United States Patent Application Publication US 2004/0123343 A1 - sequence listing, part 18

SEQ ID NO: 48970 - DNA, 2494 bp, Oryza sativa
  Clone ID: PAT_MRT4530_51595C.1
atggcgacgccaccgccgctccgccgcgtcgccgccctcctcctcctcctagtagccgccgcctccacccccaccgcacgggccgatctcgtcgtcaccagggcggatcggaaggttgacctgacttcgcacatcgttcgtgtcctcacttcgctcaaggttgagaatagtggaccggaggctgtttctcaatttctactggcgtttcccaatgtccaagcaaagaacttagcagctataagagcatttggtactgaggaaaaggtgaaaggtccaagtatggtccttccgattgaagttgttcagccttctggagtgcccccagaacttacattcttttcggcatctttatccaaacctttggagaaggggaagactcttcacttagatgtcctgaccgtatttacgcactctgtccagccattccccgaagaaatcacacaagctgaatcgcagcttgttgtctatcaggacagtgctcagtatctgtcaccttaccctgttaaggtacagacacttagtatcagattgcctggtggaagagttgagtcctacacaaagtacccaaacacaaaacttgcagagtcagaactaaaatatggaccatatgaagatcttccaccgttttcctactcccctatggttgtgcactatgagaacaataacccttttgcagttgcaaaggaagttataagggagatagagatatctcactgggggaatgtacagattacagaacattacaacattgctcatggtggtgccaaactcaagggtgaattttccaggattgattaccaatctagaccgtacataagaggggtctcatcttttaggcatcttattgctagactgcctccaagggcacattctatatactacagagatgagattggtaacatttcaacatcacatttatggagtgattccaagaagactcaacttgaagttgagccaaggtttcctttgtttgggtggttggcaaacgacctttaccattggttatggtttacctcttcaagactttgttttcaattctgatggaaagagattcctcaatatcacatttggttctccagtggagggagattctcatagaaaagcttattgtgaaagggttgttctgcctgaaggttcaaaggatattgatatttcagttccatttccaacaaagcaagagcaagaggtgaagtattcacaccttgatatttctggaaggccagtggttgtcttggagaagcttgatgttattccagagcataatctatatttccaggtttactacaggttcaacaacatctctctactcagagaaccgatgatgttgataactggcttctttctcctcttcatggcctgtattgtttacatgcgcactgacatgtcaatctctaagaattctccttcttatctggcaaaggtgcagtgggatgaggtagaggaattggttgccaaggagagagagttgcaggataagctcatgacaaggcattccactgtggttgacagctttgaaaagaagttgcgagggcaagatgtggagaacaggattgctgcccagcagcagaaagttgctgccctgaggcaagagcgttattttgcacgcgacatctgcatctccctccacctcacactgccgttagggggacgcctgcgactgcagcgctatctccacctcggggctccgcaccctcgccgcggccgccgcctgctgctgctgctgctactgggggacgcctgcgacggcgacgggcacacggagtgcagtgttgcggttgcgacggcggcggctgaggcgactagggcagcgactgctggaatcggatgggctcgagcagcgagggcgatggcggcagcgatagagcaagttgtggctcacaacggcgaggacggcggcggagagagcggagagaacggagcggcggtggagcaagaaagcagcgggaagagagaggggtatcctaccccttctgactactatggaaccatcactctgagctgctctcgtcgtgtgaagtggaatgaagacaacctgtatgagattgaatcaaataaacctgttaggcagaagataactgagcctaagacaccatatcaccctatggtagatgatgatgggtcattgtcaccaacgcgtccttttgacaagtgtctggatgagactgttaatgctgaagctattttaactgctttaaatggtgtggcttcttcaagcaaaactgatccaaaggatgatggttgggcatcctcagatgatgatgcagatgccatggaacaagatgatgatccagaagctgaaaagtcaagactgagtttcaaggaacatcgtcgtgctcactatgatgaattcctcaaggtgaaggagctgatgcgctccggatcgctgattgacgatgaggctgatgaggatgatagaggtgcaaaaggcagccaagccaaagctgtaggaaagaagccagcaggctgtgacagcacacccccaccgcaaacatga

SEQ ID NO: 48971 - DNA, 465 bp, Oryza sativa
  Clone ID: PAT_MRT4530_51596C.1
atggctgactcatcgtatgacccacgtggaccccacatgccgggccggcccgcgggtggggaggagggcgtcggcagccggcgacacggcggcagcggccgaggcggcgacgacgacgacacgggagaaggtggcgacgtctccgcgtgtgcgagctcggggacggagcggcccgggaggcaggagaaggaggagggccagcgggagaaggcggccggcaagggcggggaaaatcagacgagcttcatctcatctccgacgacgacgagctccaccaagaacgtcgtccccctctcgccgtcgtccctccccttcggcggctgtgatggggtgcgcggcgtccgcgacggacagcgctgcgcggcagaggccgtaggatgggaggaggcggcggcgatggcgccaccagctcgaccggccgccgccatcttctcgacgatggcgcacggggagaaggcccggtag

SEQ ID NO: 48972 - DNA, 1777 bp, Oryza sativa
  Clone ID: PAT_MRT4530_51597C.1
ccgcacgcatcgcacccgacctcgtcgccgtcgccgacgccgccagccatgccggaggacgtcgagatgaacgactcccagccccagcccgccgccgcgccaccgcccgcggcctccaccttgcagcatctgaaggagatcgcgtcggtgatcgaggccgggtcgctgaccaaggaggttcgccggatctcccgcgccgtgcgcctcaccgtcgcgctccgccgccgcctcgccgcccgtgacgtcgccgccttcctcgccttcgcgctgccgcattcctcggaagccttcgcccgcctttcctccctcctgcccaaggaagatgggagtgaaatggatgttgatttggcagctccagcggctcaagtgtcaattaagcatggtctcccagagattgaaatatactgttacttgcttgtgctgattttccttattgataataagaaatatgatgaggctaaagcatgtgcttctgcaagcattactcgtttgaagaatcttaacaggagaacagtcgatgttttagcttctagggttttcacctattactcttatgtccacgaactcaccagcagccttgctgaaattcgtggaactcttctggcattgcacagaatggcaactttacatcgtgatgagcttggtcaggaaactctactcaacctgcttcttcgcaactacctgcactacaacttgtatgaccaagcagaaaagcttaggtccaaggcaccgcgttttgaagcacattctaatcagcagttctgcaggtatctgttctacttgggaaaaattaggacaattcagttggagtacactgatgcaaaggaaagcctactgcaagctgctcgaaaggcacccactacagctcgtgggttccgagttcagtgcaacaagtgggctatcatagtgagattacttttaggagaaataccagagagaactgtttttatgcagaaaggaatgaaggctgctttggcaccatattttgagcttacaaatgctgttcgagttggggaccttgaattgttcagagcagtggcagaaaaatttgctagcactttcagcgcggataggacgcgcaatttgatagtgaggctgcgccacaatgtcattcggactggattgcgcaacataagcatttcatactcacggatctcccttgctgacattgccaagaagctgaggttggactcagagaaccctgttgctgatgctgaaagtattgtagccaaagcaatcagggatggggcaattgatgccaccattgatcatgccaatggttggatggtgtcaaaagagactggtgatgtctactcaacgaatgagccacagattgctttcaattcaaggattgcattttgcttgaacatgcacaacgaagcggtcaaagcactgaggttccctccgaattctcacaaggaaaaggagagtgctgagaagaggcgcgagaggctccaacaggaggaagaactagcaaaacacatggctgaggaggacgatgacgacttttagattggtgatttcttttcatgctttcagttgctgcctcaagggtttcattttgaagcatgggcatccattcagttttaagagacggaagatctcgaaatgccaaccctgcttttctgggatagttgaaaccatggaaccgttgacatttaattcagtgtgttttatgtttttaacaatttttttatcactcaaaccgcttagaaggcaatgtattctttcctgaaatactgtaccgttcaatccttggggcacaatgttttgaacg

SEQ ID NO: 48973 - DNA, 152 bp, Oryza sativa
  Clone ID: PAT_MRT4530_51598C.1
ctttctttttctttctcgtagtttagtccccttttttcaagacagagtcccgttagcattccacccctccctttactgtgccgtctcagtagccggcaccaccatgatcctagcgctttcctgcgtgaatctgacaccctcccactatcccc

SEQ ID NO: 48974 - DNA, 636 bp, Oryza sativa
  Clone ID: PAT_MRT4530_51599C.1
atggggacaacaaggacgatggcaataatgataaggacaatgacgcgacagcaaaacgaggaggaaggcaaggacatggccgagaacaggtgcgctcagtgggacaaggacaacaacagcgagctcctcttctccgttgacaatgtggcagtgatgacgttgtgcgggaagtccaccgacgccgtgcgggaaatccgccgctgtcggccatcgccgacgcacgcgggaagtccaaccgcagctgtcggtcattgccggccgatgcacgcggaaagtctaccgccaccggacatcaccgacaccgtgaggggcacgcggtcacggcggctccggagctccgcggcacggctgctcgacggtggcgcactcaccctcgggcgagtgcacacaccggcgaggggcccaggcctccactggagctcctcctcctcctcctccgatggcaagtggacgacggcgactacacgagcaggatggacgggctcccgccggcagctcgaggatggagagcggattgtagcggcgacacgaggaggacgactggacgacaccaacgacgcgaggaggatcagcaaacgctggacggcacgaggggcgtcgacttgcccgggcggaagagtagctggtggcggctag

SEQ ID NO: 48975 - DNA, 352 bp, Oryza sativa
  Clone ID: PAT_MRT4530_5159C.1
ccgggctgcaggaattcggcacaggtggaaaaatacatctcgcatggaggagacgagaaggcagcggcggcgacgcaagcgcgagtgcgagtgtcaaccgcgtgacggcgcgacggcaacactgcgctctccccggcggcggcgctctcccctccgctggccaacttctcaccggctttgggaagaaggaagtctgcaaggatactgcttttttgcggcatcagcaaatgttgatccctgaacctttgaatatgtatattgttgatgcaacctttgaatagaacaaatgttcagacttgtttaatttatttaatttgtcaggtcgtctcctgctgctcgtcagctctccact

SEQ ID NO: 48976 - DNA, 268 bp, Oryza sativa
  Clone ID: PAT_MRT4530_515C.1
ccggcaacgaagggaacaacggcaatagaggagagaaaactacaatggcaacacggcgacaaaaccaacaacactgtcgcctccggattcggagcgttctctaggtatattcttctcatctcggtgttaaatgtgttcttagatgctattgttactggtagcatattcatgtgtaccaccatggtagaatcactctctttttcacatgtcatgtttatcacaagtcatgtttattatgattatattttaatccataaataggaggaaa

SEQ ID NO: 48977 - DNA, 382 bp, Oryza sativa
  Clone ID: PAT_MRT4530_51600C.1
tttgtgacgccgtgccgggcgcccgtgtcgagcccgctcgcccacgggcaccaccaaggccagggcgtaatggcgttcggtggtcagaacccgcggccgtctaccagtcgcggtacgcagtgcctctacgttcgcctcaacacgcttcacttcatgctcagccacgtgcacgcgctcgacaagtcgctctccttcttctcccgcggcaggtgctcgtcgtcgccgtcgtccgccgccaccgcccgcctcctcgcgccgtgctcccacttcgaccgcgcgcgcgccgtggcgcagtccgcggtcgggcacgtcgccgaggtcgccgcgtaccgacttatctttctcgacttgcaccactcgttctacgacgggctttacgtgg

SEQ ID NO: 48978 - DNA, 172 bp, Oryza sativa
  Clone ID: PAT_MRT4530_51601C.1
aataacagggtcttatcgattgaggccaatttttttaatcgcgaaatcatcctctggttccttataaagactcaccgctctcgtcatctatcttgagagactactgactggtaacaaagctacatgctacaaaccatgtctggagcgaaccacattatcatgagagaaccaa

SEQ ID NO: 48979 - DNA, 193 bp, Oryza sativa
  Clone ID: PAT_MRT4530_51602C.1
atggacgatggagacgatccttccaaggaggagatccaagtgtctccagcaaaagaccaagatcaagaaaaactcaagcgcaaaaacgatgaggaggaggtagatattggtggttcagcatcgagcacgggcacatcaaagaagaagaaaaggggatgttgtgttgatattccttcatctgaatctgatgaag

SEQ ID NO: 48980 - DNA, 480 bp, Oryza sativa
  Clone ID: PAT_MRT4530_51603C.1
atggatggtgatgatgaccagatcgacccgagctccttccgcctcgctctctcgctgatgaggtcatcgccgcctgtctccaccttttcctccgcactgtccccgcccaagtcccctcgccccatggctgatgacatccagtgctactgctttgagacgcatcggcgttggcggtgcagctgctatgagaatacgacgtcgaggttgatctcaatgctggccgccgccgcgcggccgagctggaggagcggctccattagtggcttggtggtcaaagggttgtgtggccatggcgaccaccttggccttcgccgcgccgagcaaagagagcagattgagaggagatgggacaatgaaggaagaaggccagaaaaaaaagagatggatggaaaacgtgacggcagtgatgaactctatgtgaaacttatgaagctcgaaaagacatacaactttgtaatagttgataatgttttcatttaa

SEQ ID NO: 48981 - DNA, 712 bp, Oryza sativa
  Clone ID: PAT_MRT4530_51604C.1
ccgccccccacctgctcgatctccactccgtctccatctccatccgatccaagatgccgccgaggcagtggaggccgatgctggcgtcggcgaccgcccgcgcatggccgccgtcgtcgacgccctcgagcgcctgcagggcttcaaggacatggccgtcaccgtcggcctctggcccaccaacgcccccgtcgccggcaggaacgccatctccgccaagatccgcgccgaggtcagaggcgccggctccggcggcggcgcggcctcgcggcggcggagcgcctccgccaagctgccctgatcgcccgcgtgcgttcgtgggcgcgccacgtcatcgcgagtacgtatttgtatacgtgtacgtgtgtgtatatactttagctgctgtataagatggcacggccgatgtattgtacgtggtgatcatcgagcttgattgatttttttttagccatatggattatggattattgcggaattaatactgatctgtatcaccatatgtacgtacttagtaggagtatttagttttaggtgccatgatgctggtagatcatgcatgcatgtatgatgaattgtactttcatccaccgattgctgattgcaagttcgtgcatcagtaatcggtcatttcgatattatctttttttttccttgaaaaaaaaaaaaaaaaaaaaaaaaaaaaaaaaaaaaaaaaaaaaaaaaaaaaaaa

SEQ ID NO: 48982 - DNA, 547 bp, Oryza sativa
  unsure (1)..(547): unsure at all n locations
  Clone ID: PAT_MRT4530_51605C.1
atgcgcactantgctacgctaggtataattgataactagagtttttttttcatttttgatggcatagcccctataaaattacttgcaagaatatatactggaaaacacattttcacatacaacaaaaatgccttttctcatgcgggttcagtatgctccttgacctgagatatgggcgcgtgcacaacgactgccctctctgctgcttgtcgccaccttcgatcggtggccatcgccagcagatctgctgctaccgacagagacgtagccaggaaattttccttagtagtcctagttcgcacggtatgtcacgtggtaaaattttcttttgcaccataaaactgatatacaaatacaaatttagtgaaaatgtgatagaaataatatcttccaacatccataagcagcttacttaacaagcaagttcaaaatgtgcaaatattcacgtactcactaatctctagtcacaattcacaactcgatttaaccatttaggcagctattcgttaccttcacaactcgatttatccatttaggcagctattcg

SEQ ID NO: 48983 - DNA, 558 bp, Oryza sativa
  Clone ID: PAT_MRT4530_51606C.1
atgccggcgccgctgctgctgctggaggagatggcggaggtggtgcgccaccaggagctggagctggaggtggtgcgccaggagctggagccggtgccgcgaacaacaacaccaacggaggcaattctgcctcacaatccagcggagggccattctcgggtggggatggacaaccatgtcatgtgccccttctacacgcaggagccgaagacatcaaaccacattctaatggaatgtgctgttgctagacaggtgtggcacaagctgctcatcgagacaccgtgggttcctctgcccccaatcgtctctaccctacattcctccaaccaactgagcgagcaggggacaacagagcaagtgccatcggttcgcgacatggcgtcgacagcgaaacaagcagccgggggtggcgctgaccgtgtcgacggtggagcaagcggcaatggtggcaaggtcaggactgtgcggagcatatctcataatcccaccctctctttcttcactccgttcgttgaggaccttgtagatccagtggttaagcatatctggcgatggtga

SEQ ID NO: 48984 - DNA, 475 bp, Oryza sativa
  Clone ID: PAT_MRT4530_51607C.1
ctttcgttttccccatctcccgagctctctcgtgctccgtagtgtcgccgccgcgcgtgtctagctggttctgcttccccgcttctgatcgcttgcgagcatgagagattgaaacaaggagggcctccggaaccacagcttcgcctgaaatctgcaccgagtaggcgggtgagcagggcctccggaaccacaccttcgcctgagatctgcaccgggtaggcgggtgatcaggtttttggggagtgcttccgcacgactgctcgttctcgccccaccatgtctgcgcctggagcctgcgccgccgctgctgctgctggaggagatggcggaggtggtgcgccaccaggagctggagccggaggtggtgcgccactaggagctggagccggaggtggtgcgccaggagctggagccggtggcgcgaacaacaacaccaacggaggcaattctgcctcacaatccagtggagggccat

SEQ ID NO: 48985 - DNA, 177 bp, Oryza sativa
  Clone ID: PAT_MRT4530_51608C.1
atggccgtcgccgagagcacctcggcgaaggtggaggctggagggagtaaggacgcggaggaagaaatgagatgctctaacacagcaggtagcttcaagattctcctggccgacgacggtcgcagaaatcaaaggtgtgatacaatgtatccaacgggtgcagatgcacaagattga

SEQ ID NO: 48986 - DNA, 502 bp, Oryza sativa
  Clone ID: PAT_MRT4530_51609C.1
gcgcctctagaaaggaaaaagaacttattaagttgggaatttagtccccctggatgcatttgaagcacaaggtaagcaaggttaaaaacacacgcacacacccatctagagagagaagggaccggccagggggtgtaatgtacatcacagtacatgcaaacaatactactttttacagttgaaaaatatctaatgcatatcaaaagctgtgataaaccaaaatgtaattataattatgcttcgattggggtgcattaatattgactgcatctagcatgtctagccttcattctgatgtaattaagcacaacaatacctttgcccaaactttttttgtcctctcttttcttttctttcaacaactttgtctcttctatcttggagtgtccttgcacagttaatttgatctcccttttttcatggaggcagatctatacagatctctttaatctttttcttctcccaaccatagtacatacattcttcaagaaagcaatgttgt

SEQ ID NO: 48987 - DNA, 1422 bp, Oryza sativa
  Clone ID: PAT_MRT4530_5160C.1
atggaggattgcagcagctggatccatggctacgccaacgctaacgccaccgccggcaacaacggcttcatgtgcggctacgctgccagctgcagcccagtagagtttcagcagcagcaacagctggtcggctcgcagattgagcaccacctcaaccaggcaagcttgatttgcaatttattcgatcaagaaacaatgcataaaatcaaagaaattttaggatttaatttggtaggtgtcgcgttttattacggcatgcagatcagcatgcagatggggatggatgacgagtcggcggtgtacgacggcgcctccatggtggacgtcctcctcatggcttcctcgtcgccgcaccaccacgccggcgccggcagcttccagtactcctcgccgacgtcctcctccgcctccttccgctccgcctccgtctcgtgcagccctgagagctcggcggcggcgacgacgcacttcctcggaccgccggcgccgtccgcggcggcggcggggttccattacccggaggtctcctcgcaggcgccgttgccactacccttgccgccctacgagccgcagcacggccaatacaccaccgtcctctcgccgccgccgccggcgccagagttgccggcgactactacgccggcgaccggcggcgcgttcaggcggtacgcgcggcacctccgcccgaggaggctgcccaagccgggagggtgcgggcagaggatgttcaagacggccatgtcggtgctcaccaagatgcacgtggcggcgacgtacaaccgccagtactactaccagcaggcggcagccgccgccgcgtcggcgtcggcggccgaggcgccgccgtccggcaaccagctgcagcacatgatctcggagcggaagcggcgggagaagctcaacgacagcttcctcgccctcaaggccgtcctccctcccggctctaagaaagacaagacatcgatactgatcagagcaagagagtacgtaaaatctctcgagtcaaagctgtcagagctggaggagaagaaccgggagctagaggcgaggctagccagccgccccgccgccgccgccaagaacgacaaaggcgagacggcggcggcgccagcgccggaagccggcgatgagacgaagcgaaaggacctagtagagatcgaggtgacgacgagcggcggcggcgccggagcggcggatgcggcggcggcggcgggaggagatcaagagacctgcacgctcaacgtagacttgcgcggcggcggaggcggcggaggcatgagcacgacggacgttgtgctccggacgctgcagtgcctgagagagcagatcggcgacggcgccagcctcgtggcgatgagcaccagcgccggctccggcggccgcccgcctcgtgcaaacctaacattacagctcaaggtgtaa

SEQ ID NO: 48988 - DNA, 207 bp, Oryza sativa
  Clone ID: PAT_MRT4530_51610C.1
atgcttcttcgtcttctccaacgaaggcggctacacgaagccgggaaggttgtgacggcgacaagaggttgggagggcggtgacggcaaactccgccgccaagctgtgccgctcgtcgccggctaccgccatgaccccatccatccatctgacgccgcgaacacagccgtgtcgttcggcccgaccaccgcgggtgccacacattga

SEQ ID NO: 48989 - DNA, 1678 bp, Oryza sativa
  Clone ID: PAT_MRT4530_51611C.1
ccgaaaaagaaaaaaaaaaccgaagcaccaaagaaaggctcagcttcttctcctcctccttcctcgaccgctcaaaccaccaacgctggcctttgcactcctcctgctcgggttcatcttccctgcaaatctttgagctctacgagtgccggatcgactgggttgcgagatttccatgaaaaaggcgcggttttgggacggtcctcgtgagcagagccgaccgcggtggtttccccaggggaggggtctcgctggcggcggggggttctgaatttttttgccccgctcttcccgttgttttggttcgtgtttttagccctcggattggtgctgagggggattttggaagacatgtcgaggttttgctgcttcggtgctggttgctccgagttctcggggcatgcatcaaccagctctggtaaagggaaaggtattcaaggccaagtgaaggtaagctatgggttttaccttgtaagagggatgacgaatcatccaatggaggactatcatgtcgcggaacttgcagaagagaaaggaaacgaacttggtcttttcgctattttcgatggccatctaggagatactgttcctgcatacttgcagaagaacttatttgcaaacattttgaatgaggaggagtttttgacacaaccagatagagcaatcataaaagcttatgaaaagacagaccaagcaatcctgtcacatactccagatttgggacaaggtggctccactgctgtaacagcaattcttttgaatggcaggaagttgtgggtcgcaaatgttggcgattcgcgagctgttcttttgaaaggtggtaggccaatacagatgtcgactgaccatgatccgaatgtcgagcgtagtgctattgaaaataggggtggctttgtttcaaacatgccaggagatgttccccgagtctgtggtcagttggctgtctccagagcttttggcgacaggaatctaaagtcactattgaagtcagagcctgatataaaagttgaagatatagattacactgctgagcttcttgtccttgcgagcgatggactttggaaggtaatgaacaatcaggaggtcgttgatgtggccaaaagattcaaggatccacaagcagctgccaagcaattaacagctgaggcattgaaaagagacagtaaagacgacatatcgtgcgttgttgttcggttcaggatgtaattggttgcaggcaactcgtgaaggtttggattgtcaccgaggcggaactgattatagagcaaatcataggttgcctgcgaagttagtggtgatccaaacaaataactcactgggatgttggttgtaaatgatgtgttggctccattatatgttcatatataaatgcgctagaagtatttgtttggcgattcaaaggtacatgtgtgaggctcatagctgtctaaatagctattatcttctgtaaataatggttgcagatatttggaagttcaccatgattcattgtgtgagtaccatttagtttgtattgctcctcttgctttgtattgaattggtactcaaaccacaaatgtctacaaatgcgttaaaaacagcaagaggacggccggtatgcttaataccttattgtttctttcttgttagagctgatgaatttgctctgataccatcccaaaaaaaaaaaaaaaaaaaa

SEQ ID NO: 48990 - DNA, 1158 bp, Oryza sativa
  Clone ID: PAT_MRT4530_51612C.1
gcacgaggagggatctcccctatgggtacgatgtgttggtggagaatctcatggaccctgctcatgtcccctacgcgcacaaggggttgatgcgcacccgcaagaaggaagatccaggaagagttgagttcgacaaggaaggcggcgggccgctcaagatggagatagaggaaaccaacgtcgaggggttcctgtcaatgctagacaggggcttcttcaagttcgtcgcgccgtgcacgttctacggctcgccacttcagactccatctcaggatgatcagggcaaggagaagaagaagaagcaacccacagtgatgctggtgttcttgtgcatcccggtgtctccggggaggagcaggttggtctgggcattcccgcggaacgtcggcgtctggatggacaagatcataccacggtggtactaccacattgggcagaatgccatcttggattcagacatctacctgctccacattgaggagcgcaatttcgctacggttggtcttgataactggcagaaagcttgctatgtgcccacatcatctgacaacatgatcatcaccttcagaaactggttcagaaagtactgcaagcatcagattggctgggcaaccccaataactaatcagctgccaccaactcctagcaaagatcagctcttggacaggtattggtcgcacgtcatgcagtgcacgagctgcagcggtgcactgaagaagatgaaggcgctggaggtcgccctgcaggtggcgtcggtcgccgtcgtcgggttcctcgccgtcgccaaggggacggtggtcacgtcggttgtgcagagatccgccgtcgtggctgcggccgtgctgtgcttcgccgcctcccgctggctcgccaacttcatcgagaagaacttctatttccaggactacgtccatgcttacaagtgatcgtcgatgcgtccaggaaatcagagagttctttgttgctgggaattccttagcttctaatttagcagcttaaaaatgtatatagaaaacacaaccaagtatgcttgatatcgatagcatctgtatataaacaactgatcatcttaagagttagctgacgatttcataggatgcagctaaacaaatggatggagaaaacaaatttcgggcgcgttctaaaaaaaaaaaaaaa

SEQ ID NO: 48991 - DNA, 1760 bp, Oryza sativa
  Clone ID: PAT_MRT4530_51613C.1
ttacgccaagctcgaaattaaccctcactaaagggaacaaaagctggagctccaccgcggtgccggccgctctagaactagtggatcccccgggctgcaggaattcggcacgaggccccgcgcgccccgcgctccacctccgcgacgccgccgccgccgccgccgccgcccgcgtcccgccgcctcggctgccgtggagccgcgccgtggcgaggcggctgttgtcgacgtcggttgcggccgtggcggccgagacgccgcgggcggaggacgcgccgtcggcgtcgggtaaggaggagcggttcgactggctggaccagtggtacccggtggcgcccgtctgcgacctcgacccgggcgcgccgcacgggaagacggtgctgggcctccgcatcgtcgcctggttcgaccgcaccaccgccgccgccgacggcggcggcggcgagtggcgggtgttcgacgactcgtgcccgcaccgcctcgcgccgctgtccgagggccgcgtcgacgacaagggccgcctccagtgcgtctaccatggctggtgcttcgacggccgcggcgcctgccagttcatcccccaggcccccgccctcggccccgcggtgcacaagaacagcaaggcgtgcgtggcatcatacccatgcgtggtgcagaacaacatcctgtggttctacccgagatcggagccggagtacaaggagatcctgcagaggaagcggccgccatacatcccgcagatcgacgacccgtccttcgtcaccgtctatggcgtcagggatctcccctatgggtacgatgtgttggtggagaatctcatggaccctgctcatgtcccctacgcgcacaaggggttgatgcgcacccgcaagaaggaagatccaggaagatataacattcatctcctctacacagttgagttcgacaaggaaggcggcgggccgctcaagatggagatagaggaaaccaacgtcgaggggttcctgtcaatgctagacaggggcttcttcaagttcgtcgcgccgtgcacgttctacggctcgccacttcagactccatctcaggcattgttcaagctcatagaaccatcttacaagatcagtattgatgatcagggcaaggagaagaagaagaagcaacccacagtgatgctggtgttcttgtgcatcccggtgtctccggggaggagcaggttggtctgggcattcccgcggaacgtcggcgtctggatggacaagatcataccacggtggtactaccacattgggcagaatgccatcttggattcagacatctacctgctccacattgaggagcgcaatttcgctacggttggtcttgataactggcagaaagcttgctatgtgcccacatcatctgacaacatgatcatcaccttcagaaactggttcagaaagtactgcaagcatcagattggctgggcaaccccaataactaatcagctgccaccaactcctagcaaagatcagctcttggacaggtattggtcgcacgtcatgcagtgcacgagctgcagcggtgcactgaagaagatgaaggcgctggaggtcgccctgcaggtggcgtcggtcgccgtcgtcgggttcctcgccgtcgccaaggggacggtggtcacgtcggttgtgcagagatccgccgtcgtggctgcggccgtgctgtgcttcgccgcctcccgctggctcgccaacttcatcgagaagaacttctatttccaggactacgtccatgcttacaagtga

SEQ ID NO: 48992 - DNA, 2280 bp, Oryza sativa
  Clone ID: PAT_MRT4530_51614C.1
atgccgccgtctcgccgccatggccatggtggtgcccgcctcctcgtgttcttgctgccggtgctgctcctcctgcggacggcggcgtcgaacaccttgtccaccttcgccatggccaaggcggagtccacgacgatagtgtgcgcgctgctgccgtcggcggcgtcgccgctgctcgtggacctcaattgcacggaggccggcggcgaccacgagcggcaggagacgtacccgtcgtcgcaccccttctccgcgctcgccggcggcgaccacttcctctgcgccgtcggcccgtcggcgctccgcgccggcgacgtcgcgatgcggtggtgggatctgtccaagaaccggacgaacacgccggagacgaacgggacgaaggatggtggcgggaggtcgaagagggtgtatctcggcccgccgatccaggcgctgtcctccggtgggtaccgtgtctgcggcgtgctctccagcggcgagctccactgctggcggtggcgcgggctgaagatccccgacgggctccggttcgtctccgtcgccgtcggcgactggttcgtgtgcgccatccaggcggcgcggccggcgtccatccggtgcttcggcaacgacacggaggcggtaagctcggcgccggagggcgggagcttcgacgtggtggccgcgcacggccgccgcgcgtgcgcgctgtccacgtccggcgcgctctcgtgctggggccacggcgcgccgctggtgggcggcggcgaggacgaggccaccaccgggtacgcggcgctggcattgggcaccgacggcgtctgcgggctgcgcaccaacggcaccatccgctgcttcggcgacggcgtggcgccgccgccggacagcctcgcggggttccagtacgtcgacgtccaggcgcacgggagcgtcttctgcggcgtcctcatggcgaactactccctcgtctgctggggcgggcacgagttcaacgccaccaaccgcctggtgttcgaccgcgtcctcccgggcccgtgcgtgaccatgtcgtcatgcaggtgcggcgtcctgccgggctcggccaacctctgcgcctccggtcgctgcatctgcgtggactgcgcgttcgagctcaacgtcgccacgcccaacgcgtcgtcgctcggccctggccccggcaagagcagcagcaagcggagcaggatcatctgggtcgccgtcgccgcgggcgcgttcctcgtgctgctcgtggcattgcagttcgcgctgctcatgtggtgtcgccggcggcggcggcgcggcaggggcgggcaggcggaccaagcggcggcgatgtcgctgatgctgccgcggcatgggtcgagcaaggggccgggcagcgtggtggagcatttcgccctggaggcgctccaggcggcgacggacgggttctccgacgagcggcggatcgggtcggggagcttcgggtcggtgtaccgcggcacgctgaccgacgggcgggaggtggcgatcaagcgcgccgaggaccaggcgaagtcgtcgagctcggcggcgaggccggcgcggcggcgcgacagggagacggcgttcaactcggagctcaccgcgctggcgcgcgccaaccacaagaacatcgtgtgcctcctcggctgctgcgccgacgccggcgagcgcgtgctggtgtacgagtacatggcgaacggcaccctccacgaccagctccacggccggagccccatggcgccgccggtgtcggcgtggcgcggccgcctcaccatcgcgctcgacgcggcgcgcggcatcgagtacatgcacgggagcagctcgaggccgctgtacacgggcggcacggtggggtacatggacccggagtactaccggatgcagcacctgacggacaagagcgacgtgtacagcttcggggtggtgctcctggagctcatgtccgggtgccgcgtcgtgcagcgctacgccgagagcgtgacgcccaagaacgtggtggagttcgccgtgccgcacatcctcgccgacgaggtggcgcgggtgctcgacccgcgcatcccgccgccgacgccgcacgaggccgacgcgctcgcctacgtcggctacctcgccgccgactgcgtcggccccgtcggctgcgaccgcccgtccatgaccgaggtcgtcgacgccctggagcgcgccctcgccgcctgcgccgccgcgtcgctctcccgctccggcaccgtcaccggcgccggccgccgcgccctctcccgctccgggacagaccagtttgacctcactgacactgactag

SEQ ID NO: 48993 - DNA, 2971 bp, Oryza sativa
  Clone ID: PAT_MRT4530_51615C.1
atggagaaaaaaatcactggatataccaccgttgatatatcccaatggcatcgtaaagaacattttgaggcatttcagtcagttgctcaatgtacctataaccagaccgttcagctggatattacggcctttttaaagaccgtaaagaaaaataagcacaagttttatccggcctttattcacattcttgcccgcctgatgaatgctcatccggaattccgtatggcaatgaaagacggtgagctggtgatatgggatagtgttcacccttgttacaccgttttccatgagcaaactgaaacgttttcatcgctctggagtgaataccacgacgatttccggcagtttctacacatatattcgcaagatgtggcgtgttacggtgaaaacctggcctatttccctaaagggtttattgagaatatgtttttcgtctcagccaatccctgggtgagtttcaccagttttgatttaaacgtggccaatatggacaacttcttcgcccccgttttcaccatgggcaaatattatacgcaaggcgacaaggtgctgatgccgctggcgattcagaaattcgatgataagctgtcaaacatgagaattggtcgacggcccgggcggccgcaaggggttcgcgttggccgattcattaatgcagctggcacgacaggtttcccgactggaaagcgggcaaatactcaagcttgcccagagaggtattcacattacaagcagccagattcagcagcaattttgaagaaatgtgatggccagccacttgctcttgttaccataggtgaattcctgcaagctaatggctggccaacggggcctaactgtgaagatctctgcaatcggctacattatcacctagagaatgataaaacacttgaaaggatgcggcgagtgctggtccgcaactacactagtctacctggccatgctctcaaggcctgcttactatattttggtatgttcccatctgatcatccaatcaggaggaaaagtctgttgaggcgatggctggccgagggatttgtagaaccagtgtcttcatctagtaacctagattccacggctgctttcgatgtgctaatggaccggaacattattgagcccatcaatgtaagcaataatgataaagtcaagacatgccaaacgtacggtatgatgcgtgaattcatatcgcatatgtcaatctctcagaactttgtcacctttttctgtgatgacaagttcctgcccaaatatgttcgtcggctttctctccatggtgacactgttgtgaatggcgataacttcaacggtattgatttatcacttgtacggtctctggtagtctttggggaggcaggtacaactgtattagacttcagcaagtatcaattgctgcgagttttagatcttgaaaaatgtgatgatttgaacgatgatcatctcaaagaaatatgcaatctggtgcttctgaaatatctgagccttgggggtaatatctccaaacttccaaaggatattgccaaattgaaagatttggaggcactcgatgtaaggagatcgaaagtaaagataatgccggtagaagtcttcgggttgccatgcctaattcatctgcttggaaaatttaagctctcagataaagtcaagcagaagactgaagtgcaagagtttctctcgaaaggaaaaagcaacttgcagacgctagcaggatttgctagcaacggaagcgaagggtttctgcatcttatgaggtacatgaataagttgagaaagttgaagatttggtgtacgtcgtctgcaggtagcaccgattggactgatcttagggaggccattcaacagttcattctggatgaaaaggaagcaaatattggtacccgttctttatcgcttcatttcactggatgctctgaagatgcgataaattccttaaaagaaccctgctacctcagctcgttgaaattacatggcaacttcccccaattgcctcagtttgttacatcacttcgtggtctcaaggagctttgcctttcatctactaaatttacaacaggccttcttgaagccttgagtaatttgagctacttgcagtatctcaaactggttgccgatgaacttgagaagttcatcataaaagttcaggggttccccaggctgctatgcctttgtattgtgctacaatgtccaacattcccagtaattgaagaaggagctctgccatttcttgtcacacttcagctgctatgcaaagatctacatggcctttctgacatcaaaattgaatgttttaaacatcttcaggaggtaactcttcattctggagtcactccagctacaagacaggaatgggtaaaggctgctaaggagcatccgaataggccaaaagtattgcttctcaaatctgttgatacagcagaaagtgaacatacagacgttgatagtgtaatggaggcagtcaaaagtgagactacagaatattctattgcaccagagggaccagaacaagtgattgacatgaacaacaaaatgcaacttgaccatggattggaatcctcttctgtgctgaacaaacaaaacaattttgcagaccaatcaagctcaaaagatcaactgcattattctttcaacaatatggggctttcagatgtctctcctgctgtgagtgagctgccgaatggcatggtgccttcttgtacatgacaaggatctagaatcttcacgtggcttccctgtcagttatttggacctgttgctttctgattgtgcattttgtgtttacttgtccttcacacaatcatcgtcatcaaaatacctttgatttcctacactccctgttacctcccttgatgaaatcagggggattcatgggaacagctacttcttctgtctgcattatgtgtagtgatgtggcatacctagtacatgttttgtctccgtcctgtttggcagagctacaaaaaaaaaaaaaaaaaaa

SEQ ID NO: 48994 - DNA, 538 bp, Oryza sativa
  Clone ID: PAT_MRT4530_51617C.1
gaagaccctgactggcaagacccccgttaccttgaggttgagtcgtcctgacactattgtacaacgtgaaggcgaagatccaggacaaggagggggccattccccccccccggggacctcagtcagcgtcgtgatcctttttgctggtaagcagcttgaggatggcccccggcccaacccccccctttttgccccgggaattttttacccctaccccaattttcccccaggaagggagtccacactccacctggtgctccgccctccgtggtggcccagtaagtcctcagccatggagcctgctgctgttctagggttcacaagtctgcctattgtcttccccaatggagctatggttgtctggtctggtcccttggtcgtgtcccgtttcattgtgtactatttacctgtaatgtgtatccttaagtctggtttgatggtgtctgaaacgttttgctgtggtagagcagcatggaagaactataatgaataagtgatccctaatccttgtgtcccaattttgcttctgctaaaataa

SEQ ID NO: 48995 - DNA, 1673 bp, Oryza sativa
  Clone ID: PAT_MRT4530_51618C.1
cgaaaaatctccctcgaagcgaacgtgcgaatcgccttctcaagatgcagatctttgtgaagaccctcacgggcaagaccatcaccctcgaggttgagtcctcggacaccattgacaatgtcaaggccaagatccaggacaaggagggcatccccccggaccagcagcgtctcatcttcgctggcaagcagcttgaggatggccgcaccctggccgactacaacatccagaaggagtccaccctccaccttgtgctcaggctcaggggaggcatgcagatcttcgtcaagaccttgactggcaagaccatcacccttgaggtcgagtcgtctgacaccattgacaatgtcaaggccaagatccaggacaaggagggcatccccccggaccagcagcgtctcatcttcgctggcaagcagcttgaggatggccgcaccctggctgactacaacatccagaaggagtccaccctccaccttgtgctcaggctcaggggaggcatgcagatcttcgtcaagaccttgactggcaagaccatcacccttgaggtcgagtcgtctgacaccattgacaatgtcaaggccaagatccaggacaaggagggcatccccccagaccagcagcgtctcatcttcgccggcaagcagctggaggatggccgcacccttgctgactacaacatccagaaggagtccaccctccaccttgtgctcaggctcaggggaggtatgcagatcttcgtcaagaccctgaccggcaagaccatcaccctcgaggtcgagtcctcggacacgatcgacaacgtgaaggccaagatccaggacaaggagggcatccccccggaccagcagcgtctcatctttgctggcaagcagctggaggatggccgcacccttgccgactacaacatccagaaggagtccaccctccaccttgtgctcaggctcaggggtggtatgcagatcttcgtcaagaccctgaccggcaagaccatcacgcttgaggtcgagtcctcggacacgatcgacaatgtgaaggccaagatccaggacaaggagggtatccccccggaccagcagcgtctcatcttcgccggcaagcagctggaggatggccgcaccttggctgactacaacatccagaaggagtccacccttcacctggttctcaggctcaggggtgggatgcagatcttcgtgaagaccctgactggcaagaccattacccttgaggttgagtcgtccgacactattgacaacgtgaaggcgaagatccaggacaaggagggcatccccccggaccagcagcgtctgatctttgctggtaagcagcttgaggatggccgcaccttggcggattacaacatccagaaggagtccacactccacctggttctgcgcctccgtggtggccagtaagtcctcagccatggagctgctgctgttctagggttcacaagtctgcctattgtctccccaatggagctatggttgtctggtctggtccttggtcgtgtcccgtttcattgtgtactatttacctgtaatgtgtatccttaagtctggtttgatggtgtctgaaacgttttgccgtggtagagcagcatggaagaactataatgaataagtgatccctaatcattgtgtccaaaaaaaaaaaaaaaaaaaaaaaaa

SEQ ID NO: 48996 - DNA, 651 bp, Oryza sativa
  Clone ID: PAT_MRT4530_51619C.1
atggccgccaggagagagaggggggcgatgagcttcctccacaccaccactgttgccaccatcgccacctcgccagcttgcgacgccgacctcgacgacgccaccgttcctcgtcgattccctcgtgccgtcagcgggcgggcgagcggatctgacggaggtggaggtagcggcggaaatcggcggcggggaagaagccgagtgatgacggtggcggcggcggcagcacccgagcggcgacggcgatggcgtgccctcgcgcatttgaggcagcggcgagtgcatggcgcgggaggccctcctcggcggcagtcgacaatggtggatccgtgcatgcgtgaggcgtccccgacgacgaacggcgttgtcggcctcgtcctcttcgacggccgtgcatcgcgccccatccccctccctcgatgccacgtccctccaagtccgtcgtctctgcgccctctctcactcacggtcgccacgtccccctccgccgccccattgcatgccttcctccaccgttggtgccgccgccgaccaccttgcgccacttgccggccatctcgacctccgtgggagctagccatcggcgccgtcggtagagggcatgagagctggccgtcggctaagagaagagggaagcaaagaaagagttag

SEQ ID NO: 48997 - DNA, 207 bp, Oryza sativa
  Clone ID: PAT_MRT4530_5161C.1
ccggaactgaatggccgacccacgcgaccggttcacttctcctcacgataaggcacgaggagactatatgctgccatctactgctcctatccgcgccgacgcaccccgccgagctacatctccgccgtgctgatcgcgtggagccgacgagaggagcggcggacaacgctacgaggagaggagagagggggaggggaggctaccgta

SEQ ID NO: 48998 - DNA, 2067 bp, Oryza sativa
  Clone ID: PAT_MRT4530_51620C.1
atgcagatctttgtgaagaccctcaccggcaagaccatcaccctcgaggttgagtcctcggacaccattgacaatgtcaaggccaagatccaggacaaggagggcatccccccggaccagcagcgtctcatctttgctggcaagcagcttgaggatggccgcaccctggccgactacaacatccagaaggagtccaccctccaccttgtgctcaggctcaggggaggcatgcagatcttcgtcaagaccttgactggcaagaccatcacccttgaggtcgagtcgtctgacaccattgacaatgtcaaggccaagatccaggacaaggagggcatccccccggaccagcagcgtctcatcttcgctggcaagcagcttgaggatggccgcaccctggccgactacaacatccagaaggagtctaccctccaccttgtgctcaggctcaggggaggcatgcagatcttcgtcaagaccttgactggcaagaccatcacccttgaggtcgagtcgtctgacaccattgacaatgtcaaggccaagatccaggacaaggagggcatccccccagaccagcagcgtctcatcttcgccggcaagcagctggaggatggccgcacccttgctgactacaacatccagaaggagtccaccctccaccttgtgctcaggctcaggggaggtatgcagatcttcgtcaagaccctgaccggcaagaccatcaccctcgaggtcgagtcctcggacacgatcgacaacgtgaaggccaagatccaggacaaggagggcatccccccggaccagcagcgtctcatcttcgccggcaagcagctggaggacggccgcacccttgccgactacaacatccagaaggaatccaccctccaccttgtgcttaggctcaggggaggtatgcagatcttcgtcaagaccctgactggcaagaccatcacacttgaggtcgagtcctcggacacgatcgacaatgtgaaggccaagatccaggacaaggagggcatccccccggaccagcagcgtctcatcttcgctggcaagcagctggaggacggccgcacccttgccgactacaacatccagaaggagtccaccctccaccttgtgctcaggctcaggggtggtatgcagatcttcgtcaagaccctgaccggcaagaccatcacgcttgaggtcgagtcctcggacacgatcgacaacgtgaaggccaagatccaggacaaggagggtatccccccggaccagcagcgcctcatcttcgccggcaagcagctggaggatggccgcaccttggctgactacaacatccagaaggagtccacccttcacctggttctcaggctcaggggtgggatgcagatcttcgtgaagaccctgactggcaagaccattacccttgaggttgagtcgtccgacactattgacaacgtgaaggcgaagatccaggacaaggagggcatccccccggaccagcagcgtctgatctttgctggtaagcagcttgaggatggccgcacccttgcggattacaacatccagaaggagtccacactccacctggtgctccgcctccgtggtggccagtaagtcctcagccatggagctgctgctgttctagggttcacaagtctgcctatttgtcttccccaatggagctatggttgtctggtctggtccttggtcgtgtcccgtttcattgtgtactatttacctgtaatgtgtatccttaagtctggtttgatggtgtctgaaacgttttgctgtggtagagcagcatggaagaactataatgaataagtgatccctaatcattgtgtccaaattttgcttctgctatacccttttgtgctgtttcttatgttttgcttaaaaatttgatctgacaaacaaatttgtctaaattatgctcttgttctgactgtgtactgtacacatttgtattgctaccggtttggcacatagttttctctttgattgcaaaaaaaaaaaaaaaaaaactcgagactagtctctctctctctctctccctcgtgccgaattcctgcagcccgg

SEQ ID NO: 48999 - DNA, 1709 bp, Oryza sativa
  Clone ID: PAT_MRT4530_51621C.1
ccggccggggtcaatcgaaccccaaaatcgcagagaaaaaaaaatctcccctcgaagcgaagcgtcgaatcgccttctcaagatgcagatctttgtgaagaccctcaccggcaagaccatcaccctcgaggttgagtcctcggacaccattgacaatgtcaaggccaagatccaggacaaggagggcatccccccggaccagcagcgtctcatctttgctggcaagcagcttgaggatggccgcaccctggccgactacaacatccagaaggagtccaccctccaccttgtgctcaggctcaggggaggcatgcagatcttcgtcaagaccttgactggcaagaccatcacccttgaggtcgagtcgtctgacaccattgacaatgtcaaggccaagatccaggacaaggagggcatccccccggaccagcagcgtctcatcttcgctggcaagcagcttgaggatggccgcaccctggccgactacaacatccagaaggagtctaccctccaccttgtgctcaggctcaggggaggcatgcagatcttcgtcaagaccttgactggcaagaccatcacccttgaggtcgagtcgtctgacaccattgacaatgtcaaggccaagatccaggacaagggagggcatccccccagaccagcagcgtctcatcttcgccggcaagcagctggaggatggccgcacccttgctgactacaacatccagaaggagtccaccctccaccttgtgctcaggctcaggggaggtatgcagatcttcgtcaagaccctgaccggcaagaccatcaccctcgaggtcgagtcctcggacacgatcgacaatgtgaaagccaagatccaggacaaggagggtatccccccggaccagcagcgtctcatcttcgccggcaagcagctggaggatggccgcaccttggctgactacaacatccagaaggagtccacccttcacctggtactcaggctcaggggtgggatgcagatcttcgtgaagaccctgactggcaagaccattacccttgaggttgagtcgtccgacactattgacaacgtgaaggcgaagatccaggacaaggagggcatccccccggaccagcagcgtctcatcttcgccggcaagcagctggaggatggccgcaccttggctgactacaacatccagaaggagtccacccttcacctggttctcaggctcaggggtgggatgcagatcttcgtgaagaccctgactggcaagaccattacccttgaggttgagtcgtccgacactattgacaacgtgaaggcgaagatccaggacaaggagggcatccccccggaccagcagcgtctgatctttgctggtaagcagcttgaggatggccgcaccttggcggattacaacatccagaaggagtccacactccacctggtcctccgcctccgtggtggccagtaagtcctcagccatggagctgctgctgttcttgggttcacaagtctgccattgtcttccccaatggagctatggttgtctggtctggtccttggtcgtgtcccgtttcattgtgtactatttacctgtaatgtgtatccttaagtctggtttgatggtgtctgaaacgttttgctgtggtagagcagcatggaagaactataatgaataagtgatccctaatcattgtgtccaaaaaaaaaaaaaaaaaaaaaa

SEQ ID NO: 49000 - DNA, 540 bp, Oryza sativa
  Clone ID: PAT_MRT4530_51622C.1
atgcggaagggcgaagggggagttgaggtggatggccagatggggaagggagaggagatggtggtggaattggaggtcagcgcacccaacagcgtcgccaagattttccattggaagacgaggtgcctccgtctcctgccgccgcccgtcgcgtcgacgcctatggccaccacccgcagcgtcgatgccttcggctatcacccgcctctccgcagcgccccctaccactacccgctcgccaccacgcccccacatcacccgccgggatctaccattgggggggggttggagtataggactttccctcatcataggcatgggagagaagaattcgagcaaaagtgtgcatctctgagggaatggatcacttctggaaaccttgctggacgccgacatcatgatatctcagctagggttttttctgacagcgcagacagaatatggcgtgacgtactgctcaacaaggaacttaatcttacatcttactatgctgcagaaagctggtgcattgaggatgtcacagtgctaaatgggccttga

SEQ ID NO: 49001 - DNA, 430 bp, Oryza sativa
  Clone ID: PAT_MRT4530_51623C.1
ctaaactggcttagaccaaacctgtcgagatacagtcgcatatatggggtaggctagctgagtgggtgtcaattatttccaaaacggttgacatagccctgtcaaatgaaaagaattgctttatttggtcactacataaaaatagccatttttcggtcaaatccatgtataatgggatcatcaatttcaatataagaatccacaagaggatcttatgggatgtaaaggtaccactaaaaatgaaagttatcttcatgtgatccaattggctccactcttggtgtatgatgctttcacaggaacaacaggatactatgcgcagtggtgctacacgtttggaattggtagccaaggaacttttactcaagtttggactttgtgaactattttcagatcgggaagggagtattttcaggaagaaaccattaga

SEQ ID NO: 49002 - DNA, 702 bp, Oryza sativa
  Clone ID: PAT_MRT4530_51624C.1
tccaagccacaatacctggccacaaacccaaatcatcccccaatcgaaaacatcgccttcttttcttcagttcttgctgtttttttgtatggtgatttgtatgttttggacggctctcagacgaacgggtgctctgccgatctattccatgggcgagccaccctttgcagaagtgccgagagagacgcaggccgctaacacgattgggtgtttcctttctagatccatccaaatttcaagcggaaatattgtatctgtatcccatagatctgtccggtttttcattaattcgctcgctttggtgtttcaatcgattgcttgtttttgctgtcagtcactgcggatcgaaaaaacttgtgcaactgagggactaatctaggcggatgatttctgtaaaactctaatggacaatgggtactccatataaaatatgcccatcttaaaaatatttcttgttgatcggatggacacttagggagttagggtgcgttcgttccatggacaatgatgagtgagatagcacatcgatgcgttttttgcaatttttttttaaaaaatcatattaatctatttttacactttaaagtagttaatacttaattaatcatattctaatagcttatcttttttggcatatctttccaatcttctcgatattcgaactcacccttagcatggacgagtactgtacacggctccata

SEQ ID NO: 49003 - DNA, 279 bp, Oryza sativa
  Clone ID: PAT_MRT4530_51625C.1
atggcgatagggttgtcaataaatgccactcccaacgatcaagatggatcaccaaatgctgataggacgccattaatggcgggatctgtgcttcgatctggagagcgccgtacagctgccgcaacggctaaacgcctctactgctgccctgccgccacgggcatgaacggcggcggtacacgaggtggtggtgcgggattcaatgcggccacccgttcgtcccaaatcggcgcaaattggagcaaaatgcgggctaaaattgggggtggtgaaatttga

SEQ ID NO: 49004 - DNA, 531 bp, Oryza sativa
  Clone ID: PAT_MRT4530_51626C.1
atggggaggaagctaggttttgagaaggtcctcgactgcttctccctcgctctctgcacgaacgcctgcgtctgcatacattcggtggaagacgacgaggaggaggccatcgagagggaggcgctggtgagctctcagctggaagagcttgtgaagctcaaggatctcgtcggcggagccaagactctcgctttccatctagagccaaagaccgtggagctcagggtgtccatgcactgctacggatgcgccaagaaagttcagaagcatatatccaagatggacggtgttacgtcgtttgaggtagatctagagagtaagaaggtggtggtgataggggatatcacgccgtatgaggtgctggcgagcgtctccaaggcaaactcacaatgcactgtctcccttgcctccctcctctttcccgtgttgccacaaaccactggagcccctctttgccgacctcctactgccattgttgccttcgtgatcatctcgccgaccaccccgctcatctcctcaccaatgagctcc

SEQ ID NO: 49005 - DNA, 273 bp, Oryza sativa
  Clone ID: PAT_MRT4530_51627C.1
atggatggagactccctcccagtcgcttcggcgtcgacgacgggcgcttgcccctgtccgaccccttcttcaatcctctgccctgcttgccgccatgctgccggaactctagctaggctaaccggtgccaccgaggcacgagactacctacctctccatgatatgtgcggctcagatgagcagcaggtgccgcacagccgcagtgagcccaggaggaggatgcactggtgcatggggtcggagtactccgaccccctctgggatttcagctag

SEQ ID NO: 49006 - DNA, 765 bp, Oryza sativa
  Clone ID: PAT_MRT4530_51628C.1
ttttttttttttttttttttccgcagcaaaacgcagagcttttatctagtttcatcgcaattcgtccattttttttttttttttttttttcaccaacgaatataagcatatttataaggatccataacgattccattgctagccacaaattaccataaacaagacaacagacaccggagaagttgtctagttcaagcagatgcataaccaaaaccaagtcaaatttcgcatgaaacaccaaatctaaaattatagctgctaaattactgctgctttcaccaaacttacattcatcatagtggacagtttcagtccaaatacagcctagtcttgccactgttcgttcaaaccttcacatggtcattctgcttccatagttaaagcagcaacaaccggcgaaggatgagccaaatgacgagtccgatcaataagtttgtaaatctgtctgtgctgtttggttatgacagtataattattgtcctcagtgtcatcccctccaacctgagagtaggtgcgatgaacgatacgcgctttatgcagcttggcgtctggaccaggagtagcagcagatcgaacgtcgatggaagagaagatgcccttccccaaggagcagaaaagctgcctggaacaatgcccttggacaccacggggatgttgaggatggacaactccgtcttgtgtgaccctgaacttgttggctgtaggggaagaccctgatgtcgtacactgcagcagcaccgccattggctatggagcgggcaatga

SEQ ID NO: 49007 - DNA, 2295 bp, Oryza sativa
  Clone ID: PAT_MRT4530_51629C.1
atggatgagaaagacggcaacaatggccgatgcaatttcagtacggaagatcctggggaggacaaagccttcgctgcctcgcttgtagatcaagatcaggatccggatcctactgatgctgccctactggataatgagtgttccagagttgtagatcaagatcctcctcctgatgctgctgccctcctgtatgatgagtgttctgcagcgtatggtgctcatgtagccaagaagaacaaatccgaggcaatgcatgcgggtgtcggacttgctatgaaaatagatttgccgttggaacttcaaagttataatctagtcaaaggagcaaacgtggaaaactgggcatgtgtaaatttttctttaatgggtactacagaaacacagaaatttgcatctgagctcaaaaaagcgtgtgtggccattgggatggatttgaagtctgttcatgcagtgttcgtagacttgaactctcccaataaactagaaagtactttgcatgatgtgcaagaactgtttggcggacaaggagtggaagtaaaccagataaaccttctaattgtaattcttccagaattcagacgttctgatgcgaaagtcaaagatatctgtaagaaccttggattcttatatcaatgttgtttgcctgagcatgctaggacacccagcaagctatacctgaacaatgttgctcacaatattcgttccaaggagaagagggtaaatggcgactctgagaaagtctatggttctgatgagatgagagaagatagtgagtcagatctaagtgatttggaagatatgggagatgctgactcagacatcatttacttggaagcattccctacatcagatgaagagatggatgatgatgatgattatggtgatgatgatgaatatgtaccagtatctcctgatgaagagatggatgatgatggttccgtgcagcagatgagagagaatgatgaattatgtaaacagctccagcggctggaagagaatggacatgaacaggccgccaatagcgcagaaggctgcctcaaaacctacaaggaaatagagactcatacagcgttagcaggaagtacttattctgagttaagtgaaccgccttcatttgaagccttcctgtgccctggggaacgcgagcacattctcaagacaggatgggaaacacaacatccatacaagaagcctagcggcgtgtcttgggatgagtactctaaggtgtttgacaccaatggctactacaaactcagcaacatgcctgtggaggataaggacttggttgctgcagaatgtaacactcctgaagtgaggcgatgggaaaatcacatcagtcatgactatgatgagctgcaggtcgaacgtggaattgtgagacgttgggcatgtgtaaatttttcacctaagcgtaaacatgcagcgcgggttgtcagtgacattataggaaagtgtatagacatgggaatggaatttggtacattaccaaaaatggatgtcgatgtaccccttacttcccttcatatacgacgtactttgctggatgtgcccaaaaagatagacattctaattgtgattatggcagatgatagaagttatgatggggaaattgaagagatgtgtgagagccttagaattgtttatgttttctgtttaccctgcctaagcaaacggaatctgaagagagttgcacgccaaatacaattgaaggttgtaaagagttataagtcccaacgattttttggtgctcacacgatacactatgatcttggagaggattcagaggcaggagtggattcagagggcattgcatctcaagttctttcggtccttctacaaaatgataaaagaaagacccaagaggataatcttctacagtgcaacatcttgcacagaggtggattaatggaaggtgagatggagcgcatttgcctgcaagaaatagatgctattaaacaggcttgtgcctattcctacaaagaagatcaaccatcactgacatatgtggtcgtggtgcctactgcatcaattggaactgaggctgacaccgctaagtataagttcttttgccgccatactactcataagtcaacctcccgcgtggtccgctaccacgttgtccatgacgacaacaactttctagctggtgaacttcagtctctaaccttgaagcttttcaccttccgtcatcgtcgggaatacccaaagatagatgcagttgtaccggcctactacgcagagcgtgctgcattcaaagcttatcgcgcagagtgtgctgcatccaaagcttcttaa

SEQ ID NO: 49008 - DNA, 588 bp, Oryza sativa
  Clone ID: PAT_MRT4530_5162C.1
atgggaacccagggaataatgcaaatggtacttgacctctcaaatcttttacattcatctcaagagttggaagctctaagtgaaataccttcaaatgatgaactggatttgattataaagcacttgcctttagacagagcacctgggccagatggttttaatgctttccacctggtggaacatgaagcaatcctgcaaatcttgcaggctaaggggtttaaccaatcttggatcaacttggtcaacaatgtcttgaaatctgtttccacttctgtgatgctgaatggagtacctggaaaaaccttcaaatgcaagagaggagtcaggcagggtgacccactttccccactgttgtttgttctaaccgcagacctgctgcaatccattgtaaacaaagcacaaactttgggcctcctcactgccccaatcccaaatggagatagccaatttccaatcctgcaatacgctgatgatactctgataattatgaaagcggaccaaaaggaaaatttcacccttaaagccctgctcaacacctatgccctttgcactgggggccgaaaatcaatttccataaatcttgcatga

SEQ ID NO: 49009 - DNA, 1929 bp, Oryza sativa
  Clone ID: PAT_MRT4530_51630C.1
atgtccaaccccttcgacctcctcggcgaggccgacggcgagtccggcgaggccgccgtcgccatcctcgtcggcaagaagaaggccgaggccgatgccttcgccgccgccaacccacagcccacgaagaagggcgccaaagatgtgaaggggaagaataacggccaagagaatggcagtggaggtcggaattacgattatgattattacaaccgtggctattccaacaacaatggtggttatcaaaattacaattacaatggtaataatagcaatggttatcaaaactacaattacaatggtaatggccaaggccattacaatggtggatatcagcctatccaccaggggaacggccagtatcaaaacaatgggaattatcacggggactatggatatgatggtcagtatgcagagaattacaataatggtcagaggcaagtgtacaatgggggtcagtacaggaagaagaatctgcagtacaggcctaaagagaaacagttgtctgaaactgcttctgcttgttctgccgagaacaaatctgaagataagttggactcagccagtgaaacaggaaagaaggaatctgttgcaggggatgctgttgccaagcctgtttctggaccagaagagtctacaggggatgttgcgcaagacaattcgaagaaggatggaggtgaccctgaaaagaagaaggtgcgcaacactcttagcggttccgctaagaggaagttgaagaagaagcatgattctaaggtttccggaaagactgagaaagaagcagagaaggcagaggttcttaaggaagaagagagaaaggacatgacccttgaagaatatgagaaagtgcttgaagagaaaaggaaggctttggaggactcgaaatctgaagggaggaaggtcactgctgaagtgtttgagggcatgcaactattggagaaaaagaagcttgatgatgaaaatgctagcaagaaggctgaaaatgagcagcgcaaagagccagcaaagcaagtcaaagctcctaaggctataaacctcaatgacttgttaaagcctgctgatggacaagcgtaccgccctcgtcctccacctaggcgtgtgcaggaagatggcttttcacaagggtactacaatggtggtggtggccctggccgtggcaatggtggtttcaggcaaaacagccgtgaccacagcgctgaaccacatggcaacgctaggggcaacggtggctaccaagagcgccgtgatattggttacaacggtggctaccaagggcgtggcaatggtggatatcagcagcgtggttacaacggcaacaacaatggtggatatcagcagcgtggttacaatggcaacaacaatggtcgattccagcaagagcgcgcggttaactctggcaatggtggatacaggcagggcggctacagaggtgatggtggctaccagcagggccgaggctactccggcaatggcaatggtggctaccagcagggccaaggctactctggcaatggtggttaccagcagggccgaggctactccaacaatggtggctaccggcgtggtggtaaccaaggcaacggcaggaacgagagcgactctattctctctcctgcccacttccctgcgctgacagggaccatccctgcgacgccagagaaggtgcagtcccagtcccaggcctcctcgtctccagctccagctcaagctcagcctcaggctcagaccctgtcatcgtcctcgtcctcaggcgcagctccggctcctgcccaagccaagtcacaggctcctcctccggctcctgctcaagccaagtcccaggctcctcctgcccaagccaagtcccaggctcctgcccaagtcaagtcccaagccaaggctccagctccagctgcaagaaccaaggctccgtccaaggctcaggcctaa

SEQ ID NO: 49010 - DNA, 156 bp, Oryza sativa
  unsure (1)..(156): unsure at all n locations
  Clone ID: PAT_MRT4530_51631C.1
aacccaaacccgcggcgcaagaccaacaaggggccggggcgccncagcccncggggccgaaacgggagcggnccgacccctcggggagacaaagagggggncgnccncatcaccctcgggcccgacccccccgagggggtcaggcctcgtgggtga

SEQ ID NO: 49011 - DNA, 162 bp, Oryza sativa
  Clone ID: PAT_MRT4530_51632C.1
atgaagagacggcccctggtggagaaaatgacccggcaagccgcggccgacatcgtcgaaatgtgccacctcgccggcggaaatgttgtagacaggccaaagccagaaaaagggacgcacgcaagccaactgcgctgggccgcggaagatgtaaaaaactga

SEQ ID NO: 49012 - DNA, 1032 bp, Oryza sativa
  unsure (1)..(1032): unsure at all n locations
  Clone ID: PAT_MRT4530_51633C.1
atggcgggaatcgtagaaaaagaaggcgagacgggtcacctcacctcaccaaccgcgccaactttaaccacaccaaccaaccaagccttcgtcaatataataacagtactgatgatggtgagcttgatggaggaagaggccatggccatggagacgatggcgacgacgacgaccaagaggatgtcggtggcggaggtgtctctggtggaggccgtgctgttcgacatcgacggcaccatgtgcgtctccgacccgttccaccacagggccttctccgagctcctccaggccctcggctacaactccggcgtccccatcacgccggagttcggcatggcccacatggccggccggagcaaccaccagatcggcagcttcctcttcccggactggccccagcaccgcctcgacgccttcttcgccgacaaggaggccctcttcgcgcgctacgccgccgagggcctccgcgaggtcgccggcctcaccgacctctgccggtgggccgccgcccgcggcctcaagcgcgccgccgtcaccaacgcgccgcgggccaacgccgacctcatgatctccatcctcggcctctccgacttcttccaggtcatcgtcgccgctgccgacgactgcgacctccccaagccctcgccggagccctacctccgggcgctcagcctgctcggcgcgtctccccgtcacacgctcgtcttcgaggactcggtggtcggggtgcaggccggcgtcgccgccgggatgccggtgatcgccgttgcggaggaggcccgggaggccaaggtcgtcgccgccggagcgtccctcgtcatcagggactacaaagaccacaagctctgggcggcattagacaagctccaagcagcagcagcagctcaatccaatggacaacttggagcatagtaggggnttaattggatgattatgcaatctcataaccaatatgaagtttgtattacaatacaagatgatgaatggtacaataagtgaaaagaaaaaaaaaanaaaaaaaaaaaaaaaaaa

SEQ ID NO: 49013 - DNA, 350 bp, Oryza sativa
  Clone ID: PAT_MRT4530_51634C.1
caaaacatgaaagagcactcaatgttcctattcatatccgaccttaacgtcttcactatgtcacaatacgaggggtggccgtgggctctatatttattactctccaaactacaaaatcgggaaaattcaccacaagacaccagccagggggggaatactaccccgagcactatatgacctaggggggataccctatgtacatggcaaggcaaaagccaacagcccttgggcttgagccaaattccggccaatgtggagatcaccaaactgctgggggggtagctgctgccctatgggctggacaacctcaatctcctgggagccagattggtgcgccaccagccttagct

SEQ ID NO: 49014 - DNA, 407 bp, Oryza sativa
  Clone ID: PAT_MRT4530_51635C.1
ggaaactaaacacagccgtattttttttgatgggcttgaagaaaatttgtttaccaacagcataaactgtcttgtattaacgaatcacaaaggggacaactgggttgtaatataaatcgttggaaagggacgttttgcccaaattaattaacatttgagggccttgcgcttttttttttaaaaaaaatgttctttttgggttagaaaagaaacccttgttacacttgggtggttttttacagggattttttttaaaaatactttgaaaaagggtaggtgccaaaggggcactttttttaaacacccgaacataaaggggtttataaaaaattattttttccaaaaagggccgggaggtttgggggttcaacacatccctccggggggtgatttcctcctcccctact

SEQ ID NO: 49015 - DNA, 4373 bp, Oryza sativa
  Clone ID: PAT_MRT4530_51636C.1
ccaaaatcctgctctgcttctctatcctcacccttcattggcttagcttgactacccatttagcaatacggccgacgacatctttattcctgatgacttctcccaaaggggaggaggagatcactatgaccttatgggcttggaagttgtggtgtagctttctggatgtcatgatcacagcgtagaatagtttttggatctgtggatatttagtttttgcatcgtggagggccttgctgacatagacactgggtattgtactctttccctctctacaacgataaacgtactcatagaataaggtgtggcagtaatataaatgaataattcttcattattttgtggggcaactagtccggggggtttgacaagtagcgtttgagcgcaatgaacgcgctctcagcttcttgggtccactcgaatttgtcctgcttcttgagcagggcgaagaaagcttgtcctcgttctcccatccttgcgatgaaacgacttaacgaagccatgcatcctgtcaatcgttggacctccttgagtcttgtgggcgacttcatgttctcgattgccttgaacttctcagggttggcctcgattccccgcccggagaccaggaagccgagtagtttccctaacggtactctgaacgtacacttctccgggttgagcttcgtttgatatcgtcggaggttgtcgaacgttttccttaggtcgtcgatcaatgagtcgcccgtcttggttttgacgacgatgtcgtccacgtaagcttcggcgtttcgtccgagctgatcacctagtgctccctggatcccgcactgatatgtgttgcctgcgcttattaatccaaacggcatcttggtgtagcagaatacaccgaaggacgtgacgaacgctgtcttctccacatcctcttttgccatgttgatctggtggtagccggagtaagcatcgagaaagcttaagaactagcagccggctgttgaatccaccagttgatctattcgagggagagggaaatggtccttggggcatgccttattgaggtcggtgaagtcgacacacatcctccacttcccgttggcttcatgtatcattactggattagcgagccactctggatggagggcttctttgatgaagccaattttgagaagtttgtcgaattcgtatgacttgtgttcgatcaggtgcaaatctccatagtttttgcttaactggcttggcgtcgggttgcaccatcagtttgtgctcaatcgcctccctgggaactcccgacatgtctgacggttgccaagcgaacacgtttgcattgttgcggaggaaggtgatgaacgcgagttcggtcttgtcggggttggagttggacaacggaataatcttgatggcgccgtctaacttcggtttcttgttgggcttgctcactttcttggggtgctcaattgtggcgggcgggttgggagtatgctcgaccatgtcgaggctccgcttgttgcactgcaccgctaacttggcgtttccctggatagtaattgtcccttttggtcctggcattttgagaacttggtaagtgtagtgggatgctgccatgaacttcgcgagtgcagttcttccaatgatggtattgtaagtggtatcgaactctgcgacattaaaggtgatctgctctgttcggaagttgtcggcttgtccgaaggtgacgggcaatgtaatcttacccagcggcttagatgatgattctggagtgatttcatggaagggctgatctgtgggcgtcagctcgcttcgcggtatccccatggcatctaaggtgctggcgaagagtagattaatggaacttctgccatcgatgagagcccgtgctaccttgacattccgaatagtgggttcgatcacgatcagatatctaccaggtgtggtcgcgattatgtgcaagacatggaggtcgtactctgggaacgcggagttggagtcgggagtggccgcctcttcggccgtttcgacaacacgtactcgcttccctctctagagtgctagttgtcgcgcgagctcctttttgaagacataacaatcctccatggagtgattgttagtcttgtgtatagggcaccattacttcttcgagtcgtcgttttgggggttcgagcgcttgggtgggtccgtttgcttagcggcgaggacctctcccgagggtttgcgcttcccacttttacgacttcttttcttgcttgattccggcgcgtctttgttggctgacttcttctcctcacctacactgctctttccttcctttcatctcaaggcgtcatctgcatgagcgcatctgtcaatgatctcaaatagtttgcaagcagatgtgattcttcgagttgccagttcctggttggtgtatcaatctcggacgcctgacttgaatgtgcggatgacagaagcgtcagtgatctcggggatcgtattcctgcactcattgaagtgccgaatatagtccctctatgattcatctgggttttgagttagggcatgaaggtcgtcctcaatcgcgtgacacttgtatgttccctggaagttgacaacaaactgttaccacaagtcttcccatgaagagattgagtagggtgggaggtgaaccagtcatgaacgagcggaatctttcaacgcgtctggtaaatagtttgccagcgcattgtcgtatgcactagcagcgtagagaattgtggagtagacttgcagaaattcttctatgtctgtgcttccgtcatacttctcgatcgcccctgtccggaacttttcgggccatcgcacatctcgcaatgtgcgcgcaaacgctctgcacacgcctccttgggcgaaaggtggcccgcggttgtgatgtcgtcgaggaggcttgtccgatgaagaagatgaccaagacgaagacgagggatcactagggttaggagcccagcttctcgaacggtggtccactagggttaggagcccagcttctcgaacggtggtcacgtcttcgatctcgcctagaggcgggagaccgggagctacgttctcgtccgttgttgctgcctcgcctccgttctcaattgttatctccattgtggtgttgacgtgagcgatgttctctcctcgtctggagggagagcgatgctgatgacgatcattgtcattccaatctcgcctgtccctccgccggtcatctagatgttcatgaaggtcacgattttcacgacgcgatggagtcgggtctcgagccggtggttccctagtagggttttgcgcttccgcgttcccgttagctggttcaccgttccctcccggtggatcttggggtggaggctcgactgctgcatccacgaatgcgctgttgaggttggtcacagtctctcgtagtcgtgccgcccactgatcgacatcggggtttaggacagggtcaaaggggctctctcttaatattgcgtcgaggttccgcagttgttgtggaggtgttctcgcggccgcggaagcacttgtctcgacaccattgatcacgttcacgtctcgtggtgagtctgaagaagactcgtaatctttcagtaggtgcagcatggatggctcgctagggttgacaccgataaagcctacgaaccgatctaaagtcgctgcgtctcgttcctcgacaacgcactgagattgatctcgtggttgtgggatgtgaggatgcgacgacttgaatgtcctaaggaagattatgcaacttgtgagatcgtgggatctcgatctatgaatcgggcaataagtggtgcccgttggtgaagtgcgttgaatcccacgtttccagcaggcgtagagttcagcctttgcgtgaagtatcacgaggcaatcttccagagtatgcttggatgtcttatggacgggacaccaagacctcggtttctggatgggtatccttgtcggctctggtctcttgttcagaggacagaactcggccgcttgaggattccttccaggtactaaggccgtcgatgttccattctccacttgcgtgggaggaattgtcagcgaagcgtcatttctcgaagtcatagccgtgccgttctcgttcccaatagtgattgggcttgtcgagatcggcatgacggtgtagaccggaaagacaatagtcccgacttgagtccaaaccagcgatgtcgaggtagaggctccttgattgacgccggtgttggtactgttgtcgggatggcttgaagtcatatttgtagaaccttgagcaccaagttcccctacctggcgtgccactgtcaatgagtggtactcgtagaccggatgatttgggtattgggatacgttggaacaaggatttcgtaaactatggtgggtgtgttggtgatgaattttgatgccttgcaccc

SEQ ID NO: 49016 - DNA, 1530 bp, Oryza sativa
  Clone ID: PAT_MRT4530_51637C.1
tgatgctgtttgctgttactggtttgatcacagtcacagcgacatataaccgatgaagaaacaagtaattaatgcgcagactaacaaggctgagttggaggttgtttgcctcaaggaggcacttgcacaacaaaatacagagaaagaagccatagttttgcaatgccaacaatcgactgctagattacagaacctcaagtccgaaatattgcatacacaggagaagttcaacagactgaaagaggaaatgcaaagtggatttcaaccttttaccacagctgacgaacgttccgtacttcttgaaaaagcaaaccaggagatgaatttggagctgaataagctgaaacatatgttgaaacagaagcatgaagagctaaacgagaagcaagctgagttggaaaagcttaacatctctacagaggaggagcatctcaagtgcatgcaagcagaaatggctcagctctctttggagaagcaactaatacttgctcaggacaaaatgaggcttttggctcttgagaagcagattgaagtaagcaaggcaaaggacactgaaacagaaaaggttatgcttgagaaagaattggagaaaattcaaaaagagagcacaagtttgaatgatcaaattcactcttcctcgtccatgataattcgcctgcaggacgagataattacgatgaagaatgcacagcggagactcgaggaagatgtttgccggcatgttgatgaaaagaagacacttcaaaatgagctttgtcaccttaaggaggataggagtgacttggacaagaaacactcttcaatcaaggagcaaatacaggctgtggacttgaatgtagaatcactacaagcactcgtacaagaattgaaggatggtaatgttgagttgaaagggattataagaaaccatgagagcacagaagttctgcatatcgagaacctaaggcgtttggagaggatgtcagagaagaactcatatttggagaagtctttgtcagctgtgactactgaactcgaagttttgagggaaaagaaggcagaactggaagaatcatgcaagcaccttagctccaagatttccagtcatcagtctgagcgagctgtgcttgttgcacaaatcgaggcaatttctcagactatggcagagctatttgagaagaatgtctttctagagaattcattatctgatgctaatgctgaactcgaaagcttaagagggaaattaaaagagctagaagaatcttcagaggcattgtatagtcagaattctgcacttcaacatgagaagagtactcttgcttgtcaggttgatagaatcagtgataccctgcagaatttggaagcacattatgcagagctagaaaagcggcactctgatctacmagaagagaaaggctcagtgcttgacgaggtgatcaagttacaggaacagataagatttgagaggaaggagcacaatgatcttgagcactctagaaagtctcaattggatgctctacacgagaaaatcaacgtactgtcggcagaagg

SEQ ID NO: 49017 - DNA, 273 bp, Oryza sativa
  Clone ID: PAT_MRT4530_51638C.1
atggctccaacaaaggagggcatacaagttcgagaagtgctagctatgataaatttcatggaggagcgactaatggcggtgatggaacagttagacacgaaggttaatgagatggaaataattggcaaacaagtgtatatgattgcatcaaagcttgaacaacaagggagcggttggacaagttgcataccaagtttaaaactcgataaggcaaattcacgtcaccttgggcactatctcagcgccaatgatgatggagttgagacactatag

SEQ ID NO: 49018 - DNA, 285 bp, Oryza sativa
  unsure (1)..(285): unsure at all n locations
  Clone ID: PAT_MRT4530_51639C.1
cgnaaaggacttacaatggaggatcgatgcttactacatcagcatggcaacaataacatagatagaattgcatgtataggctagttcttcttcttcctcctcccaattcttggcaacatctagtaccatgtttcttgtagcttncttggcctgcatttctcaatgcagaaaaaaagataanaaattggaagttcttttctggcagcagtgacgtctgtatacaatttgtcatttccataatccatctctttctccctgtggctgatgggctggacatcatcaatg

SEQ ID NO: 49019 - DNA, 165 bp, Oryza sativa
  Clone ID: PAT_MRT4530_5163C.1
ggagtaaccaaattgttttacaggccacacattcaagaagtacacagtttcgcttacacacaaggttattgtagaggctaaacacgaggtatgtataacaaacgctctagagaagaatcatgtgatcaaatacaagatgatccactaatgttcgcaagggaaaaa

SEQ ID NO: 49020 - DNA, 456 bp, Oryza sativa
  unsure (1)..(456): unsure at all n locations
  Clone ID: PAT_MRT4530_51640C.1
ggggttctcctttgaagggtggggagggttccaacgaggaggagtcgagtcggagcatcgaaggacttaagggtttgaggcggggggctctgtacttctggagatgatgctgcgaggtgggcggctggctggcttggcctctcggatgggtggagccaagcctttcagcacggagagaggagagagctggggtgggngtaagancggnccgncagaactncatgagcgaggagggggggggaaactgccggccgcggaggatgaaangagcactaaaggggctatcattctacacaacagaggaagaacaaaaaaaagtcttctcaccatatggcgctggtgaggaagctcgattggtgagagacaaccaaacgggaaggccaaagggatccgggcccgctaaacatccttctcaagcagacgcaagagaaagctgccaaggcaatggatggacgg

SEQ ID NO: 49021 - DNA, 286 bp, Oryza sativa
  unsure (1)..(286): unsure at all n locations
  Clone ID: PAT_MRT4530_51641C.1
aagagaaagggcgtattgtattntaggcaggcagcagctgaggctgagcgaccgtccccngacgccgacgccgacccccgtctcgtgagggagggagggtcatcgccatcnaatcnnaaaaaatcaccngncgccgcatcntcgaatccaatcattcaatcaaggaggaggaggaggatttggatttggatttgganttngaattagggttagtgattccccatttttttaagggcaatcgatcgagcttagctagggttggatgcgatgacggcggcggcgtcgt

SEQ ID NO: 49022 - DNA, 287 bp, Oryza sativa
  Clone ID: PAT_MRT4530_51642C.1
gagcctttttgtgcttccacactggcgaccaagcatccttggacgcgtgggcgaatccaaacccccaaaattcccagagagatgaacgcggcggctcggaaggccggcgccgcggcgcggatgccggcggcgctttacactgctgtaggaggagggcctccatttgtttgtttgccaatcacgttgtatgtcttccggatgacgaggcgctgctaccggatcagtgagggatagggacccggtggtggcgatgccggggtggatgctggcggctgggtcggcgggcg

SEQ ID NO: 49023 - DNA, 231 bp, Oryza sativa
  unsure (1)..(231): unsure at all n locations
  Clone ID: PAT_MRT4530_51643C.1
tgttcggttngnggcgacggggncggttcgcgccccgntcgtcgcgagaagtccattganccttatnatttagaggaaagagaaggcacattcaagagggtcttctaattttaantggaaatgttgttgattcttttttgttgtaatttatccttgatgtcaaaatgtgcatgagcagtaaaaaaaaaaaaaaanaaaaaaanaaaaaaaaaaaaaanaaaaaaaaaaaaa

SEQ ID NO: 49024 - DNA, 402 bp, Oryza sativa
  Clone ID: PAT_MRT4530_51644C.1
tcctatacagccgcccccctttttttatttttttattacaaacggattagaattgagggaaactgcaaattcacggggggaaacacaaattttataaatacacagagtcagcatctactaccatgcacaaaatatatcccgccgcactcacaatttcgcgctatgaacgggttcctacaatggctagaagcatatttaaacggagtgtaaagacttaaacccaagcttaaccttagtggagacccccatccgtcatggcacactttcttacacctaaagttggacaattgaacttccttcgacaacttgcttgccagccactactcttatgaatggccatccaacaaatagcattttctttacagactcaccccgacaacccaaaactctttatgacatatc

SEQ ID NO: 49025 - DNA, 1005 bp, Oryza sativa
  Clone ID: PAT_MRT4530_51645C.1
attgaagctcaactgattttgaaaagcggaagcgaagccatctaggtaacattatattctaaggagggttggttagaaaagttaccgttattattacctccttgatagtacgggggcgtggctggttccgcccttgatctccttgtggatgatacccgttaatgttgcccatgtacatcgcctcttcacgggtttccaggaagtcattcccagaatgactcgtactaccgcagacctcacacgtgacatgtgagtccatggctttgacgatgccttgaggccatttgtcgtggtcgtccaagtgcttcatgaggaggtttagcttggtagcgagtaattccgtctccttgacggtgtgcatacctcgcagacgggtttggagtcgttcctcgctccaacccatattggagaccatcttctctattagatcaacggctcctcgaactgtcttagagaagaatgctcctccagccgccacgtccaggtgattgtggaacatgggagtgagtccattataaagaacttcaagaggaatgttgtagaacacttgtcctaggtgttgacagcagcacggttggtgtaaaaccactgtttcgctctcccgaggagggaaaacgttaacagccttagtcaaacggcgtctggactgacgccctttgtagtatacatgctacagatctccaggaactgctgcagatgagcgttggcatcctcgttaggcttgccgcagagcgggctagcgtacgccattgtgataaggctggacttcaagtcaaaatccacgtctcccatgttgatctgcggcccaatggccacattgtcagtagaaggagcagcgaactcgcaaagggtcttgtcagccatagtcctgaaagtcggtggcgctggtacggctggtttctctgtcggtagagttttctgcggagcaacgactcgcggcctgacgctccggaagaaagcttctgcattttctttgaagttttccggcaaattgaaaccagtcat

SEQ ID NO: 49026 - DNA, 766 bp, Oryza sativa
  Clone ID: PAT_MRT4530_51646C.1
cttaggtatgaagagtacattgattatattttccccgatgaggttgcgctggctccaaacctcaagatccttgaagcagcttgtcttgctgatggtatccaattttcctgagcgaggaccgaggagatagtgcatattaatctctctaaacgtcgtgggagcgcgtccacgtgtcctagcctggctacccttccaccatcgtctgatcgacggtatggatttgccaaaaaccctagccacctcaaacctcgcgccactcaacgcgtagctcggccacccgacgttcttctcacccacgccgcctcgccctcctcttctcgcgcgcgtcgccgccttgccctcctcccgctgccggcagcccgccctcgcctctcttcccggtcaggccaccgcagctaccaatgagggaggccagcctccccacagatggatccaaccgcccagatgaaagagatgtgagccgcctccaccttcttcttcgcccctcttggtgtagcgctagatccgttggcgggccgtcgatggtttggtctcccgctagtggatctggctgctcgggaccttggaagcgagggagcaagccgtcgctgccaccctctactactctccttctctgcacctccaccacccctctcctctcagctccacccggtgttagattcggcttatataggtcgccggatttggtaggaggagaaggtaggaacagtgcagctggtgatgcttgcattggagtcacatcaaggagcccagagtaattttccat

SEQ ID NO: 49027 - DNA, 2721 bp, Oryza sativa
  Clone ID: PAT_MRT4530_51647C.1
cctgccgccacgaccctgccgaaccctaaccctagctctccccccgcgccggcggcggccatggcgctcatcaccccagctagcggcgggggcggcggcggaggagacaaagccccaccgtccgcctccgacccgagcctcgggttcctcactaagcgcgacacggaggtgaagctgccccgggcgacgcgggtgaagaacaagacccccgcctcggtccagatcaccgcagagcagatcctccgggaggcgcgggagcggcaggagcccgagatccgcccgcccaagcagaagatcaccgactcaatcgagctctccgagtaccgcctccgccgccgcaaagagttcgaggacgtcatccgccgcgtccgatggaacgtcaacgcctgggtcaagtacgccaagtgggaggagcagcaacgggacttcgcccgcgcgcgctccgtctacgagcgcgccctcgacgtcgcccaccgcgaccatacgctctggctcaagtacgcagagttcgagatgcgcaacaggttcgtcaatcatgcccgcaacgtctgggaccgcgccgtttctctcctaccccgggtggaccagctgtggtacaagtacatccacatggaggagctacttggcgctgttgccaacgcccgccaggtgttcgagcgctggatggcctggcgtcctgacacagctggctggaactcgtacatcaaatttgagctgcgctatggtgaggtggagcgggcaagagctatttatgagcggtttgtggctgaacacccacgaccagatacgttcattcgatatgccaagtttgagatgaagcgtggagaagtggagcgcgcgcggcaggtgtaccagcgtgctgcagacctgctcgcagatgatgaggatgcccaggtgctgtttgtagcctttgctgagtttgaggaaaggtgccgggaggttgagcgtgcccgagctatatacaagtatgcacttgatagggtgcccaaaggccaggctgaggagctgtacaggaagttccttgcatttgaaaaacagtttggtgaccgtgaaggaattgaggatgccatcgtgggtaagaggagattccagtatgaggacgaggtgaggaagaaccctctcaattatgattcatggtttgattacattaggctggaggagagtgttgggaacaatgacaggatcagggaggtgtatgagagagccattgctaatatccccccagcagatgagaagcgttactggcaacgatacatttacctatggataaattatgctttgtatgaggagcttgatgcaaaggacgtggaacggaccagggaagtttacagcgagtgtctcaaattggttccacacaagaaattcacttttgccaagatgtggctcatggcagcccagtttgagataaggcaaaggaatcttaaagctgcacggcagatactcggaaatgccattgggatgtctccaaagggcaagatattcaaaaagtacattgagattgagttgtatcttggtaattttgaccgttgtaggactctctatgagaagtatattgaatggtctccagcaaactgttatgcctggaggaagtatgctgaattagagaagaaccttagtgagactgatcgtgctcgttccatatatgagcttgctattgctcagccagcccttgatacaccagaagttttgtggaaggagtacttgcagtttgaaattgatgaaaatgaattcgataggactcgcgaactatacgagagattgcttgatagaacaaaacatttgaaggtatggataagctataccgagtttgaggcctcggctggtttggctggggaagacggtgagagtgaggagattaagaaagaagttagttatcatgaacagcagatagaacgggttcgaaggtgccgagcaatctttgaaagagcattcgaatacttcagaactagtgctccagagttaaaggaggaaagagcaatgctccttgaagaatggcttaacaaggaggtgagctttggtgaccttggtgatgtcaccttagtgcagaaaaaggcgccaaggaaagtgaagagaaagagaccaattcctacagaggatggctccactgttgcgtatgaagagtacattgattatattttccccgatgaggttgcgctggctccaaacctcaagatccttgaagcagcctataagtggaagaagcagaagacagatgatactgatgatgtctgagctaaactgccactgtttctgtggtcacgaatgagctaatcgttgtcaaaattagatctgaaggtcttctacaatgctgggtaaagttgtgaatgtgccctacctgatcatgtggtgtggtgctggcacttcgatcaattcagttttacatctgtatgtctgatggatagaaactgaaacaagttcatagtctttaatttagttttggcatgcatgatcttgtttcttgctcacgatatttgtctctaaggtccaaaataggagacggttgttccttttagttttcttttatttatacatcaataggtaggcagctccagccatattagtctaagaatggcgcattttgtgtaaagaagctgcctgtaaggtgcggttgtgtaccagtgagatggactgtgaaaacttgtcttgctgatggtatccaattttcctgagcgaggaccgaggagatagtgcatattaatctctctaaaaaaaaaaaaaaaa

SEQ ID NO: 49028 - DNA, 266 bp, Oryza sativa
  Clone ID: PAT_MRT4530_51648C.1
tcttgtgcaccgtaagagcagcagcagctgccttctggtacacactgcactacacaatagatgaactagcgatagagtatgaaacttactggatacgcagaacagcctgtaccgcagaacaagcagctgagcgatcaataaaggagagcaaaccgataaacacaagcatcgccaatgtctgcctagctattgccagctgtggtccaggggcatgccgctaatacatgaactgaactggctactacaaagagcacagagtgagcgca

SEQ ID NO: 49029 - DNA, 606 bp, Oryza sativa
  Clone ID: PAT_MRT4530_51649C.1
aacgtggcaagaggcagagtttattacgagtagtaatcaaaatgattgggccatgctacacaagaaagagatgtcagtgatggatttagtagtacatcttcaagattaacatatgtaacagccttgtgccatcttgttacagaaagcgattatggatgtgcttccaactatgatctagccttctcatcttccctccaaaattgtacttacacgatagaaattagaacctagtgttggatggcaatcatcacctttacacaatatcagatatcaccaccttcgcaccagtgatgtgagcaactcaaaaagctcaaaaggacttccccgcctgtagacatcatcttgctggctctgtccagtggaaaatagtagagaaaccagggcacgccatccagtcaacaaaacccaagtacttcccatggctaccaggataaaaggagttggtggaatatgaccagatgacagtgctcgaatggcgagggcccaacggtatccccacaccccggggttcggccgcaacaactacagcgttccccaccccattgcgacctttcgcatcatccccgaatccgccaggagataggcactgacaccaccctcgtgccg

SEQ ID NO: 49030 - DNA, 2352 bp, Oryza sativa
  Clone ID: PAT_MRT4530_5164C.1
atgatcacgttcgcggacctggcggagccggcgcccggcgccgagcggtgcgtcgaccggcagctgtggctggcgtgcgcggggggcatgtgcaccgtgccgccggtgggcgccgccgtgtactacttcccgcaggggcacgccgagcacgcgctcggcctcgccgcgccggagctctccgcggcgcgcgtcccggcgctcgtgccctgccgcgtcgcgtccgtgcggtacatggccgacccggacaccgacgaggtgttcgccaggatccgcctcgtgccgctccgcgccgcggaggatggggacgtcgaggaggatggcgccgcggcaggcgaggagcacgagaagccggcgtcgttcgccaagacgctgacgcagtcggatgccaacaacggcggggggttctcggtgcccaggtactgcgccgagaccatcttcccgcgcctggactacgccgccgacccgcccgtgcagaccgtcgtcgccaaggacgtccatggagtcgcctggaacttccgccacatctacaggggcacgccgcgccggcacctgctcaccacggggtggagcacgttcgtgaaccagaagaagctcgtggccggcgactccatcgtgttcctccgcggcgacggaggggacctgcacgtcggcatccggcgcgccaagcgcgggttttgcggcggcggaggcggagccgaggaggcctccctgcccgggtgggaccagtacggcggcctgatgcgaggcaatgcgagcccgtgcgcggccgccaaggggcggggcaaggtgcgcgcggaggacctcgtcgaggcggcgaggctggcgaacggcgggcagccgttcgaggtcgtgtactacccgcgcgccagcacgccggagttctgcgtgcgcgcggcggcggtccgcgcggcgatgcgggtgcagtggtgccccgggatgcggttcaagatggcgttcgagaccgaggactcctcccggatcagctggttcatgggcaccgtcgccagcgtccaggtcgccgaccccatccgttggccgcagtcgccgtggcggcttctccaggtgacctgggacgaaccggacctcctccagaacgtgaagcgggtgagcccatggttggtcgagctggtgtcgagcatgccggccatcaacctctcgtctttctcgccgccgcgcaagaagccccggattctggcgtacccggagttccccttcgaggggcagctcctcaacccggcgttcccgccaaacccgctggcacacggccaccaccattaccatcacaaccacccgtccttcttcccgttccccgacgttagtgctcctgcaggcatacagggagccaggcatgcgcaatttggtccatctttatcagatctccaccttacccacctgcagtcgagcctcatgtacccggggctccgccgccccgatcatgtcggtccaacatccatcccgccaccaagaatcagcactgacctgacaatgggcagctcgccgccggcgcgcgctctgtccatgggcgccaagaagcccgacgacgccaagccgccggggctaatgctgttcgggcagaggatactgaccgagcgccagatgagccttagcggcaccacctcgccggcggccaccgggaacagctctctcaactggaacaccgagaaaggtgcctcggagggctcgggctccggcgtcatccagaacagccccaccgacaacacgtcgtcggagaggctccagtggttcagggagaacagcaccgtctccgagctcgggctggagcccgggcagtgcaaggtgttcatcgagtccgacacggtcggccgcaacctcgacctctcgtcgctggcctcgttcgagcagctctacggccggctgtccgagatgttctgcatcgacagcgcggagctgaggagccgtgtgctctaccgtggcgccaccggcgaagtgaggcacgccggcgacgagccattcagtagagatttcaacaagaaagctcaatctgcacaggtatcctactgttctcctgtatccttcttcatcatcatcaacaacgatcagctgcgtgtacttgttgattcccgtgtactacgatgcaaaaatcctgtgaccactcatcagaggcttgaatgccgcggccccttggcccaagggacaagcgcatgcagcatgcagacgcagacgcagcgctgcgccatttctgacctctccggtggcctgacctccaggctccagcctccaggcgaggcaatccctcttggttctcttgccttggcagcaagctcgcttacccatgatgatgagatttgtgatctgcatcgtgctgcgtatccctggctagtagagagctag

SEQ ID NO: 49031 - DNA, 223 bp, Oryza sativa
  Clone ID: PAT_MRT4530_51650C.1
ttttaaagcaaattagttacgtatacaaacaatgcttttacaaacgtagggaagtacgaaggctgtgtggcatgaactatcacagcatgccctagagaccctcctactggttacattgataaaaagctgccaccagaaactatggatggcctttctgctggtcctacagcagtgtattccatacggaaatcctactcctaatttttgggccggcaatcaaatg

SEQ ID NO: 49032 - DNA, 110 bp, Oryza sativa
  Clone ID: PAT_MRT4530_51651C.1
atggtagccaagatagactacacatgtgaagcggacagtcctactctctttgccgtcgagattccaaacagcataagcaacgatgccgatcttttgtcgagcgtgaaaag

SEQ ID NO: 49033 - DNA, 2164 bp, Oryza sativa
  Clone ID: PAT_MRT4530_51652C.1
gcacagcagggcgacggggggaggggaaggggaccatgcgctgcgttggcttcttctgctgaatggacagatgaaaacactaggatagtttgtgagttgttcgctgaacaagttaggataggaaatcgctcaaatacccatttgaacaaggtggggtatgataatgtgattgcaaaatttgaagaaaagactggcttacgctatcaaaagctgcagttcaagaacaaatggagcaagctgaggaatgagtataatctatggaagaaactgatagctagagagactggattaggttgggaccaagctagggctactattgttgcatctgatgattggtggttacgggggattcaaaatgaacatttgctccaacaaatatttgaagacctttgaaacacaggagatgaccactggaatcctactagtggaaatttaccgcagagttcaacccaaccttccagtactattaatgtagatacagaagctgtgaatgaaggtgatgatgatgatagtaacgatgatgatttctcacctcctcccaagagaggtaaggcagcagctggtaaggaagccaagaaacccaagaccagtggtggatattggttctatgaacaaatgagtcgttttgttgataaccaagagaaatcagccgcatctgttgagtctcttgtcaggagggaggacacttcagggtgtgccatcaaagatgtcatggctctagtgaaggaatgtggtgctgtatttggtaccaaagagcacttcattgctactgagattttcacaaagaaatctgagagagagatgttcatgaccttggataattcagaagaaagatttgcatggctcaccatgaaacatgaatccaagaactttctttccatgtgccagatgtcttctagtgaaactgatggaaatgagactttttctgaaagtgatggtactgatctacatgaagatgatgaggtttccatacaatcagttattcgtcatcatcaagcattggaagccaatcttttttcagctgcctgcttacttggacaatattatatgacgtattatgataaaaataaaccaaggacgtcagtactaagtggatatgcatgggtacaagagactctgaggactccaggagagagtcaccacatgtttcgaatgaatacagacctcttctacaaattgcatgacttgctggtgagtacctataacctgaaagcaaccaaccacatgaactccatggaatcagttgctatctttcttttcatacttggaggtggtgagtccaatagaagggttcaaaataggttcaagcattccggtgaacacaattagtagaaaatttgaagaggtcttattgagtgtggttagtatgtgcaaggattacatatgtcccaaagatcctaacttcccaagggctcatagtaggattaagaatgacaaaagattatggccacatttcaaaaagtgcattggagccattgatgggactcatatcacagcaaacccacctcgtgaagattatgttagatacattggtagaagcaagagtcctactcagaatgtgatggcagcagtcgactttgacatgcgatttacatattcttctattggacaaccagggtctatgcatgatactagcgtcctttatcatgtgttagatgttgataaagatatatttccacaccctccacaaggtaaatattatcttgttgatgctggctacccaaataggccagggtatatggcaccatacaaggggcaaaggtaccatattcctgaatggagaagaggtcctccaccaagtggtgagcaagagtattccaaccaatgtcactcaagtgcacgcaatgtcgttgagcgcacctttggtgtgtggaagatgaaatggcggatccttttaaagatgcctacctatgcaatggacaagcaagaaatgatcattgcagctaccatgtgtcttcacaactttataagacagaattcgacaactgacaagtattttcgtaggtgtgatcgagatccaaattatgtcccaactataccaacaagatatgcaagatatgttgtttcccaaaatgcatcagatacttctactccaaagtctagtgataggtctatggacagatttcgtgatgacctagcaactgcattgtggcaatctagatga

SEQ ID NO: 49034 - DNA, 159 bp, Oryza sativa
  Clone ID: PAT_MRT4530_51653C.1
atggccgtagattctagtctccgagcagctctgcagtgtgcagctgcctcctgggctcctggctcctgccttccttacctcttcgctcttttaggcctcaatttgtatttcaacctggtgccccaaagtactggagacggccctggcctcaataggtga

SEQ ID NO: 49035 - DNA, 654 bp, Oryza sativa
  Clone ID: PAT_MRT4530_51654C.1
atggcagcaacagtagtagaggaaaatcaaggtgcaaataatgttgaatggacagatgaaaacactaggatagtttgtgagttgctcgctgaacaagttaggataggaaatcgctcaaatacccatttgaacaaggtggggtatgataatgtgattgcaaaatttgaagaaaagactggcttacgctatcaaaagctgcagttcaagaacaaatggagcaagctgaggaatgagtataatctatggaagaaactgatagctagagagactagattaggttgggaccaagctagggctactattgttgcatctgatgattggtgggcaagagccaagaaggatttgccaggttgtgcaaagttcaagttacgggggattcaaaatgaacatttgctccaacaaatatttgaagaccttcgaaacacaggagatgaccactgtaatcctactagtggaaatttaccgcaaagttcaacccaaccttccagtactattaatgtagatacaaaagctgtgaatgaaggtgatgatgatgatagtaatgatgaggatttctcacctcctcccaagagagagaaatcagctgcgtctgttgagtctcttgtcaagagggaggacacttcagggtgtgccatcaaagatgtcatggctcta

SEQ ID NO: 49036 - DNA, 1144 bp, Oryza sativa
  Clone ID: PAT_MRT4530_51655C.1
catctcttgcatttttttttctttgcattctcattaccacacttctctagaggcaatgtttataaacccccatacccccaaccaaagcccttctcaagttctcagtttcaacagtggcaacatctttgctttgctctctctccccttttgtttctttgtctcattgccagtgtaaatcccctgaggaatctagtaggttaaagagacgaagacaagaggagaaacaagggaagggacaagagcatatatttggatgctttcttgctgaatagggcgggtagtaccatcagcttgctgatctcagtcaaggacaagaacataacaagaacaaagtgaagctcaagatgatggtgcagatggagaagcttgtgaggcagtgcgacatggaggtcatgaagatggccatgctcaagcatgaagagactttcaagcagcaggtgtatgagctgcaccggctgtaccgcgtccagaagcagctgatgagcgacctcaacaggtcgccgccggagctaacctgccggcggcggcagcggcgcaagcagcacacccgccgccgggcgctcaacctgcagctccccgccgacgagtacatcgtcgtggccgacgccggcggccaagcgacgccgctgccgccgccgccggcgtcgtccagggaagacgagctagcgctgacactggccgtcggcggcggaggcgccgccggcaggaggaacaacaagcggcgggagagtagccccttcacgtccaactgctcgggcgggagcctcacgacggcgacatcgacgtcgacgtcgtcgtcgaccgactccgacggctcgctccggcagccgccgccgtgcccgagagcaatggcattcgatgtgctacatgacgggtcgacggcggcggcggcggcggcagcgccatggctgcagcagcggctcagccttaggatggcatgatgagatgattagatatgatgatattatgatcgatccttgtagaggttaatttgcaaggttgtaagatgtaacctcttctgccttaggatggcatgagatgattcagtacttggcagtaggtagcgtgctagctttgctaaattgctaatcaatgagtgtttgatggttaatcagatcaacaatggttaatttctcccttgatc

SEQ ID NO: 49037 - DNA, 530 bp, Oryza sativa
  Clone ID: PAT_MRT4530_51656C.1
gcagtggcaacatctttgctttgctctctctccccttttgtttctttgtctcattgccagtgtaaatcccctgaggaatctagtaggttaaagagacgaagacaagaggagaaacaagggaagggacaagagcatatatttggatgctttcttgctgaatagggcggtaggttcaggggggcacagctctttctgttgtgtgttgtgatctttgtggttgcttcagtgtgtgttctgaaaactgcacaacttcacctttttatgcattgagatatacacaccagcatcagagcatcttgcaactgattaatttgcacttgttattatgatctatctattgattcttctcagagttcgagtacatgtgtttcagcaactgaaaagctagctagctcctttctaagcctgcattttgcatctgtttttttattctttttttattttttttgcagggtagtaccatcagcttgctgatctcagtcaaggacaagaacataacaagaacaaagtgaagctcaagatgatggtgc

SEQ ID NO: 49038 - DNA, 2058 bp, Oryza sativa
  Clone ID: PAT_MRT4530_51657C.1
atggcgcggagcggggagctccccaaggtctcggcggcggcgacggccgcggtgcggcacgaggggtggatgctgcggtacgggcggaggaagattgggaggtcgttcgtccgcacgcgctacttcgtcctcgacaacaagctgctcgcctactacaagaagcagcccaaggacaacatggtgccagtgaaggcgcttcaaatagatggaaattgcagagtggaagacagagggcttaaaacacatcatggtcaaatggtctatgttctgtgcatatacaacaagaaagaaaaggagaatcatatcacgatgggtgcgcatgatatcgaggatgccctggtctggaaaaagaagctagagctccttattgatcagcaacaagacactatgacggctaaaaaccgcaaagcttttgcttcactggactttgacatggagtttggaggcccattatcattctctgatcgtgacagtgggcaagccctcctgattcggtacatgattggaccaaggagcctgatattgggctgtcagatcagaatgacaccaaccatgcttactcaagaaagaactggcggctacttagatgtcagaatggcaagaagctgtagccgagcaatgagagctgttggtgtggtggaagccacatgtgaatccatttttgggctaataatgagtatggatgtaacacgatatgagtgggattgtagcttccagtatgggagtttagttgaagaggttgatgttgtactgttccgatctactgagcatcagaattgtggtccccaaccaggatttgtgagggcgtttattgaaagtggaggttttaaaatttctcctctcaaatgcgtcaacgggagaccacgcactcaagttcaacaccttatgcaaattgatctaaagggatggggcgtcaactatttttcatcgttccagtactactctttgttgcagatgctcaactgtgttgctggattgcgtgagtacttttcccaaactgatgatattcatccagttccgaggattcctgtgatgagtactatggctactgtgtccaaattgaaaaaggataagaaactccaagaaactgacttaaagacaaaacaagctgattttggacaagtcgataacaaaaatttggatatgatagatgaagagtcagaagaagatgatgactatcaagttcctgaagctaatcttgaggaggcacctaccagatctgacagtgatgctaagtacacagatccaatagatttgtcttgtttttcgggcattattcgtcgggatgcaaatgagaaaagccgtaactgctggacagtacctgatagcaagctctttaaagttcgtagtgagagctttccacatgacaaatcaaaggttcccgcaacaaagtaccttatggagcttgtagcaatcgactggcttagggacataaagcgaatggatcatgttgctaggcggaaaggatgtgcagctcaggttgctgctgagaaggggatgttcacctttgttgtaaacattcaattttcccttgaaaaataccagttttcattctgtgattccatcagggctcgtcttctttattttggtcacgctgatcaggtctgtttgcatttgcagattcctggatcaagccattacagcttggtcctctattttgttacaagaaccttggaaaaaggatcactgttacaacgttttgctgatggcgatgatgatttccgaaatagcagattgaagctcatcccatctgttccaaagggatcttggatagtgcgacagagcgtcggaagtaccccttgcttattgggaaaggctgttgattgcagttatatgcgtggtcaagagtacatagaagtagatgtagacattggttcctcagcagtggccaatggtgttctgggcttggtgtttggcgtcgttacgactttaatagttgacatggcttttcttatacaggcaaacacatacgacgagctcccggagcaacttctaggtgctgcacggctatccaatatcgaacccagctcagcaatagttcctgtacttgataaatag

SEQ ID NO: 49039 - DNA, 364 bp, Oryza sativa
  Clone ID: PAT_MRT4530_51658C.1
aaaaaaaaaaatttccggggcttattcatttcccccggtgggagttaaatcccggccaggtccaaaagggggggccttcccagggaaaattttttccctgggagccggcccaagttgggttgctgccctttgctaaacccggggccttggggggggaacaaaaataacgccccccacttaaatccccccaaaagggattccccaaaaaagtaaacccgcctttccccccacataaacatcaccaggggaaaaccctctttcggggggtttttttggggtgggcccctaaacatttggtccctatttgggggaaaacggggaaaaaccctttcccttgggcacccttgcaaaagcattaaaacct

SEQ ID NO: 49040 - DNA, 583 bp, Oryza sativa
  Clone ID: PAT_MRT4530_51659C.1
gaactagtggatccccgggccgcggggaaaaatagaaacacctcgtcggcgtttagaaaggcggttggggttcggcggcggcggcggaggccggtgagtatccgcggccgcgcgaaccagtcgcctgagctcccagaagcatccggcgctgcggctcctccgtgatttgtgtatttttccccttgaatcccgcgccgtcgcggccgccgtgtgctcttgccgccggcgagaaggggggaaaacgcccgcggagatgtcggtcctcatcgtgaccagcgtgggggacatcgaggtggacctccacaccgacatgtgccccctcaccaccaagaacttcctcaagctctgcaagatgaagtattacaatgggtgcctgttccacaaggtggagaaggatttcttggcacaaactggggacccaactggaacaggagctggaggcgattctgtatacaagttcctttatggtgatcaagctcgattttttgatgatgagatccgaccagaccttaggcattcaaaaaagggaactattgctatggcgagtgctggtgaaaattgcaatgcctcgcagttctatatc

SEQ ID NO: 49041 - DNA, 1019 bp, Oryza sativa
  Clone ID: PAT_MRT4530_5165C.1
ctagtggatccccgggctgcaggccctgcgccgcccccggccccccgttcctcgccatggcggccccggcggacgactactacggcgacgacgacgacgagtacgacgactacaacccccacccctacggcggcggctacgacatcttcgccacctacggctccccgattccgccctcccccaccacctgctaccccgtctcctccgctgctcctacggccccgccgcctaagccgtcgcctactccgcctccggcttctccaccgcctgcgcccactcccccgcaaacgcggccgccttctccgccgccgcagcagcagcagcctcggccggtttcgccgccgcccgtggcggagccgtactactggcccaagccctacgactacggggatgcgccgcgcgagcagccggcgtacgccacgccggaggtcttccggggctggcccttcttcgcgggggcgcgctgccactcgcggtgcggcggccgcgactactggaggcagttcatgcgggggctggattacctcttcggccacgccgatggctacggggagcgccgtattggggtggactaccacggcgtccccgtctacgccaacaggaagggaggcgtcgaggaagccgtcgtcatacaagtggagccgccggccaccgggactgtagagtggcaccacgccgccgacgacccggagtacaactacaacaacggcaataactaccagcacgtgtacaaagaggaggaatctcagtatcagtttagtgaacaaccgctacatgttcttgttgagcccccagaaacagtttattctcagaagttggagtactatgaggtttgtctgtcatctacaaatgctgtttacagtcaaatctttgcaactctcctggacctggcccaattaggtcctcctgtcagggccttcaacgggaacctggagagcgaggaaccaataataaaaatagaagttctaaagctacatatgacggcaacgaggaatggtgacatctacagctcgacctga

SEQ ID NO: 49042 - DNA, 3129 bp, Oryza sativa
  Clone ID: PAT_MRT4530_51660C.1
atggccagctcctcctctaccgcagtttccaatccgctattcggggttcaagtctccgagaaattgagcaagcagaatcatgcgctctggagagcgcaggttctcacggtgattcgtggcgcacgcctggagggtcacatcaccggcgaaacggcagtacctgccgcacaactcagcaagacggtggaaggaaaggaggtcaaattctccaatccagcgcatgacgaatggattgccgcggatcagcagttcctcgggttcctgttttcctccatgacgagggaaacgctagcgcaagtcgctactgccgcaacggcggccgaagcctggaagacgatccaacggatgttcacagcaaaaacgcatgctcaaaccatgaacgtgcggctggccctcatcactatgaagaagggtaatctttcagtttctgattatgttggaagaggccggaacaccaacagcaaccgcggccgtggctccggccgtgggcgtggctcaagtcaacagcgcggcaacgacggccgccccttatgccatgtgtgctacaaacgtggccacgttgctgcaaattgctggcatcgctatgacgaagactacgtcccagatgacaaactcgtcgccgcagctacatacagccatggcgctgactcgaactggtatgttgatacgggtgctaccgatcacatcactagtcaactggagaaactcaacacgcgggaggtgtacaagggacatgatcagattcacaccgctagcggtgcaggtatgaaaatcaagcacattggtcatgctatagttcataccccaactcgtcctttacatcttaataatgttcttcatgtgccacaggccgctaaaaatcttatatcagcaactaaacttgcctctgataactctgtttttgtggaaattcactctaagtattttttgattaaggatcgaaccacgaggagcacggttcttaaggggccacgccgccatggtctctatccgcttccgtccacatcatccaccaagcaggcctttgcagttgctccatcgcttgagcggtggcacagtcggctcgggcatccttccattcccattgttatgaaggtcattagttcaaataagttaccgtgtcttagagaatctaataaagagtcagtgtgtgatgcttgtcaaaaggccaagagccatcaattaccgtattccaattctatgagtgtgtccaataaacctctagaacttatttattcagatgtatgggggccggcctccacctcttttggaggaaagaaattttatgttagcttcatcgatagctatcgcaagttttcttggatatatttcctcaagcataaatctgatgtctttgaaaagtttcatgactttcagcagcttgttgagcggctttttgatcgcaaaattatagctatgcaaaccgattggggaggagaatatcaaaaattaaactccttctttgaaaaaatcggaatctctcatcatgtgtcatgtcctcacactcaccaacaaaatggttcagctgaaaggaagcatcgactcatagttgaagttggtctagctcttcttgcatatgcatctatgccacttaaatattgggatgaagcctttcttgctgccactcatattattaatcgcattccctccagaattcttcaatatgacacacctctagaatgcctatttaaccataaacttgactattcttctttccgtatttttggttgtgcttgttggccaaatcttcgcccttataatgctcataaattgcaattccgctccatgcaatgtgtttttcttggcccaagccacacccacaatggatataagtgccttgacatagccacgggaagaatctatatttgtagagatgtcgtctttgatgaaaatgtttttcctttatctaaatttcactccaatgcgggttcaagactacgcagtgaaattgcccttctaccctcacatcttttatctcacacttctcatcaagggggagaacataacaaccatatgcttgatttttataatgtttcatctgatcagactgatgagaatgcagatatagatggaggaaatacgacagatacaactaatgatgatctgggtaatcaattgcatgaattgagatcctctgtgatgcaggacatgcactttggaggagaagcagccactcatgccacagaagatcaatcaatggtcgcagcaaagcccagaacaaggttacaaagtggtatccgcaaggaaaaggtatatactgatggaacagttaaatactcatgttttacttcatctggtgaaccacaaaaccttcatgaggctttaaatgataagaactggaaacatgctatggactctgaatacacagccttaatgaagaataaaacttggcaccttgttccagcaaaatcagatagaaatgttatagattgtaaatgggtatacaagattaaaagaaaagctgatggaagtctagacaggtataaagctagactagttgctaagggctttaaacaaagatatggcatagactatgaagatacattcagtcctgttgttaaagctgctacaattagagttattctgtctattgctgtatctagaggatggagccttcgtcagcttgatgtaagcaatgcttttctgcatggcatcctagaggaggaggtttatatgagacaacctctagggtacgaggtgtcttctcttcctaatcatgtttgcaaattagataaggctttgtatggtcttaaacaagcccctagagtatggtactctaggttgagcacaaaattgcaagaactaggatttcaagcatccaaggctgatacatctctatttttctataataagggtgtagtgagtatgtttgtcttggtttatgttgatgacatatttgttgctagttctatgcaaagtgctactgcagctttgttacaagacctgaacaaagagtttgctctgaaggatcttggagaccttcattatttccttggaatagaagccaccaagattgggcaggttgtctatatgacagaagatcaatttgcggatggatttacaaagtccttaacagagagacaattaaagctgtttcggcacaatctcaaccttagaagtttagattga

SEQ ID NO: 49043 - DNA, 873 bp, Oryza sativa
  Clone ID: PAT_MRT4530_51661C.1
atggccagctcttcctctaccgcagtttccaatccgctgttcggggttcaagtctccgagaaattgagcaagcagaatcatgcgctctggagagcacaggttctcatagtgattcgtggcgcaggcttggagggtcccatcacgggggaacggcaggacaatccggcacaatcaaccaaacggtggaaagaaaagaggaaacgctggggcaagttggtactgccgcaacgacgggcgaagcctggaaagaggatccagcaaatgttcacagcaaaaacgcatgctcaaaccatgaacgtgcggctggccctcatcaccatgaagaaggatgagatagcaacagcaggcaagtccatggatagcgatgaactgatcgcatatatcctgaatggactggatgaagactttgatccagtcgtctctgcgctggtggccaaaactgaatcggtcacagtagcagaggctgtctcgcagctcctgagcttcgagagcagattggcgcttcgtcacgcaaggctccgcgaatgcagccagcagaaaccgtgggggcttctcctcacgtggtggcgcaggaagaggccggaacgccaacagcaaccgcggccgcggctccggccgtgggcgtggctcaagtcaacagcgcggcaacgacggccgccccttatgccagattgctggcatcgctttgacgaagactacgtcccagatgacaaactcgtcgccgcagctacatacagccatggcgctaactcgaactggtatgttgatacgggtgctaccgatcacatcactagtcaactggagaaactcaacatacgggaggtgtacaagggacatgatcagattcacaccgctagcggtgcaggccgctaa

SEQ ID NO: 49044 - DNA, 699 bp, Oryza sativa
  unsure (1)..(699): unsure at all n locations
  Clone ID: PAT_MRT4530_51662C.1
attcccgggccgacccacgcgtccggtttgatttctgtaggaatttgaagttgaggtgattgtggttgcaaaagagagagaatctggatgtgtgccatctttctattatttaggtcgttgattgcttaagtttcaatctaatgctaaatttattgtattaccattctataacttttgtctaacacccctggtttaaaattttcatgtggaacctgctatggattggttgggatattttcatgagatctcttcatcaaagcatgatctgtgctgttattacaatataaatggtgcacgttgctcttgtttacacttatctgtgatttgttaatcttctgttaaacaatttgctccctatgtttgtcctgccctgaaatctggacttgtttagcacaaatggtgcattttctgagacatgtgaatggctttatctctaggtctatggtttaatttggcgtaggttgatttttgattctatacttttgtttccctatcatttgacgctttacacacaaaaaaaaaaacttcaccgttattgactgactggcattgaatatgaagcatctagctgtaatagtttctcagccattagtatgggtacgagttgttatgccatactgattgnatttatcctttttttcctggagtgggcaagggaagctgtnttttgttttattcatcctcagtaaaaattttcat

SEQ ID NO: 49045 - DNA, 2523 bp, Oryza sativa
  Clone ID: PAT_MRT4530_51663C.1
atggccagctcctcctctaccgcagtttccaatccgctgttcggggttcaagtctccgagaaattgagcaagcagaatcatgcgctctggagagcacaggttctcatagtgattcgtggcgcacgcctggagggtcacatcaccggcgaaacggcagtacatgccgcacaactcagcaagacggtggaaggaaaggaggtcaaattctccaatccagcgcatgacgaatggattgcagcggatcagcagatcctcgggttcctgttttcctccatgacgagggaaacgctggcgcaagtcgctactgccgcaacgacgggcgaagcctggaagacgatccagcagatgttcacagcaaaaacgcatgctcaaaccatgaacgtgcggctggccctcatcaccatgaagaagggtaatctttcagtttctgattatgttggtaaaatgaaatcgtttgcagatgagatagcaacagcaggcaagtccatggatagcgatgaactgatcgcatatatcctgaatggactggatgaagactttgatccagtcgtctctgcgctggtggccaaaactgaatcggtcacagtagcagaggctgtctcgcagctcctgagcttcgagagcagattggcgcttcgtcacgcaaggctccgcgaatgcagccagcagaaaccgtgggggcttctcctcacgtggtggcgcaggaagaggccggaacaccaacagcaaccgcggccgcggctccggccgtgggcgtggctcaagtcaacagcgcggcaacgacggccgccccttatgccagattgctggcatcgctttgacgaagactacgtcccagatgacaaactcgtcgccgcagctacatacagccatggcgctaactcgaactggtatgttgatacgggtgctaccgatcacatcactagtcaactggagaaactcaacatacgggaggtgtacaagggacatgatcagattcacaccgctagcggtgcaggacatgcactttggaggagaagcagccactcatgccacaaaagatcaatcaatggtcgcagcaaagcccagaacaaggttacaaagtggtatccgcaaggaaaaggtagaaatgttatagattgtaaatgggtatacaagattaaaagaaaagctgatggaagtctagacaggtataaagctagactagttgctaagggctttaaacaaagatatggcatagactatgaagatacattcagtcctgttgttaaagctgctacaattagagttattctgtctattgctgtatctagaggatggagccttcgtcagcttgatgtaagcaatgcttttctgcatggcatcctagaggaggaggtttatatgagacaacctccaggatatgaggtgtcttctcttcctaatcatgtttgcaaattagataaggctttgtatggtcttgaacaagcccctagagcatggtactctaggttgagcacaaaattgcaagaactaggatttcaagcatccaaggctgatacatctctatttttctataataagggtgcagtgactatgtttgtcttggtttatgttgatgacataattgttgctagttctatgcaaagtgctactgcagctctgttacaatacctgaacaaagagtttgctctgaaggatcttggagaccttcattatttccttggaatagaagccaccaaggtatgtaatggtttaatactgtctcaagagaagtatgtgacagatttactgaaacgagttaatatggataagtgtaagcctgtaagcacacctatgtcagtatcagaaaaattatccttgcatcaaggagaagttcttgcatctggagatgctacaaggtacagaagtatagtaggagcactacagtatctgacattaaccagacctgacatctcattcttagtaaataaggtgtgccagtatctacatgctcctaccacagttcattgggcagctgtaaagagaatcctgagatatttccagcaaacaacaaagttaggtcttaagattactaaatctccttcatttcttgttaatggtttcactgatgcagattgggcaggttatctagatgacagaagatccactggagggtttgctgtttatcttggttctaacctagtttcatggagtgcccgtaaacaagcaacagtgtcaagatcaagtacagaagcagaatataaggccttagctaatgtcattgccgaattaatgtggattcagaccttgctgcgagaactgagagttcaagcgcctcaagctgcaaaggtatggtgtgataatttaggagcaaaatatctttctgctaatccagtgtttcatgccagaaccaaacatattggggtggattatcattttgtgcgtgagtgggtttcaaggaaactcctagaaattgaatttatctcttcagaagatcaagttgcggatggatttacaaagtccttaacagagagacaattaaagctgtttcggcacaatctcaaccttagaagtttagattga

SEQ ID NO: 49046 - DNA, 2601 bp, Oryza sativa
  Clone ID: PAT_MRT4530_51664C.1
atggccagctcctcctctaccgcagtttccaatccgctattcggggttcaagtctccgagaaattgagcaagcagaatcatgcgctctggagagcgcaggttctcacggtgattcgtggcgcacgcctggagggtcacatcaccggcgaaacggcagtacctgccgcacaactcagcaagacggtggaaggaaaggaggtcaaattctccaatccagcgcatgacgaatggattgccgcggatcagcagttcctcgggttcctgttttcctccatgacgagggaaacgctagcgcaagtcgctactgccgcaacggcggccgaagcctggaagacgatccaacggatgttcacagcaaaaacgcatgctcaaaccatgaacgtgcggctggccctcatcactatgaagaagggtaatctttcagtttctgattatgttggtaaaatgaaattgtttgcagatgagatagcaacagtaggcaagtccatggatagcgatgaactgatcgcatatatcctcaatggactggacgaatgcagccagcagaaaccgtgggggcttctcctcgtgtggtggcgcaggaagaggccggaacaccaacagcaaccgcggccgtggctccggccgtgggcgtggtcaagtcaacagcgcggcaacgacggccgccccttatgccatgtgtgctacaaacgtggccacgttgctgcaaattgctggcatcgctatgacgaagactacgtcccagatgacaaactcgtcgccgcagctacatacagccatggcgctgactcgaactggtatgttgatacgggtgctaccgatcacatcactagtcaactggagaaactcaacacgcgggaggtgtacaagggacatgatcagattcacaccgctagcggtgcaggtatgaaaatcaagcacattggtcatgctatagttcataccccaactcgtcctttacatcttaataatgttcttcatgtgccacaggccgctaaaaatcttatatcagcaactaaacttgcctctgataactctgtttttgtggaaattcactctaagtattttttgattaaggatcgaaccacgaggagcacggttcttaaggggccacgccgccatggtctctatccgcttccgtccacatcatccaccaagcaggcctttgcagttgctccatcgcttgagcggtggcacagtcggctcgggcatccttccattcccattgttatgaaggtcattagttcaaataagttaccgtgtcttagagaatctaataaagagtcagtgtgtgatgcttgtcaaaaggccaagagccatcaattaccgtattccaattctatgagtgtgtccaataaacctctagaacttatttattcagatgtatgggggccggcctccacctcttttggaggaaagaaattttatgttagcttcatcgatagctatcgcaagttttcttggatatatttcctcaagcataaatctgatgtctttgaaaagtttcatgactttcagcagcttgttgagcggctttttgatcgcaaaattatagctatgcaaaccgattggggaggagaatatcaaaaattaaactccttctttgaaaaaatcggaatctctcatcatgtgtcatgtcctcacactcaccaacaaaatggttcagctgaaaggaagcatcgactcatagttgaagttggtctagctcttcttgcatatgcatctatgccacttaaatattgggatgaagcctttcttgctgccactcatattattaatcgcattccctccagaattcttcaatatgacacacctctagaatgcctatttaaccataaacttgactattcttctttccgtatttttggttgtgcttgttggccaaatcttcgcccttataatgctcataaattgcaattccgctccatgcaatgtgtttttcttggcccaagccacacccacaatggatataagtgccttgacatagccacgggaagaatctatatttgtagagatgtcgtctttgatgaaaatgtttttcctttatctaaatttcactccaatgcgggttcaagactacgcagtgaaattgcccttctaccctcacatcttttatctcacacttctcatcaagggggagaacataacaaccatatgcttgatttttataatgtttcatctgatcagactgatgagaatgcagatatagatggaggaaatacgacagatacaactaatgatgatctgggtaatcaattgcatgaattgagatcctctgtgatgcaggacatgcactttggaggagaagcagccactcatgccacagaagatcaatcaatggtcgcagcaaagcccagaacaaggttacaaagtggtatccgcaaggaaaaggtatatactgatggaacagttaaatactcatgttttacttcatctggtgaaccacaaaaccttcatgaggctttaaatgataagaactggaaacatgctatggactctgaatacacagccttaatgaagaataaaacttggcaccttgttccagcaaaatcagatagaaatgttatagattgtaaatgggtatacaagattaaaagataa

SEQ ID NO: 49047 - DNA, 593 bp, Oryza sativa
  unsure (1)..(593): unsure at all n locations
  Clone ID: PAT_MRT4530_51665C.1
ttcgacaaaactggaactccaccgcggtggcggccgctctaaactactggatcccccgggctgcacgaattcggcaccacggatactatggggaacaccatgggcatctacattcattccctcatcaaaggtttacggaccatttattcccatcattgtctatgagagtaagaaattgccacatgctcctatgcacctccaaacctggcctcagcatactgcggatcatgttcacgcatcatataccaatgtctcccttttggacatactacaacaaattaatatttagtcttacttcagttactttacacgggacaaacttgaaatcggaaaaattctcccattgatgtcccaccgcccgatcctgtctctaactttctatctcaacaacatcctaacggtgtctcgaacatcccccctattcaacgttaatgagctcccccaaacgaagtactttgaatgtgggtaacttcctagttcaaatttaagggacttactttccgcccctttaaaagttttttnaacccgatctaacctatccnacccagnttaaggtnaaanatntttgtcccaacccccnctaaccactcccg

SEQ ID NO: 49048 - DNA, 488 bp, Oryza sativa
  unsure (1)..(488): unsure at all n locations
  Clone ID: PAT_MRT4530_51666C.1
tttttttttgtacanaaacaattgttctagtttttttctctgtttttttccttttgattcatatcaccattttatacacaaaagaagaaatggcacatgactaactatacaacttgcaatctatctcctttaaacactatataatccacgaactaacaaaaatgacagaccaacacaagattgctgtccacgatgcacaatcaccctttgctctgctagattgctatttgtacagccacaactggaagtctgtaaccccacaaaatcacttcttccggcaggtacaatgtcaccagttgcaacaccattcttcaaaattggtcccaccagtanacatttggtggcagcacagcatcacttgcctggcaacacctggcatcagcacatccattccaagcgtcatgctcaacatgcatttgcgcagcataaacttgcaaacaggccagttccccacgcccttttgctagtttcagcatggacagttgcac

SEQ ID NO: 49049 - DNA, 399 bp, Oryza sativa
  Clone ID: PAT_MRT4530_51667C.1
atgcccccaagggtcgagaatacgacacccgcaggcatcgtcgttgctagcccgaaggctaggcttttaaccgtagttttcctaccctcctgcgaatgcctatcaggttcagcagccaaccaccatctaaagcctttcaacgcgcagccaccgcaccaacgtctcgctgttggccggccatcaaagcaggatttcaacctccgacgcacactagatccatccatgccatcgcacggggctcctgttgccatcgacgccgctcacaccgaccacggcgtcatgctggtgttgacgctgctagctctgtcgcgccgtccacagcctcgcgtcatgcggcgtgtcgtccccgcccccgtcttgcaccaccgcccgcaccggctgctccctagccagttctga

SEQ ID NO: 49050 - DNA, 237 bp, Oryza sativa
  Clone ID: PAT_MRT4530_51668C.1
gagctcggtaccctaccgaatctcagcgaaatattaagttggaagatggcgctagcaattagcattggcatatttgttgcttggttaggcggacgaggcatcaatttaatggccactcaaccattaatcattacaggcttattgatcggcacaattatcggcattgccttttttgggggaataccagttgggccattgatcgccgcaggcattatgtcgttactagttggcaaattg

SEQ ID NO: 49051 - DNA, 231 bp, Oryza sativa
  Clone ID: PAT_MRT4530_51669C.1
atgggtcagcagctcaaggagctgacctaccatggtctgggaccacgcgggcggtccaccgtcggttcacgaaatcggcagcccagcggcggcacagcaaggcagcatggcggcaacatggcacggtgtggccgcggcgacagcgtgcagcatggtgcgacggtagcggcaagctcacagcaaaggcggcagcggcgcggcaagacgtcggtggcggcaggcgcacactga

SEQ ID NO: 49052 - DNA, 507 bp, Oryza sativa
  Clone ID: PAT_MRT4530_5166C.1
caacaagtacacgcagctgatcgttgttgatgatgatgaagaaggatacaggagaacagtaggatacctgtgcagattgagctttcttgttgaaatctctactgcagagttggggacattactagttgaacggaaattactagggctgctactactgctactagttgatacaaaatcataagctcattcaagctgtacatactacggcgatgctcccggttgtcctctttgctctctagctccctaagttgtcgctcccggcgtcggttagtatggtaagcctcctcgccaacttaatgaactcgctgaatggctcgtcgccggcgtgcctcacttcgccggtggcgccacggtagagcacacggctcctcagctccgcgctgtcgatgcagaacatctcggacagccggccgtagagctgctcgaacgaggccagcgacgagaggtcgaggttgcggccgaccgtgtcggactcgatgaaacacctgtgcacgtgcccagggctcc

SEQ ID NO: 49053 - DNA, 442 bp, Oryza sativa
  Clone ID: PAT_MRT4530_51670C.1
ggatggatacggtgggacccgtatgtcattagcacatggattaagaagggattaaaacaaagattaagcacaatagggcccacgtgtcatggagaccttagaggaggattaacaaggtgattactgtgcacacatgattaaggaaccatgggtcccgcatgtccgtgcctcacctgctctgttttatccccttttctttcctgctcctcttcttgatctctcctctcgttcccctctctgctcctctccaccgagcggcgcagggcgaagaccggcgtgggcgcggggcgctgcggcggcagccggcgttccgacggcggacgaggcgggaccggtgccggcgcggcaacgacagccgatgcggcgacggggaatgcaacgaggcagaggggcacgcgaggaggcggtgctcgacgcggtgtggcggcacaacggaggaaga

SEQ ID NO: 49054 - DNA, 281 bp, Oryza sativa
  unsure (1)..(281): unsure at all n locations
  Clone ID: PAT_MRT4530_51671C.1
aatccttcttttttttttcttattcttgttttgcaaaagtttttatttcccagtgtctgacttgcgaaaacaccctttttctccacaaaccaaccgcaaaaccacctttttaccagggcccccaaacttaaaaacaagcttttgggggagaaatccaggtggggggtgttttgggaatccccccccagggtttaccatgtnnaaaattgaaatgtcccgccccccggaatggcccccaaaacccaataacgggcgatggctgattactattaccgggggcc

SEQ ID NO: 49055 - DNA, 1140 bp, Oryza sativa
  Clone ID: PAT_MRT4530_51672C.1
atgggagagggtggcatcttgctggggccgtcggctctcggccggtggggccccttccgccgcaccctcttcccggcgtggagcgccgccgcgctggacaccgtctccggcctcggcctgctgctcttcctcttcctggtcggcctcgagctcgacttccgctccgtgcgccgcgtcgggccgcgcagcgtggccatcgccgcggcgggcatcgcgcccccgttcctcgccgccgcgggcctcgtgccgctcctcgacgtcgccgtcccggcgccgcgccgcgcgtccttcctcccgctctgcgtgttcgtcggcgccgcgctctcggtgaccgcgctccccgtgctcgcctgcatcctcaaggagctcagcctcctcggcgtgcccttcggcgacaccgccatggcggccgccgccgtaaacgacgtcttcgcttgggtcctcctcgccctcgcgctcgccgtctccggcggcggaggcggcgagccgaaggggccccctctcgcgccggtgtacatcctcgcgtcgggtgccgccttcgtggcgttcatgctcggcgcgctccgcccgctcatggcgcgcctggcgcgccgccttggccccgaccgcgcgggcgacctggcgtgcaccggcgccgtggcgtgcgtgctcctcgccggcgccgccaccgacgccatcggcgtgcacccggtgttcggcgcgttcgtgttcgggctggccatgccgcgggagggcggcctcgggagcgcgcgggcgagaagcggcctgcacacggacatcgacaacgtccgtggcgcggccgcgtggggcatggtcgcgctcgtcgtggccgtggccatcggcgggaagttcgccgggacgttcgcggtggccgccggcaccggcatgcccaggcgcgaggccgccgccctcggcgtggccatgagcgccaaggggctcgtcgagctcatcgtgctcaacatcggcaaggagaggaaggtgctggacgacacgacgtttgccatcttcgtgatcatggcgctaacgacgacggtgctcgcgacgccgttcatgacggcgctctaccggcgcacgccgacggcgaccacgccggagagcgatgacgtggagctcaatggtggcgacgcttgtccggcttag

SEQ ID NO: 49056 - DNA, 1362 bp, Oryza sativa
  Clone ID: PAT_MRT4530_51673C.1
atggcggcggcggcggtcaccgtgaagatggcgtcggacgggatgtggcagggggagaacccgctggacttcgcgctgccgctgctggcgctgcaggtggccgtcatcctggtgatcacgcagggcctcgcgctcgcgcttaagcccctgcgccagcctagggtggtcgccgagatcctgggtggcatcttgctggggccgtcggctctcggccggtggggccccttccgccgcaccctcttcccggcgtggagcgccgccgcgctggacaccgtctccggcctcggcctgctgctcttcctcttcctggtcggcctcgagctcgacttccgctccgtgcgccgcgtcgggccgcgcagcgtggccatcgccgcggcgggcatcgcgcccccgttcctcgccgccgcgggcctcgtgccgctcctcgacgtcgccgtcccggcgccgcgccgcgcgtccttcctcccgctctgcgtgttcgtcggcgccgcgctctcggtgaccgcgctccccgtgctcgcctgcatcctcaaggagctcagcctcctcggcgtgcccttcggcgacaccgccatggcggccgccgccgtaaacgacgtcttcgcttgggtcctcctcgccctcgcgctcgccgtctccggcggcggaggcggcgagccgaaggggccccctctcgcgccggtgtacatcctcgcgtcgggtgccgccttcgtggcgttcatgctcggcgcgctccgcccgctcatggcgcgcctggcgcgccgccttggccccgaccgcgcgggcgacctggcgtgcaccggcgccgtggcgtgcgtgctcctcgccggcgccgccaccgacgccatcggcgtgcacccggtgttcggcgcgttcgtgttcgggctggccatgccgcgggagggcggcctcgcggagcgcgcgggcgagaaggtggcaccgctggtgtccgggctgatgctgccgctctacttcgccacgagcggcctgcacacggacatcgacaacgtccgtggcgcggccgcgtggggcatggtcgcgctcgtcgtggccgtggccatcggcgggaagttcgccgggacgttcgcggtggccgccggcaccggcatgcccaggcgcgaggccgccgccctcggcgtggccatgagcgccaaggggctcgtcgagctcatcgtgctcaacatcggcaaggagaggaaggtgctggacgacacgacgtttgccatcttcgtgatcatggcgctaacgacgacggtgctcgcgacgccgttcatgacggcgctctaccggcgcacgccgacggcgaccacgccggagagcgatgacgtggagctcaatggtggcgacgcttgtccggcttag

SEQ ID NO: 49057 - DNA, 510 bp, Oryza sativa
  Clone ID: PAT_MRT4530_51674C.1
cttacatgtaggtcaacattgacctcaatgcccgtggacgccacccaggtctccgaactcatccaggcctccctctcgggggacaatgagcgcatcaaacaggccaccaagctgctcaagacctacaccaagcacaaggcctccatccgagtcctcacctacatcctggtcaactccacccagctggcacacagacagatggcagctgtcctgctcaagcgcaacctgatcaatctctacgagggactctcagttgaggagaaggcggaatttaggtctttgcttttgcagcaatacgccaaggagccgcatttgttggtccagagaggtatcgccacgctcatcagcattctgctgccagtggttgagatcaagaattgggtggaactacagcaacttttggacaccgctgtccaatcagccccctaatcagctgctactttcgtgctgcttgacagcatcctttatcacttcaagccttcagctgcactctacaactatcttctcaat

SEQ ID NO: 49058 - DNA, 596 bp, Oryza sativa
  Clone ID: PAT_MRT4530_51675C.1
gccaacacagagtgattcttaccactggaaaggtatgaatgcccaccaacgccaagaaatcctcaatgaacaagacaagcaaagaaaggaaactgaaaaaattaaaaagcttagagatgaagaggaaagaatgtatgctttacaggcagaagtatagatctttattccgacattttactaaccttccaaagcatcaaagaaaaatgcaaatccaaatggaaagagaaaagcaaagaagaaaggatgaactcctcagaaaccaaaaagaattcaatcttcttaaaaatgaagaacaacaaatcaaaatcaaaaccatgtatggctaaataattttttctgttgcggatatttcgttatgaagtataacaaaaaatctctataacagctacctattttttattttaacattactacataaaatgtttatttgagtaattttaatacaattgtattcatgtagctgaccatcctctaaaaagtgccaattattctctcttgaatttcaataaagagcaaagtaaagtatacagataactgaggaaaaaatttatattataaaattctatcaagaatgatgaaacaaaaaaactttaatt

SEQ ID NO: 49059 - DNA, 815 bp, Oryza sativa
  unsure (1)..(815): unsure at all n locations
  Clone ID: PAT_MRT4530_51676C.1
gcacgaggggactgatttttaatggttgtgacccgctccccccccgcggcagtcccgaagcgaagttcaatccatccccaaatgtcccggccaacccaacaccaccccaccgccgccgccaccgccgtcatcctcctcttacttgcagtatccccggcgccgtccggcgcggatccggacgacgagcggtgcctgtcgagcctccagcaatctttgtccggcctccgcaactggagcaaggcctccttctccgccccctgcgagggcttcatctcccacctccagggcgtcacctgcaacaacggccgtgtctacaagctctccctcccgggcctctccctcgccggcaccatcccgccggacctctccaactgcaccaacctccagtcgctcgacctctcctccaacgcgctctccggcgccatccccccggagctctccggcctgctcaacctcgccgtgctcaacctctccgccaaccgcctctccggcgccatcccaagggacctcgcccgctgcgcatacctcaacgttatagatctccacgccaaccagctcaccggcagcatccccgacgagctcggcctcctcgtccgcctctccaccttcgacgtctcctacaaccgcctctccggtcccatcccggtgctcctcgccaaccgctccgggacgacggggaggttcaatgccacctccttcgtcgggaacaaggacctgtacggctacccgctgccgcccatgcggnggcacgccctctccgtcctcgccatagtcggcatcggcctcggcagcgggctgctcagcctcgtcctcag

SEQ ID NO: 49060 - DNA, 3637 bp, Oryza sativa
  Clone ID: PAT_MRT4530_51677C.1
atgaccgccggcggcgggatgaaggtggaggtgcgggtggtgggcggcgcccggagctgtttcgccgcgctcccgctccacctgatccacgccctgtcccgcacctccgtttccggcgacctcccgccggtcctcgcgctccacctccgcgccgccgccaccgccaccgccgcccgctggtccctcgcctggtccggcgccgcgtcccggtccagcgccatcgaggttgctcaagagctggcagaatgcatctcgttgcctgatggaacagttgcacagttgagtgtagctcgctccctggccaaagctgattcagtctgtatagaacctttcagcgaggatgattgggagatactggagagccgtgctgatttggctgaagaaacaatcttgactcaggttggcgttgtttacgagggtatgaaattcccattgtggttggacggccataatattgtgaagtttgttgtgacctcatcttctccaaagaaatcactggttcaacttgttccgggaactgaagttgctgtggcacccaaaaaacgtagagaaaactccagccaggatgtgcaaaagcaaagtgcactgaaggaagaagctcaaacaaaggctctcctgcgtgttcaagcagcagataggaagtatgtgcataaattcaaatataaaggtgttgaactgggggtgattctcagctatgctgtgctggtacatccagatacagctgcaagagcttcaatttccaatcttcagttggtcactgtttcatccaaatcatcaccaaagagacttgctcaaaaaggcaaagaagttactcaaaagaagggtattttactgcctaaagaaagggtccgagaagtggtagtctatatcttattctcagattcagtttccaaagggcatgttatgcttccccactctattcgccactacataagtgcagacattcattcatgggtttatgtgaagacattctcagctaatgtcaagaatgatcaacctatattgacaataagtccgttacattttaagatgcaagaaaaagttgctcatgatggtagtgaattaggaagtcaagaagcgaacatttggaggaaaactagcatcccttcagaaaatagagatccctttcaggaagctcattttggtaacaatgatgatgttctgagcacagatgttgataacacttctgaatccatattggaacataagattctcattaaacagtggcttgttgggcaacttaaagatatgggcttacacgttgggaactctgagataagtccagtagttttaccaaccaaagttttgctccattttgaagcagtagaccaaaagcataacaggggaaaagaatttctatacctgctaaaggttggctttgaaaattctagctacagcaattcgcaaggcaatgctgagctttcttggagcattcaaactgatgatctagaaaacttggaattaaaatttgggaggttggagctggatgatgggttcagcaatgggttcaagctgactcgatcttctttaggctggatggagaatgcaatgtcagatgtcacaaaaaggctatctgttctcttatcgtcaactagtctgaggttatttgaccagctaaagctccccttccctggtcatgttcttgtccttggacctcgaggttctgggaaaactgctttggttagggctgctgcaaaatactttgaagaccataaagagatattggctcatgtaatatatatagattgttccaaacttacagtgggcaaggctaaggagacaaagcaaacaattgaagatagcatttctgaagctctgcttcacgcaccttcagttatcttatttgatgatatggacaatgtggtttcagtgtcttcagatcctcaagcacctcagtcatccagttcatctgattctatagtaagatatttggctgatatcatggatgagtacaaggataaggctcagaatgcatgtggatatggacctattgcattaatggcttcagctcaatcacttcagagtcttcctcaagatttaacttcttctgggagatttgatttccacgttgagcttcctgttcttgctattcctgagcgtgaggcgctattgaaacatcatgttgaggagcatgagttacagtgttctaaggaagttctttcagagatagcatcaaaatgtgatggctatgatgcatatgacttggatattttggttgatagggctgtgcatgctgctgcctctcgctttgttctgccttctagcgcctctgtgaactgtgctgaaccaactctagtgaaggaagacttcttaaaagcgatacatgacttccttccagttgccatgcgtgatcttagcaaatatgcccctgctgacggtgaaggtggttgggaagatgttggagggcttaatgaagcagtaaccatcatcaaagagactcttgaattgccatcaaaatacccgaatatctttaccaaggcacctgtaaggttgcgatcaaacattctcctctatggaccatctggatgtggaaaaacacatattgtgggagctgcagctgccgcttgttctctgcgattcatatcagtcaaaggtccagagctattgaataagtacatcggttcttctgagcaatctgttcgtgacttctttgcaaaggcagctgctgcagcaccttgcctactgttctttgatgagtttgaatccattgcaccccagcgaggaacacagagtgcaggagtttctgatcgtgttgttaatcaattcttgacagaactagatggtgtagaaagcttgactggagtatttgtatttgctgcaacaagtaagccacaatcaattgatgctgcactcttgcgtccgggaagatttgaccgtttgatcttatgtgattttcctggatggcatgagcgtttggaaattctgaaagttcactctagagaggtttcactggcaagtgatgccagtctggaagaggttgcttctttgactgaaggatttacaggtgcagatcttgcagctattctaagagatgctaagctggcagcagtgcataaagttctggaggacagaaataatggtatctcagacacacagccatgtatcagcaaagaactcctaatatctactgctagggaggctagaccttcgacatcagcagaacaaaaaatgcagtatgacatggacttcggtcaatttgtatcgtctaggaagtctgtttcaacgaaggcaagggaatctaaaggaaaaaaggtcacgctggcttgagtctctctgcattggacaagtacaattacgttatgttcattggcgcagaacaagaatggcgagcgccttttttctgctcggcaaatctcagttttgacttaccaactccacccctcttctttgagaaagggaaagaaactcattttgtagattgtagtgcaggcagcgaggggctgtgatgatgtatagcattgtgccaaattttgatacgaatggcttcttcttgtgcagtacgaaatagaaatgctgacagaacgcgtgtagcgtttgaatgaacattgggggaacgtactgacgtatctaatgctaattgtgtcgatatactttatctgtttcccattataaaaaggttttggttttgaatagattt

SEQ ID NO: 49061 - DNA, 345 bp, Oryza sativa
  Clone ID: PAT_MRT4530_51678C.1
atggccgctgtgtggcggcgccgccgtttctcgactcctccgcagcgccgccgcaatcctctcccatcctccgcctcaacgacgtccgaggaggtgttcggtcggcttcttcagcgcccctcttttcgtcggagtagagcagaatttgatatccatatcctcaagaggacatacttcattgtatacacactctcagagtcttcagtgtacactcaagaaccctcaaggcagattatgtgcctaatgcaccagattacatttttactacatggtttttacttgctgagagtgaagcagcttggcgagcctcttgaattcctccctttatatcctgcttccaagtaa

SEQ ID NO: 49062 - DNA, 447 bp, Oryza sativa
  Clone ID: PAT_MRT4530_51679C.1
atggcgcaccatgtcgagctcgagcttgttgcggtggtgatgaaagtagtgaaccttattgagggacacaagcagaaaggcggcaacacccgaggaaaagaaaggaaggtgtggcttcatcgatctcgagctcatacgggcagctgcaacgtccgacctcgtcgaggacgcaagcagccgagcagcgaggcgtgcggtggtggactcgagtacgcgacgcgcggcgcgccgcggtatttttatgtgttcgcgccgtcgttcgtgcgccgggagaccgaaccgtggacggcggagagaagaagacgtgacaagtggacgtggccgcggcccgcgggtggaaaggaaagtggcccccgcgccgcgagccattttcccttttccccgctgctagtagatggtggattgctgctggttggacagcggcagatgggggtgggcccgttctga

SEQ ID NO: 49063 - DNA, 195 bp, Oryza sativa
  Clone ID: PAT_MRT4530_5167C.1
atgatgacaagcatgtcgaagtcagctcaaggtgcaaccaaggataagtcaggtgaaaagaagattccatctgcaacaggagatcaagccaagcagttcagagtggggaagttttgctgggcaagtttgttaaagaagacgcaacggaagaagtcagaccagaagagaagaccgcccaacctatcttcttgctag

SEQ ID NO: 49064 - DNA, 466 bp, Oryza sativa
  Clone ID: PAT_MRT4530_51680C.1
cgcgaggctctatgacgcgaatcgaatcctctgacgtcctcaagatgcagatcttagtgaagacattgaccggcaagactatcaccctcgaggaggagtcctctgacaccatcgataatgtcaaggctaagatccacgataaagagggcatccccccggaccagcatcgtctaatcttactctggcaagcagttagaggatggcatgacccttgctgactacaacatccagaacgagctgaccattcaccttgggctccaactgcgtggcggcatgcacatctttgtcaagactctgaccggcgagactatcacccttgagggggagtcttgtgacaccatagacaactccaacgcctacatccaggacatagagggcatccccccagaccagcagcgtctaatctttgtctgcaagacgctggaggatggcacgacctttgctgactacatcatccagagcgagt

SEQ ID NO: 49065 - DNA, 357 bp, Oryza sativa
  Clone ID: PAT_MRT4530_51681C.1
atggacgacgacgacgacgaggtcgccgccggcgaggctggacctgcgccggcggcggcggcgacgggaggccacgccgaccgcgtattccgggccctcgcgctcgcctccctctacatcctcttccggcggtggcgcgccggtggggccggcctcgcggagcggccgtcgccggccgagatcgcggcggccgtggcgctgtgcgcctccgtggcgtggctctacgcgctccccgccttcgggatccgccggagcagcgagatctccacccggcgctctgaggcctacatcgccactgctgctaacatcgtcacatgggttctgactgcaatagctcaactctctcttgtgaaatga

SEQ ID NO: 49066 - DNA, 141 bp, Oryza sativa
  Clone ID: PAT_MRT4530_51682C.1
tctgacagccaattgaatatttggacaaagagtacccctgttatgaggaccctctcatatctcagaattttatttagtgtgttcttggatatcaggaatcagaagcttaggatgatcgggaaggcaacctgattatagctg

SEQ ID NO: 49067 - DNA, 1421 bp, Oryza sativa
  Clone ID: PAT_MRT4530_51683C.1
tgttcccccattacctcgccccggttcgcatggattccccctcgctcctcccccactccacccgccgatccaccggccggggcagcgcgaggcgatgcaattgaggtgaggtgagaccgccgcttcttccgtcgtcgtcgcgtgggttttttttttctctctttggtgctgggggatacaacaacctggcggccgcgctgccgctggacgacgccatcgcgcgcctgcacggcgtcttggggtggacgaggcccagcagccgcggcggcggcggtgggaggaagaggtggccgcgcgggggaaaggggagcgccatgctgtgggcggcgcgggtgtccgggttcttctccgccgccatggtgatggtggtgctgtccccgtcgctgcagtccttcccgcccgccgaggccatccggtcgtcgcagtttgacagccacgtccgcttccctggccagatcgcggggggcgccaggggcctcgccttccgtcgcgcccccgcgttccgcaatgccgctgactgcggcaacgccaccggcaatgtctgcgacccatcgctcgtccacatcgcgattacgctggacgaggagtacctcaggggctccgtcgccgcggtccactccgtcgtgcagcacgccacgtgccccgagagcgtcttcttccacttcctcgtctccgacccggcgctcggcgacctcgtccgcgccgtgttcccgcagctccagttcaaggtctactacttcgaccccgaccgcgtccgcggcctcatctccacgtcggtgaggcaggccctggagcagccgctcaactacgcccgcaactatctggccgatctcctcgagccctgcgtgcgccgggtcatctacctcgactccgacctcgtcgtcgtcgacgatgtcgccaagctctggcgcaccgacctcggcggccgcaccgtcggcgcgccggagtactgccacgcgaacttcaccaagtacttcaccgacaggttctggtcggacaagcagttcgccgggacgttcgcggggcgccggccgtgctacttcaacacgggcgtcatggtgctcgacctcgccaggtggcggcggacgggctacacgcggcgcatcgagcggtggatggagatacagaagtcgccggcggggcgcatctacgagctcgggtcgttgccgcccttcctgctggtgttcgcggggcacgtggcgccgatcgagcaccggtggaaccagcacggcctcggcggcgacaacgtgttcggcagctgccgcgacctccacccggggccggtgagcctgctgcattggtccggatccggcaagccgtgggcgcggctcggcgccgggcggccgtgcccgctcgacgcgctctgggcgccgttcgacctgtacggcccggccgactccgccgcggaagggtcccggtaa

SEQ ID NO: 49068 - DNA, 168 bp, Oryza sativa
  unsure (1)..(168): unsure at all n locations
  Clone ID: PAT_MRT4530_51684C.1
atggagacatatgatcgcaagcactctcttccccagnncgtcagacanncagcaactccnnagcacggccacagcnnnttctgcacgtcnnacctcatnncggcctcnnaactcgcgnnggaggtcggagcccgcnncaaccacctgnncagttcagggcnnncgtag

SEQ ID NO: 49069 - DNA, 3638 bp, Oryza sativa
  Clone ID: PAT_MRT4530_51685C.1
atgggaggaattgcagaatgtggtgtgaacattgatcagaaagcttcgccacgccgtgcggccatagagaaagctcaagaggagcttaggcaagaatatgatgtccgtgaagaacgaagaagggagcttgaatttttagagaagggaggtaaccccttggatttcaaacttggacatgtagcatcacttagtgtccagtccacttctgttgcagatcatataaccgaacaaaatgtgataagtgaagctaagggcagctttgcgtttgctgcctcaccccatggggattcagttgaaagtagtggcaagccaggaagttcatcatgccgtgatgccaacacagctgataatcttatgcttttggatggagataccagcaacacaggtggggagaaacttgtcaaatgtggtactaaacgaactaatgtatctcaacctgatgtgtccctgcgctgtgatggtcaaaacaatgtaaaagaggctgaagattctagtttgttccgccctggggcaaagaaccaggcgtatgctcgtcgcagatcgaaatcaagcagggagaatgccactgcgtctgttgggtctctaccagtttccccactatattctcaagggaaagatgcaaaagggataatacaagaaacaaaatcagaagatcatggtgcctcatctattggcaactcaaaaccagcaagtccagatcggaacaacacatcaaaggttgcttcattaggtgatcatgatgcgatggagatggacaacactaatgaaggaaaccaagcagcaactcatgaaacaacaaacttcaaagatggtgttgaaacaccggaaatctcaccaaacagtgtgaatggtaattcacagcttattggagatggtttggtagttactgcaactacttctgcagaatcccctgacacaagtccaaaagaagctgctttaatggcaacttcttcatttccatcttcatgcaatgaagtcttggaagaagcatgtgctgcggaagaagcagatgatatggttagcaagagttctgttcctccctctgaggtagaaattgccagtttgaatgaaaatgaagcggatataccatgtgcagatgtgtctaagaccgttgatgaacatcctggaaaaagtgagaacttatcagggaaggtgtctgatgaagatttaggtgatgctataccttctgacaaggatggaaacaaagatggtcaaccagaaggtggtgacatgcccacagttgttgatggcgtttctaattctgttcaaccagaagtcagcaataccatttatgccaaagatgacgttgatgtccataacaagatggttgatgcacaaaaggatacagggaatcttgctacttctggtcttgacaaagtcgataaggaagcatgttctaatttgaaaaaaaataataaatgttctcctgattctaatattgctgataagttggattctgttactgtggcgtctggtttgctcatgaaggacgtgcctagttctgtgtcattaatgaaccctgacaatgatgttaataaaactggtgaaaatattccaatgatggaaaagaaggaatgcgaagattctactgttgccaagaaggaacatgaagatactatccttagaagggcacgattaatagaggtcaatatcaagaaagctggtgaacgatctctctgcaatatttctttggagaagaagccaaagagtcactgggaatttgtcctggaggagatggcttggatggcaaatgaatttatgcaggagcgcctgtggaaaagtgcagcagcttcccagatgtgccactggattgccttaagtggtcgagcaacatttgaggaagcaaacattcaaaggaaacagaaatcaattgctagaatcctagccaagagtatcatgaagttttggtgttcagctgagactttacgagctaccagtggtgaaatgcgtaaagagaagcaagcagaggagtcaattgggattggggaaacaaagctggctggaatcaatgcagaaaaagaacagtgtaacgaacctctggaacaagagaagcttcagtctcctattcaaagttacgcactaaagtttctgaaggacaactgtaatatatctgagtgtctgtcgttagctgaagcaccagctactcctgacaggctgaatgattttggcattttgaaagtgccagaccagctttcagaatgtctaccgtccagaaaaccaataactctcgacagaagaatgattatgagccatctacaacaggctctgttgcagatgcacataggggacatgcatatgaagatgatgatgtcgaggcatccacttatgtattgcatggtacatatgatgatggtttgccatcaaaatcgagtcacaaaaagaaacaccttatgcagcagaggatgaatggcacaaggcattacagtactggtgttgacatgccttatgatccatatgtggagagcaagccaggaaaccagccatttttatcaaatggaaaaagaccttcagatttctttaatattcctacaaaacgcatccggacagctgctagacaacgagttgtaagcccatatcctgctaatgcttctggagccactgcattcacaagtaaaacagatgcttctagtggagacacaaactcttgtcaagatgaccaaagttcattgcatggtggatcttttccaaggaagaatgtggatattgaatcgacagttgattttgatagacaattgtatgatggcagtgaggtatctactaagtcaaaaaagaagaaaaagtctaagcaccctggatacaagacacctcaaagtgtcgctgagtcttgctctttgattgctgggaagggcattgcctgtgatcctagacctcaggttgatttgattgctcaatatgagcagaaggattatttgaagaagagatcagaggtccatcaattcgattcaaatggaaatattgtgataaatggtcagcatgctgccaagaagcctaaattgatgaaccaagcaccagatgtttcattagaagcacttacaccagttggcccaatggtatctcctgctgcttcacaaatgagtaatatggcaaatcctactaagattataaagatcattacaaaccgggatcgtgggagaaaaaataaagtgctcaagaaacgtataattgctaatacaaacagtacttataaatcaccaaaacaaatgagtaaacctcacaatcatatactaccagtaaagctacacagccttaaagcagcagttttagagaactgcagttcattttgcataactttatccaattggttgggcttgctcgtcgatatcacaatcctaccattttatattaacaaggttccaagcaccggtggtaaccggtctgaagccagtgactgggccaaaacagtccatgcaggtggaaatcatctgaggtggcactcattgatgacatgtagccctgtagtacacgcatcagttgcttatataatttgggccccctaccttggtgctgaggtccactgccatgatgccggcgtcatcagcgccgagggttggtgctactggctctggcactcgtgtcaaccccgttcccctcagagtgatggtgactgcatgcacctccggagtggcaggcgatgctga

SEQ ID NO: 49070 - DNA, 969 bp, Oryza sativa
  unsure (1)..(969): unsure at all n locations
  Clone ID: PAT_MRT4530_51686C.1
ctttaatatagagaagcttcagtctcctattcaaagttacgcactaaagtttctgaaggacaactgtaatatatctgagtgtctgtcgttagctgaagcaccagctactcctgacaggctgaatgattttggcattttgaaagtgccagaccagctttcagaagcaaacctattttatggcgtagcccctggtgcgatgcaggcatacagagagtttgtggagggtccttttgtggctaataagaaaaccaataactctcgacagaagaatgattatgagccatctacaacaggctctgttgcagatgcacataggggacatgcatatgaagatgatgatgtcgaggcatccacttatgtattgcatggtacatatgatgatggtttgccatcaaaatcgagtcacaaaaagaaacaccttatgcagcagaggatgaatggcacaaggcattacagtactggtgttgacatgccttatgatccatatgtggagagcaagccaggaaaccagccatttttatcaaatggaaaaagaccttcagatttctttaatattcctacaaaacgcatccggacagctgctagacaacgagttgtaagcccatatcctgctaatgcttctggagccactgcattcacaagtaaaacagatgcttctagtggagacacaaactcttgtcaagatgaccaaagttcattgncatggtggatcttttccaaggaagaatgtggatattgaatcgacagttgattttgatagacaattgtatgatggcagtgaggtatctactaagtcaaaaaagaagaaaaagtctaagcaccctggatacaagacacctcaaagtgtcgctgagtcttgctctttgattgctgngaagaaggattatttgaagaagagatcagaggtccatcaattcgattcanatggaaatattgggataaatggtcagcatgctgccaagaagccta

SEQ ID NO: 49071 - DNA, 709 bp, Oryza sativa
  unsure (1)..(709): unsure at all n locations
  Clone ID: PAT_MRT4530_51687C.1
cggacgcgtgggtcaacatccaatcctacacttgtacctttgcattctttagctgtttacacaggtctcctccccaaagaccccacgggacttgagctgccttctggtggtcatgtaagctgtcgatactgcacaccaagtggtaagctgtctagcgcttctgtattcattgagatggagatgtcgtatatggtgaatccacaaactgggtatgttaacaagcttaaggaacgggcaaagatttctacaccaagattctcatatttaccccagagcgggattttacatggatgaggctcattgctgataagtgcggtgcggtgctgtgttgtgctcatgtgcgacccggcgcacatcagcaggcttgtcaccacgatggtaaataactaccagcatggaacatttatttatcttgtatgtgtaatgtagcagaatctcttattaatacaatcaaaattagttgctagaattgttttgcttctagttgccctggaaactcattgcaaaagagcttcaatctttttgccttcttagtcacttggccatctagtaaggcatggtctgtttaaatcattgaatgtcacaatgcaacctttccttgtttcaggtttttagggtgacaaatatgtatatgttttntgggtacgttgattaggttgatactatagttctgatgaaactattttgcaggtatcatattcaaactgag

SEQ ID NO: 49072 - DNA, 348 bp, Oryza sativa
  Clone ID: PAT_MRT4530_51688C.1
aacccgggaatctactatagcattatatattatcagggccacgttacattttaccactcacacttttatctaatctaaaaactcatttaacttttatttttcaacttgcatccaaggggcaagggggaaggcaagaaactagcgaagcccttttacagccacaggacacagggggaattgcacagataaacaaaagggtagcacaccagcgaagcccggagcgagggcgttctcaacaggtgggggcaggacccccaccggatcaccgacttggggaccgccacatccaggggctcgggcttgccggggccaaaggggggggtccccccggtggacaagcccaaggcc

SEQ ID NO: 49073 - DNA, 2356 bp, Oryza sativa
  Clone ID: PAT_MRT4530_51689C.1
cgggctgcaggaattcggcacgagggagagagagaactagtctcgagtttttttttttttttttttttcagtcaaactgttgctactgaacttgaaggatgcagaaagcgaaacataaactaacagattaatctcccagctagagaagtatacggcctgatcggattctaagtaggatctatttctcactaagcaaaactcagaagttaaagtcatcatagaaacacatacggttacactgtatgtaaccttacgggctgcatgcccgaaagcttcgaagaagaatcaaaagccccagctattgttccaagctcgcgatcccaagttggagacctgatgctggcaatggatttacaacagaatggagatgggattctggtgcatggtacgcaatcccagagcccatgccagcacctcgactgtgagccaagggagtagcagatctgcccaaatagtccatgctatggtgatttattgtcacaaaagggtgtcgcggtgaactgcccatggatgactgcgcatcctgttgcgatggttgacacatgactgctgatgccggggctgaaacggatgcaggaatctgcaaagcctgctgacctgatgatcgattaggctgcatgcttctcctggctcttgatccgtgtgaaacaaacatagtctggaatccctcagccaacgtttgtcgtttatagactttgtcagcaagtatttgaattcctttctttctctgtgatgtttccatctccaatttatggatcagctcatcatacttccttttagtttcagccatctctatttcacgtgccaaaataatttgttgccgcttctcttcatgtctcttggtcatcagacaacgtaacatctgtaaccgactcaactcaacagcaacgggatctgattgaaacccagcttcattagggcgttgctcaaagatggatcttgttagaatctggttgactgaatatgactcaatatttgatgctcgagggttgataaactcagttctaaccgaatgaatactcccatcaggtggttgatgagtaacagcctggcaagttgatgtatttgcttgcatgttaggctgctcggtaacttgggcaaaggaggaagcttgaccattaggcgcttcctcacttctaatgtcctcagactgttccacccgaatcacattactaatgtcctcagattgttccatctgaatcacattagttgaaggcggacttgcagatggagcttcctgcggagaaacagtgtccaaggatatttggtgatttgcgcagggagcttcctgcggagaaacagtgttcaaggatatctggtgatctgcacatggggcttccttgtgaagcaatgcagtttcgcacgggctcgaggcagactcaaatgggagttttctctgagacccagagcaggaacctagcgaaacattataggttgaacttggacatcttccctttgctctggaaagcaggtttgcattttctgaatcagcagccacaacattagcatgtgctgatgctgcactaatgtgagattgagaggcataggataactctgcatcccccacattactttgtgctgctactgggaagtcaatttgtctcccattattttgaccaaataccattgtagtcggcccacaggtggactgtgaagacctttcacaggtgaaaacttcttcagctgcaccaactgaagccccatccttggtagatacattgatttcaagcagaacttctgaattgtctagaatgggctcagaagtgtcgcttctcttgcctgcacaggtctcttctgattttgtacttgaagaagcaatagcttcaatttcagtagatagacattccatgttaaagtagttgagctgtgcatcaccatttaaatagtcagtcgaagagcatttcaatttctctatcttaagcccagaatatgacaagggaatcatgtcaaaatctgtcttaaggtaaccagcttcagcctcaaatatccagcggtttcttactctcttatccttgtctctatcttttatttgtcgtttcacaaattctatcagctgggattggaaatgtttatgaaaagtcttgtgcaaaacagagaatagtaactttggtagcttcatcctgcaacgttttattgttggtataactcgtgtgtactggacttcataagagcgtagatgttcttggaagaactcaaactcttgacttttgcgcacaacattgaattcctcacggtcttcgttgtgccataccaatagtttatcaaatcttcttgagctgactttttcaatctttttcaagacttcttctagttcagagtcataaaacgatatatattcctcacttcccttttccat

SEQ ID NO: 49074 - DNA, 722 bp, Oryza sativa
  Clone ID: PAT_MRT4530_5168C.1
atgagtagtgtgagactaatcatgaaaaacattgttaaactcactcataaccgcgggcacggctattcgaatagttttactctgatcagaggtacaccactgtacccacaagacacagctccacaacatgtcaccatgcgcctcaataccaccacggtacctcggaaaggaactgtgacagcaccccttacacaacacaactcactacagtgcaccgttcctggatcgtaatctccccctcaaaaccagaggcaatggactccccagcgacccccacggacttctcgccgcttcacagtctggcaccccgtaatgaataatactatacaaaaggcgcgggcgacgcgaccaccggcgctagaggggtcggccgggctatctaagggcacctacgcgtagaggacgacgacgtgaactcaccggtacaagaaaacacgacggacgacgacgaacggcggccggcgacgagctccgacggctgcacggctcgggtcggcaatggcggcagctctccggcgactggtgatggcggcaaaggggcggccggggttcctctcctccgtgtgcacccgacgacggcgacggacggcaacggcaacggctaccgcggcggcgcggcgcggctggacggtcgccagtggcggcggcggctagggcaaagtggcggcggcgctacgggcgacgagggagctcgggacttggggcaaacggaagaggacgac

SEQ ID NO: 49075 - DNA, 522 bp, Oryza sativa
  Clone ID: PAT_MRT4530_51690C.1
atggatttgtacggcgcggcggcgggcgggggaccggtggcgaggcgaccgtggagcaaggtggaggacaaggtgttcgagagcgcgctggtgctgtgcccggaggacgtccccgaccggtgggcgctcgtcgcggcgcagctcccagggcgcacgccgcaggaggccttggagcactaccaggtgctcgtcgccgacatcgatctcatcatgcgcggcgccgtcgacgcccccgggtcctgggacgataacgacggcaacgaccgccgcggcggcggcggcaagccccgcggcgaggagcggcgccgcggcgtaccctggtccgaagacgagcacaggttgtttctcgaggggttggacaggtacgggcggggagactggaggaacatctcgcggttctcggtgaggacgcggacgccgacgcaggtggcgagccacgcgcagaagtacttcatccggcaggccaacgccggcgcccgcgactccaagcgcaagagcatccatgacatcaccaccccttga

SEQ ID NO: 49076 - DNA, 286 bp, Oryza sativa
  Clone ID: PAT_MRT4530_51691C.1
ataggaaatgccatcacaagtttgcaatataaagatttacatttatcaaaacatcaaggggaaaaaattagttctcgtttatttttgaaagaaacaaaatttaacttttaatggtaaacatcgtaatcatcattatcatcggaattaacctcctaaaaatgacctttcccaaccttgattttaccatttaaataacttggggggcatgccccatttaacaaaatgttatgcccaggattattttggccatgtttatacccatttccagtcccatttatttctaaac

SEQ ID NO: 49077 - DNA, 2445 bp, Oryza sativa
  Clone ID: PAT_MRT4530_51692C.1
atggcggcctcgccggagcagttccggggccaggcgcggctcccgcggtgcgcctccccgctcagctacgacctccgcctccgccccgacctcgccgcctgcgccttctccggctccgccgccgtcgccgtcgccgtctccgccccgacccgattcctcgtcctcaacgccgccgagctcgccgtcgacggatcctccgatttggtgccttccgaggtggtgcagttcgaggaggacgagatcgtggtcatcgggttcggccaggatctgccgatcggcgagggcgtgctcaagatggacttcaccgggacgctcaacgatcagatgagaggcttctacaggagcaagtatgagtacaagggggagtcaagaaatatggcagttacacagttcgaagctgctgatgcaagacgatgttttccatgctgggatgaacctgcatttaaggctaagttcaagctaacactggaagttccatcagagttggtagcactgtccaacatgccagtaattaaggagacagttcatggacctctcaagaccgtctattatgaggaatcgccacttatgtcaacttatctagtggctatagttgttggtttatttgattacatagagggctcaacattagaaggcaccaaagttcgtgtgtatactcaagttggcaagagtaaccaaggaaagtttgcactagatgttgcagtgaagtcactggatttattcaaagattattttgccactccttacccgctaccgaagttggatatggttgctattcctgattttgctgctggagctatggagaactatgggttggtcacttaccgagaaacagctttactttatgatgagctgttatcctcagcatccaataaacaacaggtgagttatttggctgtggaagcattatttccagaatggaataactggacacaatttcttgatgagacgacctctggtctcagactggatgcacttgcagagtctcatcctattgagatatggaagtacatgaaagcagttgacataaaccatgcctctgaaattgatgcaatttttgattccataagctatgataagggcgcttccgtcattcgcatgctgcaaagttaccttggtgcagagcgttttcagaaagctttggcatcatatataaagaagtatgcttactcgaatgccaaaacagaagatctatgggctgttcttgaggaggaatctggggaacctgttaaggatttgatgactacatggactaagcaacaaggataccctgttatttatgcaaaactagatggacatgatttgcaccttgaacagaaaaagtttctcttgaagggcaagactgataaggtccatatagacctcactgcctcccaaaatgccggaggagagaagggtgaaaactgttggatcaaattgaacgttgaccaaactggattttatagagtgaagtatgatgatgaacttgcagctggacttgaaaaggcaatcaaagccaataagctctctttaatggataagattggtattgtggaagattcatactccctttctgtggctcgcaagcaaacactgacatccttgcttcgcctgctgaatgcttatcgcaatgagtctgattacactgtgctttcacatgtaacctctgtatgcttaggcattgataaaatatcagttgatgctactcctgaattgtccagagatatcaaacagcttttgatcaatcttcttctatcagctgccaaagcacttggcttcgatggtaaggacggcttgggacatcgagaaggtatgcttggatctgtgctgtaaggtaccactgtggaactatgacttgaaggaactggccatcaagttcactcatatcggacttcgtccaaatctactgtttcacggttcaccacagcggagaaggctgctgaagtttccgagcttcttcgccggtaaaacctaaccatcgttcgagcgtgcactgaagcagagcctcgagagggtcccgtatcagcgcgagatggatcgagagcatcaggagcgagcctaaccttgctcagacagctgaacgagctgctgcagcacagacactgtaggccttcctttttgggcctaaaagctatttgtacgctcatggaggatcgtacaacacaaatgttcttcgaaaggttgtggcctgggtgtgggcttgattctaatcgatcatatttcaaagtttgtttagttctatctttatcttttgcttgggcaatcgaaaagacatgtttggtcctcgcagcgaggtgtgcttggttcagcttttgtcaggactggcaatgaaaaaaaccaagcttggagcgaacactaaagcagagcctagagtgtgtccttatcagcgagaaatggagcggtagaagcattagcgaccctaaccttgctcagacagtaaacgagctgatgcagcacgacatgtag

SEQ ID NO: 49078 - DNA, 192 bp, Oryza sativa
  Clone ID: PAT_MRT4530_51693C.1
atggccataaataacagccacatcgtgttgcaaacccgctgcatagtagaactgttggtctttaggaggagaggaaaggagggaggtgggcttgcattgcaggccatactgttcctaacggtgttgagaatggatgccttgagaaatactccctccgtttcacaatgtccttcaatttggcgccaagtttaa

SEQ ID NO: 49079 - DNA, 643 bp, Oryza sativa
  Clone ID: PAT_MRT4530_51695C.1
ttgatccgatgattttaatgtactgaccaataaatgtaatcactgctcttacagtcaacaagaagtcgttggagaagattggcaagcaatgctagcgattcatatgggttggctccggaaacttcattggagccaaatgcaagatcgactgaaagagaacacacttacctatggcaaatgaagggttgaggacgctcgatctcgagaaatttacaaatccctaaggcttaaatggttgtggcacaaatgggtagaatcttggaagccatgggtgggcatggaaacgccttgtgacgagacaaacaaaaccctctttgttgtagcctccaaaatcaacataagcgaccaatgaatgtaacatctaaagaaaaaaaaaggacaatgcaccaagacttgaagaataagacctggatacaagacctcatctgcaaaccatcctggacctagtagccttatggaatgtgatccaacatgcataaggttgtgttcgtcaccagtggatgggaaccaatctaggaagacagaacgacttattagcacatggaagctaaccaaccacggtgaatgtacgtccttatccgtttacaaagcacaatgtcttggctgagttaccacaaacttcaatgccctcatttggaagcct

SEQ ID NO: 49080 - DNA, 2232 bp, Oryza sativa
  Clone ID: PAT_MRT4530_51696C.1
cacgtggctggacgtgtcgcgtgtcctgtttctgtttttctttgggttgcctgccgcgccgctcattcttccttgcctctgctgggatgctaaccttttcacaatcgactggttcagtttttttttttttttttttgccagtaaaagagaccggttttagtcctttttttttccacttgtcatttgcaaagtttctatcaacaaaagggtttaagcatagaagaaggggaaaaaaaacaatacgatatctgcagcatgtgatgtttcgcactatcacccactcgagcgcaaagccaacttgagtttggcagcagtacattagacagtgggttgctttatcgtcaattcagctctcagatgcaacacgccgtcgaggaagaagaggctgtcgtcagccatgaacgtcgaccatggtatcgcaaagagattcctgtaaccaaccgccttcccaccggtgaacgtgtagttacccttgtacttgctcacaaactctcctgacggtcttgtccttgcagcaaactcataatctactgtcacgctcattgagcccttctcttgcatccctaagaagagaccgaagcagtagaacgtactctgctgttccatgttacagtgtgctgagaggaagaagccctgccctgcaagatggaaggcttgagagtacatccgacctgacgggaagagccgggagcactcttcgcgctttagatccaagtatgctatacactgtgggtagggtcggtcaaactcaacaactttcaaaggtctgtacttgtaagcccgctctgcaaatttctgacaggttgttacgtctgctgcgagagcacgttgcctgtgtggagcatcagctttatatagaagtgcctcagtgacacacttggttgcttgctcatggtccagatcggtgcatattaggaccttccgcagcttcctacaggtcatgtgactgaatcgcacgagcggaagcaaacgagaactcaagatctcacgcctttcctctgatttagggtattgtgcgcgagcccacctgatcaagaaatcgtagatagcatcttcagatgccacctggaggtcattacttgacaagatggcttcgattccagcaagagggatgttcatcacttcatcttggaacttagtcaaatccttgtatttgttggaaagatattccttggctgcatctgtcagaggttgaactgcagcagccatcgaaatggagcatggaagatctaggtagagtagtgcagattctgtagtcatagtcaagcttgtgagcaactgactgcagtacctcatgcacgaaataacctcaaacttgtcggcagccatcagaatatccagtagaagagtagggtcagttgatgtcaactttccactgtacataaagcttaaaagctccataagggcattttcctctgaatcagtaattctaagggttgcctgcctctcatcagattctttcatgccatttgagaaaagcttgaaaaagaaaggactttttgctgcaagaatcgctgaactgatataaatgttctttactcttagaactggtgtgctcaccccaccactccaaggtgagtccatacttggtccatcatcaccatcagggccaacactgggtggagagtcgtccatcattgctacaggttcttcttgattttcttcatatgcatcacattcttctggttctactttgcaatttatctggtctggcatgactgcttcagactctttctccttgaggagctcctcgcggcggcgcttgcggtggcgcgcccaatccgaaagcgagccggccccgccgtcccggctggagccgggcgcgtggtcgtcgtcgtcgtcgtcgtcccccgcgacgacctcgatccggagcacccggtcggagaagttgaccgagttgaaggcgaactcgaagctggggcccccaccgcccccgcccgagaagtccgggtccatctccgcctcctgcgccgccgccgcctcgctcccggggcggcgcccgcggtacgacgaggaggaggaggaggaggcggcgccgccgtcccggctcgagccgggcgcgtggtcgtcgtcgtcgtcgtcgtcccccgcgacgacctcgatccggagcacccggtcggagaagttgaccgagttgaaggcgaactcgaagctggggcccccaccgcccccgcccgagaagtccgggtccatctccgcctcctgcgccgccgccgcctcgctcccggccat

SEQ ID NO: 49081 - DNA, 324 bp, Oryza sativa
  Clone ID: PAT_MRT4530_51697C.1
atggccatcgtgggggacgcactcaaggccaacatcatggccatccgccccccgggtgtgtggctggcacgtctccttgctaagctccgaggagaggagaccgacgccgtcacgctgaagattgacaaccaatccgcaatcatgctcaacacaagatatcaatatatcagagaatgcatcgaggagggcagggtgaaggtcgagttcatcggcactgacgggcagctagcggacatcctgatgaaggcactcgggcgcgacagatttattgaacttcgttctcagattggcttcgtcgaaattcaaactccatgcaaggtttag

SEQ ID NO: 49082 - DNA, 1032 bp, Oryza sativa
  Clone ID: PAT_MRT4530_51698C.1
atgctgccgggcgcgaggtcgctggtggtgctgcggaggagggcggggctggccctcctgcggcgcggctgcggggagggcggcacgtgcgggaagggggaggcgcccgccaatgccaggcgcgcggcggccacgctggccgggctcggcggccgcgggccgctcgggcggtgggccgatccgacgggtcccccgcgcggggaggcggagagggcgggcggggtgtggcgcgcgggcacgcagacgaggtccttccttggatgcggcgacggggatgaggggagcgtgctctccaaggtctacgaggagaggcgcgtcatggggtactcgccggagcagatgttcgctgttgtcgcggcagtagacctctatgaggattttgtgccgtggtgtcagaggtctaggattatcaggcgacacgagaatggctcgtttgatgctgaactcgaaattggattcaagttccttgtcgagagttatgtttctcatgtggagatggagaagccaaaatatatcaagacgacagcatctgaaagtggactttttgatcatttgataaatgtttgggagttcaagcctggtcctgttcctggaacatgtgacctttacttcttggttgattttaagtttcagtcgccactatatcgtcaggttgcttccatgttcttcaaggaagttgtttcccggttagtgagctcacttagtgatcgttgttatagaatttatgggcctcccattcctgtgctggaaaatacttatgggcaaggaagatagacaaaagataatccaattttgaagtatgttcgctccatgaatatctgagtgaggaaatcttaatatacattgcctttgccttcgattctgatgtcattatacccatagggtaccattaggcaagaggattttgaactaaatcagccagaattttcacttcttggctatttctcaggtgttttttttttccatgtaccactaaacgattcccatgtgtaacaacaaatggctccctaatacacgattgtttacctagcc

SEQ ID NO: 49083 - DNA, 355 bp, Oryza sativa
  Clone ID: PAT_MRT4530_51699C.1
acccaagaaacgaatccaaaaaaaagaattgaccacaagggcgaaggcaaaaacatttaaaaccccaaatttaaacctttccggggttttttttaattggggcccccaaacagggggccaaaaagagctaacaaaaaccaacctgggaaggccaaccgggttgaatttcgaaacccaaaaggggaagccacagaattggggcccagtttctcaaaaaaaaaaggtttatgatcattggggaaaaaactggggggaaactttttttaaatccaaaatttgcccccaaaaaaaaccgacaccgggggggggctttttgggggttttccttttaaccctaccaggggggcccccacca

SEQ ID NO: 49084 - DNA, 491 bp, Oryza sativa
  Clone ID: PAT_MRT4530_5169C.1
gtgcagtgtctgctccggctgggttccctgaccatccacacagaggtttcgagaccgtcacttacatgctcgaggtaggcagagtcttttaccacagttcacattctgttcgtcggtagtagaacatccaactgcatatagagcggccatgaaaattccttgcttaatccccagtgatacgtacagacagcagcgtcttttgacaaccacatcacacggatcagcagaaacgaattaaacgcgtttcatttgtcaacaacgcaaacctgataggctgatacggagtagtagtttttagcaaattcagaacgtttctttccgtcaaattgaagaatctaacccatccaaacgggccctgttgccttgctctgcctttggttggtagccttcctacgtcaaccacctcgcgtcgcatatacttttccgcgctcaaaactctgcttcacaccttgaactcatcattggcagatcgattagtaatatatatcttc

SEQ ID NO: 49085 - DNA, 957 bp, Oryza sativa
  Clone ID: PAT_MRT4530_516C.1
tcacagtatatttccagacgttgacaagtcaaacgccggcaggtcggaccacccgccgccgccgccgccgggagcagcactgccgccggcaccatcaccaccgccacggtggccgccgccgcctccccagaactgcaagcttccacggagaccgaggaactcaatcggcgagctcgccgtcgtcgttgccgcagacggtggtgggtggttgtcgatgtcgtccatcttcaccgaggccatctgcgtgatgagcccggcggagccggcgacgctggcggcgttggccggcatgtcgccgccaaggccgcccgccgcgacgtcgccaaatggatacgataccccggcggcggtggacatcagcggcggtggatggactgcggcgttggatcgggctaagaacgggaagtgcgggaggcgctgccgttcgagcccgaggccgtcgccgccgccgccgccgccgagctggtagtcgacggcggcagccgcgtgcagcgagctgagctccggaaaccctaacctcgacgcgccaccaccaccaccaccaccgatgatactaccatggccaccgccgccgccgccatcaaacccgaaagggagctgcagctgcgcatgcggcggcgccatgacgccgccggcgacggcggcggcgggcttcttggagttagagggcttggttccgcgcttgttgcggcggaagccgccgccgacggggacgttgcggagggcgccgccgcgggtccagtagcggcggcaagccttgcagaagtggcggggctgggtgagggagtagttgttgaagtagcagaacttggtgttggtggagtcgcagcgcggacacttgagccccggctccggctgcgggatcttcgccatcctggcgcgctccgccatcgacaccggccgcgccgaggaggcgccgccgccaccactcaccggaaggatcccggcggcggccat

SEQ ID NO: 49086 - DNA, 142 bp, Oryza sativa
  unsure (1)..(142): unsure at all n locations
  Clone ID: PAT_MRT4530_51700C.1
acttggagagttttcagggggaaggggagagctgaggggcaaagcttaggagggatgtttntccctatggtcctgttggtgcttcgccttctcctgcgggcctgttggctcttgtgcctggctccggtgccctcgtcccctt

SEQ ID NO: 49087 - DNA, 439 bp, Oryza sativa
  unsure (1)..(439): unsure at all n locations
  Clone ID: PAT_MRT4530_51701C.1
cggacntgtctgtgaacgcgtggatgccgcgccacagccgagcactgccaacgccgggcgccaccaccctgctggctgccgccgagcgctgccaccccacctgccgccgagcagcccaccatccatctgcaatcgtgcatctgatcttccaattgatgcttctatatgaaatgactgacggtgaggacatccagcgtcttgcgtcttgtatgtgataatggcactgggagttgtcaaggtcagaatttcctttttttactcttaagncttaactagtggaggtaactgctatgtatgccccatctcctgcaaaaaaaattttctgaatatgccgccccttttgcanatttgatcatgtaggncaagttcattgggggataaatttttnttgggtaattttatcagagctatntagattgggtttnaaattgggattttt

SEQ ID NO: 49088 - DNA, 391 bp, Oryza sativa
  Clone ID: PAT_MRT4530_51702C.1
gtcagggttacggatagggcataccttctatcctacgacttatggaatataccgataaggtataccttcacgtacacggattgttcccatgtatatcgtttgaaatccgtcccaaattatggaaaatatctctacgagtcaagcgatttccaaagtcctacttggaatctttcttgggggtcaagatgatccacggtataaaagggacccccggggaggggtgaaaagcatccaattccatcgcgaacacacccaccatagtttacgaagcggagtacacggagccaagtcgccgggagatctcgtcgaagccatcgactacgatctcaccctcgttccaacgtaccccaatactcaactcatctggtccacgagtatcactcgtcgacac

SEQ ID NO: 49089 - DNA, 291 bp, Oryza sativa
  Clone ID: PAT_MRT4530_51703C.1
atggatctgattagagttgttgtagtcagtatgagcaatgcacatgagcaatctgcaggcatgtatggccacttgatcctgtccgcggcgcggcgcatggtcctcaatcatggagcagcccctgggtactgtgcctcagcacccatcaagggtccatctatgatcacattgttaaccatggagaaggtgaagaagaagagggggaagctgcagaatgtcctgagggagcagaaggccaggctctacatcatccgacgctgcgtcgtcatgcttctctgctggagtgactga

SEQ ID NO: 49090 - DNA, 282 bp, Oryza sativa
  Clone ID: PAT_MRT4530_51704C.1
cttacatgtctttcccaggccgggtccgcttatatttgacagcttttataggtcatagactgcccgggcccacttacatctgtcttttctgcacactttgtcctcactcgtgtgcacctgagaagaatttcccgggtcggtcacccatcccaaattactccaaaccaagcacgcttaacctcggagttctttggagattggcttccggaaaaaaagttgcaactcattgatatgagtattctattaattctattaagccctaggctgggatgtcacaaccca

SEQ ID NO: 49091 - DNA, 1542 bp, Oryza sativa
  Clone ID: PAT_MRT4530_51705C.1
tcccccctccccatggccgccgtctcgacgaccaaatcaaaccccgccccaccccaatccgcgcaaccccccccccccccggctccaccgccgcgccctcaccccgccacccccgccgctggggaggaggtggccaccgctgctccggcccgccgctgggaaggagccagagcccaccgccaccaccgcctccctccccaccccccccccccccccccccttgagactttgtctcccttcgtttgcttcgcctcgacctcctcctcctcctccgccgccgcctcctcctcctcctcctcctcgtcgtcctcctccttcaagggcaccgcccacgtcctcggctccggccccgacccctcctcccgcccctccaaccctacccctagtcgccccgctgccccccggcgagaggccgccgcctccgcgaggccgccctcctccggcttcgccccctactccccgctcatctccacctcctcccgccgcaccgacccacccgcgggggcgggggcgggggaggacgacgccgtcgcgtgccccagctgcgccgagccgttcccctccgagctggcggtgtcggaccacctcgacggctgcctcgcggcggcggggggagcccgcccccgcgcggccgcctacctggccggcgacccccccgcgtccgccgtggaggtggtgaagaggctgctcgggaacctgctctccgacccccggaacgacaagtacaggaaggtcaggctcgggaacccgaggatcaaggaggccctggcggacagggagggcggggtggatctcctcgaggccgtggggttcagggtcgccgacgagggcggggagctcttcgccctcatggacgaggtgcccggggacgcgaggctcggcggcatcaggcaggccgtgctcctgctcgagagggcccggccatcgacgccgccgcagacacaggcagatgccaaagagacttgcccgaatggagttagcgaagagcaggggattaagaagccggttgatcgtcagattcgggtgttcttctctgttgctgcaagttctgttgcagaaaatgatctaccagattctttctatagccttagtaatgaggagatcaggaatgaggcaaagatgaggagggagaggctagaacaatctcggttgttgattccaaagtcatataaggagaagcaggcactggctgcccgacagaagtataaacaagctctgattcgaattcagtttccggatggagtaattctgcagggtgtgttccttcccgcggagcccattagttcactatatgagtttgtcgcatcttctttgaagcagccaagtttggaattcgatcttatctgtccagcgggtcctaggacacgcgtcatacctccttttccaaaaccaggggaacaggcacgcacactgcgggatgaagacctagtcccttctgctcggctcaccttcaagcccaaagagactgattcggttgtgttcactggtctgttggacgagcttcttgagaccagtgagccgttcacatctgcatcctcatga

SEQ ID NO: 49092 - DNA, 503 bp, Oryza sativa
  Clone ID: PAT_MRT4530_51706C.1
gcaagtgccacgtgacctgcaatcaccagctgatggcagtgattgtgcccagcaacattgagccatgggcaccagcggatgccgtattagcagtgacatgatgcaaacgttgggcatgggtagctgccacagccatgttcatgatgcacagccaatgggctgcccctgctagcagcaatggttggcatgcagctgcaaggcatgatggcctcagtgcaactgtggacacccagttgaccagatggatgcagagctatgcaacaagttgatttggtgctgggactcgggcagcagcagatggatgatgaacatggcgatgcagatgccatgacatgtggcaacatgggcccctggtcaactgtccaactctcttcttgtggttgttgttgatcaacgttggttacatgtactctagtaataaggtgttgcatactatcgtgtgcaacactagaaataagaacccttgaataaagtatcatcatttcagaaaaaaaaaaaaaaaa

SEQ ID NO: 49093 - DNA, 339 bp, Oryza sativa
  Clone ID: PAT_MRT4530_51707C.1
atggagggcatgatgatgattgtggcggtgtcgggagcggcgtcctctcgatcgccgatggacgccatcatcatcgcagccatcatgccgtcctcgcgccgaggcaaccccaagacccaaaccaaacgcacggccaccaccgctgtcgcagccgtcaccaccattgtcgtcgccgacgccttgcccaggcccaccgccgtcatccccgcggtcgccagcgacgaatctggcctccccgcggtggcctgcgacggatccggccttcccgcggtggcaggcgacggatccggcctccccgcggtggctggcgacggatccgctccgcagccaccaccctag

SEQ ID NO: 49094 - DNA, 457 bp, Oryza sativa
  Clone ID: PAT_MRT4530_51708C.1
gatttatatctaggaataacaagcatgtatgcgagggtacaatcacatttgcgggagcagtaccttaaagctaatgagaaacatctattgagctcaaaagagaactttgaacatctactagagatacatgtccaaacaagtgcatagacaagggcgctactacagttcacagccttggataccatgcgccagattgggcagagggaggtgtaagcagctggggcatacgccatttactggtcgacaggagagggctcaaccgggtagtacttgaagtgcagctccccaacattatatgcagaaagccttcgccagccgagcgggccaacatgtgtaacgctcacacaaccaccacttgctccatcacgggatgtagctcgagaaatagcccgtcttgctaactcagcagatgagtcaactggcatcacatagcggtaactctcgtccaagataccat

SEQ ID NO: 49095 - DNA, 315 bp, Oryza sativa
  unsure (1)..(315): unsure at all n locations
  Clone ID: PAT_MRT4530_51709C.1
nnccggcccgggctcttaccaacaacagaaacctcaaccagagagcttgcggaagcggaggttacggtgcggacgcgcgcgtgtgaggggggagagaaggccattaggaggcgacgccgtcgtccgagggaggcaagaaatccagatcctactactgacctgttcgctctctcgttcgtctgcgctgtgcgcacttggtcctgagccgatcgttcccgttcggcaggcataaaaagatggatctttgggatcttccgttatggctccccttatctggaaccccggatacaactttgatgagaagaacctgggctt

SEQ ID NO: 49096 - DNA, 412 bp, Oryza sativa
  Clone ID: PAT_MRT4530_5170C.1
ccacacgcgcgaatcaacggttgggaggcccccgcgacgtgcgacggcccccctcactcccgcgacgcgcgcggtggagtcctcccccaccaccgacggtgcgccgcgctctcccccaccaccggagagtgccctctccgccgccgccgccggatctagcgggaggggagcgcgcgcggtgctctcccctccaccggatccacagcgacggcgacgcgccggttcggcaacgacggcgacgcgcacgcggcgacccccttcgatctaatttttgttttattggatatatgtgtctgcgcgacccctttcgatctaattttttttttttccaaagtgctataaagctgcatgtgattctttgttatgtgctatgattttttatactatgtatgtatataaaaaaaaaaaaaaa

SEQ ID NO: 49097 - DNA, 183 bp, Oryza sativa
  Clone ID: PAT_MRT4530_51710C.1
atggggctaaaggagacaatggacatggttgatggtgggggcgagggaggcatggggttcgaagaaggattcgattcgcagcaatgggccgccgtaaatggggaagagggcaagagagagggagagcaaggaggggagcgggagtttatccgagaattagaccatccacattcaaaattttaa

SEQ ID NO: 49098 - DNA, 334 bp, Oryza sativa
  Clone ID: PAT_MRT4530_51711C.1
atggagcgatctggagcgcaggatcggccagctggatcggtggacggtggcgatgggcgtgccgcctggcgcggcagctctgcggcggcacgtgagtggggcccgggagggggtacactttacccacacggcgcggggcgtgatcgctccggcctcgggccggggaagaggaggaagacgtgcgcccggagtccccttcacgcgcccttcgcacgctccggctctcccgacgcggggcaggcgctgacggcggcggcgactggccggtcggccaccacggcgcgcgcgcgcgggaagcaacggcgcgcggtgatgatttgggccggttttgtcg

SEQ ID NO: 49099 - DNA, 176 bp, Oryza sativa
  Clone ID: PAT_MRT4530_51712C.1
acattaaaaatcatgacgaatgtgattaatgcacgatatgagaaaattgtatataactagtaaatacaagatgggcacaacatatcctgacatttcttcaggatcagtcggtcaaaattgatacaagggaatgcaataaattcccagtgaggaaaacacgctactacaagttagcg

SEQ ID NO: 49100 - DNA, 463 bp, Oryza sativa
  Clone ID: PAT_MRT4530_51713C.1
atccccgccaccggccgatctccctcaccggagcattaccgaccaagccctcgcgccatcgggcttgcctcgatggggtccttcttaagtcctcgcgcaggaggcaaacttatgccgcgaagggcaattgtgatatttaccgaggcgcagttctctctaaaaacctcgggaacgccagaactcctctcgctgctgataacgttacgttcagagcgcatggggactagagttcatggaacagttgatacagttaaacatgtcggtttccgaatccttaggtttgggacccgacaatgctcggttcgaggcgcccgagccgcaaaaacaaaaaagaacacaaatctcaacacgccgctcaaactgctgatctcaccgccaggacaacacaaaaatcacaaatcaaatcgccctatcgcgcttatctccagaaacacctcatcacgacacgaagtacagaatcaac

SEQ ID NO: 49101 - DNA, 481 bp, Oryza sativa
  Clone ID: PAT_MRT4530_51714C.1
cccacgcgtccgcccacgcgtccgaaaaaaggtcatccaaatcaacctcagaagtttcttctgtttcctcaatttgcgacatggatacgaaccgcacggtccaagctgttttcaccggcgtggaggtaaagccttgcggtaaggctggaagagggcttcggatgatcaagcacaaatcggaatgttacagcttggacaagaactcctctaccattgagtgctctaagtaagattcttggattttgttactagcaaaggctccgattagcggagctagctgctgctcaaggaagtaggaagccagcaataagctgcaatgtcataatactaatgcatatatattgggggacctggctgtgttgcttcttagttagcatggtcttattttccagggaatgcgcagaaggattatgcatattttgtatttttgaaataaaagtgtgcatctttgtattaagaagataaggcattaggcatgcat

SEQ ID NO: 49102 - DNA, 3258 bp, Oryza sativa
  Clone ID: PAT_MRT4530_51715C.1
cccacgcgtccgcccacgcgtccgcgaaagcgcaaaagcaaagccacgcttttcgtcaggttgatctctccccgcattggccctggtacacttgttctaggcggaggtgggggagaagggggaaaaggagtcggctttcggggagatggcgcgcaatgcggcggacaaggggacgtccatcgacgcgcagctgcggatcctggcgcctaagaagctctcggaggacgacaagcttgtggagtacgacgcgctgctcctcgatcgcttcctcgacatcctccaggatctgcatggggaggacatcagggagacggttcaagaatgctatgaattagctgctgagtatgaaagtaaggttgaccccaaacagctggatgcaattgggaatgtgttaactcgtttagatcctggagactccattgtgatgacgaagtcattctcacacatgcttatcctggcaaacttggctgaggaggtccagattgcgtatcgtaggaggataaaactgaagaagggtgattttgctgatgaaaactctgctacaactgaatcaaactttgaggagaccctaaaaaggcttgttggtgagcttaagaagtcccctcatgaggtatttgatgctctcaagaatcaaacaatcgacctggtcctgacagcacatccaactcagtcagtcaggaggtcgctgctacaaaagcatggcaggataagaagttgtttaacaaaactttatgcaaaagacataactccagatgagaagcaggaactcgatgaagcacttaagagagagatccaagccgcctttagaacagatgaaattcggcgagcacctcctacaccacaggatgaaatgcgtgctggaatgagttattttcatgagacaatatggaagggtgtacccaagtttttacgtagggttgatactgcccttaagaacattggcataaacgagcgagtgccctataatgctcctcttattcaattttcttcttggatgggtggagaccgtgatggaaatccaagagtcacaccagaggttacaagggacgtatgcctgttagctagaatgatggctgctaacttatactatgcacagatagaggatctgatgtttgagctatctatgtggcgctgtagtgatgaactacgtgtaaaagctgatcagttacaccgttgcgcaaagaaaaacacaacaaagcactatatagagttctggaaacaagttcctccgagtgaaccctatcgtgtaatactgagcaatgtcagagataagttgtacaatacacgcgagcgagcacgccatttattagccagtggattttctgaaattcctgacgaagcaacattcactgatgttgagcagttcttggagcctcttgagctctgttacaggtctctctgtgcctgtggtgataattctattgcagatggcagtcttcttgactttctacggcaagtgtccacatttggactatcccttgttagacttgatattaggcaagaatctgaccgacatactgatgttatggatgccataactcaataccttggaattggatcctatcgtgaatggtcagaggagaaacgccaagaatggcttctgtcagaactcaatggaaagaggccattatttggtcctgaccttccccagacggatgaaattgctgatgccctagatacttttcatgtgatagcagaactaccctatgatagctttggtgcatatgtaatatccatggcaacagctccttcagatgttctagcagttgagcttctgcaacgtgaatgtcatgtgaagaagccactgagagttgtgccattgtttgaaaaactagcagatctggaagcagcaccagcagctcttgcccgacttttctctgttgactggtacagaaataggatcgacggaaagcaggaagtaatgattgggtattcagattctggaaaagatgctggccgtttctctgcagcttgggaactgtataaagctcaagaggagcttattaaagttgctaagcagtttggggttaagttgactatgtttcatgggcgaggtggaactgttggaagaggtgggggtcctacacaccttgctatactgtcacaacctccagataccattcatggatcacttcgtgtgactgttcaaggtgaagtcattgagcaatcttttggagaggagcatttgtgttttaggacacttcaacgttttacatctgctactcttgagcatggtatgcatccaccaatttcaccaaagccagaatggcgtgctttgatggatgaaatggccgctgttgctacaaaagaataccggtccattgtcttccaagaggcacgatttgttgaatatttccgccttgcaacaccagagttggaatatggtaggatgaatattggaagtaggccatcaaaacgaaagcctagtggaggcattgaatcacttcgtgcaattccttggatctttgcttggacacaaactcgtttccacctaccagtgtggcttggttttggcgcagcgttcaagcatgtcttgcagaaggacatacgcaatcttcagatccttcaggagatgtacaacgaatggccatttttcagggttacaatagacttggttgagatggtgtttgctaagggtgatcctggtatagcagctctgtatgacaagttgctagtttctgaggatttgtggccatttggtgctcgtcttagagcaaactatgaagaaacaaagcaacttcttctacaggttgctggacacaaagaccttctggagggagatccttacttgaggcagagactgcgtatccgtgattcctacatcacagcgctgaatgtttgccaagcttgcacggctaaagcgtatcagggaccctggcttccatgtaagcccccgagctcacctctccaaggacataatggactcagggaagccagccgctgagcttgtgaagctgaacacaacaagcgagtacggcccaggcctcgaggacactctcatcctgaccatgaagggcatcgctgctggtatgcagaacactgggtgaagtagaactggttcgttctgatggtgtgttatggtgtcatgaattagtgtagtttgcacctctatgcaatcactatttgcagtttgcacctctgaactctatatgtaaataaggggatgctaagcaacgtataactaagactggttatatccatggatattacctgtttagcatgtaaaacgttgaagtgtcctagcgtacgcgcgcgtgc

SEQ ID NO: 49103 - DNA, 1813 bp, Oryza sativa
  Clone ID: PAT_MRT4530_51716C.1
gaccgtgttcctcaaaaagctaaatatggttaaatggacattctgcgctcctgatagctattctgttatcaggcttttctgttaaacacatcaaaaggctattctgttagcttgaagttttgattttctgtgtgatcttcacatgtgttcttatctgcttatgcgccgggggaaagccgctctctggcggccgcgccatggcgagggcgagacgtcccggcgtggaggcgacggcgatggagaagcggccgaccgcctcagcgccctcccggacggggtgctgcaccacgtgatgtcgttcctcaaggcgtgggaggtggtgcgcacctgcgtgctctcccggcggtggcgcaacctctgggcgtccgcgccctgcgtcgacctccgcatccggtacttccgcctcgacagcgagccgccggaggagccgcgcgatttcgtgaaccgcctcttccgccgccgggaggcgtcggcgccggtggacacgctccgcctgcagttgagcgacccggacaatttgtttgacaacgacgatgccaatgcgtggatccggactgccatcaagcgcaatgctcgattcattcatctcactgggcaccgcaaagagatcggggtgttaaagcacagggccttggtctctacccacctcaagatcttgaagctgtcctatgtcctgatcgatgacaagatcctcaagcagctttcttcagggtgcaaatctttggaagaactggatcttaaggactgcgtgatgaccggccatcagatctcctctgcttctttgaagactttgaagatggataggtgcaagatcaatgtggacctctctatcactgctccaaaccttgtttttctgaacatagtcacaccttacatccgagttccatcgttcaagaacttggagtcgctggtgacatgctctatcatacttgatgaccttttcttgggtgatgattatcagcacattagtgatgaagatgacattgatgaaaccactgatgatgatgattttggttatcagaagaatgataaggcagggtataggattaattacgctaaaaaaggatttgtgtttggtggaaacgaggatggttatggctatggtagtgatattgagagtgatgacaacacctatgaatatagtgagattgcaaatgagtgtggtgagcttcagtatggtaacaatggtgatggtcataattccagtaaagatggcgaatatgacaatgctgaaacatttggtggccaaaatgtgattcacagcctttcaaatgttagaagtttggaactcttagctggtgctggagaggtggttctttctagggaattgaaaagctgcccaatttttatcaacttgaagaccctgtcccttggtgaatggtgtatggatgctgaattcgatgcattagttttcttgctacagcgttcacctaatttggagaggctttttcttgaacctcagttgatttcattgttctgcaaaaagaacttcaatactaggaaggcattggaaagtggtgttaaacctacgggaagatcatttacttgtaaagacctgcaaatggtgaagatcagatgctcgaaggacgatgcgagagtccatatgctggcacatttgttcagggctaatggcataccctttgataagatttatgtccatcggtctgggagctctcgtctccgcagcgagaaggtgatgagagatctagccaagcaagaactggagttctgggggtcagatgagttctggggttcagattatgagtactgtggtccagatccggagttcggggattcggatttggaattctga

SEQ ID NO: 49104 - DNA, 663 bp, Oryza sativa
  Clone ID: PAT_MRT4530_51717C.1
tcagctattttgaatagccgcaccactctcaagctgtgcatcagcagaagcatccaggtcctgagggaagaagaacctgcacgtgttgtggtacagagttttacttaagccttcaatgtcagaaattcctttgcatccagctacaacctcaagaacttgctgaacaataaccttattagagtttacctgacataacttgcctttcgcgattccttccttcgccagagccagcagcgcctggaaatgcccttccggatctccactctcctcaaactccttgaaggcaccaagcataacatagtcaaaacaacccgcatccaagcagctgagctcaccgtcagtctcggcgatctcgagcacttctctagattccttcagcgagcctccggtgacgatgatgcggtcgacgccggccgcccacgcgcgggcgatcacggcggggatgtcggcggcgtggcactgcttgccgtggtagatgccccggtgaagttgacggcgatgtctgctcgtcgcggtggcgccggagatggagaagaagatgagaggaggagtagaagaaggccgggtcagtccaggtaggagcatgagagccgcgagcgagagagagagagagagagagagagtagagcactcgccgatgagcttgacgccggtggacgccat

SEQ ID NO: 49105 - DNA, 1369 bp, Oryza sativa
  Clone ID: PAT_MRT4530_51718C.1
cgttctttttcctgtccaccttctcccactccctcatccctgcccttcgcggctcctgccgtcgcccgagcccgctgcccctgcaaatgcccttccggggctcccctccccccttacgccccgctcctcgtcgcgtgcgcgccctccgggcccatcagctattttgaataaacgcaccactctcaagctgtgcatcagcagaagcatccaggtcctgagggaagaagagcctgcacgtgttgtggtacagagttttacttaagccttcaatgtcagcaattcctttgcatccagctacaacctcaagaacttgcctgactaagcagggctcattgcgaccttttactgtagaatccggctcgtacttttctttcttcttggatggccagacagacttcacgaacttgattccagcatgagtatttttaatatcacagtatggagagtctgtctctatcatcatcctctctgcaggaataccttgtagaacctcaagattttcactagtcttcagagagcatccattaatacctataaacatcttttcaaaggaaagaagcttatcacggtcctctgcagttccagtgaaggagtgtgtaacacccccagggaatctatacagattttctgacacaatctcacagaagtcttcaccagcagcccgcatgtgaagaaacattggcaattttactgcttcagccaattcaaattgcttcttgaagtacttcttctgtacatccgatggacaaaagtgaagtcgatcataatccagaccacattctcccactgctacaaccttgcctttcgcaattccttccttcgccagagccagcagcgcctggaaatgcccttccgggtctccactctcctcaaactccagcaatgaaagaggaatggaacacaatccacccctaccccgcatctcgtcgggtgcacgcccaccgtgcagaacagcctccctgcatcgtacaagcacatcacagcttctcaggcacattacaacaaacaccttgaaggcaccaaggagaacatagtcaaaacaacccgcatccaagcagctgagctcaccgtcggtctcggcgatctcgagcgcttccctagactccttcagcgagcctccggtgaccttccgcccggaccaaaccaaagaaagcaagagattaagcacaccaaagccgagccataagaaagtagaaaccaagcaagaaagaaggcgaaagggggaatggccggcagcaaagcagcgtacgatgatgcggtcgacgccggccgcccacgcgcgggcgagcacggcggggatgtcggcggcgtggcattgcttgccgtggtagatgccctcgccgatgagcttgacgccggtggacgccat

SEQ ID NO: 49106 - DNA, 402 bp, Oryza sativa
  Clone ID: PAT_MRT4530_51719C.1
atgggacgacgaggtggagctcgagtcctcgaggaacttgtgccgcatgggacgcccaccaagaaagcccccctcgtcgccccgccaccgccaccgccgccgccgaacaaccaagagtctgaatctgattctgattccgatgacggccaaaagtccgattccagtgacgacgaggcgctgccggtgccgaacccagcgcttcaggccaacaagaatgtgcctccgtccgatgatgatgaggatgacgaccaagagtccgattccggtgatgcccgaggtcgcaaggccagtgccttggatgctaagatcaagcagctgactttggctcaggtcagggtgtctttgcaggggcgtggcctggagaaggaactgatcaagttgctgtcgggcttgctcaagtga

SEQ ID NO: 49107 - DNA, 477 bp, Oryza sativa
  Clone ID: PAT_MRT4530_5171C.1
atgacgggaggaaggaggaggaaaataaaaagaaaaagaaaggctgacaggaggcaaatttatgccgcgaagggcaatattgtgatatttaccgaggcgcaggtaccactgatgtcagtgatcgaaaagctttgccatgacaaggctaatgtgtttggcacgtcatggattacgggcatccttgatggtagcgacgaaaccaacttcttcgagacatcttcaactgagaaggacttcaactctggtgtgggggaaaagagagcaagactgagtactacccactgtactcagcaagtcataccggaagagaagatgagaccacagcaacgtcttcgaggaaccgcggatcgacgaaacgaccgaaatctacgcgacaaacaaagcacacaagcaaaacatgctataagtctactgaaacaggaaaccaaaccatttttaatggattctatacatttttatgaatttaatgagacttga

SEQ ID NO: 49108 - DNA, 252 bp, Oryza sativa
  Clone ID: PAT_MRT4530_51720C.1
atggcgcccgggacagaggtggtggtcttcgtggtcaacagcgagcgcttcaagctctaccaccacggagccgctgtcgccgaccccaggggcaccctcctcgggttcctctgctcccgcactcgcttcaccagcgccaagcctcaccattgtgctgctatcggcgtcggtcacccggcagcctctccaccacctcccacctcctcctcgcctctctgccaatccggaggagatggtggatgccctccatga

SEQ ID NO: 49109 - DNA, 330 bp, Oryza sativa
  Clone ID: PAT_MRT4530_51721C.1
tttgttttttttttttttttttttttttttttttttttttttttttttttttttaacacccaagctgaaacggttttcctccttggggagttgggggttgggttcttgggggtcttttttcacctgcctgcatatttgtctcgggggggggattaccacgcaaacacaggacgacatacaaccgggggcttcaccctacttttttacagccaaacagggggtttttccagggtcttatatttaactttggggggtcaggggacgggcgggggggctaagctacataccgaggggatgggcattctggcggtacgacgaggttgtccgctg

SEQ ID NO: 49110 - DNA, 126 bp, Oryza sativa
  Clone ID: PAT_MRT4530_51722C.1
atgtccaagacagttagcatgacaatatccagcaaagtggggctgtggggtacacggtaccacggtactcacgggctcacggcaaggccttgggccaagaagcatggtgtgggccgagagccctag

SEQ ID NO: 49111 - DNA, 282 bp, Oryza sativa
  Clone ID: PAT_MRT4530_51723C.1
atgacggttgtgacggttggaatggtcggtaataccctccaacagtcattggggagccatctcagccgtccagaagaaccctggatcaaatggagctgcggggggttcggccgaaccatgggctgggccgacctggcccaatttcggcaggctgcctcctcttttgctctcatacgcagacttgtgcattttggcccaattcatcgtgtcaattctgagttcttggcccattcatacataagtctgattgccgacatcgttcgattgatttatcgtttgagt

SEQ ID NO: 49112 - DNA, 189 bp, Oryza sativa
  Clone ID: PAT_MRT4530_51724C.1
actttattggccggccttcctttttttttttttgaaagacgggtgtaaatgaattgtattatgctcagtatatgatgatgttacaggaaacgaacagtcgtatcgtaagatacaacatcaattcgactatggtaagtcattacattctgctataccataagcacccaacccttcggggagaaactagat

SEQ ID NO: 49113 - DNA, 1030 bp, Oryza sativa
  Clone ID: PAT_MRT4530_51725C.1
tttttttttttttttttttttttttttttttaagcacaaccgaactaaggcactccttaagagagctcttcattcaaaatattcagcttctcaaacaacacagattctcactcagattatcagaatccgaatacaaaagaagccataagcttgtagaactactcattccagattctcatcagccgctcctcagaacatcatgctccccccaataatgcaaagtatgtgcatgcatgcttggatatgatcttcaaatcatagttccaaacaaataataaaaccaacctctgcttaactgcaaccagtcaagagggtgtcggcccaatgggctggaaaaaatcacggccctacacaacacatgttgtggttagctagcccagcccaggcagaattacatgctcttgggaggcggcaggatccaggagtcgccgtagacgaagtgtgatccggtgaagggcttggcctggatgtcgctcagcaccagcgaccacccgatcctcttgctaggcagcgccccgggcccactgcacttgtactctccgtagtatatcccgctatgctcgggtttctggacttcccagccgtcccaaccgatcggcacaacctccttgcccatggtggtgtaggagtaaaccacccgggacgagtcaccccatgcccgccccaggtagatctgcccaatgccgctgatcttgcagcgcaggaaggagaacccggtgtcgatggcctcggcaatgttcttgctcctctgctgcgccgtcaccaccgccacctccttcgtcaccgactcaatcgtgcaatccgcgtagagggacctgccgaagccgaagatgaagtcgacgctgccacggatgaggcagttcttgaagtaatggaggcccttgtggtcgtacagcgtgtcctgcccgccgtcgatggtgcagttgtacatcgccaccttgctcccgaacacccgcagcgccaccgcctgccctccatgcgctcccggcgccgccatggcgcgttgttcttgaagatgatgctggaggcc

SEQ ID NO: 49114 - DNA, 3076 bp, Oryza sativa
  Clone ID: PAT_MRT4530_51726C.1
tcccaatctcgcgaataatcgagagagagagagagagagagagagagaggcgacgagacggcgattgctcggttctcccgcgggcgccgccgccacggcgagggcttctccggtggggggcggcgagctatcctagcgcccgccttgggagcgctctcgcggatctcctttggagctttgatagcatagcaagtggcagagcagaaactggggatggagaagaggatgggcacgaggcttgggcgcgatggacagagcgagaaagagtgcgcggctgaggagcagctcatgccgctcgaacgtggacggcgcggctggcggggagccggctggggcctcctcgccgcttcccaaccttctcagtgagtgaccgcgtttttcttgctaggccggttcatttttggaacaggatgtgagatgtttgttcctcactgtatttcctgattcttccaccagtgttagtgttctgaatattttgggctagacatcggagcaaggacttgtcgcatcactggggagttttacttatggtcgtggtgatggtgaaggcactatacggtttaacattgctgcttcttacccctggtagagatgccggtataattccacgtagtgcaaacccacctggacctgaatcgattgatggagacagtgagatgggaaatgtacaggctccacaacaactacatttaccacgcacgtaggatgttttttttaaaggagtaattgtgaggctcaaatactggcgatacctgcatgttgtacgagtcactgcgttactctcacggagctatatgtaatgtctaagtaggacgaatgggtcatcccagcagtcgagttgctagaacccatggatgtggatatgaccgactcatctacatgtgtgatttcacctccatgtacttacaactctgtaattatagggaagattggttggacattgtaaaaataggagatgaaaaaaaatgaacgatatggaaagcaatgtttatgacaccggcatctgttgtcaggggcgactactacgaaattcacgggcgaatactttgaagtaccacgatgattactcccttccaggccgtggacgttgcgaggggaagaaggggcggaagaccgggaccattccgtggtgcgcgcccagtgggcgtggtcgattctaagatgaaatcaggaggaggtgcccttgaagcttgagaactcgtgtgcttaaattatctgataatgctgttctgtatggggttttcgacatgaatccgtatgccccatcagtatgtttttacttcccgtggcggtgtgactgattgggcaaattttgtggctggatcttggttttgtagctaggcctgtcctgtcagcaaaagcaacaacaaacaaacaaacaccctgtgctgctgtttatttatcaacaacctaggtttccttccccagatctttctcatccgggtgagcttgtggaaggtagggctggtatgcattcgagacgatcaagttggggtcacagaagcggaacctcagagtcgatggacagcatcgctgtgcaaatgggaaccgaagctaactggggttcaatcagcagcggccatggaggttaccgtggtatttatattaccgtaccccgcggtaagtccggtaaccgcgcagttaccgacgaaggagatcaagaacaggcagtaggaggcctcttcctcttctccatggatcacctttgggcctctgtctttgggattcttggaaacatcgtctcattcctggttttcctcgcaccgatgccgacgttcctgagggtgtacaggaagaagtcgacggaggggttcagctcggtgccgtacgtggtggcgctcttcagctgcacgctgtggatactgtacgccatggtgaagaccaactccagccccctcctcaccatcaacgccttcggctgcgtcgtcgaggccgcctacatcgccgtctacctcgtctacgcccccaggccggccaggctcagggcgctcacctccttcctcctcctcaacgtcgccgccttctccctcgtcgtcgtcgtcaccgtcgccgccgtcgcccagccccaccgcgtcagggtgctcggctccatctgcctcgccttctccatggccgtcttcgtcgcccccatgagcgtcatcatggtggtgatcaagacgaaaagcgcggagttcatgccgttctcgctctccttcttcctcacgctcagcgccgtcgcctggttcttctacggcctcttcaccaacgacctctacgtcacgcttccgaacgtgggaggcttcttcttcggctgcgtccagatggcgctctacttcaaataccggaagcccaatacggctgccggcggcgtgatgatcctgccgacgacggcggctgcggcggcggtcgacggcgccgtggctgagcctgcggcggcggcgcagcagctggcggaggagctggaaatggagctcgcggccgcaggcgcgcacgcggtggccgtgctgccggcgagcgcgctgcccgtgctggccgagctgcacaagatggagcaggagatcgggacgccgcgcaagggcgccaccaagaccgtctgacggggtcgccgccgccgccgccgccgacaaggagctgctgcagaacaagccggaggtgatcgagatcaccgccgccgtgtgacgacgactgatctcgacgacgacagattctcgctactgatgaagaagacgacgacgatggccggatcgatgacggacagaatttagcagtgtggattactaccgaactttaattagttggttaattattggattacaatgtggtaagagtgtgtcattagcagctagttaacttacttaaattaattatcttgttcagtcagtcagtcagtcagtcagtcagtcagctttgagtgagtgagtgagtgatctcgacgtagtttgctggttggtgtaataagaaaaaggcgatctactagtagtctactagctagtacgcatgcatgtgtgtgtgctctacttaccgtgttgcaatctcatctctttgtacttacaactcagaaatcaatggaagattgtgacaggtattattagtagtt

SEQ ID NO: 49115 - DNA, 2858 bp, Oryza sativa
  Clone ID: PAT_MRT4530_51727C.1
catgacagacatcgacggtcaatcatcagataaacaatgggcaggttagtagcaacattatcaatctttcgtgacaaaacatgcacagttgcatgaccgaactactaccaatttacaatttgtgagaccaacatatggaacaaaaaccttgtttgtggctgtcaaactggtatcattagtgggaaaagaacacctgctacaaagaagtgtcagacactagaagtagatcagcaaccatttcatcgatcaaggaaccaagcaactctgttgtaatgtcaatgccagattcgtatgactccaacttgaaatctacccagctccccagaggactactcatttctttgtacacgagttcatccaccatccactcctcagcaaccttcagatcagtcatctccgcatagatttcttcagctgtgagcttcttcagaattgccatccccaagcaccatgagccgtagccggcattgaaatagtatgcccatctcacacttagtatctcgtctacacattcgaagagcagcctccgatttattcggagtgttttgccctctgatacacccaccgccaggcgaatctcgccattttagtctttcagaggttctaaatccaggatatctgagtttctcaatcgctccaagcccgagcaaatttgaccattaagacgactggtgtttaatatttctcttatgaaatcaatctcctgtctgcaatccattcggcttgaactgctgctatctgatggggggatatccgtcgtagtcacagtgattgatgaggctgtgtcagaatactccgagaaagcgtcagcttccaggaatttactgaagcatgcagaattagacgttgttgcaccttccgttgagctaaatactttggttccatttgcgcttctccagctctctgttgagctaccggtttcagttgaaacagaagcatcccatgttgaaaggggactgaggtgaaggcgctctatctccatttgatccatggcatcattatcatacttcacagattgagatgactgaccactctttgatgcaagatctgtctgggtgaaactgccttttccatccttataggattggacggactccctatcataatcagtagatgcaatgctcgatgtttcacatgctgattgtgaatcttccagaactgatgatggggcatatatccgaacatctttggctggcttacagtagggtgacctaaccccagaagtaagttctctcaacttctgctctaaaaggagacccaaataatcaccatcaattgaatcaaatttagcactcgatgtctcgcttgaatttggtactgagctcgcgtttattcataaactgtttttccactaaatgattgggtaggcgataaccagataatggtttctccactggggcggtgaatgtgaatgaaacaatatcagtgctaattttcttcttgttcatggaaaaaggtgattgctcatctattacaatattgtgccgaacacgcctttggcttctgtcagcaatatctttatcacttggacgggttttcactgaatgtatcctcccatctggtaatcttcctggcttggggattgatttggctgtagaattttgccttctatttgcatggccagttgaccgcaattccacgtttctgttaccttgagtattgttttcagacggtgtgccggcagtcccaacctttctcatagtgccatttattgaatgtgtgttgcttctttgccggttgggtgttggtggcttggaattcaccttgtgcttaaccatagcattttgctttctgttattttgcacaagcacattggacgaacttgccatgcccacttgattgttattcttcccttggttaatcccatttctctcaaccattctccgctcaggatcccgagttgcaagttttctgctaatcttgcttatatcttcccttccttgaacattagttgctctagaatctggtgatgatcgactgctggccttgacctttgggccaactggagcacctccatttgactgtgagaccacagaagcagaggtgttccctgaacttttcagacttccatccaaaggctttccagttggtagcctataagatgtcaagccatcatgcttcttcagtgcttcattcattcttggtggcctttgttggactatcgcaatctctctttggctgtatacacgaacagtatttgcatatccaacatcacgaactctgtaagggctaataacctcaactccagcccctataatcctagacgccgcctccattatatcagcagcatttctgctagatatatgattaggattcttcatgggggacaacttgttttgcgcaaccgacagtgtccttttggcaaatcttggtggcaatgcttccatcctaaaccggtcaataggactaccaggcatcttatgaggactaccgggcatcttatgaggactgccaacatagcttctgccaatgaactcatcatggatagtactgttctggggggactgctgcacagttaatggcatcgtataggatccagatgagcttgctgcgggcatggaatccagacccataagccttgctacaacagtggggcccctcctcacaagagcttcatcgtcaaccactgaagatgagcaactgtgctcactgctttccttcaaactcggtgcatcttcaaggaacgaatttggtcgagtgcttggtgtgccaccatcagattccctgaaattttcagaaacccttggagccggagaatcgctcccatttccactgaccagccgcttcttggacttcttgccccaatcaaacaggctaaagaagccatgtccctttgaagtaggcttctccacatccat

SEQ ID NO: 49116 - DNA, 295 bp, Oryza sativa
  Clone ID: PAT_MRT4530_51728C.1
ggacgcactcgagaatacacgcgagcgtcgtctcagtagatgcgccaatggtgcactatctcggcgaacacccgggggggcggtgcagaactcctatggacgaaccagcccctttgctgacctagaaggtaatcaaatgaaccggcaagggctgtatacaaacaaaatgggacctgcaaaggtaaagctaacacgctaagctgatggactatgctgcgcctaagcaacatgtatattacgcgagaacacaaaggctgggaactggcacgggatcatggagagtaaaacgggcgcg

SEQ ID NO: 49117 - DNA, 586 bp, Oryza sativa
  Clone ID: PAT_MRT4530_51729C.1
ggagaggaaaaaatggggcccgctttatatcaaagggaggagggaatactggcctcactcccagggaacaaaccaaaaagctttttgtcaaggggccgacaaatttaaactggaagctggaacgaaattaaaaaatcaaaaatagcttcaaaacaaatgggacttccaaaaggccaaaaacttgatcagggactcaaaacttgcaaaactttgcgctgaaaactatcctggaaaactactttaacctttaccaaacctgttaaggctcaccatgcgggcaccaccataacctccttttgccataaaaccaaactggttgggaaaccttcccccattttggaagcgcgaaccacccccatagcctccacgggaaccctgactacccctgtccctttgggagccaccaccaccttttccagggcctccaactttgcctgagtatccaaacctcccgccgccttgccgcccttgggaagaaacaaagttctcctgccacttgcccaagtgggatgagtcctgaccataaccacccctacgccgggggggggctccctcaagggcaccaccagttttggcctcatatgcc

SEQ ID NO: 49118 - DNA, 313 bp, Oryza sativa
  Clone ID: PAT_MRT4530_5172C.1
cggacgcgtgggttcttttcctgttttatcaacagttttaatatggccaaacaacagtgcagaatcgtgctacgtggatgaattactatcaaggagtacggcaatggatacactgaggcttcccgcttgttatcttaggaaggaggaatgccagggtctatgcaaagcacgatctgacggttcttattgagcgatataagagaacactgcgcgtgttttccacccgcaattgtgctagcatatgaactcaatgacggtcaatttagttgtttacagcatatcaccttaaagtcttcattgaactgaggattgc

SEQ ID NO: 49119 - DNA, 871 bp, Oryza sativa
  unsure (1)..(871): unsure at all n locations
  Clone ID: PAT_MRT4530_51730C.1
ggggatgtcctgcaagccgattaatttgggtaacgccagggttttcccagtcacgacgttgtaaaacgacggccagtaagcgcgcttaatacgactcactatagggcgaattgggtaccgggccccccctcgcgcccgtccctcgccgtctcagctagctagcagctagcccaagtactgacatacagtatgaagctgatgctcctcttcgccgccaccgtcgtcgccgcggcgttggtgctggtggcggcggtggatgtcggcagcagcggcgccttgttgccgatgcacgtgctgcgcggccgggtggctgacgtcgaggacgtggtggcgagcgtggtggaggaggaggaggcagcgtacccgcggaggaggatcctctacgacagccggtacgccagctacaacgggctcacggagagcaaggcggcgtgctacggctcctgccccggcaggggccagccgtacagcggacgcagctgcctcaacatctaccagtgcaagggctaaaagcttggagaaattaaagctgctggtgatatgatcgatcgatcgatcctctgcaataattctgcgtctgtactgcaggggaagatatgttcaaactaactgtgttgaaatgatactggtgaatttgtatgctgttgatgactttgtgttagtcgatcacttcatatatgtaatatgtagttaagtgttgtatccgattcacgtacgctcgtngttaatagctngtttgagcgttngatacaattaatatccggnctatacgattcattgttgttcgatgaattactgggacgangaaactgattaatcgatgaataaaacaanggtttgnntctgcaaaaaaaaaaaaaaaaaaaaaaaa

SEQ ID NO: 49120 - DNA, 534 bp, Oryza sativa
  Clone ID: PAT_MRT4530_51731C.1
atgcccccacagccaaggctccacatcacgaccatcttcttcttccagatgccaccacctcctcctctcccaggatctgctttctctcatgcgcaccggatccgctaccttctccgccctgttgccgttgccagtgctcctcagcacgcgttgccttcctcaccgcaccaccccatcaacaagcttagtcttttccttgaggtcgatggcaccctctccagtgtccttatgagttttgagttgttggcatcatcttggagttgcattgtgcctccacagctcagtgataacttgacgaacagtatgccgagtgttcaggagatcagcgtccacagggtggccaagatcgagccgacgacgccgacgacggtggcgaacgcggtgaagacgccggcgccgcctgcaggcggcggcattgacgcggcagcggcggggtacatcgccaagatgaagcggcggtgggcggcggagtcggcggcggcggcggctgcatcgtcgtcgtcgtcgactcgtgctactgcgaaaaagcgttag

SEQ ID NO: 49121 - DNA, 2628 bp, Oryza sativa
  Clone ID: PAT_MRT4530_51732C.1
atggagaggggtggggagatggatcctcccatcactgcctcgctgggagccattcatattgtttttgggaaactggtccggttgctctccgagcctggactgcggctgcacaaggaagagatgaaagcgctaggtgtgctcaaagacggcctccaagctaactactggatgaaggaggtgcgggagctgtgctacgacatcgacgactttgttgatgagcttttccatgctgccgctaatgccaagatccaaagagctctccagtttaaggcttctccactccggaagaaattgcccctctttaagacttctcagctccaggagaagttatcccgcttcaacgcttctcagctccagaagaaattgtcatggaggcaaaaaattgttgatgaggtctcaagtttcagttcttgcttgaaggaattgattatgctttataagcgttatgatcttggtagtttagagagacgttccgggtgggaatcaaatggaacaatgtctttaactctcccgttagctgaagagaccagccaacgctgctacctcggtatggacaaagatatggataaacttgttgggttactaaatgatgggcagcaagaatgcaaggtcattgctatcattggactttgtggtgttggcaagaccacccttgctgaagaactttatcagaagtttggatttcagtttcaatgttgtgcctttctaaggttatctcggaaacctgacatgaagagggtgctcggtagtttattctcacaagttcggcagcatgatcctcctggtactggtactgttgaggtggataatttatcccatgagatcaagtcatatctgaatgacaaaaggtattttattgtaattgatggtgtttggtcatcatatatatggaacactatcaatcagactttgccaaagaatttttacagtagaatattgataactacagaaattgatcatgtagctcagaggtgctgtgttgataaccgcaaatacatctttaagaaggaaccatttaataaagttgaatctgatgaattcttcagcagagtccatgaatatctaaaggaaatttcttctgagattgcacaactctttagtggcttaccgctcatgatggctattgtagctagtattttaacacgattgccaccaagcacagagcaatggaatgttcttatcagctatgggctaatacaacctgtagagaccaggtttgataatgaagtgttgtcctttagagtgcattacatgataattgattctattcggtctaaggcagtccagcacaattttgccattgcaattgataatcatcagacagatgtgcgaattgctgataagattcgtcggttgtcccttcgttttggcaatgcaaatgatgtgacaacaccaattgggttgagatggtcacaagttcgcacgcttgtcttttttggacctctccgctgtacaccttctattgctgagtttagagttcttcgagttttgatccttcgattatctgctgatgatgatgatgtaacttatgacctctcagaaattgctgagttgcttggattaaagtatctgtatattgatgcatgccatctgaatataaggctaccaatgcagatgcgacagttgcaatatttggcaaagttaaaaatagaagcaagattgagttatgttccatcagatattttttatttgccacgattgcaacagttgattcttccaagtgagactactttgccccatttcactgagccgatgaagtctcttcatactttagggtgttttgatctcagcgggagctcaacagaaagtattgtggatcttgggaagatggtaaatcttcaaaatcttcacatgacatgttctagtggacagcctgccaatctgaaacttctagggtctgttctcaataaactcaaaaacatgaagtctctaattctggtatttactggttcattggatgatgctgattcttcaattatggaaatttcttctgatgacttcagtgtttcatctcctccggttcttctgacaagtgtgttacctgcactcacttctctctctgtgtatatccaaagagcacctgaggaaaggatcagttttggtaaaggaggattcgtagctttgaagtactttaaactcaagtgcactgtaccttggctcaaagttgaggtagatgcaatgcctaatcttgaaaaactgaagctaaggttcaatgttggtctcagtctgcaaagagtgggtctgcatggcaataaccttatcaacattgagcacttgtcaaggcttaaggagatatatgcaaaagtggagagtgaaggttctgttgatgcagggtctgctttgatgactggtgtttggaatgatccaagaaatcctacaattaccattcaattgatttgtggtttctatggtgaaatgactagactgatgacaaaagatgatattatcttggaagaaaatccagacagcataactgaggatgaggtcagacagaaggatgagaagaaacaagtggatgatcacaggtttcaatttttcgcttctttactttggtttcactttttgaacctaattactcgtgtaattcctattataatgcagctaattggtgttgtaattaggacttag

SEQ ID NO: 49122 - DNA, 378 bp, Oryza sativa
  Clone ID: PAT_MRT4530_51733C.1
atggaggactcacctgggggtcggcgtcgggcgtcgggcgtcgcaggctcggtggaggcggcgtcgggcgtcggaggttcggtggaggcggctgcctcggtggcggcggcctcagactcagcgagggaggagtcggcgaagggcggcggtgccgggctcggtggagggcgtcgccgggggcccgtcacagatgactcatcggtgacgggctccatcacggagattgagatgacattcaggcccgtcacggatgactcatctatgatgggccctaagataatgcccgatagagatagactaatctctatcgggcttaaactaaggcccgtcaccgatgactatttttctatttttcccatcaagtctttatatttgtga

SEQ ID NO: 49123 - DNA, 108 bp, Oryza sativa
  Clone ID: PAT_MRT4530_51734C.1
ccgacgccttcaacgagagtatccgtcaaatagatcactcagtacccacgattactatgttactagagctaagtttagggctgcggcgagcacactgtgattctgttc

SEQ ID NO: 49124 - DNA, 367 bp, Oryza sativa
  Clone ID: PAT_MRT4530_51735C.1
aaaaaaaagggccccttttttaaagggggtttaaaaaagaaaccccccccaaaattaatcctgggggggttttttttggtttttggccaaaactgggtttaagaaaaattccttggaaggtaaattttgggactaattaaaaaaaccggggggaatttgggggaaaaattaggggggggggggcccgggctttttccccatatggttttggaggcttggggcttgcccccgggggggggggaaggatttaggccccaaataaagggggaggggggggaaaatgggtttttttcccgaaggggggctaaaaaaggggtaagggttggttttgatggaaaaaaatggggaccttcaacgctttgttttt

SEQ ID NO: 49125 - DNA, 441 bp, Oryza sativa
  Clone ID: PAT_MRT4530_51736C.1
agccggtctcctaaaattcagaaccattccaagtcatccatttccataaagaaatctgataaattaatgaatatagatgtgtggtcctgtatggatatagaaccttttggtcatgtgtggacactgtcgacgggggatacccgtagactggatataaagggtattggggtccgttggtacgaggatctacgtagtacgacatcaagcaaacaaaagacaaggattatactggttcaggccccttggtaggtaatagccctaatccagttggtatgggattatataatggaaaccacagattacaaagggaatagcagaactcgatgataccgtcgagatcgtagtcgagttagctgtggtgggtgtgttggcagtaagtttcgatgccttaggtcctgcccaggggctcccttatataccgcgggtcagttgatctccaag

SEQ ID NO: 49126 - DNA, 545 bp, Oryza sativa
  Clone ID: PAT_MRT4530_51737C.1
tgttttggtttttttttttttttttttttttttttttttttttttttttttttttcttgtttgtttttttttttttttttttgctcctcctcttccggccgtggcgggccgcccgcttttcgccgcggtgcctgtccctccggggggggggggccgggttgatttcctttccccggtccccccctctttccaatggccttttctcttcctggccccccccgctgagggcccccgccggccctggcacccgccccccccagggagcttcggcggttgatgctctcgccgcccggccgccaaccccgggatagtttgcggcgggtcaacatcgccaccccgccctgcatccccgctttttcttcctcgggccccccgctgcggggcgccaccggcgtgcccggggtctctgcgttgtagccggcatctttttttgctctctttttttgctcccgtccccacccggggggcggccccgtgggtccccccgggttttccccccccggccccgccggccccccggctttccccaaagtgagcacaacaaa

SEQ ID NO: 49127 - DNA, 115 bp, Oryza sativa
  Clone ID: PAT_MRT4530_51738C.1
gaaaaaacatgcttttggaccctttattccatcaggcagggaatacctgattatttataatacatgggtttagtaaatgaaataaccccgggtatttcctggcacaagatttttc

SEQ ID NO: 49128 - DNA, 3102 bp, Oryza sativa
  Clone ID: PAT_MRT4530_51739C.1
cgtggctccccgggctgcaggaatcggcacgaggccgctctcctgtctcgaacgtacacacacgcatcccaaatggcccacgtcatggccgcctccgagctcgtcaccgccaccatcaagcgccccttccagaacgacgacgacaacagcagcaacggcaacggcaacgccgacgggaagcccaaggcgcggcgccgggaggccgacccggcggcggcgctggccgcggcgcgccacgagttcggcgagcacggcggggtgaacatgtccatcgaggcgtcggcgacgttcacggtgatggagccggacaccatgcgccgcctcttctccggggagctcggcccggagcgcggcgacctgtacatctacagccgccacttcaacccgacggtgctggcgctggggcggcagatggcggcgctggagggcaccgaggccgcgtactgcacggcgtccgggatgtccgccatctcctccgtgctgatgcagctcgtcggcgcgggggggcacgtggtggcgtcgcggtgcctgtacggcggcacgcacgcgctgctgtcccggttcctgccgcgcgcgtccggggtgcgcgcaacgttcgtggacgctgacgacgaggcggcggtgcgcgccgcggtgcgcccgggggagacgcgggtggtgtacgtggagacgatgtcgaacccgacgctggccgtggccgacatcccgatgctggcccgcgtcgcgcacgacgccggcgccaagctggtggtggacaacacgttcacgcccatggtcgtctcgccggcccgcctcggcgccgacgtcgtcgtccacagcgtctccaagttcatcagcggcggcgccgacatcatcgcaggggcgatctgtgggccggcgagcctggtgaacgcgatgatggacctgcaggagggggccctgatgctgctgggcccgacgatgaacgccaaggtggccttcgagctctcggagcgcctcccgcacctcccgctccggatgcaggagcactcgcggcgcgccgccgagtacgcgtcccggatgcgccgcctcggcctccgcgtcgcctacccgggcctccccgaccacccgcaccacgcccgcctcctcgccatcgccaacccgggctacggcgccggcggcatgctctgcgtcgacatgggcaccgaggaccgcgccaaccgcctcatgcaccacctccagaacaccacccgcttcggcctcatggccgtcagcctcggctactacgagaccctcatgtcgtgctccggcagcagcaccagcagcgagatgccgcccgaggaccgcgctcgcgccggcatctcccccggcctcgtccgcatgtccgtcgggtacaacggcacgctcgagcagcggtgggcgcagttcgagcgcgcgctctcgctcatgcagcagcagcagcagcagcatcccgaccgcgacgccgccgccaagtactgcaaggtgtgacgtcacgagccccgccattgatggtgcgcattagcgacgatccgatttgttgtatctgccccgtgttgctggtttgtatatatagtttattatgtaattactagtgctacctataagtaaggtttaagctgttaaactgagtactatctgatcgctctggttcagatagttgaatggcacagctaagctgcttgttctctgggaaactgagtgtattggaataagctggtgaaatgttatatggacaatgtttctgcagcaaccttctttctcagtaagattatggcacttcgtgcgtgtcacagtctatatatattcttcagactgaaacacttggctggaatatgtatttacaatgatgaattctcaattaggagaaatgcacacttctaattctctctcactgaattactgatggttggagcgatccttatatatatgtgtgctcatgcagtttggaatatgttctggaccattctcttcggagactccattgctgcagcttcgagctctgaaacttcagcagggctaagcctccagcccagtgctcccaagttatcctcgacgtgcctgactgttttgacacctggaataggaattgtgcccttgcagatgcaccaatttatggccacttgagacatggtcttccccttcctttctgcaattcttttcagacaagtcagcagagattccaacccaggaagaatttgccggaacaacacagaccttggtccacttggaaggttagaagtagtatactttcctgtcagcattcctaatccaagtggactataagcaatcagacgaatgcccaaagaatcacacacagttttcagctccatctgctcatcccccatgctcagtagtgagaactgaacctgagctgagctcaatggaacacctctagatgatagatggctgtggatcttcagaagctgcttgggcccataattgctgacgccgacagcacgaaccaaacccttttcatacatctcaactagaccatcccaaagagcacgctcctgcagaggtgcatagttagcagtagaccaatgcagctgtcctatcccgagccgatcaagctgcaatctttccaaagaagacttgcaggcgctgacaaattggcctgatgttagccgccaaggatatgctgcaaacttggttgcaatgatcacatcatcaggggacttcatcggcccttcatactcgcggataaatttaccgaggagcctttcgctctgaccattcaaccttccagttccataagagtcagcagtgtcaaaaaggtttatgccattcttcagagccaaattgaaacactcctgaagttcagtatccatgctttcttgatatccccaaagtagctggttcccccaagcccatgttccaaatcccataggcgaaacagaaaggggaccgactttcaccttctgccacggccagaagaggggcggcgcgatgcgcagcgcggcggcaggcggcgacggtcgccggaggaggccgccgccggcggtgcgcggctgcggcgcgaagggcatcgccggcgccgccctggtggtcaccggcagagccatcgatcggtggccggagccgaggtcgacgaggcgcggaatttggcggcgcgttccctcgtgc

SEQ ID NO: 49129 - DNA, 540 bp, Oryza sativa
  Clone ID: PAT_MRT4530_5173C.1
atgcggcgttttcctccggcaggtgccatcttgcttctccggcaagggacgcggcgaggcgcgaggatgcgacggctaggactagcaagcggcggtgtggcggcatggacatgtggttgcggcggcggcgcaaggtccagccggcttccttcttcggaattttgtcggggaaatttgacgaaaattaccaataaaaaacggttaccgacaaaacggtcggaaaaaaccccatatcatttccgctaccattttcggaagagattaccgtttccatttccgataccgacaattaccgatactgacaattatcaataccgactgaaacggttagtgcaaaccggaaacggtagccagaattctcggaaatttccgtaccgttttcatccctacaactattgcgcacatagataccccatccgtaacatgtatagtactacatccaaagcggaaagcgatgcgaccctatcccgacaagcccaactatgcccaagcattgcaagctgctgctactactactacactattgtagcaaaccaaaag

SEQ ID NO: 49130 - DNA, 816 bp, Oryza sativa
  unsure (1)..(816): unsure at all n locations
  Clone ID: PAT_MRT4530_51740C.1
agcctcgccatcatccgcaatcgccgccgcgcgcanacgcagcagcccacaagcatcctctcnctcacgcgatcgcgccaacggcnatccgggcacgcagccatactccgccncgccancgctatcccacaccgcccgcanccagctcaccacccatccccgcacagacattcactcgagctcncgctcgcctccgcatctcccatcaccgacaccccccaccggtcgccccgcgcacactncatccacacacacgtcgtccacatcaactccaccacagctgtacnccnatgctcttgaacgctgcataccaagatcgacgccgctcacccancagtcacaacctcatcacccacgagatngctgatcgctcctgcggcgagtcactagtgagacggtccanatcgctgcatgangtcntnggtgctcatcatcgatcccaccccggcgcatcctcccactcccaagtccgtntagtnaacggttggaaacgacccgtgtaatgatggtcgtacttcctgcccacccacacctcnatccgatccatcggcggcaaccattcatggctcgtccttgaatactaaacgcactaggcgtcgaacggatcgccaataatatccgcaatctaaggacgaacnctaatgccttacgtaagcaaccgtgcattggaacaactcagtattgcatgcntaggcanncgatgtactcggtcaatgattatcgcatctcaagggaccaaccgcgatgccttgacgaccgtcaaggtagaccagctaacggtgaccccaatcctacattccaccagactaccagact

SEQ ID NO: 49131 - DNA, 593 bp, Oryza sativa
  Clone ID: PAT_MRT4530_51741C.1
ggagcagatcaagtttaagaattctttatgtccaggctttgttacaaccatcccaattcattaagagttcaccagaacacaacccacgaagccaggagaaaagctgataaagcagcatccaattacattccccaccacaccaatctataattagtctggaagctaagtagcttaccaaccatcatcagtcaggttacatgacagtcgagacaataagaactcacttagacttccatctgatcttcctccttttggacccatactttcaccgtcttatcgccgtcaagtcctcccgatgcaatcatgttttcattggggtggcatgacactgcaatgactgtgtcagtatgaccttccaatttctgcaaaatctttcttgactgaagatcccatatgtagacacacttgtcctccgagccactgacaatatacttgccattggtgattgaaaatgctgctggaatgcagtatttttgtgttcacatggccagtatatgtcttaagaaatttcccagctgagaaattccagagcctcagcttgctatcaagagtggcgggaagcacgaacttcccattgggcgagaacttggcga

SEQ ID NO: 49132 - DNA, 408 bp, Oryza sativa
  Clone ID: PAT_MRT4530_51742C.1
ttttgttttttttttttttttttttttttaaattttaataattttaatgtattttttttttttttttaaattattttttttttaagttttttcaaaataaaattaaaaaaaatgattattaaatagtttggtttatattacaagaagcataataaggaaaaaaccatctaaaaacaacaggaataaaaaggaaaaggaaaccagcaaatgaagcctaaggcgccgggtgacagaggcccgccttggggagcaatttcccaatcgcttaaggggagcacacctggtactgaacctccccggtgacgggctgcaggaaaaaatcggcgaggtccagtttataggaggtaaaattggtcgaatccatggacatgctcaggaccttgagggcaagggttacgggctggtccc

SEQ ID NO: 49133 - DNA, 423 bp, Oryza sativa
  Clone ID: PAT_MRT4530_51743C.1
atggatgatggtgatactcactcaaaaccgcggacatgtgcgatgacgcagtggtcggccaagggagacggtggatgtactacacccgagctcaaggaggagcagggcgaggccggcgtccatccccatgcagtttgccaggtcagagccagagatggagacgaagatgaaggggggaagattgagagggaggtggcagcgagggggttcctggcgacgaggatggtgtgggaggtgcgcgtggtggaggcggaggcggagaaggtggcgaggaaggtggaggccgaggcgaaggcgctgaggcggaacgtgaggaggaggatcatgtcgtcagcgaggttctcatgcggctgctgctctggctcaacgcggtctacggcgcaatggagtcctcgcgctgcaggacaccatcgatgcccttga

SEQ ID NO: 49134 - DNA, 1749 bp, Oryza sativa
  Clone ID: PAT_MRT4530_51744C.1
atggtcactactacaaatatcaatgactacatcaataacaataaagattccacagaagatgaagtgacatttgctcaagtggagatggtttacgacaacgagcagactggttacacgcagatgctccaacttccaagggatctagttatcttgttcaagatcctacatcctgaagatcaggacaacatccatatcatctggtatcaaagctttcgttgtcacgggagaatgtatattcatcttccattttatggaagcgctgatccagaggagtattttggatgggtaaatcaaatggagattgaacttgaagcccaatgtttttgtgaagagaagaaattgcagcgtgctactctcgagttgaagcatgtgaagcaaggaaccaaatctgtccaagcatattatgatgagttgagttcttgcttgtgccgagcaaatgccattgatgatctagatgcaattgagtattttaagagaggtctcagtcctaaaattgctactgcaattgagggaagatatgcaagaagtgttcgaggtttcttgatctatgccattaaagaggagaagaaatgggaatattattgcaagaagaaaagaagtatatcaccaagtaagaagatgaaggttgacgattccacccccacgccaaattgtttacgtccattggagaataccattgttgatggtggaacttttgctcctggtgttcaagtggctttggaggaggttgcagttgacgaccattgttctattgatgccccttgttatgctgatttggagatgcaacaaaacccaagtgagaatgagagccacatagccaaattgagtgaaagagataaaaagagtgtgttgtctgattccaccaaatatgaggttgagagcatccacaatgagagtgagagaaatacaccacacaaaaagagaggattagagtgcaaagcatgtgaggatgtttttgattctaacaaacttatctccacttttagtgttgtctctcctaatgttcaggtttgcaaagaaaaagatgaagagatagttgtcaacccgatgaaatgtcaagaagataaaagaattgagaagatagaccttatggagaattacccaactactgccctgagtattaaccatgatgataagggaggtaaaaattcagaaacgacacccacattcgatacgtctccacaagagctgaaaggtaacaaagacgaatcatatttctgcaagcatgaagagttggtgagtgaatttgttgatacacttgatcaacgtgatattttaattgcaaataaatttgatcttgtggaactgattactcatgatgaagtctttacaaaaatattgcctgttgaaattttgtgttatatcatcctcgataaacatgttgaaatacacgatatgcttgagaaagtttctgaaatagcttcgctgaaatctttgaatagtattcatgtatgcaagtatacttttaatttgattggtggatatgctgaaaataaattctatatgtgtgctatttgcattacttgtgacaagcttgctgatttgaggttaaaattagtgaataatcatgcttttgaaccttcttatgctcagccctctcatcagccagttgcatacacccccggaactcctttcgacaactctatcaatgcccttagtcatactcttgaactcgaacatatctacctcattctgaccatatctaatgttgccttcactgtaatacaagtcgaatatcagcttacttaa

SEQ ID NO: 49135 - DNA, 399 bp, Oryza sativa
  Clone ID: PAT_MRT4530_51745C.1
aatacgtgattgagtcattggtgtccagtggggagaagaagtattctcctcgctgggcaaccgacagtgaattagttgtcaacttgttcgccatggacatccgattggcgggtttagttttcgtcatcacatccaattggcggttcaacatgctgtgcttggtgatgcttcctggtcaaagctaacttcagagaaaagtagaaactctaaaatggttgctacttcttaggtttctaattgtaagtttttttcccttttgaaccttcctttgcatctctcttatttatcatgagatgaaggtgtactcaacagaagtttgatgtaatccaaaacatttatgattgcgatgggttgaactgtttgtgatgtctgctgcccctgctcaaaaaaaaaaaaaaa

SEQ ID NO: 49136 - DNA, 318 bp, Oryza sativa
  Clone ID: PAT_MRT4530_51746C.1
atggcggagagtaagaagcgcgggattagggattggattggtgactcccggcggaagcggaaccacaagccgggccgattgttcttcctcctctcgctctcctcccaacctccgcggctccaccttgcggccgtgaaaccaacggaggccgacagggcttcgcttcgggatgtggccgcggcggcgcggtggcgagaaatgaactctggcaaggagaaaaactcaaagcacttaccggtcggattccgcaaaattatgggccgaaggtggatcatatatgggctgaaattgcgatcatccacgtgctggaaggaataa

SEQ ID NO: 49137 - DNA, 3270 bp, Oryza sativa
  Clone ID: PAT_MRT4530_51747C.1
gggagggctgcctgtttccatcggtgccgggaggggtgcataacgtatcgagcatcggtctcctctgctctcttgggtttcctctgcccagcccttctgcccctgagcattctctggggtgactgcatttggggcttggcctgctgctgacgcgacgcgctttgagaactgcgagttttaatctgattctagagttgaagataacgaaaggagcaagggtgaactctgctgacttggtttttgtgtgcacagaccaactgcagctgaggatttagtagattgactgcaattggatcaattcaagtagaggtctaggaggaggtatgaggtactacttgtgtcaggtccagcgtttggttggagatatggaaggaggagtgcttttgtttgtggaagacctcaactctaactgacaaagcgaccaattgccaacacttctgttatatttcttctttttcttgaattgggaatggagattaattcctctggtgaggaagcggtggtaaaggtgaggaagccatacacaatcacaaagcagagggagcgttggactgaggcagagcacaacaggttccttgaagccttgaaactgtatgggagagcctggcagcgcatagaagagcatgttgggacaaagacagctgtgcagatcagaagtcatgctcaaaagttcttcaccaagttggaaaaggaagctatcaacaatggcacttctccaggacaagctcatgacatcgacatacctccaccacgaccaaaaagaaaacctaacagtccatatcctcgaaaaagttgtctcagctctgagacatccaccagggaagttcaaaatgataaggcaacaatatcaaatatgacgaacaatagcactgcacaaatggcaggtgatgcagctcttgagaaacttcaaagaaaggagatatctgaaaaaggaagttgctccgaagttcttaatctctttcgagaagtcccatcggcatcattttcttcagttaacaaaagctcttcaaatcatggtgcatccagggggctggaaccgactaaaacagaagtcaaagatgtggtcatcttggaaagggattctatttccaatggtgcagggaaggatgcaaaagatatcaatgatcaagaaatggaaaggctcaatgggatacacatcagctcgaagcctgatcattctcatgaaaactgtttggatacctcaagccaacaatttaagccaaaatcaaactctgtggagacaacatatgtggattggtctgctgcaaaagcttcacactaccaaatggacagaaatggggttactggctttcaagccactggaactgaaggaagccatcctgatcaaacaagtgatcaaatgggaggagccagcggaactatgaatcaatgcatccatccaacacttcctgtggatccaaaattcgacggcaatgccgcagcacagccctttcctcacaactatgcagcctttgcaccaatgatgcaatgccactgcaaccaagatgcctacagatcttttgccaatatgtcatccaccttctccagcatgcttgtctccacattgttgtcaaaccctgcaatccatgcagctgccaggcttgcagcatcgtactggcctacagtagacggcaatactcctgatccaaatcaagaaaatctttctgagagtgctcaaggaagccacgctggctctcctcccaacatggcatctattgtcgcagctacagttgctgcagcatcagcatggtgggcaacacaaggtcttctccctctttttcctccacctatagcttttccatttgttccagctcctagtgctcccttttccacagcagatgttcagcgagctcaagagaaagatatagactgcccaatggataatgcacagaaggaattgcaagaaactcggaaacaagataattctgaagctatgaaggtcatagtgtcttcagagactgatgagagtggaaaaggagaagtgtcgctccacactgagttaaagatatctccagcagataaggccgacaccaaacctgccgcaggagctgaaacaagtgacgtttttggaaataagaaaaagcaggatcgctcttcatgtggttccaacacaccgtcaagtagtgatatagaagcagataatgctcctgagaatcaagaaaaggctaacgacaaggcaaagcaagcatcttgcagtaactcttcagccggtgacaataaccaccgtagatttaggagcagtgcaagcacaagtgattcatggaaggaagtttctgaagagggtcgtctggcttttgatgcactgttcagtagagaaaggcttccccaaagcttttctcctccgcaagtagaaggatcaaaggagattagcaaggaggaagaagatgaagtaaccacggtgacggttgacctcaacaagaatgccgctattattgatcaagaactcgacacagcggatgagccaagagcttcctttcctaatgaattgtcaaacctgaagctgaaatctcgcaggaccggtttcaaaccatacaagaggtgctcagtggaagcgaaggagaacagggtaccggctagcgatgaggttggtaccaagaggattcgtcttgagagcgaagcatcgacatgatttgctttccacctggttgctggcctctaccaagtcagaagttaaatttacatccgagctaccataggacttcagaccttccaatgcattacctcacaaactcaatttattgtgtgttgtatcttaatgcttgccaagcagctcctatagactgcttttaaaccgtatctcatagacttttgattagcatttaagcgactgctaaactttcttcataaaagggtattatccttattatgcattatagtctggggaaggtaataagtggaattttggttccaaaaacaaagaaaaaaaaaattaaaaatctttgtgacttgggaaaacccctgggtttacccaatttaaattcctttggagaaaataccccttttcccacggttgggtataatcaaaaagggcccacacgatcgcctttctcaacaatttgccaaccttaaagggtaaatggaaacccccttttatccggcgatataaacgccgttcggggtggtggggtatttctaaatatgatctcattcatttttcatacgccatatactcccagtctgtatcgtttattatcctctctttcgtcacaacatctttcggttttcttccttatatactaaaacttggggtccgcctgttggtcttgatct

SEQ ID NO: 49138 - DNA, 2352 bp, Oryza sativa
  Clone ID: PAT_MRT4530_51748C.1
atggagattaattcctctggtgaggaagcggtggtaaaggtgaggaagccatacacaatcacaaagcagagggagcgttggactgaggcagagcacaacaggttccttgaagccttgaaactgtatgggagagcctggcagcgcatagaaggtctcattgcaagatctatgaatggggaggaacacaagcaaggcagacataatccgttggaaaaggaagctatcaacaatggcacttctccaggacaagctcatgacatcgacatacctccaccacgaccaaaaagaaaacctaacagtccatatcctcgaaaaagttgtctcagctctgagacatccaccagggaagttcaaaatgataaggcaacaatatcaaatatgacgaacaatagcactgcacaaatggcaggtgatgcagctcttgagaaactcacttacattcagaaacttcaaagaaaggagatatctgaaaaaggaagttgctccgaagttcttaatctctttcgagaagtcccatcggcatcattttcttcagttaacaaaagctcttcaaatcatggtgcatccagggggctggaaccgactaaaacagaagtcaaagatgtggtcatcttggaaagggattctatttccaatggtgcagggaaggatgcaaaagatatcaatgatcaagaaatggaaaggctcaatgggatacacatcagctcgaagcctgatcattctcatgaaaactgtttggatacctcaagccaacaatttaagccaaaatcaaactctgtggagacaacatatgtggattggtctgctgcaaaagcttcacactaccaaatggacagaaatggggttactggctttcaagccactggaactgaaggaagccatcctgatcaaacaagtgatcaaatgggaggagccagcggaactatgaatcaatgcatccatccaacacttcctgtggatccaaaattcgacggcaatgccgcagcacagccctttcctcacaactatgcagcctttgcaccaatgatgcaatgccactgcaaccaagatgcctacagatcttttgccaatatgtcatccaccttctccagcatgcttgtctccacattgttgtcaaaccctgcaatccatgcagctgccaggcttgcagcatcgtactggcctacagtagacggcaatactcctgatccaaatcaagaaaatctttctgagagtgctcaaggaagccacgctggctctcctcccaacatggcatctattgtcacagctacagttgctgcagcatcagcatggtgggcaacacaaggtcttctccctctttttcctccacctatagcttttccatttgttccagctcctagtgctcccttttccacagcagatgttcagcgagctcaagagaaagatatagactgcccaatggataatgcacagaaggaattgcaagaaactcggaaacaagataattttgaagctatgaaggtcatagtgtcttcagagactgatgagagtggaaaaggagaagtgtcgctccacactgagttaaagatatctccagcagataaggccgacaccaaacctgccgcaggagctgaaacaagtgacgtttttggaaataagaaaaagcaggatcgctcttcatgtggttccaacacaccgtcaagtagtgatatagaagcagataatgctcctgagaatcaagaaaaggctaacgacaaggcaaagcaagcatcttgcagtaactcttcagccggtgacaataaccaccgtagatttaggagcagtgcaagcacaagtgattcatggaaggaagtttctgaagaggtggtcgtctaccagcattccgcatattcacatttatcttactcgctgaacatccatcactgcttttctaattcacatttctgctgtcagggtcgtctggcttttgatgcactgttcagtagagaaaggcttccccaaagcttttctcctccgcaagtagaaggatcaaaggagattagcaaggaggaagaagatgaagtaaccacggtgacggttgacctcaacaagaatgccgctattattgatcaagaactcgacacagcggatgagccaagagcttcctttcctaatgaattgtcaaacctgaagctgaaatctcgcaggaccggtttcaaaccatacaagaggtgctcagtggaagcgaaggagaacagggtaccggctagcgatgagggggaaacagggtgccagagtgggaagaacgtgttcaacgtgcccacttgcaagcatggacaggctggtgctgtgtacaacttcttctctgctacccaacaggggaaaatgcgtgactatgaaaggttgatgtga

SEQ ID NO: 49139 - DNA, 789 bp, Oryza sativa
  Clone ID: PAT_MRT4530_51749C.1
atggaggcccatcaagataaccaccctagccagagacaaccacgaccattgtcctatggcagtagccgtccactgttagcgacaaaattttcaagccgcggagaaatttcacagctatttgccgatgtcatttaccaggacgctgtggttgtcaccgttcttggagctggcaatccaaacacaacgaaaatatcagctatgataggcttcgtgtgtgactgccagattgatgattttgccttactgccgttcaggcacaaaattgtcccaaacccactgcgccaaagagtcatacttgcactcgaaggaataccaccagaattatggaacaagcaggccatgaaagaattactagacggtagttgtatggttgaagagctttatgaagagcatcatatacaaaacctgtcgattttcagattgtctgcatggacaactgaccgcaatctcatccccaaactaatggattggaatattgaggaggttcaaggagaggaacaatcatctgaccaaggctggaaacgcaatgcagatttatttgtcatattaattcacattgaaaagctttttgactacactgatgaagacagcgacaatgagatcgatggagaagttttaaagcaatatgagaaagacaaccgtcgactgccagttataaagacattccagtgggtatctcggcaaacagacacagatagcggacctgttgaaggcgggtcgccggcaaggccaccacggcgtcttcctcttgaatttcgtaggcgccacccatatcatccagctccatag

SEQ ID NO: 49140 - DNA, 321 bp, Oryza sativa
  Clone ID: PAT_MRT4530_5174C.1
gggggggaaaaaaactgggtttatagacggaaacgaaacttggttttacaggggggcacaacttcaaaaaaaagccccaaagaggggggaacatatggaaaaaagttttgacccccgaaaaaaagatctagtttccccaaaaggaaaggtaggtaggacctatttaaaggaaggggggggtcccaaaaaggggcccaaattgaaaatggacccttgaaaaaaaaacttggggcaaagggggcccctggcaccaaagaggggaaacttggcaagaaagattgggcccaccccgtttccaaaaaagaacccccaacccggggg

SEQ ID NO: 49141 - DNA, 660 bp, Oryza sativa
  Clone ID: PAT_MRT4530_51750C.1
atggcggcgagcttccatgccgctctcctcctcctcttcttcctcctctcggccgtggccgggcgagaccaccacctggtggtggagaagtacggtgtcagcatgaaaggcgccgacggcgacgtggtgcaccgtgcacctggccgtgcacaaacacgactactccttcgctggcttcgccaaccgaagcggccattggcacgtcttccccggcgtctcccgttccgcaacacctaccgcgaccttattggcggcctcgagaacatccccggcctgccgctcaggagggcggcctcgctgcgcgccatcggggcactgtcctcctacgacgccggtgccaccggcgaggaggcgatgaggcgtggcgtggcaacactgtcgatggtgctgacccaagccctgcggctaaggccagtcggggagaccgtgtcgagcaggtgggagagcggtgaggcgcgcgtggcggcggagcacctgccgtacatcgagcactggtacaccatgtcgttcgaggtcctctggtggaggcgcaccgggaggtgggacagcccgttcactgagctgctgaggaggcgtgccggcgaggcgctcgccgtggtccgtgtgatcgcgaacaagagcttcgtgcagctgctgcgggctcacagccacggcgcctga

SEQ ID NO: 49142 - DNA, 2136 bp, Oryza sativa
  Clone ID: PAT_MRT4530_51751C.1
atgtcgtacgcgtccggtggcggcggcggcggggagctggcgacgaagcggtcggcgttccacatcgactatgggggtggcgtgtcactgcggcggctggcgcagccggaggccctggcgcgcgggatgatcacgcaggggtcggcgcagctgcggacgctggggcggtcgctgcggacgggggcggccatggcggtggtgttccaggaggacctgaagaacacctcccgcaagatcttcgacccgcaggaccggctgctggtgcgcctgaaccgcagcttcgtggtctcctgcatcgtctccatcgccgtcgacccggtgttcttctacgcgccccaggtgacggcgaacggcggcaacctgtgcgtggggatcagccgcgacctggccatctccgccagcgtcgtgcgcaccgtcgtggacctcttcttcgcggcgcggatcgtgctccagttccggaccgcttacatcgctccgtcgtcccgcgtattcggccgcggcgagctcgtcatcgacaccgcccagatcgccgcccggtacttccggcggttcttcgccgccgacctcctctccgtgctcccgctcccgcagatcgtgatctggaagttcctccaccggtccaagggcgccgccgtgctgtccaccaaggacgcgctcctcatcatcgtcttcctccagtacatcccccgcgtcgtccgcatctaccctctctcctccgagctcaagcgcaccagcggcgccttcgccgagtccgcctacgccggcgccgcctactacctcctctggtacatgctcgccagccacatcgtgggggcatcgtggtacttgctgtcgatcgagagggtgagcgattgctggaagaaggcgtgcaacgagttcccgggatgcaacaagatctacatgtactgcggcaacgaccaccaaaaagggttcctcgagtggcgaaccatcacgcggcagtacatcaacgagacgtgcgagcctagggacggcgtcatgcccttcaactacggcatctacacgccggccgtcaggtccgacgtcatcaagtccaacgacttcacctccaagctcctctactgcctctggtggggccttgccaacctcagcacgctggggcaagggctgcagacgagcatatacacgggggaggcgctgttctcgatattcctggcgacgttcgggctgatcctgatggcgatgctgatcggcaacatccagacgtacctgcagtcgatgacggtgaggctggaggagatgcgggtgaagcggcgcgactcggagcagtggatgcaccaccgcctcctcccccaggagctccgggagcgcgtccgccgctacgacgcctacaagtgggtcaacacccggggcgtcgacgaggaggtcctcgtcgccaacctccccaaggacctccgccgcgacatcaagcgccacctctgcctcggcctcgtccgccgcgtcccgctcttcgccaacatggacgagcgcctcctcgacgccatctgcgagcgcctccgccccgccctctacaccgagcgcaccttcatcatccgcgagggcgaccccgtcgaccagatgctcttcatcatccgcggctgcctcgagagcatcaccaccgacggcggccgctccggcttcttcaaccgcagcctcctcgaggagagcgacttctgcggcgaggagctcctcacctgggcgctcgaccccaaggccggcctctccctcccctcctccacccgcaccgtcagggccctctccgaggtcgaggccttcgccctccactccgacgagctcaagttcgtggcggggcagttccgccggatgcacagcaagcaggtgcagcacaccttccggttctactcccagcagtggcggacgtgggcggccacctacatccaggccgcctggaggcgccacctcaagcggagggcggcggagctgcggcggagggaggaggaggaggaggaggccgccgcgatccgctcgtcgacggggctcaagaccaccatgctggtgtcgcgcttcgccgccaacgccatgcgcggcgtccaccggcagcgatccaggcgggccgacgaggtcctcatgatgcccatgcccaagccctccgagcctgatttcggcgccgattactga

SEQ ID NO: 49143 - DNA, 225 bp, Oryza sativa
  Clone ID: PAT_MRT4530_51752C.1
ccgagattaggtgtgggttagttggttagcgttagctgttggtgtgttggctttagaggttgttgtcaagtgtttgttcagcttttggtctgctcctaagctccttgctgtggttaagcttactagtcttgttttgctcttgtatggttcgctggcatccccagctgttaaaagacaccgccgatgtggctttcaagtaaaagccaggtctctgaccttttctct

SEQ ID NO: 49144 - DNA, 704 bp, Oryza sativa
  unsure (1)..(704): unsure at all n locations
  Clone ID: PAT_MRT4530_51753C.1
ttcccagtcacgacnttgtaaaacgacggccagtgagcgcgcgtaatacgactcactatagggcgaattggccgcccggccacaaggcccacgacccaacaaccttccactgatccacacacagccgcgaggagagagaaagagagaggagagagagatggcggcggagctgacggcggcgcagctgcgggcgtacgacgggagcgacccatcgaagccgatctacgtctccgtccgcggcaaggtctacgacgtcacctccggccgcggcttctacggccccggcggcgcctacgccgtcttcgccggccgcgaggccagccgcgcgctcggcaagatgtccaaggacgacgccgacgtctccggcgacctctccggcctctccgacaaggagctcggcgtcctcgccgactgggagaccaagttccaggccaagtaccccgtcgtcgcccgcctcaccgaatgaaaaaaaaaaatccccccaaatcaacccttagattattgtatcctcttgtgctctacagcttaattccatccgtaattccatgtgtaacttattattacttctccctgtgtgtcagtgtgtctgtgcttgcagctttgctctctggttgcttgattagctgcccaataatctgaacaataagaaatctggggagtaatttaagtattggattgtctgaaaaaaaaaaaaaaaaaaaaaa

SEQ ID NO: 49145 - DNA, 1656 bp, Oryza sativa
  Clone ID: PAT_MRT4530_51754C.1
atggcgatcggcggcggcggcggcggcggtagctggagcatccacggccgccccgacgtcacctcccgctacgaggtcctcggccgcgccggctcgggagcctacgccgacgtctaccgcggccgccgccgctccgacggcgcccccgtcgccctcaaggaggtccacgacgccgtcagcgcccgccgcgaggccgacgccctcctcgccgccgcgccctcccgccacgtcgtcgccctcctcgaccacttccccggcggggaccacgacgacgacgtcctcgtcctcgagtggctcccgctcgacctctccgccgtcgtccgcgccgccgccgccgccaggccgagcgccctccccgccgcgcagcgcaagcgctggatgctgcaggtgctcgagggcgtcgccgcgtgccacagcgccggggtcgtgcaccgcgacctcaagcccgccaacctgctcatctccgaggacggggtcctcaaggtcgccgaccttggtcaggccaggatacttcaggagacaggaacataccaaggtatgcatccatatgagcaaagttcaggagtggagccttgggtttcacaacaacgagcagtgctacatggagtgaaagagaaccacccatctcatgactcagaaactcaaactggtcaggagccagagagactcaccgcagctgattacctacatgagatggaccaactccgggccaaatccacacatggagatgttgacaaaatgagcctacaggatgggaatgcctcctgtcttgccacatgcagcacagcagacattgacgatgatccatttagagcctcctattcatatgacgcagaagaaggcatgttggaagaagagtccggtgctttcacttcttgtgttggcacacgctggtttagagctccagagctcctttatgggtcaacaaactatgggcaggaggttgacctctggtcactaggatgtattttggctgaactgtttaatttagagcctatattcccaggcacatctgatatcgatcagattggtagaattatcagtgttctgggcaacatcacagaagaaacctttccaggctgttcaaatctgccagattacaataagattttcttcaacaaagtcgagaagccaataggcctcgaagcatgcctgcctgatagatctgcttctgaagttagtatcataaagaggctactttgctatgacccaacaaagagggccagtgctgccgacttgctgaatgatccatacttcgccgaagaaccattacctgtacctattgaaggattacaagtcccagaatcaaaggatgaagatgatgacagcacagaagaatgggctaatttcaggggtggagattcagattcagacttcgatgaattcggcagcatggatgtcaccaagaccgacaagggtttcagcatacgcttctcgtgatcaagaatgattgatgagggtaattgtatcttcctgaacatgctggcagaggaatttctgtcgcagcatattgtatggcattttgataattgttttactatttgtaaactgcgatatgttcattatgttgtgtacaacagcaccagctttcctggtaatgagatgaataaactacagtctgcaccaaaaaaaaaaaaaaaaaaaaaaaaaaaaaaa

SEQ ID NO: 49146 - DNA, 217 bp, Oryza sativa
  Clone ID: PAT_MRT4530_51755C.1
tcatccagtccactggtatcttgtgacaaggactccgcactggggcagtcatgaacaacaatggcgagtccatgctcttatgttgagatgcacttttttgatgccttgccaatttatattcacattcttactccagtaaagacccttcttagtcatggcaaaggacactccccctgacaaactacgagctgacatgcagatgtggttctcattctaa

SEQ ID NO: 49147 - DNA, 470 bp, Oryza sativa
  unsure (1)..(470): unsure at all n locations
  Clone ID: PAT_MRT4530_51756C.1
gggttgtttttttaaaaatttaatttattttttttttttttttttttttttttttttttttttnaaacgaagggattggtgaacccaggaacgggagcccgacacattgacgaaaaacttttttttagaagagcaggagttaaaaagggttgaagtaaaagggggcgcggaggcccccgcaaaaaaattttcccccgcaaaaaagaccaccaaccctaaccccaaaaaaaaaaggtaccggggggggagggaaaaaaggagggagcctaccaagagaaagggcggcggcccggtcgggtttccacaaagaaaccctgctggaaaaaaaaaaaaaaaaaccagggcgacaagaaaggagaatcgccctcttggggagggggggcctcggtttttttttttaaaaaaaggaaactgcccaccagcgggtggtccttaacccgccgccgggggaggagagggttttagtttac

SEQ ID NO: 49148 - DNA, 658 bp, Oryza sativa
  unsure (1)..(658): unsure at all n locations
  Clone ID: PAT_MRT4530_51757C.1
ggcagntngnggacggctttggatggtagccaaagccggcagcgctaggagaggctgcaacagtggctggcaccggttaggcaggatgcggggcttctgggttggatccgccggaacgctgtggtgattgctcgagtgcagtcggcagagcagctgcatgggcgtttggcggtcgtcctagtcgcaaaagtgggccgcgtgggcggtggttgaggctgtgttcctggctattcaagttggcatcaacggcgaccgcagccctgccgcggtgagcgactggatctggtgcgtcctcgctaggggtagggatccgagccacggggcgtgctagcatccgagcagcgagaggactcctcccaaccgcttggacgttttggagctccttgtggtgcatggatggtggcaacagggtggaggtgcgaggtacgacaacgaccaaagctgggcatctgcgatgatcaagaagcagctgggtagtggtgacggcgtgtcttccatttttgccggccaagcatcttcctcttcttggagctcctccccttctatggctggagactgtagttttggtcatggggagctttgattggagggtggaagttgtggctatcatcaggagatgtcgatggcgtggccggaaacggggtagtcctatgagcat

SEQ ID NO: 49149 - DNA, 621 bp, Oryza sativa
  Clone ID: PAT_MRT4530_51758C.1
atggtggggcccacgtggaccccacctatcatcctcactatcccttctctttatcccatctctctccctcttctctccagcggagcgacggggaggagtggcggcgaccggagtggggcggggaaggagcggcggcggcctaattgtggcgggcaaggagcggaggccgccagagtggggcggggaggagcgggccgggcacccggcggcgacggcccccgcacccgcgaccttcctcgccggcacggcgatccatgggtcccccgccgccgcgtcgcagagccagagcacgacggagccagagcacggcggcgcgtcggggagccagagcacggcggtgtgtcggggagccagagcacggcagcgcatcggggagccagagcacggcgacgcgtcggggacaaaggggcgcgtgatggtgccgtccgggtggaagaaggggaagctcctcgctccggcgggcggccgctgacgagcttggtgacagtgaagaagagaggggcgacagcgagatttagcatggcacactatgccaggaaactgcaaaagaaaaggagtggtcgtgaccaatcagacagacagttaccagtagccctcaacagtttttttggctggaaatga

SEQ ID NO: 49150 - DNA, 309 bp, Oryza sativa
  Clone ID: PAT_MRT4530_51759C.1
atggcgggggtgcaaccgaacctggcaatggaggaccagcgcacctgctcgctccgccgactgtcatccgaggaggagccgcctccaccgctcgctgcctccaccactcaagctcctccgccccgccgttgttgtcctcttcgcgtgccggtggaggccgtggagaagccacgcggtcgtcaaggaggtgcgcaccagcggaggctgaggaggagccgcctccactgctcgtcgcccctagccgcgtccgccactcaccactcatactccttcgccccgccgctcgtcgtccccagccttgtcgattga

SEQ ID NO: 49151 - DNA, 1593 bp, Oryza sativa
  Clone ID: PAT_MRT4530_5175C.1
gtgtaccgccctttgctgaacatctcgggggagttcacggcggaggacctcgaggaggcgcttatcactcccaatagtactctagatgatgtgcacatgccactcctaaagtcaattcctccagtaacccgcatggctatgggacgtggaacctgggtgaccgtcctatgtagaaagctaagggattggtggcattgggttgcagaaggtgatataccaattgttgcatcacatggaactgaaattgaagcatacaaggttctagaaccggcgactcgtttaattatcttgaaagcaatatgcgatatacgtgtcgagcaagaggatatccggaatttcattgacagttccctaaagcatggctatgacctttctacctttcgtaaagaacgaatagggggtgatgcctatggaatctcatactggtatgaagatgatccgattctcgggcatagattatatcgtgaaattagacgagtggaacagctgaagaaagagccaggaaaaagatctagggggaaaggagggtctataattcttccagttgtgtcctaccagtgggaaactgtcgcatccaactttgacgagtttgatgatgttgcagaaaaactcttttcaagtcggaacaggacagaggccaaccttggcaagaagttgaagattgaatatcttccagatattgaaaagatacataaaaagaaggagaggttgctcaaaaagcaacaaagagaagcccttctcattgatagcttcttggctccagatggatttaccactggtcgctctcttcgtgatagaaagccagtaacatacacttttgatgaatatgaccgctcaataagtgaggccataaaaataacgaagaaaggagaaaactctgctgagcctgctgctccagccaatagaaggatccttacgccaagaccggaggcatcgagcaatggcaaggtgaatggcctctcaccgactaccaatgaatatgatggaaattcttcaaagtcagatgactaccgagatagtgatggtgaagaagaaagtgagacacttgatcggagcaaccgccggaggaggagatctcagagatatacacgggactttgtcgaggctgtctcagatattgacccgaactttgacagtgacgatgaaatcatgggggaggcagtctatgatgaggaatatctgagaactcgaaaacagcagaagacatcaaacacagagggaggaaaggaaggaaaatccgatgcatcagatcctgatgctggttttgatgcagaaaatgatacggaactctcgacatcgagtcaagagcaagaggaagatgaggatgatggccctgaggaacaaaaggacaatagcgacgacaataaaatggatgaggatcatgtaatggtggaaaataaagaagagcaggaggagcagccgcagccacctccactgccaccacagcagcctgtggaaaaaatggaagctcctagtagagagattgaaactgtagggagaacatttctagatttaaatgagcttgcacctggaggtggctttgacgatgggccaagcctgactatgaaagatgaggatatggataacagttag

SEQ ID NO: 49152 - DNA, 369 bp, Oryza sativa
  unsure (1)..(369): unsure at all n locations
  Clone ID: PAT_MRT4530_51760C.1
ananantnnanntttttnatagggaatttttataaataagtttatagaaattattataatattttttaaataatagttaattattttataaaataaaaaatatttaaatattttattgtagaatttagagtagccactcatgtaaagacgaaactgctaaaaactcgtaaagttttaggctttttgtgctattagataaaaggtgagtttacacctacaagtttcaatctttaaattcaattatcacctaaagcaacattgtcaccaacgtattacattagttttgttcaaatatttcccacccttttcaaaatcattaagatcggaattcacaacaactgctctgccaatgattgaatttggtccaat

SEQ ID NO: 49153 - DNA, 470 bp, Oryza sativa
  Clone ID: PAT_MRT4530_51761C.1
ggggagacactgaaacatgtagtgataatgcaatctgtataatggatacacatgtgactttcttgcggggaaattacaataagctaccaattgacaaagctgtgttattatgcaactataaaccaacgggtaatccagcagaatgataaggaactggactaaaagctcatgtcatacatgatctgtcggaacgggggaaggtctccaggacagtatttggctcatctgtaccataagcagatgatggagtcatgggagcggcatcgaccatgtattggctaaactgctacatgcgacggagcatcccatgtgtggctattccagtaacgctactatggaatatgcatgctggaggctctgggtacatgtaactgatcgtgtcctggaacgctgtcatgtgctgctgtggctgatccgctttacgtttgttggatacatcacactctgtgaacacataggttaatccaatg

SEQ ID NO: 49154 - DNA, 407 bp, Oryza sativa
  Clone ID: PAT_MRT4530_51762C.1
tgttattgcccttcttcctctcgcttgcgccaccaagccattcgcgaaccttctagaaccccccaaaaccggacacctgggggtcacgctgctcttgcggtccgctgccgccagcgccgtctccctccgcggcgcccgctcgcaccacatactgtcctcctgcctccccaaggggggaagagcctgatgggcgcgcgccggccaggagggcgcccaattccggtgcagggcctgggtgcctgctgcactggctggcgtcggttcattcggaatcactgcgcgctgcaactccacctggaggtcggccgcttcggagggtaccaccgcgctgacgaggactgagcccgtggtttctgccgagtggctgcactccaacctcaaagaccccgatgtggaaggacttgatg

SEQ ID NO: 49155 - DNA, 1703 bp, Oryza sativa
  Clone ID: PAT_MRT4530_51763C.1
ctgcagcaccccccgatccccttctccctcccgcggccggcggcgcgcgcgccgccggcggccggccgcgtctctgctgctgggccggctccattctgcctgctgcctgcctcatgccgcgtggtcgccgatgaagctgcttcagcgcgtcaaccccacggcagcggcgtcgctcacggcgctcgccgtcgtcgtgctgctcacggcgtcggcaagccgcccttcgttcctccggaggttcgagcccagcatcgcgtcgctgccgagggccgcccggcgcgccgcgccggcggactgcgacatcttccgcggcgagtgggtgcccgccaccgccgccgacgacggcgcggcgccgtactacacgaacgccacctgcggggagatccaggagcaccagaactgcatgaagtacggccgccccgacctcggcttcctccggtggcggtggcgcccggagcgctgcgagctcccgcggttcgacgcggcggcgttcctggacctcctcaggggcaagtccatggcgttcgtcggcgactcgctctccaggaaccatatgcagtctctcctgtgcctcctctccaaggtggagaatccgagagaagtccccaagacggcggatccagagttcagggcggtgcggtacgagtcccacaacttcaccgtcgccgtcttccggtcgccgtacctcgtgacggcgaaccagtcggaccccgccggcgggatgtgggacctctacctcgacgagccggacgccgcctgggcgaccgccgtggcgggcttcgactacgtcgtcgtctccacggggatctggttcaaccgcccgaccatgttctacgagcgcggccgcctcgtcggctgctacagctgccgcctcccgggcgtccccgacctcaccctccgctactccctgcccctggcgttccgcaccgcgctgcgcgcgctcaccgccgcaagcgtgttcaacggcacggtgatcgtgcgcacgctgtcgccgacgtcgcacttcgagggcggcgagtgggacaagggcggcgactgccggcgcacgcggccgaccgcggcgagcgaggcgcggatgtccgggctggacgtggacttccacgcggcgcaggtggaggagttcaggagggcggaggcggcggcggcggcgagcgggagcgcggtgaggatgctgctgatggacgcgacggcggcgatggtggcgcgggcggacgggcacccgagccggtacgggcactgggcgcacgagaacgtgacgctgtacaacgactgcgtgcactggtgcctccctggacccgtcgatgtgtggaacgagatgctgctccagatgctgctgcgtcatcaatcgtgacgcgcgtgctcgtgccgctgtgcaacgtctccctcccctggtgctcgcctggacccatcgtcgtgtggcccctgatgctcctcctgtggcggctgcctctgcctcagtcgggcccgccttctgtctcagcctggggccctgccggggctccaggtgctgcggccgtgttcttgctggtttctgtccgtgtgttttgcgtgggtgcggctcttcgtcctttccctcaactttgtgttagcaaatagcaaccaaacactataatatctatgcattggtatatgctggagttcacataaaaaaaaaaaaaaaaaaaaaaaaaaaaaaaaaaaaaaaaacctcgtgccgattcctg

SEQ ID NO: 49156 - DNA, 1518 bp, Oryza sativa
  Clone ID: PAT_MRT4530_51764C.1
atggtgatctcggtcgccaccccccgccgctccatccgcgacgccgtgctgggtggcgtgctcggcgccggaggccgccagctctaccagcccctccgctgcgccttctacgacggcgccgccgggggcggcctcaccgccgcgctctcggaggatggagccgagggcggcgtccccctcccgtgcgggaggaagacggcggcggcgaagaacgtgctcatcctcatgagcgacaccggcggcggccaccgcgcatccgccgaggccctccgcgacgccttccgcctcgagttcggcgacgcctaccaggtgttcgtgagagatttggggaaggagtacggcgggtggccactgaacgacatggagcggtcgtacaagttcatgatccgccatgtccggctctggaaggtggcgttccacggcacttcgccgcgctgggtgcacggcatgtacctcgccgcgctggcctatttctacgccaagtacgcacgcacgcagccatcacaacttgatcgtccaatccaaatcacgttctgtttccgtctctgttcatccgatcgattcgcgaaaactgacatggttgatttcagcgaggtggtggccgggatcatgaggtacaaccccgacattatcatcagcgtgcacccgctgatgcagcacatcccgctgtgggtgctcaagtggcagagcctccaccccaaggtgccattcgtcaccgtcatcaccgacctcaacacctgccacccgacatggttccaccatggcgtgacgaggtgctactgcccgtcggcggaggtggccaagagggcactgctccgggggctcgagccgtcccaaatccgtgtgtacgggttgccgatcaggccgtccttctgccgcgccgtgctcgacaaggatgagctgaggaaagagctggacatggatcccgacctgcctgcagtgctactgatgggcggcggcgaggggatgggtccggtggaggagacggcgagagcactcagcgacgagctctacgatcgccggagacgccggcctgtcgggcagatcgttgtcatctgtggcaggaaccaggtgctgcggtccacgctgcagtcgtcacggtggaatgtccctgtcaagattagagggttcgaaaagcagatggagaagtggatgggcgcttgcgattgcatcatcacaaaggctggtcctggtacaattgcagaggccctgataagaggactcccaattattctcaacgacttcatacctggacaggaagtcgggaatgtgccttacgtcgtggacaatggtgccggtgtgttctccaaggacccgagggaagccgcgagacaggttgccagatggttcaccacacacacaaacgagctccggagatactccctcaacgcgctgaagctagcgcagccagaagccgtgttcgacatcgtgaaggacatccacaagctccagcagcagcctgccacggtgacgcggatcccttactccctgacctcatcgttctcatacagcatatga

SEQ ID NO: 49157 - DNA, 337 bp, Oryza sativa
  Clone ID: PAT_MRT4530_51765C.1
atacatccaagcaagggtgggcgtgatggagcggataggccctgcgacggcctttgtcgcttccggattcacctaggcatgagaggggactgcccgccgccttttgagaagtgggggtgaaacctgaggtgtggtgtgcttggttagagagagttatgctaagggtcctgtcacggcctctttccgacatggatctgtatgtcaacattgtcgtttgtgtaccctggccggtcctggacaagagttttaatgcacattctgcttggaattctatttgggaatttctgggtgtgacaagttggtattgaagccgaccgtgaccgtaggacaagccaaa

SEQ ID NO: 49158 - DNA, 1044 bp, Oryza sativa
  Clone ID: PAT_MRT4530_51766C.1
tcccgttcaaggacatcgccgccgtcgccgtcgcacggcgaccggttgcggaggagtacggcgacgtcgtggcggcgctcccgagcaggctgtacccgccgcagcagcggtggcgcgagtaccagggcgcctggttccgggaggcgtacgtgggtccccgggatcgtggcgctccagcgccgcttcgagccgcgcgccggcgacgtcctcctggcgagcctgcccaagtgcggcaccacgtggctcaaggccctggccttcgccacggcggcgcgcggcgtgtacccgcccgccgccgccggcggtgatggccggcacccgctgctccggctcaacccacacgagtgcgtcccgttcctggaggggatctacttggacgaggaggaggccaagctcgacgccgcgccaacgccgcggctgatgagcacgcacgcgtcgtacccaaacctgccggcctccatcaccgaggacgaccgctgtaaaatcatctacatctgcaggcaaccgaaagacatggcaatttctttatggcatttcatgaactgttctaaggctaagacctcatcattatctgatgatcagtgggagtccatcaccatgtcattatctgatgtgtgggagtccatccgtgagggtgcatacttgggaggcccaatctgggagcatatccttgggtattggaacacgagtaaggcaaagccggacaaggtgctattcctaaagtacgaggaggttctacgcgatcctacgaagaacatcgagaaaatcacggaattcatcgggtcccagccattctctgacgccgagaaggaagccgggatcgttgagagcatcatcgagctttgcagttttgagaagatgaaggcttcgggtgccaacagcacaggctccctacatatgatggccaatgagtacccacatgagtctttctttaggaagggagtcatcggagattgggtgaaccacgtcacgccagagatggccgatagtcttgataagtttctctcggccaagttttatggatcagggtttacttttgcggag

SEQ ID NO: 49159 - DNA, 234 bp, Oryza sativa
  Clone ID: PAT_MRT4530_51767C.1
acccacgcgtgcggcggagggtgggatggacgactactctcggtagatgatggatctcaagacgctcttcactcgcaccctagagaataatcccttcgggcccgtgatcatgcttgagctgatagcatgtgtattaaaaaccattggcctgtacctaaggctgagtggctatattcatgttcggacaatagatgtgattaaattgtctcgccacatcccatagctattccaacc

SEQ ID NO: 49160 - DNA, 319 bp, Oryza sativa
  Clone ID: PAT_MRT4530_51768C.1
gacattaattagcaatagtccacaaaacctggggtgttggtgtactcaagtcaaaaagatcacaagatgtcaagatatacacaccatacatgtacaaaaaaggaatcaaaatttcaatataacttccaacatcttctgtgcagcggaattctcttaatcttttaccctacacattggatctgctattgttacaaaagtacctttttgatgtttctacccttaacaaagcaaaccaactttctttgatgtgcatgtccatcttcctttttttattataagattacgttttggccaattcttgactgtcttcattagctat

SEQ ID NO: 49161 - DNA, 465 bp, Oryza sativa
  unsure (1)..(465): unsure at all n locations
  Clone ID: PAT_MRT4530_51769C.1
tgacagttctcgtttgggttgtgctgactttcccctcctgccttgtgtactcccaccgtggcttgaatcaagccagattcctgaagggatccattggagcaagaaggccaagatgaaaagcaatactccgtcatactcagacatgtcggttcatgtagacatagaactgaagaagtgaattttatcagcttttgatctcatgggtttctcaaaattgacagacgaggtttttctggagaattaggaggcgaatggtgatggtttctgacacaccttgtgggaattgctgtgaaaagtttgggttttggggctttccccgatggaaccttttgtgggcccccattttttgacaaaattccttggggaaacaatttttgtaaacttcctcctanggcaattcaacngngcccatnggcttatttaatnagttctaagtgaaaattgactttgaatcccatntgccaa

SEQ ID NO: 49162 - DNA, 576 bp, Oryza sativa
  Clone ID: PAT_MRT4530_5176C.1
atggtgctcagcggcaggggcatgcttgatggtggagcggacgacgttgggttgtggctagggatgcaactgccaaccacctcgatcgtcgactccccggggaagagaagcctctgcgttcgggcgagcgatggagcaggggagcgagacgctggacgagcggctgccgctcccgtgcgcgaacggctgtggcttctccggctctgccaacacccgcggcctctgctccaagtgctaccgcgacagcctccgccagaccgtgatgtcccaggcgccgtcgtcatcgtcgtccacggagcttcacggcgcggtaccgtgccggagggcattcccgtggacgagggggcgatgcctccgccgccgccgccgcgggcgaagacgaagagcaggtgcgctgcgtgcgggaggagagtggggctgatggggttcgagtgccgctgcggcgccgtgttctgcggcgcgcacccgctactcggacaggcacgactgtggctacgattacaggggcgcgccgggcgcgatgccatcgcccgcgccaatcccgtcgtcagtgccgacaaggtcgacaagctctga

SEQ ID NO: 49163 - DNA, 283 bp, Oryza sativa
  Clone ID: PAT_MRT4530_51770C.1
ctgaaccaactggattaataccttavctctacccvtgtgadctcacatgttcagtgcaatgtacatcttgggagggataaaacagatcaacgataccagctaaccgggaaagtttggaatctccaatgggtaacgacctaccaataccacccacgtggtattggtggacaccgcaaccgggtgcactacgcgcagtataagtattacaataggaccttdggccvracaactactggaaccccctttccccagagtgccaacgggacaccgtraggggaaactg

SEQ ID NO: 49164 - DNA, 366 bp, Oryza sativa
  Clone ID: PAT_MRT4530_51771C.1
ggccagggttttggaaccgccaccttgggggttttggggaagaagtgcaataccaacccatgttgttcacattgagggcagagacgcctgatcttgtagcgtgcataacttatccaacacttccttttgcatatatgcattggtcacacaagggtgcaggtgcgaaaagagagatgatctgcctgtggtgccatgtagttttctgggtgatgaaaacatgttcgcacttggaacagtttcactgcaccactattgatcaggacctgtaatttcagtttctcttaaatcctctgggacttgaggcctggagcttgaggcatgatcacggaaagcacaaccggatcaaaagtttaaaaaaaaaaaaaa

SEQ ID NO: 49165 - DNA, 546 bp, Oryza sativa
  Clone ID: PAT_MRT4530_51772C.1
ttttttttaaacggatgacaaaatccgcacaatatttatacattattgcaatgctgcaagctattcgctacccatgtatacatcagcttttcatcaccaagttacaaacattaccatacaacgataggcattggcatgtttgcccttcaacattcatactcaccatggtttataattaattcccaattccaaagtatgatcttgcatcataatcagcccaaactagacagaaaatctaaccggaagtttgattgaacttcacatggctacagctatctaaagcatttcaatctatgtgctctcaatcaggtttagatcttgttgagcatctcaaccacttcttccatggatggccggtgcttagggctctcctccgtgcaacgccgtgccacatccaaatacgctatcatttcatcttggtcagcctctctcccttcccattggatccccatctgacggtccaggatctccaatgcctggcccttgtctaccttatccctagcccatttcagcatctctacctctttccctttcatgttgatcttc

SEQ ID NO: 49166 - DNA, 530 bp, Oryza sativa
  Clone ID: PAT_MRT4530_51773C.1
gtttgaccagtagtttcgccctttccccccttcttccaccatccactaacccccatctcaacgcaaaccaccctctccgccgcgcgcgcgaggcagatctcgacggggagcgcagccgccgccgccagatcccgccccgatcgcccccgcctcgtccccacggtcccgtggatacctctctctctctctctctctctctctctctctcggatcggtgcgattgcctttctttttgcgcggcggggatcgggtgtgttttggggacggtgaaggagaggagtgaagtgtggaggcgaatcgaatcgatctgattaggagacctgccatttctgtgcttgattttgtttcgatctgctccttgggctgtagatctggaagggcttcgtgggatctgctgctcgagcttcgtgagttgcacaggaaagtcttgggcttttgcgctcagctccaccaccttcacctgttcctcgggccatggctgctctcgtcatctcgaagcagcgcagtcaccagcagcaggcatccgatcg

SEQ ID NO: 49167 - DNA, 470 bp, Oryza sativa
  Clone ID: PAT_MRT4530_51774C.1
cggcatcggtggttgagacactagggtatccgagggagaaagagatagggaaggagctcactggtgtgggagaagagaggctcaccggtgcctcatcaatcaagctccaggtggtgattgagcgatctcgggtggccagtggtggaggcggcgagctcgggcgatcggcggtggaggaggaggtagagcacaccgtccgggccaaccgccgcatcatttttctggatccgcgctgtctgcactccagcccgtcgccgtcctcggcccccctctaccacccccagctggccggcttcgcccccgcctccgccgttctcaactcactgctgccggtgagtgatggaggtggtgattatggtggatatgggggttgcacctcacgctggccctcctcgaagcatattgggaggctctacaccgccactcgagctctgcaccgattgccaccgccacttaagctcgagctctag

SEQ ID NO: 49168 - DNA, 517 bp, Oryza sativa
  unsure (1)..(517): unsure at all n locations
  Clone ID: PAT_MRT4530_51775C.1
gannggatcccccnggggggcntttnannaaaagancccccggncncgggnttngcgggggaaccntcggggtntnagttttncccttttttncccaaanatngaaaaaattggggcngnnatgggagggtttnanaactcaaagngggnnncaattngggganttaatggggttnccnaaancccntttntggggtataaattnaaattanaaaantncnggnggnaaaaantgtnggggttnaaaaaanaaantgcnntttnttncccntnccnttntttaaanttnntnganccncnnctntgggggnttnnnggggnnnnttttcnaaaaantnccntcccaannnngggggnntttnggttttnccaangggnttttttttnnggnaaantncccnaaaanttnnttncaaaaaaaaaaaaaaaaaaaaaaaaaaaaaaaaaaaaaaaaaaaaaaaaaaaaaaaaaaaaaaaaaaaaaaaaaaaaaaaaaaaaaaaaaaaaaaaaaaaaaaa

SEQ ID NO: 49169 - DNA, 497 bp, Oryza sativa
  Clone ID: PAT_MRT4530_51776C.1
ggctgaatagaccactgatgacttggataaaagcacgacacacctcaagttacacaagtctgttattaataactccaaataaattaatggaggcacagacctaaataatggacaccacaccactaataactcaaaacgtaaagcacgacacatctcaagttacacaagtctgttattaataaattaaccaaggcacatacctaaacaatggacacaacaaataacttaaaacataaaggacaacacaccttaagttacaaaattaaatactgggtaataatgatccgacatccaagttaccaaccatggcaacggctgcaaggctcccggacattgaacttgactgtagagggaattttcccctcgatgtatgttcggatagccaagagcgaattatgcactcccttgataacatcctgatccaatgggaggcagacattgatgttgccgtcagaacaccgaagttgagtgcaaagagtgttcaatgtaaggcactc

SEQ ID NO: 49170 - DNA, 1788 bp, Oryza sativa
  Clone ID: PAT_MRT4530_51777C.1
atgttacttcgacaagtgaatcaaaaatcatggaatcttctgaagcaacatagccgtccagtgtgccttcacttctcttctgatagttcggccaattcaacggctaatattgatcttgatgctgaagctatctgtatgaatcctttgaagccttactctaagtgttggttttatgtgcccccgtggatcaacttgccgcccataaataaggataatgatattaagaagttgattagttctaatccttcaacagtaatgaaagcttatgagactagcaagttagaaatgttgtttgagaagaaagttcgctcctttcttgtttcaaggtgtattctggcttgcgaatctataaatggtcctgacatcaagaaactgcattttatgaacaagagtatcattggccactttcctgtctatgtgacctctctctctttgatgaagtgtttgatcaaacatcgtgaagaatactggattgcaatccttcaatcacttgcagcagagaaggtgatggtattacctgactggaaacaagaattaactcctatcgaggtttcgttcttcgatcatggactacagttgccatccaagtctgaaacatcccttgacttaattacttgcgaactagaatctgatgcgtcatactacaaggtcccagacagtgaagcaacaaatccagacgtagcaggaggacaagaagcagccataacaactactgaaggatcagcatcagcagaagtgggaatggcaacaattgcctcgattatttggaacaatagagcgattttagaaggccgaattacatgtgggcttcgttgtgaggattctgagcacgcagaagcaattgggattttaagcggacttcaactagcaagaaaattgaagataaaaaagatagatgttgtaactgataatatggaaatctatgaggttctgattggcagaaaggatgtgtttcagcacaagcatcgtgatgttttgttgatggctattgaagtagctaaagaattcgatgtttgtaggtttaggtgggaacctcgagaattgctgtgccttgtgaatgaaatggcaaatgcaacaagagaagattaccgggcaaaaacattgagcttgagaagaatttgggagggcaaagtagcatattgtctgtggagtttaccggtcattcgtataaaccaatcaacaaagaagattgcactaaaactagaaaaaggctgggctggggaggttaatatgaagttggttcaatcaaaagggtatcatgtgaacgttcgagaacaaatgcttaaaattgatgcattggagggattacttgacagtctggaccctccactgttaattgtattagtaggatcagaagaggctgcaagtaaagtctcacttgagctgaactggaggtttcgttccgttctgttgaggggatctggtcaagttagtggttccataagcaatgcaaatggtgactgcagtcctattccagagggtacagctcttgttctgaatagtgaaactaatatcccaccattttctgcacaaaaggtccttctagtagtttatgacacgccatcaagtgaactacagttcagtaaagatcaagataccacaggagttatcacagtcagaatcgtcgctcctcacgaggaagattctcttccagatacctcgactgaggtcaatcctttcgttttggggttctttaactcaggtacatattttcttcgcttgaatctgcattttggttctttactaaatgttatatttgtgtatcccacttgcaagttattcacttga

SEQ ID NO: 49171 - DNA, 606 bp, Oryza sativa
  Clone ID: PAT_MRT4530_51778C.1
atctctagttggatcctttcaaaaagaaattaaaggcccactatatcctaccattgcagtccatagtcaagatgaagagtaagatacccgttcctaagacttagttcttttcttcaactccaaacttcaacttcctggttttccatttgcacgcttttcaaactgtcaaatgatgtatcttttacaaaaaaaaaattctatatagaagctgtttaaaaaattcaaatgaattcatttttcaagtttacaataattaatacttaattaatccatgctaatgagctttctcgttttgcgtgcgctgaaaaactctctccaacctaacagcaagaatgctgcctaagtgattatttcaatgaaaatagacattccaaatatggaaaattgcattttaaccaagacagttaaacctaagttgctgaaaaatggtgttaagtgaaattatttgcttgtgttaatatattatttaggcttggaattgcatgcgttatgtgccataactcataaattattatattaattttcagcttttcaatggatctgattgttcatttttgcaaatcagggtgacagtaaactttggaaaagaaccattctgttttgaca

SEQ ID NO: 49172 - DNA, 637 bp, Oryza sativa
  Clone ID: PAT_MRT4530_51779C.1
caatcaaactcttaattttagcgtgaactaaatacaccctatggttagcaagcacgaaatcaaaaggaaaacaggtatagcgtgtagatgcagcagaccaaacagccgcattttcttgggaatgcagggaaaaagataggagctggatattgcaaaggggcacatcgaattgccgatcataagtagtgttagctataatcatgcaagcgataatgaaagatagtactactactgatcatgtgacatcaatgaaggcacatccggtttgcacggctccctgcagtggccgccgatatcgctgcgcgatttgcgttcctccagcgtggacggtgcaccaggtatcattactgtcagcgacacaatgcctttgttttagctgagtggagcacaaatcattgaatgaatggccggcacattacaggcgtatgatgcggattaactggaaacagtttttcaacatagtactactcgtctaaagtcttactatcaagaagttatcagcagatcgagaaaaggctgggtactttcctgcctatctttttctaggttagccagaattacccacgtctaatgggagtaatggcccgtatgaagtagcacgaactttagctgggctaacatgtaagtagcacgaact

SEQ ID NO: 49173 - DNA, 2454 bp, Oryza sativa
  Clone ID: PAT_MRT4530_5177C.1
atggccgcctccccctcctcctcctcctcgcctcccgcttccccctcccacccaaaccctagccctcccccccacgcagatccccgatctgctccccccatgccctcctccgccgacgccgacgccccctcctccccgccgcctccgcagcaggaggcggcggcggagggggaggaggaggaggagaagaagcagcagcgggaggaggaggaggaggccccggctccggctccggctccggcgccggagccggcccctaggaaggcgcggctgccgcgggcgtgcaacagcaagccgaagccgcccccgccgccgccgccggagcggccgcggcggcgcgccgcggcgggcggcggggccgggggcgcggaggagtcgccgcaatgccgcgtggtgacgccgctcgtgtcggagcccgaggcccccgcggagatgccgcggtggcggctccgctgcatgtgggagctcgcctccgtcctcaacttcctccacgtgtaccgccctttgctgaacatctcgggggagttcacggcggaggacctcgaggaggcgcttatcactcccaatagtactctagatgatgtgcacatgccactcctaaagtcaattcctccagtaacccgcatggctatgggacgtggaacctgggtgaccgtcctatgtagaaagctaagggattggtggcattgggttgcagaaggtgatataccaattgttgcatcacatggaactgaaattgaagcatacaaggttctagaaccggcgactcgtttaattatcttgaaagcaatatgcgatatacgtgtcgagcaagaggatatccggaatttcattgacagttccctaaagcatggctatgacctttctacctttcgtaaagaacgaatagggggtgatgcctatggaatctcatactggtatgaagatgatccgattctcgggcatagattatatcgtgaaattagacgagtggaacagctgaagaaagagccaggaaaaagatctagggggaaaggagggtctataattcttccagttgtgtcctaccagtgggaaactgtcgcatccaactttgacgagtttgatgatgttgcagaaaaactcttttcaagtcggaacaggacagaggccaaccttggcaagaagttgaagattgaatatcttccagatattgaaaagatacataaaaagaaggagaggttgctcaaaaagcaacaaagagaagcccttctcattgatagcttcttggctccagatggatttaccactggtcgctctcttcgtgatagaaagccagtaacatacacttttgatgaatatgaccgctcaataagtgaggccataaaaataacgaagaaaggagaaaactctgctgagcctgctgctccagccaatagaaggatccttacgccaagaccggaggcatcgagcaatggcaaggtgaatggcctctcaccgactaccaatgaatatgatggaaattcttcaaagtcagatgactaccgagatagtgatggtgaagaagaaagtgagacacttgatcggagcaaccgccggaggaggagatctcagagatatacacgggactttgtcgaggctgtctcagatattgacccgaactttgacagtgacgatgaaatcatgggggaggcagtctatgatgaggaatatctgagaactcgaaaacagcagaagacatcaagtgcttctgaagaggatgaagagttccgattagaagaagatgatgatgaagaggaagaggaatattctttgagtaccagtgaggatttagaggagccacaacagcgcaagaaactgcaaactcgtggccggcgaggggccaagcttagatctgttgatgaaatccaaacaggtcttaggcgcagcaagcgttcttctcgtcaacgcattaattaccaacagtatgattattcggacacagacacagagggaggaaaggaaggaaaatccgatgcatcagatcctgatgctggttttgatgcagaaaatgatacggaactctcgacatcgagtcaagagcaagaggaagatgaggatgatggccctgaggaacaaaaggacaatagcgacgacaataaaatggatgaggatcatgtaatggtggaaaataaagaagagcaggaggagcagccgcagccacctccactgccaccacagcagcctgtggaaaaaatggaagctcctagtagagagattgaaactgtagggaggagcttttgaactacttcagacggtttcagagtgcttctcaaaagaaaggaggaagtggtatttttcgacaagggtttagcccttctgaaggtgttgatgaaggaccttatggtttatcaagaagaatagcctgcaagaaatgtggtgacttccacctgtggatttatacaggaagagctaaatcgcaagctatatggtgtcaggactgcaatgattttcacc

SEQ ID NO: 49174 - DNA, 572 bp, Oryza sativa
  Clone ID: PAT_MRT4530_51780C.1
aaaaaaagggccttccccccctttgccaaaaaccgggcccgcccctacccccaaaccaatggccggcaattaattttttaagtttttcttttcccccaaccccccccaaaaggatccccccccattaaaaccccccgggaaccccctgtttgggttgggggggaagccccccaccccccccccccttttttcctggacccccggaccccctccctttgaaaacccattgcccttggctaaaccccccttggggaaacccccgaaaaaggaccccttccccccaagggggcccccccaaaaataaggatgggccctaaaccccaagaaaccccccccctttctttggccctcctttccacccggaaaggggggggggaaaaaaaccccctgcccccgggaaacccccccggggaaccccggctttccctggggggggacaccctgaccccggccccggccctgagtaataccccccaccccggggcccgtgggggcccaaaagggggaaagggggcccttccggggaaaaatttcctttgccggcccccctccggccaaaactaaaaaggggg

SEQ ID NO: 49175 - DNA, 208 bp, Oryza sativa
  Clone ID: PAT_MRT4530_51781C.1
ccacatgatcatagcgggcgcaggtatagatagcaaggaaggccgagcccccaagtctgacaaacgcctaacaccagacgtacattatcaagagcgctacatctgcacagcagaagatgccacagagcccttatgctatgatttagtcaacgttctgggcacacagctgttttgcatctcaggggagaggcacgtcacgattagtcat

SEQ ID NO: 49176 - DNA, 824 bp, Oryza sativa
  Clone ID: PAT_MRT4530_51782C.1
ctaagtccatctttccctttctccctttccttcctccccaacccggcccaccgagccggccaccacccgcctcgatccccttctccctcctcgcgccgttcgaccgccgctgcccaagccgttcgtcctgctgcttccgccgcatccatcctggtgagtgagcacaccctccgccaccgccgcctgcaccgatccccatccaaacgcgcgagcgagcgaggcgagcagtgtcgccgtcgttcgtcctgctgcttccgccgcatcacatcggccagttgtcttatggatattttgtaccaatgtaaggagttcttaaagatccagaagttccggcgtacggcgtcctatgctggattctactgcttcactgccctaatgacctatgcttacacgagcaatacgacaagggctggcatttctaggggcgaccaattttatgcctcatatcccgctggtacggagctactaactgacactgcaaagctttacaaggctgcattaggtaattgtttcgaaatagatgactggggtccaatagagttctctatcatggcaaaacattttgatcggcaaggcaaaccaccatatgcgtatcatgcacaatacatggcacaccttctctcccatgggcagctcgatggaagtggataactgcacgatgtgcttaaacttccggtttgtcttgtgatgagatctggtgtaaactgtagcccgtaagttatggtagcgtattgttggtttcatcatgacaattaaattttactaagatgttgtacaaaagagctgccttggtacgctgtgagttcagatggctcacgacagtg

SEQ ID NO: 49177 - DNA, 2609 bp, Oryza sativa
  Clone ID: PAT_MRT4530_51783C.1
gccaagagagtggtatacagtaatacactttctcgtttgtttaagccacactttgtcattcaaattaagcatgtgtatagtcagtaataaacccgagttgccacaatctcaaaccacgcaacttgccttggttcgccacaacagcaggcgtcagtgcgtcactagcttgtaattttgacctttacaaggtccgcggctgcacgggcagcggcggaggcgcggttggctgcagcaatggcagctcgggctttttcaagaacgtccgacgaacttggggttgcgcacgatatctcatcagcaggggagcgatgatgctcctggctcaccatgttactcttggtagccgcatgcattactgcagacccagcaggtgagcttggggactggggagcagcttgatattttccagtgtcctcgacaggtgaaatggacaacgatggcatatctctggaaatggaagcaactggagagttctcgattataggtaactggccctggcgtgctgaggatcctgatccatccagcagatcttcgtatttcttggtaagcgctgcttcagtattcgatgagtcccattcaaggccatactcatgagcaatagctttcagaaccttcagctttgattcagctgatggggccttcactgagagcgtctcgattatattttcctttagagggttgaactgaaaactgagggttgtagcttgtgccaacgattgcggcggtgcggtgttggcggatccgaacgacgggcacctgagggcgagagcgaggccgaggctgctagtggtgaatgggaagcatgacatggcggtagcgaagaattggaggcgaagggcgcttctcccagcttgcctgcagaccctggcctctgaataaacgagccccggtctgcagtagtaccccttgctcgggctgcagtgcctgtcctcggagcagacgcagcggccctccagcgcgcagccgtcggccttgggcagctgctcctccccgccgacgacctcgtcggaccaccggctgtcgaacagcccccgcgggtcgagctgccgcttcgccgcgccgaacttgtcccagctcgggtacttgccccgcacgccccggaacgccgccagcctgttcttggcccagtgcgggcgcgccccgtgcttgacgaacgccagctgctccacctcctcccacacgtcctggctcagccgcggcgacgacccgtccgacgcgcggtagtagttgaagtccaccaccacggtgtcctccggctggcccaggtatgcctccgacgccttcacgaatctgacgaggaggccgttgtacgcgtcgacgccgcacatgctgtccgggtcgacgtcgcgcagccgcttgacgtcgaggacgaagtcgcggaacctcgccgcaggcgagaacatcgccgtgctctcgtagaagaagaggcccttgtacctggggtcccaggggcacgcgctgagcgtgtcggtgggcggcgagcgcgcgcaggagcccgacgtctgcatcctcccctggaaccccaccacggggtagcccgtgaacagccgcccgccggcgccgcgcagcccgttgccgacgagcctcttcgccgcgatctccgccgccgccatcttgcacttgcccttcacgttcctggacgcctccagcgcggtctcgagggccctgatgccggaggagacggcgatgagcgtggactggaagccgatgaagtcgttgacgccgtcgcccgtggcgttgagcggcatgcggtcgtcgatcctgtataccgccttgtgctgcgacgggtaccaggtgatgtcggcgaactcgtggttcgcggcgtggcgtgcgaagtcgtcctggaaggtggagtcgtccctgtactcgtagcttatgcttctcttgaaccttggctccagagccagagtcacctttgagataacccctagcaagccgagggagacgagagcggcgttgaagagcgcgtcgcctctccggagcgccaccaccttggcccacccgtccgccgcgccggcgggcacgacgagcctgagcgccaccacgtggtcgtgcacggcgccgccgcggccccaccaggagctcccgtgggagcccgtgctgacgagccccccgacgctcaccccttcccagtacggcgccgccgtcaggctcagcccgctcgcctccgccgcgtcgatcacggcccgcagcggcgcgccggcgtccgcggtcaccgtccgcgcggcggcgtcgaccgccacgccgtcgtacctcgccgtgctgatgagcaaggaggaggccgcgccgctgctgccgttcccggggcacgccagtttcgggatggtgtgcgcgaagccgctgacgaccttgacgggcatgttcttggcgctggcgtcggcgacgaccgcgaccacgtcagcctcggacgccgggtacgcgacggccgagacggggcagtcggcgcggtcactcgaccacgcgccgtaggcgttggagagcacgcagcctgccccatcgccgccggcgccgccgctaccgccacaccgcacaggcgggcgcggcggcagcgggacggcggcgggcagcagggtggagagtaggagggggaggagaaaggtggcgaccat

SEQ ID NO: 49178 - DNA, 176 bp, Oryza sativa
  unsure (1)..(176): unsure at all n locations
  Clone ID: PAT_MRT4530_51784C.1
atctgactctgtgctcttngccatttttgntatggtggatgtntcggtattgccgtatcttngcgcctgancatttcggtgttatttggngaaacagttacgttttaaacgtaaatatgctagttnattaatntaaattaatgaaaaaaaaaaaaaaaaaaaaaaaaaaaaaaaaa

SEQ ID NO: 49179 - DNA, 900 bp, Oryza sativa
  Clone ID: PAT_MRT4530_51785C.1
atgtcctcatcacgagatccctctcgctcgagcctgccaccgttggcggagcccaaggctgtgaccctcacccgtcatcaccttgtcggggaggacgtccccgtgccggatctgccgccaccgagccccccgccacaagatacgtcgttgcaagtcccctgctgccagatccactgccaacgagctccctgctgccgccacccttcgcacagtcggatccaccaccaccgcccccctaaccgtcggctgctcccgcccgtttgcccgcttgccaccatcatcgtcatcatggccgcggtggaagaaggaaggggagaggacacggccactactcccatcgatggaaggccggccgcccaagtccccgacgcgccgccggctgccccagtccccgacgcgtggccgagcgctcggctccccatcgacgtgcggccgggcaccgggctccccatcgacatgcggcggcggcaggtcgccgggatccccatcgacgcgcggcatggccggttgccggcctccccatcgacgtgctgccgggcgcagggctccccatcgacgcgtggcggcggccggttgccgggatccccatcgacgcgccgccggccggccggccggccgactctcctcttggcgacctcgtctaccgacggcgtcctcttcctcgcaacagaggccatgtaccagcaggtgcccgggcaatcactggatcccatctcccacaacgcttccagcgccattttgtccatggcttggtttgttggtgaagaagagttccttcgtggaagcaatttctgcaatttcaacaagtcctgtccccgattctggatcattgttgcatctcaagtctattgtaattgtgcattatcttatcctgctgccgaatctgatgtttgtggttaa

SEQ ID NO: 49180 - DNA, 144 bp, Oryza sativa
  Clone ID: PAT_MRT4530_51786C.1
atgaaggagtacaatcccagtgaacgatgcccggtcccggagctgtggaactacaaggagaagcgcaaggcgacattggaggaagccatccagccgtccggaaacaactcgtacatgcttttgaaggagttagttaacaagtga

SEQ ID NO: 49181 - DNA, 156 bp, Oryza sativa
  Clone ID: PAT_MRT4530_51787C.1
atggacccgacaacagccagggcatgccgtgtttgggctgggccaaatctccgtgccgtggaccggggcggagattctataaaccccgtgaatcgcaggaagcccggaacactggcgaagtccagggatttcccaactttcatcaagactcaatag

SEQ ID NO: 49182 - DNA, 2417 bp, Oryza sativa
  Clone ID: PAT_MRT4530_51788C.1
ccgggctgcaggaattcggcacgaggctcatcgccgcgccgccgcctccgccgctgctccgccgctcccaaccctgcgcggcgggcggcggtctgctccttcctccaccggccgcccacgctgttccccgtgggcctccatgtctttgaccaccgtttctttctcataccccgccaagccgcttcccaaatggccgtgcacgctgcctaagccgccgccgagggctcgctgccgttttgtggtgcgggcggacgtcaaggtgatctcttccggtgaggcctgccgccgtgggctcgccgccggcatcgacaagctcgccgacgccgtcgcggtcactctaggccccaaaggcaggaatgttgttattgaccaagacgatgttcctaaagtaatcaatgatggtatcacaattgccaaggctatagagctcccaaatgctgttgagcacgcaggtgccatgttacttcaagagcatgttaaccagatagcatccaagacgaatagttctgttggcgatggaacaacaactgctattattttggcaagagaaattatcaatcttgggttgttggcagtagccactggtgctaacccagttgccctgagaaagggtattgacaaagctgttcatgaacttattgggatcttgaagactaaatgtatccctgtaagtacaaaggaggacataaaagctgttgcttcaatatcagctggcaatgatgaatatgttggcgatctcattgctgatgcattggagaagataggtcctgatggaataattaaaattgagtcctcatcttcaatatatacttcagttgaggtgcaagaaggaatgaagatagacaaaggttatatctctccacatttcatcacaaatcaagacaaagcaattgttgaatttgaaaatgctagggtacttttaactgatcagcgggtggatgatgtccaagagatacttcctttgctagagaagaccacacagttgagtgtccctttgttgattattgcggaggatgtttcacatacggtgtattcaactcttgttcttaacaaactgaatggactgctaaatgttgctgttgttaaatgtcctggtttgggagatgaaaagaaggctattctccaagatattgctattatgacaggtgcagatttctttgctagtgaccttggctggtgtcttcaaggtgctacttctgatcagctaggtatggctcagaagatcactataacaagtgatactactactatcattgcacatccttcgatgagaccagaaattgaggccagaattcagcaacttaagaaagatctagaggagacaacaagtgcctatctaaaagaaaggttttcatctcgtatcgctaaactctcaagaggtattgcagttatcaagtttgtgtctggggatttgataagagtggacttttttcaggttggtgcagctactgaagctgaactcgaggataggaaactgagagcggaggatgcaaaaaatgcaacctttgcagccattagcgaaggcataactcctggaggtggtgtgacgtatgttcaattatcaaagtatattcccagtatcatggatcttgtagatgactctgaagagaagattggtgtaaatatagttgggaaggcacttctcgtccctgctatgacgatagctcgcaatgctggggcagatggtccagctgttgtagagaagcttcttgcgagtgaatggcgagttggatacaatgcaatgactgacaaatttgaagaccttgttgatgctggtgtggtagacccatgcagggttgcaagatgtgtgcttcaaaactctgcctctattgcaggacttattttaatgacgcaagctatgatgttcgacaaaataaagaagaaaaagtccaccattcctcaaattcctggcatcccaccattgcagataaatcaaaatgcttagatttgaactagcaaatgtactgtcatataagaaaggtccatgatgcaaggcccttgtttgatcggttagatgagttgaacaaagaattggaagtgatgcctctgagcacatcatcagctggaaccactgggtatgataacggagggaaagatttagtgatatggttcagatatcagtaactttaaactaactgtatactagtcagcaaaatgctccatgtccctcctctcttttcccttggaggtaggtgcaaggagcattttttttttcttcacaattttgtaacgtagaagataggattactaaaccattgtggatcccataatgttgaacatgccagttttattgtactttttatatcttgatgaatgtctatgatgatttacttgataccactttgatcaaacacaaaaaaaaaaaaaaaaaaaaaaaactcgagactagttctctctctctctctccctcgtgccga

SEQ ID NO: 49183 - DNA, 540 bp, Oryza sativa
  Clone ID: PAT_MRT4530_51789C.1
aaatatgtagcgagttttctaagaacggtataaacgcatacgcttacaactcacgtgcactcatagaaaaaaaaaagacacacatgcatactctaccctataaaacacttctgaaaaattaacgaaatcaccattgatgtctaccaccgaaaaatagttaaccataaatacaaataccaacgtcaagttcagaatttaaatattagttaaccgtaacagccgaatcacactatcaaacacagacatacattcccataaaattttccgattaacctctcaatcagttgcggaggggagttgattttcaggtcgtccctgtttgtctgaactctggaatcgccaatgcagcacatcaacagccgtgtgagcgaggggcatccccgtaaaatcacccccagatgttagtgcgtccacatccatctaccagactccctcccacgctatcgctcgcgggctcgcggcaaccaaaaaaaaaccccaatattaccccttctaggcttaaacctccacgagtaccccccgcgcgggggaggagaggaa

SEQ ID NO: 49184 - DNA, 1190 bp, Oryza sativa
  Clone ID: PAT_MRT4530_5178C.1
cggcggctggatcgtccatggctacaccaatggcgccaccgccaccggcgccggcaaccacggcttcacctgtggctatgctgccagcagttacgtatatggttatagctgcggttcttgggagttcgagcaaagggagcagcagttcatcagctcgcagattcagcaccatcagcatgcacctgagcatggatgatgacgatgatcagtccgcggggtacggcgtcgccatggtggacgacctcctgacgccttcgccgtcgacgcaccacgccgtcgccgccgccgccggcagcttcccttcctcgtcatcctcctcggcctccttccgctccgcctccgtgtcgtacagcccggacacctcgtcgtcggcggcagcggcggcggcgacgggattctacccggagttgtcctcgcaggtggcgccattattaccaccaccacccttggtgcgcaacgagccccagcccggccgttacaccgccggcctgccgccgccaccgccgccgccggtgaccggtggcgcgttcaggcggtacgcgcggcacctcggcccgaggagggcgcccaagccgggggcgtgcgggcagaggatgttcaagacggccatgtcagcgctggccaagatgcacatggagacgacgtacaggcgccgccagtactactaccagcaagcggcggcggcggccgaggcggcgccgccgccgccgtccggcaacaaccagctgcagcacacgatgtcggagcggaagcggcgggagaagctcaacgacagcttcgtcgccctcaaggccgtcctccctcccggctccaagaaagacaagacgtcgatactgatcagagcaagggagtacgtgaagtctctcgagtcaaagctgtcggagctggaggagaagaaccgggagctcgaggcgcggctgtccacccgccccgacgacaccaagaacgacgaagaggaggtggcggcgccaccggaggccggcggcgagccactatctaagacctttcacaatgctcttaggtggcatccagccccaacctgccaccaaggagattcccttccatttccatgcaacgtggaagcccccttttcacatggccattcaatttgcgtagcttgtcctgctaatggcctaaccatgtcgatgtcgctgctgtggggcgaggacgtgaagatcttgttggggtag

SEQ ID NO: 49185 - DNA, 450 bp, Oryza sativa
  Clone ID: PAT_MRT4530_51790C.1
cccgacccaaccctgggccaaaggtggccgacccagaaggattcacgtttcgcccgaggatcccctaaagcaacggacgcaccttcaattcgcccaaggcccagctcgggctggcttcggggagaagcaaccttggccagatcgccacgacaaccgaccgtttcgcaggagctttcaatgcaaggatcgcctgacaccttatcctgacgcgcgctcctaaaacaacaaggccgaagtgaccgcagtcacttcgcccttccactggctgacctgacaggaaaacagcgccgcctacgctgctccaactgttgtgccacccgtcagggtgaggctgacagccgccaagaccggcctaaggccccataggaagctccgcttcgcccgaccccagggctcggactcaacctcaacctcggacaagggtttccgcctcgcctgacccccgggccc

SEQ ID NO: 49186 - DNA, 563 bp, Oryza sativa
  Clone ID: PAT_MRT4530_51791C.1
ctgagtttgtgaactggtttttttgcaggagccagtgggttgtgaggtctcttccatggcgtttggccgaggctgcttaaagttcggacttcgagcggcacggcggcgagatcgtcatagacgagtacgagtacgactacgagaacctgctgcgccaccgccacaccggccacgagttgcagaacgatgcggacgcagagcagcacggccgcgcggtcagagatcccgaaggccgaagctgcggacctgatcctgatgcgccagcgccaccgcgacaccagccacgagttgcagaatgatgcgcttgccaaacacgacgtgcgaggttcggaaccagcgccactcgccaaactcgcccgatcaaatctacggtccctgcgaaaggatgcttccctatactacccaaccaactgcgagaacgctgaggactccgaatccatatgggaaactatttcgatccttcgaaggatgtcacatcgttatttggatgtcacttaaaatagttatgaagaaaatttgagaagatgtaacatgtaatatattactccataaacatacaagtt

SEQ ID NO: 49187 - DNA, 513 bp, Oryza sativa
  Clone ID: PAT_MRT4530_51792C.1
tcaccgctgcgcgagagcgtcatgacgaggaggagaagccagcccgtacacaaggcgagctgtcccgggagcggacaggaggatcgagcgcgaggcgagctgcggccagcagccgcctcgaggcccgcgccggcgccggcgccggaccggagaagacgccgcgtggtggaaggagcgcagcggcggaggaagggatgaagctgccggagccatcgggaagaacaaggaggtggtcgccacgccgtcccgcgttcgcactcggcgtcttcgtctccaccaactattctcccggaacaactaattaattaatcaattcacccagtatcattctcacgtgtgtatcgatcgaaatgcatgtatacttgtactacataatatgcatgagttaaaatttccacttatctttcttttgtactattgagcttacaacaagcatcgatacaatgtccgaaacctttaggggataatataaatggtattacaatctttagaggattaaaaaaaaaaaaaaaa

SEQ ID NO: 49188 - DNA, 335 bp, Oryza sativa
  Clone ID: PAT_MRT4530_51793C.1
atccatctttatctcatctcgccacccaaaaccctaaacctgcctcccatttccgccgccgccgccatgcagtcgcttgccctcacctccccctcccttccggcgccggagaccgaatccggccgccgacgacgtcgcctggagcgcatccgcgccaccgaggtgttcgacgagccgaagctgaacaagtacagtgcgcgcatcacggagcccaagtcgcacggggctgtcataggcggggctctacggcgtggggctcaccgacgccgaccttcgcaagctgcaggtgggcgcttcctccgtctgggacgagggcaacacctgtaacaagcacc

SEQ ID NO: 49189 - DNA, 810 bp, Oryza sativa
  Clone ID: PAT_MRT4530_51794C.1
atggcggagcagcagcagcagcagcgcgacggcgacttcgagccggtctacgagtggctcgacgccggcgcccactatctcctccgcgtcaacgtcccagagttcaagaaggaggagttacaggtgcacgtggaccccgccggccggctgaccgtccgcggccagcacggcggcctccggctgaacaaggtgttccagctgccgccgacgtgcaacctcgacgcgatcaccggcaggctggaggccagcgtgctcgtcctcaccgtgcccaagaagccggcgacaaccgccgccgccgccgccctgccgcccaaggccaatcaggaggaggagaaggagaccaagaaggctgacgaacacgacgtcgccggcaagccgccgccgccgccgccgaagactgacagtgatcagtccgagcggaggacccagctgtcggctagagagaagaaagaggagccgcccaaggctacagcccccgcggcggcgccgccgcagccggcggcgcgagagcgtcatgatgaggaggagaaggccagggccgaacacaaggcgaggctgtcccgggaggcggacaggaggatcgaggcggcgagggcgaggctggcggcgcagcaggccgcctcgaggcccgcgccggcgccggcgccggagccggagaagacggccgcgtggtggaaggagcgcgcggcggaggaagggatgaagctggcggaggccatcgggaagaacaaggaggtggtcgccacggccgtcgccgcgttcgcactcggcgtcttcgtctccaccaaactattctcccggaacaactaa

SEQ ID NO: 49190 - DNA, 297 bp, Oryza sativa
  Clone ID: PAT_MRT4530_51795C.1
caagggggattcatcattttatttactttccactgattcatcccactactgcactgaaacgcagaatccttcagcaaagcaggactttgtgtttgaaatccctggtaattgcaatatggatgcaaaactgcatctttagatgcttgcaatttgacatggtggcaaacaattagtaccaggtgctgtcccgagcaagtccgttgagaagaatgaagtggctgtcctctcatggaaaaagcagcactgcaggcgccgaccgagaatgggaggaagatcatgtgtgggttcgagcctaaa

SEQ ID NO: 49191 - DNA, 813 bp, Oryza sativa
  Clone ID: PAT_MRT4530_51796C.1
gagagaatgtacaaaatcttctcgaatgccattgtggtcagctattcacacttattgctagtcgtgccatacaatacgttcaaccctcctccaccggaattcgctttgatgaaatccgatactccaattgctcaacgccgctcacctcgccggcacactggccaagccagtggagggccgaagatccagtcggacgtccaacccaacacctcgaggtcaactaaccagtcagattctcgtaagaggaagttggtttcaagtgacgatgaaggtgatgacgcggaaaagacggacaacaaaggggtgattgggaaacagccaaagcaagccaatccgaagaagaaaacgtccagtcgtcccatgccaaaaataaggaagtcatccaggaaaccatctgacatagatccctttggaaaagaccccatgccgactggcacagagactagtccttcagcagaaactgggccaactgctgaagaccgcccaggtaataatcaaccggcaaccggcaatatagatactagcaacgagcccccgactggaaaccagtcagccgaagctgaagtcggtgctgatcaagagcccccgactggaaaccagttgggtacagaacaaaatagagatatcccagaagtggaagctcaagccaacagccctcccaagacggacgctgctgctgaccctggaactaactctcctgttagggtgcaaggacctgctcgtccccgaccggaaattataatgggtaaacaagtcctccaaatctgtcttgatccgacaaactttcttcaattgcttcaccattattcatga

SEQ ID NO: 49192 - DNA, 1440 bp, Oryza sativa
  Clone ID: PAT_MRT4530_51797C.1
gcacgaggtcgctttccgtcgcgcgcgcgtttcgtcgaacaccacgccggcgaccacgacatggccaccgccgcctcccgctccggccgccgacgcggcggcggagacgacgaagacgaccggacggcggcgatgcgacggctgcgcgtgctgtccctccacctgcaggatccgtccccctcgtcggaggcggggctggcgcccgcggcgtgcgcggcggcggggaggcggcgggcgacggggggagcggacgcggcggcggcgctggcggcgtacctgagggggaggcaccgggacacgcaggcgcgggtgttcgagttcttcctctcgcggcccgacctccagacgcccgtcgagatgtccaccgccgcgcaccgggagctctgcttccggcagctgtgcgcgctggtgcgggaggccggggtgcgcccgctcagcctcatggcgaacgaccccgccgagtacttcgccgtcatggaggccgccggcggcgccgacatctccctcggcgtcaagctcggcgtccagtacagcctttggggaggttctataataaatctgggaaccaaaaagcacagagataggttctttgacggaatcgacaatttggattatcctggctgttttgctatgacagagctgcaccatggatctaatgtccaggccctacaaactactgctacattcgatccagttactgatgagttcattatcaatacacccaatgatggagctattaagtggtggattggtaatgcagcacttcatggaaaattcgcaactgtttttgcaaggttaattttgcccctccaaggaaaaggtggggaccctgctgatatgggcattcatgcattcattgttcccatacgggaccttgacaccaatgctgttcttcccggaattgagatcaatgattgtggtcacaagataggcctgaatggtgtggacaatggtgcactgaggttccgttcagtgaggatacctcgtgacaatcttctgaaccgattcggtgacgtgtcacgagatggaaaatacacaagcagtctgccaacaattaacaaaagatttgcagcaacccttggtgagcttgttgggggacgcgttggtattgcatatagttctgtaggtatactcaaagtttcagtgaccattgctgttaggtatgctctgcttcgacagcaatttggtccacctaagaagcctgaaatcagtgtgttggactaccaatctcaccagcataagctaatgcccatgttggcatcatcatacgcatttcactttgccacacggtacttggtggataaatactcagaaatgaagaaaaccaatgatgaggatgttatggctgatgtgcatgttctttcatctggattgaaagcctacataacttcatatacagcaaatccattagcgtatgccagaatcatgtggtggccatgg

SEQ ID NO: 49193 - DNA, 572 bp, Oryza sativa
  Clone ID: PAT_MRT4530_51798C.1
aacatagatttgaagaaatcaaaataacaaaaatttcaatcttttaagcatgtactatatacagatgaacattattttagtgaaaacaccacatagcaactctatgcatactttttaccatcacacatataaacaaactgatttagagaggtaaattacattatctaaaatcacacaattagtaagtgatgaagcaagtcaaactcatttctgactccaaactgtaagaatcaataataatacagcaagaatgacaaataaatttctgagtactatctgccagctactttactaagcatgtcccaatcttatctcaatcctcacaacagcagcatgaggtagattcattttaaatcccaattttgtggatgagggcatttggtataaagaagttaaatagcctgtctaaagtctacattgttgattaggggcagcacagagatttgaatcaagctggtctgaatccattgtctccttgcttaatactcagggacacctattttaagaatatattttaaactatccagtcaacaatactactcttattgattcaattctttatatgtaatata

SEQ ID NO: 49194 - DNA, 323 bp, Oryza sativa
  Clone ID: PAT_MRT4530_51799C.1
cggacgcgtgggaaaaaaaaaaaaaaaaaaaataaaattaaaaaaaaaaaaaaaaaaaaaaataaaggaaaatgggaaaaaaaaaatatgttggatccctcaaataatgacgccgtccccttttcctgggttgcgctttctttcctgggctttcgcggtttttggtctcttttttggggccccctatcttttttcctgggcccgttttttcccgttttttcccggggtaccctctgttgtcccccgtgcatttcttttgaacccactttctttttgtcccgtggggttttcctctttttggcccccccctcattttcctcttt

SEQ ID NO: 49195 - DNA, 735 bp, Oryza sativa
  Clone ID: PAT_MRT4530_5179C.1
atggcgggcggcggcgggcagtcggcgatcgccgctgaggacgacgacctcgagcgcggcgcggagcgcgacgaggaggaggaggaggggagccaatacttcaccgacgcggaggaccaccagtcgtgggcgtcgcactcgcgccacaactccaccgcctacgaggactacatctccacctgcgcctccgtccgcgcgagctcctacgacggcgaggcggaggaggaggaggatgccggcggcggcggcggcggcgtcgagcaccaccgcaggaagtcgtcgtgcgtgtcggagtgctcgctggacgacgtcgacctggaggccgggctggccgaggtcatcaagggcagccccgagaaggcggagaggtgctgccgcatttgccaccttggcctcgagaccgcggcggcggagtccggcgccggcatcacgctcggctgctcctgcaagggcgacctctcctactcccacaagcagtgcgccgagacatggttcaagattagaggcaacaagatatgtgaaatctgtagctctaccgcatgcaatgtggtaggcattggtgattcagaatccgttgagcaatggaatgaatcgaacagcacagcacctgcacaagcaccaccagctgaaactcagagattttggcaagggcatcggttcctgaactttcttcttgcttgcatggttttcgcctttgttatctcatggctctttcatttcaacgtcccgggctaa

SEQ ID NO: 49196 - DNA, 322 bp, Oryza sativa
  Clone ID: PAT_MRT4530_517C.1
tagatttgaattgccatgcccttctgatgtgatttttcatataatttcctctagttgtataaatgagttacaggttggtttgcaagaaggggagtgttgtggttttttgactacaaagattttaggatccaatcatatggccatcaagaaatgttccgcacaggatgctgtgatagacaaagataagtgcaatacgctccatgacaaggtgaaactgaggacggattccaatcaagaaggggaggatgatgaggacataactagctcggatataaccatgactaccttatgtattaatcaaataaaggtacatatattctat

SEQ ID NO: 49197 - DNA, 203 bp, Oryza sativa
  unsure (1)..(203): unsure at all n locations
  Clone ID: PAT_MRT4530_51800C.1
nccgtcgctggcaaccgcgtggcggccaccgcgctggcgttcggggtggcgtgcagggagatccncnacgnancgccgcgcgagcgctgggcctcgcctngcngccgacgcatgatcatctcgatcgagctctctggatcaatttcattaatttccaaataataataaccgggcgtgtttgtgttaaaaaaaaaaaanaaaaa

SEQ ID NO: 49198 - DNA, 192 bp, Oryza sativa
  Clone ID: PAT_MRT4530_51801C.1
atggcgcgactgtcgggagtcttgactgagcggcggagcttggagaccgtggaggcgggggtcagctacggcgagaggaggctggcgaggaacacgagcgaccagaggtcccgcgcctgggacagcactaggatgacattgaatgacgcgtccttcttccaccgcatcttcacatccacagtagatggatag

SEQ ID NO: 49199 - DNA, 1761 bp, Oryza sativa
  unsure (1)..(1761): unsure at all n locations
  Clone ID: PAT_MRT4530_51802C.1
atggtgtcggcggccgccggttgggcggcgccggcgtttgcggtcgccgccgtggttatttgggtggtgctgtgtagtgagctcctgcggaggcggcggcgtggtgcaggcagcggcaagggggacgcggcggcggcggcgcgcctcccgccggggagcttcgggtggccagtggtgggcgagacgctggagttcgtgtcgtgcgcctactcgccgcgccccgaggcgttcgtcgacaagcgccggaagctgcacgggagcgcggtgttcaggtcgcacctgttcgggtcggcgacggtggtgacggcggacgcggaggtgagccggttcgtgctgcagagcgacgcgcgggcgttcgtgccgtggtacccgcggtcgctgacggagctgatgggcaagtcctccatcctcctcatcaacggcgcgctccagcgacgcgtccacggcctcgtcggcgccttcttcaagtcctcccacctcaagtcccagctcaccgccgacatgcgccgccgcctctcccccgccctctcctccttccccgactcctccctcctccacgtccagcacctcgccaagtcggtggtgttcgaaatcctggtgaggggcctgatcgggctggaggcaggggaggagatgcagcagctgaagcagcaattccaggaatttattgtcggcctcatgtccctccccattaagctgcctggcactaggctctacagatcactccaggccaagaagaagatggcgaggctgatacagaggatcatccgggagaagagggcaaggagggccgccgcctcgccgccgcgggacgccatcgacgtgctcatcggagacggcagcgatgagctcaccgacgagctcatctccgacaacatgatcgacctcatgatccccgccgaggactccgtcccggtgctcatcacgctcgccgtcaagttcctcagcgagtgccctctcgccctgcaccaactggaagaggagaacatacagctcaagaggcgaaaaaccgacatgggtgagaccttgcaatggacagactacatgtcattgtcattcacacaacatgtgataacagagacgctgcggttgggcaacatcatcggtgggatcatgcgcaaggcggtgcgcgacgtcgaggtgaaggggcacctcatccccaaggggtggtgcgtgtttgtgtacttccggtcagtccacctcgatgatacgctctacgatgagccctacaagttcaacccatggaggtggaaggagaaggacatgagcaatggcagcttcactccttttggtggtgggcagaggctgtgcccaggcctggatctggccaggctggaagcttccatcttccttcaccacttggtcaccagcttcaggtgggtggcggaggaggaccacatcgtcaacttccccaccgtgcggctcaagcggggcatgcccatcagggtcaccgccaaggaggacgacgactagccactagccaccactactactataccgatcaccatactcaactagtagaggagatccatcagatgcatgcatggatcgatgcagatcggtcggtcgagtacgagtagcccacacgagtcgacacatgcatgcaacaagccaagttgcacacaccaagatgcacatatatatcatctatatgtcgatctatactgctacctacctatatatatatatatatatatatatatatatatatatatatatatatatatatatatatagagnatntatatatatgtgtgtgtg

SEQ ID NO: 49200 - DNA, 814 bp, Oryza sativa
  Clone ID: PAT_MRT4530_51803C.1
gagattgaacttttttttttttttttttttttttttttttttttttttttttttttttaaaggtcaagggttgttccactcatctttggaggacattgtcattacatagaggggatgagaattgctctcattcattttacattaatagtagctcataattacaattccgttaagaggaaaatcgctttcggagatttctcctcagcttacaattaacacatacatccatcaacaagcatttgatatggaatgatgcaagatgttcatcagcttcattcattcaggtatcacggccttgtgttgcgtccacggggacctatctatcttttgcctccccatctcctcttgaagttgcgctcatcatcgcttgaatcctcgtaagtaaggctcctggaactgtgactggacctcgctctgctgtgcctgtcaccaccggttggagatgaatcctcgtaagtaagcttcctggaactgtacctggacctcgctctgctgtgcctgtcaccacccggttggagatggagaagacgcgcgcattctcttgctgctgcggtgatcctcggcgtaatcactagagcggtgatcctcgacgtaatcaatggagcgcctatggtccctcctgtcagagcttgacctgctggtcttgtaactgggatcggtgccatgagaagagctcagacgctggttacgctctgatgatcgagactgattggcaggttcaggttctttgggcttcgccgccagccttggacgtgcagcgtcttcgtttgcccagtcaatcatagattgagtttcccagctgaagatgaccgag

SEQ ID NO: 49201 - DNA, 1971 bp, Oryza sativa
  Clone ID: PAT_MRT4530_51804C.1
actcaataaactttatttcttgaaactcgattttcatttttcaaagttggatgacatttgtcctcctaccattatcaacgtacgttgtcctaagttaaccccaacaattacaatccgtcaattcgttctaattaacttgcctcgataaaacacgttagctaggatcgatgaaacagatcatagaagaaatcaattcacaggcgtatttgcttgcaatatttgggcgttcttaattgtgttttgctttcgaaaccaacaaacgaaaaatatatttacgtacagacaaccgcaacatcagatcgccgccgccgccgccgccgcggcgaactcgatcgatcacatacacggcgtcgtcctcgtcgtcgccggccggccgtcacgcgtaggcggccggcgcgaggcgcggcgtgacgagggcgcggagcgggacggccttgggcagcgcgaggccgaacgtctccgacatgtccaccttgtcctcgccgtcggggagccgccagtcgaacgagtgcagcagcgtgccgaggaagtactggacgaacaccatgccggcgagcttcccggcgcagatcctcctgccggcgccgaaggggatgagctcgaagtagttgccgagcgggtccacgcgctcggcggcgccccccggcatgaaccgctccggcctgaactccagcgggtcctcccacgccgacgggtcgcggccgatggcgtagatgttgatgagcagccgcgtgttcgccgggatgcggtagccgtcgacgtcgcactcgtcgaaggagaagtgcgggaggctgagcggcgtggaggggtggagccgcatggcctccttgcagacggcctggaggtaggggaggctggcgatgtcggactcctccaggcggcggccgcggccgacgacgcggtccatctcctcctgcgcccgcgccatcaccgccgggttcttcatcatctccgccatcgcccactccacgatgatcgacgacgtgtccgtcccggccgtgaacatgtcgaagatgaggcccttgatgttgacctcggagatggtctcgccgtcctcgtcgtcgacgccgacggcggcgcggagcctgtcgacgaagtcggtgcgcccggcgcgggcgcggtcgtcggcggtggcggcgtggtcggcgagcagcttggtgatgaggacgtcgaactggtcgtggatccgccgcaacttggcctggactccctgcaggtccagccacgccagcgccggcacgaagtcgctgatgttgaacagccccgcacccgtcaacagcgagacgatcatatccttatagctgttggactcgtcgccctgcacgtcgaacacccgcttgctgacggtgatctggccgacgatgttggcgagcgcgcagacgagcacctccgggatgacgacggggcggccggcggcggacgcctccgccacgccgcgcagcagccggcgggcctcgtcgcggcgcaccgccgcccagtcggcgagcgcgcgggcgccgagcaggtggacgctcgccagcttccgcatcagcttccacctggcgccgtagttggcgaacaccatgttctggtagttgtacgtgatgtccacggcgctcgccaccgccggccggttcgcgaaccgggcgtcgagcgccttcaggaacgacctcgccgcgcacggcgacgacgccaccaccacgccgcaggtgcccatcttgaggtacatgacgggcccgtacttgcgcgccagcgacgccaggccggcgtgcggggccgggccgacgagtggcagcgcgccgaggacggggaggcccgggggtcccgccgggaggcggcggccgccgccgggggagggcgggcggtaggagcggagggagaggtggaggaggaggcagaggaaggcggcggagagcacgacggggtcggtgcagagcgcggcgagctccatggccatggcggcgaggtgggcggcgaactcggttttaccaa

SEQ ID NO: 49202 - DNA, 1147 bp, Oryza sativa
  Clone ID: PAT_MRT4530_51805C.1
tctgttttttatatacaaataactaatgtattccttcatggtattcttgaagaagaggtatacataaaacaaccacttaggtatgaagataaggtccatccttgactatgtgtgtaagtttgataaagctctctatggtttaaaacagacacctagagcatggtatgctaagttaatttatgttgatgacataattgttgctagctcgagacaagatgcggttccagctctgctgaaggacctataaaaggatttagccttgaaggatctaggtgacttacactactttcttggcatagagatgaacaaggcatctagtggcattgttctaacccaggaaaaatatgttactgatctactaagacgagttggtatgactgattgtaaacctgttagtacacctttgtcaactagtgagaaactcactttgcatgaaggagatttattaggtcccaatgatgcatctaattacataagtgtagtaggagcactccagtacttaagtctgactagaccagacatttcctttccagtaaataaggtatgtcagtttctatatgctcctactacagttcattgggctgctgtgaagagaatattaaggtatttaaaacagtgtactaaacttggtttaaagattagtaagtcaaagtctatgcttgttagtggatattcagatgcagactaggtaggaaatatagatgatagaagatctacaggaggttttgcagtatttctaggggataatttggtttcctggaatgcaaagaaacaagctactatgtcaaggtctagtactaaatcagaatacaaggccttggctaatgctacagcagaaatcatatggatacaaactctgttagaggaactcagtgtgccaagtcctccaatggctcgactgtggtatgataatcttggtgctaaatatttatcatctaaccctgtcttccatgctagaactaagcacattgaggttgactatcattttgtacgtgaaagagtgcaacgaaaattacttgaagtggagtttgctcctacaggtgatcaagtggctgatggatttacaaaggcgttatcggtaagacaacttgaaaattttaagtacaatctcgatctaggtaggttgtgattgagggggagtattaga

SEQ ID NO: 49203 - DNA, 285 bp, Oryza sativa
  unsure (1)..(285): unsure at all n locations
  Clone ID: PAT_MRT4530_51806C.1
cccggttcgcccagcgtcgcccagctccgcgcctggccatttgtgcttgcacctatgggcaatgccagcagcagccgtttgcaccgatcatgaaccctgcaatgagttgtgggcaacagtgcacccgtgagcctacttgggagcagtcacgcagctacaactgacactgccagtgtgcggcagcatgctgtcagcagagaggttgatggcgcacaatatcattgccaggcttttgcanatggtgcagtctatcatgcagcaagtgcagtttgatgctggctttgt

SEQ ID NO: 49204 - DNA, 3771 bp, Oryza sativa
  Clone ID: PAT_MRT4530_51808C.1
tcacaacctacctacattgagattgtacttaaaattttcaagttgtcttgccgataacgcctttgtaaatccatcggccacttgatcacctgtaggaataaactccacttcaagtaattttcgttgcattctttcacgtacaaaatgatagtcaacctcaatatgcttagttctagcatgaaagacagggttagatgataaatatttagcaccaagattatcacaccacagtcgagccattggaggacttggcacactgagttcctctaacagagtttgtatccacatgatttctgctgtagcattagccaaggccttgtattctgattcagtactagaccttggcacagtagcttgtttctttgcattccaagaaaccaaattatcccctagaaatactgcaaaacctcctgtagatcttctatcatctatatttcctgcccagtctgcatctgaatatccactaacaagcatagactttgacttactaatctttaaaccaagtttagtacattgttttaaataccttaatattctcttcatagcagcccaatgaactatagtaggagcatgtagaaactgacataccttatttactggaaagtaaatgtctggtctagtcagagttaagtactggagtgctcctactacacttctgtaattagatgcatcattgggacctaataaatctccttcatgcaaagtgagtttctcactagttgacaaaggtgtactaacaggtttacaatcagtcataccaactcgtcttagtagatcagtaacatatttttcctgggttagaacaatgccactagatgccttgtttacctctatgccaagaaagtagtgtaagtcacctagatcctttaaggcaaaatccttttgtaggtcctttagcagagctggaactgcatcctgtctcgagctagcaacaattatgtcatcaacataaacaagcacaaaaattattagaccccctttattataaaagaatagagaagtatctgccttggatccttggaatccaaggtgttgaagcttctgacttaacttagcataccatgctctaggtgcctgttttaaaccatagagagctttgtcaagcttacacacatagtcaggatggaccttatcttcatacccaggtggttgtttcatgtatacctcttcttcaagaataccatgaaggaaggcattttgcacatctagttgtcttagagtccaacctctagacacagcaattgatagaataattctgattgtggctgccttgacaacaggactaaaggtatcctcataatctatcccatacctttgtttaaaacctttagcaactagcctagctttatatctgtcaaggctaccatcttgttttcttttaatcttatagacccatttataatctataatatttcttcccttttgaggaggaactaaatgccatgttttattatgcaataaagctgtgaactttgcatccatagcatgtttccaatttgtgtcatgcaaagcatcatgtaaatccctaggttctccggtggtagtaagacagccatacttaacagtacgatcggtataaattttctctttgcgaatacctttttgaagatgtgtgacaggacggctcgcttctccctcgggcgtagaggatctcagcgcctgctggtgttgttgcggattgggaagtgtggcttctggtgccgtggcgacggacgattggctggcaggagaagccgacgcactgatgctgctctcatgtgtcgaactgtcattcaaattggggttggcggtcatgtcacctgctgcatcgtctgctggatcagcgttggagatcgtgcctgtgtcgctgccaccggaatcagctgcatcatcacgagtgctggcgagattttcttctgtattttccacgggattttctgcagcaaccatattagcaggagcagtagggtaatagttcacatgatcattcagctgaacatccccagggttaagcatatcggcaggaagaagattaacttctttacgaagattggttccagcatttggatttagttcggcaaaaggaaaaacagactcatcaaagacaacatcacgggagatataaatgcgtccagtagatgaatctaagcaccgaaagcctttatgaagaggactgtacccaaggaaagtgcatctcttagaacggaaatgcatcttatgagagttatatggcctaagatctggccagcaggcacacccaaaggttctaagggcttgataatcaggagtttgtttaaacaaacattcaagaggagaggaataaccaagaaccttggtgggcatgcgattaatcaaataaacaccagattgataggcctcatcccagaattttagtggtagagaagcatgggctaaaagagaaagaccaacttcaacgatgtgtcgatgtttgcgttcagctgagccattttgttgatgggtgtgtggacatgaaacatggtgtgtgatgcctattttattaaagaaggtattcaatttttgatactcgcctccccagtcggtttgcatggatatgatttttctattaaacatacgctcaacaaggcactgaaactcttgaaacttctgaaaaacttcagacttatacttgagaaaatagatccacgtaaacctactgaaagcatcaataaaacttacatagtacttctttccacccccagcaacaggagcgggaccccaaacatctgcgccgtttgcagtttgcacttggtcctggcccttgtatttgtcccggatggtcaacttctcaagttccccggtgacatggtccgtagtgccggtgtctacataccaatttgaatctactccataggatgctgttgtgcctgcatatttctcatcaggaacaaaatcctcatcatacctgtaccagcaatcaatcacggtgtgcccccttttgtaacaaagttggcacttggggcgataatcaacgccattgcctccttgtcgctggttggagttgttgccgcgtcctctgccgcggctgtttcctccatggccgcgttgctgctgctgcggctgcttattgttgcggccccttcctggattgccgcggccacgccctctgttggcgagattggccgagtgttcctggcgcatcttcatgcgctgctcaaagctgagcagctgtgagtaagcctctcctaggcttacatgctcagatttggacactagggaggagatgatgggctcgaaatcttcatctaatcccgcaattatatacgagatcaggtcttcttcatcaacgggcttgccggaagtcgccagctcgtcggccaacaccctcatcttgctgacatattcagcaatgccgaggtcgcccttcttcgtgttcgtcagtgcgatcttggtgttgatggagcgcgcccttgtggccgaagagaacatcccttcaatcgtgctccagagagatgcagcactgctgcatgtagccacctgggagagaacatctctactcatagtggttagcagataacctagtacctgctgatcattggcgatccattcatcgaccgccgggttggagacctcaacctccttctcatttttcttgatgatgatggtcgccgacggcttctttgtggcgccggtgaggtagctgtcgaggcgtgctcctcggatgacggcgagaacctgaaccttccagatcaggtagtttcccttgctcaacttctccgtgaccgtgattcctccgagggaacctgaggccgaagactgggacgaacttgccat

SEQ ID NO: 49205 - DNA, 117 bp, Oryza sativa
  Clone ID: PAT_MRT4530_51809C.1
atggatggtggacagaaccgtcgttctttaaatataaacactgaggctggagatgaagcttcggaggatccctacgcctattaccaggagggtgatgaagacgatggcgctcagtag

SEQ ID NO: 49206 - DNA, 659 bp, Oryza sativa
  unsure (1)..(659): unsure at all n locations
  Clone ID: PAT_MRT4530_5180C.1
cccagcgtccgtgcgggaggncgcgggggcgaggacgatgtgggtgcgggagcggcggtcccgtgcatccatatgcgggagcgctctagctcggcgggtccgcaccgtgacgcaaacaacccgtggtgccgttcgcctatcctgcgggaccggtgcggtatcgcatccccggcgtgggggaccggcgctctcacgcaaccatcatgtggattgggtatatttttgcaaattaatctcagacatgtatataaatgcaaaatatgaaaaataaaagtatattttcaattttttttctataagttccatactttgatgtttggatggcaacatttttgttggcacttactgtagcatcttctagaagaccgcactgtcttggaaagaaatttcgttgtcctagacagaacaggcaggtgcagatgagcacgtttgaacggtgtagcatatactgttaccgcaacgaattgtaacgtgctgtgaagttcacctacttctcgttgacactttttgtagcatcgtccgcttcagttcgatgtgcgcagtgcgcgatatccgattatatgtagattttcgtcgactatagataaagatttagggctcgttcggttcacaggattttcacaaacataggaatattaaaccccccccccacacccacc

SEQ ID NO: 49207 - DNA, 300 bp, Oryza sativa
  Clone ID: PAT_MRT4530_51810C.1
tcacgcccgcggcgacggtgagcgagacgatgacgacggcgaagcggcgcacgacggggtggaggtggcgccgccgagccttgctcgccggggctgcgtgccgccatagctggtgcgcatccccgtcgagcgttgctcgacggtgccctcagcgaggcggcgtcggcgagacgagcacgcgaagaggaagagccgggccagcacgacgggtcgcgaggccgctcggggaccaagtcctcgggcgcgcgctcgcctctttccggcgtcggtggcgacacggtggtcgccgccggccaccat

SEQ ID NO: 49208 - DNA, 255 bp, Oryza sativa
  Clone ID: PAT_MRT4530_51811C.1
atggcgacggcggtgaggcggtccagcgggcggcgcggcgtggggatggcgcggcgaggcggtccggtagccgggagcgtaactgtagctggaggaggggagttggacctaagcatacctgtagaagcatcatttggcgtgctgttgaattttggagccaggatgtgtgtcgctagtggggactcgggaggggaagtgcaggggtcgttcaccggttgggccaaggtgggaatttggagtgggcccgctgagtag

SEQ ID NO: 49209 - DNA, 396 bp, Oryza sativa
  Clone ID: PAT_MRT4530_51812C.1
cattaatgatttctttttacattggtgggcaccctcgactgggccccctgagggagctcatgctcgcccttgcgtcgttccgcgagggcaagagcagccacgaggacaaggagaaggatgcgaccgaccgcaggggcagcatcaggaagaacaaggcagaccctgggaacaagaacatccccagcaacaccgccccggactatgaagagggggccgaccccgctgccaggcacggggcggcgccagagcgcgacacacggaccggtggagagaccggcgccagcacccacccggcgatggcgaggcgccggggcaacagagccccgcccaggaggagaccaagaggtgggacaccaacaacgcacccaaccgtgcttcaacctgggcccaacacca

SEQ ID NO: 49210 - DNA, 315 bp, Oryza sativa
  unsure (1)..(315): unsure at all n locations
  Clone ID: PAT_MRT4530_51813C.1
acatcctcccacccttctgaatctatagccattttacccatacaccgcctaaaatttgatcgcgtgctactttctaccgggccttccagctcttattaataaatgctgccctaaaaccacacacctcatgcgttctatttcccagtgatataaaaggtattctcctgggaaaaacagaaatattcatttctactatactcaacctgacatattatacttaatcatcttaacctgacataatcatgatatatangggagggaattcctaccttcttgaaaactaacatgatacatatatcttgacagatggcaact

SEQ ID NO: 49211 - DNA, 342 bp, Oryza sativa
  Clone ID: PAT_MRT4530_51814C.1
ttgtttttttattttttaatttttatcgtttaaattaaaaagcgaaagagacacacggtgcgtttatcatttcgccatgggttgaaaaagatctaaagtttactctaatattgatccgaatttgacacaatttcattatcgctcgaactttacatgaacactccgatgaagatctggcagccatttctaaattgccggttcacatgggtaccggagcacagtgtggcacaatcttttttcggagggttctggagtggcctttttagggctatggctttaccggtttgatgataagcaacactggactaccgaatttaccactggtccttcaaagacacgagt

SEQ ID NO: 49212 - DNA, 878 bp, Oryza sativa
  Clone ID: PAT_MRT4530_51815C.1
atggcggcgcaggagcaggagcaggagaagcagcaggtgaagacgagcacgacgagctcgctgccgtcgagcagcgagcgctcctccagctcagcccccaacaacctcaaggaaggaggaggggtggagagcgacgaggagatacggcgggtgccggagatgggagggggcggcgggtcggcgtcgtcgggggcgggggcggacgagcggcaggggaaggaggacgggaagcagcagggtggtggcggcggcggggcggcggcggcggggggcgggcaggagcaggcgccgccggcgaggaagcgagggcggagcgccggcgacaaggagcagaaccggctgaagcggctgctgcggaaccgcgtgtcggcgcagcaggcgcgggagcggaagaaggcgtacatgacggagctcgaggccaaggccaaggacctcgagctccgcaatgccgagctcgagcagcgcgtctccaccctccagaacgagaacaacacgctccgccagatactcaagaacacgacggcgcacgccggcaagaggggcggcggcggcggaggcaagggcggcgatggcggcggcggcgggaagaagcaccatttcaccaagagctaggaggagaggggctccggtgccggcgccgccggaggcagggttgtggtaggaattgaattgttcatctgctctgaccattgttaggaaacatcatcaatgttgttgttgttgttgttgttgacgtttttccttttttttcttcctctctgttcaactctacgcttagtcgactgcttcggtgatggttgcaattactgttgctgaacattgtgtcttgtattttattaaatgtgtttttacagccccaaaaaattaaaaaaacaaaa

SEQ ID NO: 49213 - DNA, 193 bp, Oryza sativa
  Clone ID: PAT_MRT4530_51816C.1
ttacctttcacctcgggggcgggcggcggccggcggctaggtcctgacagcggagggagcaagcggggaggaccaggcattgggaccctggggcgggcgatctacacggcggggaagtggatccgcggcacggggcaggccatggaccgccttggatccaccatccagggcggcctccgcgttgacgagcagc

SEQ ID NO: 49214 - DNA, 1214 bp, Oryza sativa
  Clone ID: PAT_MRT4530_51817C.1
tggggatcgcggtgtccttcttgtcgcgcgccatcgtgcctttcgcccgttcctagtcgttggacttctccggcatgatctactacgacgtcgcagggaggcgtctggagcagccgccaccgccgcgcacgctgctgtgcagcccgctgccgtcgtccccgccggcgacgccaccgccgacgagactcctcccggtcgcgccgtctgcagctccggctgcggccgcccaaccaccgtctgcctctgcccgtaccttcccgccacgccgctccccacctccaccaccgtcgtcatcctccaccacccgcacgccctccgccgcaacccgctctccaccctccccctcctcgcccgctccctctccaacctccgcctcatccccggccgccgcctcctcccttcctccgcccccgtcatctctcgctctcccgtcctcctgctcttcccttcgccggacgccgccgacctcgcttcctggtgccgatccacgcctccgcccgcgcgcgccaacccgacactgctactgctcgatgggacatggaagcaggccaaggagatgcacgccgctagcctcccgttcctgtcctccttcgccgtccccgtctcgctgcccgtcgactgcggcgttgacggcgacagcatgttcgagggggagcttgtggtgaagaaggagccgcacaaggggtgcgtgagcactatggaggccgtcgcgagggctctgcggctgctggagccggaggggaggggagaagagatcgaggagacgatggtgggggtgctcagggcgatggttgccttccaggctgagcatttgcagcatcggccgatgaaaccgagggtgaagatgaggaagaagaaggatattaagagggaggaggagatgaagaggaacacattggactggagtgactgaatcactgaactactgaagcatctctggacacattggactggagtgactgaatcactgaactactgaagcatctctggacactgaacatacaggagctcattgcgcaatcgttgctgggtcattttggaggaatatcggctacattatcaccaatgagcaagtgatcaagagaaggagaggggaggagatgctttaggtgtttcttgagcatttgtgaacaggatttgggactcgttcttggagtttgcctttgctgccagttggagaaagaattccttcaaccgaattagagcggttaaaa

SEQ ID NO: 49215 - DNA, 472 bp, Oryza sativa
  Clone ID: PAT_MRT4530_51818C.1
cacggagccggctggggagattgttgggcatcaatttggcttcgatttggcgggagagaggcattttcgcgcgcatcgggggcaagatttagcgggatcagagagaggcaatggcggagggctggcgtgcggcggggctatggaagaggaacacgaggcgccggcgatttcgcgcgcacaggcggagggaattttgcacgcacgggcagaagagggagaggaacgcgaggcgtcgccggcgatttcgcgcgcaagggggcggagaagatttcacgcgcagggagcggagaagatgcgcgtccaaggagcgaagaggaacgcgaagggaggggcggcggagcgatgggattttcggtggttgagatgcggtggaggaggggatcagggatttttcttgtgggaactacataacgtgtttttaatcaccttcgtgggctgcatgcgagcgatacggcttcggatgaagcgctag

SEQ ID NO: 49216 - DNA, 324 bp, Oryza sativa
  Clone ID: PAT_MRT4530_51819C.1
atggataacctggcgctgctgcggggaatcctcggcccgggggtcgccggcgccgtctttggcgtgggttggtggttctgggtcgacgccgtcgtctgcagcgccgtccaggtctccttcctccactacctccccgctgacataattatctttatcaagagtagtgaagctttggctctttgtggcatagctggtgcagttggtttgttggtgcaagatgctttgactgacaagggcccgtctgtgtggactggtgtagctggtgttctgcaatgtgtccttgtattgataagtggggttaatttattggacttgccacagtaa

SEQ ID NO: 49217 - DNA, 498 bp, Oryza sativa
  Clone ID: PAT_MRT4530_5181C.1
gtggatcctgggctgagctcgtacgctgggcggccgcaagaggcagcaaaatccataatgcctctgcttgacaaggccaaccacgctatccctatctggcttatgaacaaaactccccttgaacttggggtaccgcaactgctggactcagacttattggagatgacaagacaaactagattcttgaagcgattaggaggtgactactccaaaactgtgggtgtgattgatctcggaggcggatccgtgcaaatggcctatgccatctcatcaggcacagctgctaatgctccagaaatgcccgatgggcaggatccttacattataaaggagtatcttaaaggaagagattacaatgtttatgtgcacagcttcaacggagtgtggaacggcggcggtggcgctgggcaggacgagctctacgttgcgaccagtttctactacatggcctcggatcatgagcagggtcgattacagcagatattggctcaacgttaa

SEQ ID NO: 49218 - DNA, 495 bp, Oryza sativa
  Clone ID: PAT_MRT4530_51820C.1
aaatagttatatcattcaaatgagacatttcaaatggcaggctatataccattagaggagctcttacagacaatgcacagacaatatagtatttcaagcatcaggtaggctttcagtcatttacgaattagcatttttctttgtgtgtttgctctcagtacccacttggttcttcatgtagattctagacgatttaggtttggcactaatagaactagactttcagttaaatggatgatttatatgcaggaagatccaatttgcttgataccctattatctgtgtaccattttcagtacttttgttgtacgactgttatacctatcctgacaatgttatacatcattggatcaaatggactagatccttctttacacttttaattctcttagctggtagatcattgaatggttaatatggtcaattataggttgcatgctaacatggtgtatatttgtctgcaggattttttttcttccctttacccatcatcat

SEQ ID NO: 49219 - DNA, 1456 bp, Oryza sativa
  Clone ID: PAT_MRT4530_51821C.1
atgaatatgctggttcctgcagccgtaagtgatattgcctatagactcacaacctttgccatcaagaaatatcagcaactgccagatgctgaggtggctctggagacactaaaccgactgctactaagagcccagaccatcattgaggaggcagagggaaagtgtattgccaatgaagggatgctccatcagttgcagatgttaatagaggggatgtacagaggccactacttgcttgataggtataaatatccagcccttcaagaggacagaaaggatgaggaggtgctcagtttcttgctgcaaacagatggtcttggtgatgaagattttcctgtgcttccaataattggtccaagaaaatgtgggaaaagcactctagtcgagcatgcttgtcgtgattatagggtgcgcaatcactactctttgattttgttccttagaggaaataacctgaaggatgcaagagtggcaaatctgagagagaatggtgtagtgaagcaccaaaactattcttcatgcaaaaggttgctgataattattgagctagcttgcgatatcagtgaacaaacatggcaaagcttaaaatcttcgatgagttgctgggcccgtgggagcaaaataatcatcaccagcaggtcagataagatcgagaatctgggaacagcagcagctattcggctggacctcttgcatccagaagcctactggtatttcttcaagaagcttgcatttggaagcagagacccggatgagcacccgaagcttgcttcggtagccatggagattgcaacggagtacagcgggtcctttctggctgcatacaccattggtggattactgagggataatttcaatgcccagttctggtgctctactctgaagtacctgagggcatacatacgcaaccagctccgtttgcatggtgatcaccctaacaatctcttactgaagggccaatgggtgcattgcttgagatttgcagaggccagcaatcctctgtggatgtctgattactatgagacggactcctgtccggaccaggctcccaatatctcggacatcatgctgggaagcgccacacctcgcgggagattcgaggctctaggatggaagtccaggatggcgccttactacagctacatgatatgctgcagcacggaggcgccagggcatgcggtgggcaggaagaagcgcagctacgaccggtttttggtgtaggttactgctgcgagcaccctcagttgcatggctgaacgaggctagcaacagagttgctgtatgtactaagtgaagcaaagcatttctttctcctttttttgtttgtgctgaacaagcatttgttgacactactattgtgtattgtgtatcaccactgagaagctgttgccattgatggatcaggatggagtatcaaaaaaaaaaaaaaaaaacctgcagcccggggatccactag

SEQ ID NO: 49220 - DNA, 119 bp, Oryza sativa
  Clone ID: PAT_MRT4530_51822C.1
atccccgggctgcagtgaattctggcacgaggcttttcttggagccaccaagaaaccagccatgtctgtgctcggtgtcttcttggggtcgctgcttctggctggcggtggctgccggc

SEQ ID NO: 49221 - DNA, 630 bp, Oryza sativa
  Clone ID: PAT_MRT4530_51823C.1
tcttctttttttttttttttttttttttttttttttttttttttttttttttttttggaaaaaaaatttaacattttttaaatttatttttttgaacagacccaagcccagatcacagggttcaacgccccccccttagtttaaatcaacgggtttggatttttaacagacccccttcccgtccaatttattccagttaaacaagcaaagggggggccccccccctaggcctttttgggggatttcccgggggcctttttgggcgatttggcctttttgccgggggggggggccttttccgccgtttttttgggcaaaacccccgggttgttgttgggcagcccccctccgtgcgcgagggtcaccccggccagaagtttgccgagctctttgtttttcctgatccccagcaacacggggggggggatgatcctgttttttttggtgcccttggccgggttcccggggagctccagccccttggcggggaggtactcgaggacgggggcgaggtaaacgggggccccggtgccaatgcgttgggcgtagcggccctttttgaggatagcggccgatacggccgaggggaaactggagcccggccttgacggagcgcgaccccgctttttt

SEQ ID NO: 49222 - DNA, 553 bp, Oryza sativa
  unsure (1)..(553): unsure at all n locations
  Clone ID: PAT_MRT4530_51824C.1
aagggttgcccgatcttaattttgaaaaataatggaggggtacttcgcttgttaagcgtgtctgtcgtgtntgattttgcacggccngtattggtgggtatnatggcccctggtgttgccaaagtacagcccattggggcccatgtcgatgcgatgcccgtgctgtgccgcagcctgtgctggtgtgtgtgtgcgactgatggtgagtgagaccatgaatntttgggatgcagtgtgtgtgagtgcatgttgggaatctggaatgatagattgatgcccctnttgttgtgtgtggcgacnaatgcatgctgctgacctgaatgccctgctgtgtgctggattgcctgagaaaattgatggggagtgaaatggcacctgaattgcctgctgtgtgtggtgtgctttgctgttgaggaatttgtgtggaaatgttggcagtgctgaatgatgctgtgcccttggtgattgggatggtgcggaggagcaccatgnttttttttcacaatgttaattgttatattcgtgttcccttgaaaaaaaaaaaaaaaaaaaa

SEQ ID NO: 49223 - DNA, 432 bp, Oryza sativa
  Clone ID: PAT_MRT4530_51825C.1
tttcgtgccgccctttgatttgttttttcggtttttgttttatttttttttccagtcgtttcctttttgtggaaccgcaaaagaggatcatgcccatgttcatttagacatagcaaaaaacattcgccctttcgaaaggccgtctatccttgaggtttggggcgctctacggtttcctggctggcatttttttgggcattccatttctgttcaacaaagagggagggggggcccattccattccttggggaattcgagcacaggggctatgggcttgccctctttgatggcgacgagccccttgggcagctcctcgcacgggaaaccccgttttttcgccggggaggaacttggaggctacctactctggcacaaaccgggggagcgggctctaggggaccttcttgttccggttggggacaagcggggtgc

SEQ ID NO: 49224 - DNA, 1596 bp, Oryza sativa
  Clone ID: PAT_MRT4530_51826C.1
ttaacgttttctcccatgcgaatttgccacgtatttggttggctggcaggatgtccaacgtgactgtatgtgtgcgattcagaccactgagccacaaagagaggaagactaatggtgacaagataaggcaggatgagagggaagaagatgtcatattcagctttgacagggtgttttatgaagatgcagaacagtctgatgtctataacttccttgcagtgccaattgtcgcagatgccatcagtggaataaatgggactataattacttatggtcagactggagcaggaaagacatagaggatggcgggggcgagcctcttccattccaacaagcagcgcactggactagttcagagaggcgtacacgagcttttccaatctctcccatcttgggatcgctccgcactgaagaggaggaactaggtcatgcatgaatacattttggtaaaagtactgaatcttgatgacttgacgaaggacaatctaaagatctgctagagtaaaactcaagggatctccattgctttcaaggctgagatagaagacgatatcatattcgacttcgagagggtgttttatgaagatgcagaacactctgatgtctgtgacttacttcaactaccaattgtctcagatgccatcattggaataaatgagactataattacttatggtcaggcttgagaaaaaaagaaaaaaagcattggagggggccgagttcttgatgaggcaaagacaatcaacaaatctctctcagttctcgggaatgttgtcaatgctctaacaactggtatagacttttctggagagaataaacatcaacagaaggtaaaccgaatcatgtgccttatcgtgactctaagcttacgcgcattcttcaagatgcactggttggtgaaaagattttctcaggagtttctgaatcgtcggcatctgtccaggacaaagctcataaagaccacacccaaatcaatctctcccgaagtggatagcatcaagaagcccatccctgattctcatggccaaaatgatctgcgtgaccggattctgaacaagttaaggttgagcctgaaggaggaagatgtggaccttctggaggaactgttcgtgcaggaaggcatcatcttcgaccccaactactccgtggcagacatcgactcagcctgccaagacgccgcgagccaggaggtctcactgctcacacaagctgtggaggaactgaaagaaaccgtcgaagagctcaccgatgagaacgagaggttgaggggtgaactcgagctcgcgcaggaggctgccgccgccgccgctgctgctcgggctgacggcgcgctgcttggtttcgtgccggcggtcgccatcagctccctcctccgcccctttgggttcgttccagactgaatacgagattcaaggtcacacataatacattttgctgccatttttgacgtgagatacagtgtcggtaggaactagtaagaaatgctaatgtcatcgatcgaacttctcacttgcctttatcgctgtgatagtacacagaaggaacattgacatcgagctggaatttttgtccaaaagatgttttgcttgaaccctg

SEQ ID NO: 49225 - DNA, 326 bp, Oryza sativa
  Clone ID: PAT_MRT4530_51827C.1
gaacaaaacgaaggtcaccatttattcacgccatatggactaatagctgctccgtgacaaaggaaagcactcttgaggcagcatccccacgttgcacctctcccactgctttcgatcgtcaccctaaggccgggtcttggggctcatgggtacccacggcagaggccgacaccacctggcccagaggggatgcccacgatctctaatcgcctatggttttaaggcttgcgcctaggtcccttgtcctgcggccagcgtacaccttcaccttggctggcccggcccggaatattgcgttcttccttgaaaggcgtgtcaccatggga

SEQ ID NO: 49226 - DNA, 209 bp, Oryza sativa
  unsure (1)..(209): unsure at all n locations
  Clone ID: PAT_MRT4530_51829C.1
ccggccatccttctacaactaaacattcagcgaaagcataacaactagaatcccaccacaatgaagatcattttcttctttgctctccttgctattgctgcatgtagcgcctctgcgcagnttgatgctgntactcaagtntacaggaaatatnagctggagccgnnatctatgctgcaacaacagatgcttagcgccagtgcggtgag

SEQ ID NO: 49227 - DNA, 1548 bp, Oryza sativa
  unsure (1)..(1548): unsure at all n locations
  Clone ID: PAT_MRT4530_5182C.1
ctccacttattacttagcaacaaatatacatgcaagtacaataaactggaaacacacgcaacacacaacanatagtacattaattatatnctagntactncggncatgtctcttggtgcttctttttgggtgagacagcctcaatggcggtgcccaatggccacgccgcttcgatgtagtactctccatgcttcaccttctctaccagcgtcatctccttcgttgcctccaaaccaaagccatcgacaagcaaggtgtattggtaaacgaggtccatgcatagataagcatggtcacaagctctggggtatgctgctttcgcttcttcaacactcagactgcaaactttttctgcagcaaccttgtatgctgctggtgtggacttagcactaggagcctcgctatcgatgaacccaatctgctgtagtcgaccctgctcatgatccgaggccatgtagtagaaactggtcgcaacgtagagctcgtcctgcccagcgccaccgccgccgttccacactccgttgaagctgcagttgttggtttcgcaaggcgcgtccaggttgagtgccttcaccacgtcatctctacacttgtggtagtctgccccttgtggcgctgccgttgcatcatactgctccccgttatagatgtacttaccgctaaatccacgcagcatgcagttgctaaatgtcccattcttcctttttagtatctccacgcgagaagcccgagcaccatagtgcaagtaactgtgcacataaacattgtaatctctttctttgagatactcctttataatataaggatcctgcccatcgagcacttctggagcattagcagctgtgcctgttgagatggcataggccatttgcacggatccacctccgagatcaatcactcctacagttttggagtagtcacctcctaatctatccagcaaatagttaagtgcaacccacatgtaagatccttcttgagatccactaagaacattaatccagtttggattgtattggaacttggtcttggtgtggacaacatctctaaccgcttcaagaatctggtttgccttttcatctccaataagtatgagtccagcagttgccccaagtttaaggggagttttcttcataagccagttagggacaacgtggatggccttatcaagcagaggctgtatggagttggctgcctcccgcggtcgtccagcgtacgagctcagtccaggatccaccttggcgaagacctcgatgtcgtcgccgatcttgagaagatccatcatcctgtcgaacctaaagacgtgtaccctcgtccccgtgctgccggcgtccaatatcacggcgtacttccccggccctgtcgccgcttgccctcccacgacatcgtcgtcagtcatggcgccgcccttccggccgagcaccgccgtgccggcgactgccggcgacgacgccatcaggagaagcatggctactgctgctgcggcgatgctcatgacatgatgagccgccattgcaagctattattgcccaattctggagtcccggccgg

SEQ ID NO: 49228 - DNA, 1713 bp, Oryza sativa
  Clone ID: PAT_MRT4530_51830C.1
aaatgccatcccggacggaaatgcccctggctcttcttcttcctccatcccgcgcgtgaagagctcgccgacggccatggccatctccaccgccgcgccgatgccgccttgctgatggcgattggggcgctgccctccctgccatccccgccagcgcctgtgcagatgaggtcgtcgcggaaggactccggcgacgacgtgcggatccagccagcgcgcgtgcgcgtggggccggtggcgcagctcctggccaccaccgcctcctcgttgccaccgcgtagccagccgcaatcgaccgcgcctgccgccaccgggccgccctccgccggagcccgcggccgccgccgtcgaccacgccagccgccaccacgccgccctccgccggagcccgcggccgccgccgtcgaccgcgccagccgccaccgcgcagccctccaatccgccggagcccacgcccgcgcctgccgccaccgcgtagccctccgccggagcccgcgcccgccgcccgtgcggcggggatggcagggagggagctagccatggccgccggcgagctcgcgcggtccgcgccggcaccgccttcgtccttcctcggcccaccgcgtcggcgccgcctccacctccgcccgccctccgcctccatcgcgccgcctccgcctccaccacgccggcgtcgtccttcaccaccgcggccgtaggattcggcgcactcttgtctctgtggctctctgggcaggggagcaaggcggcagcggcggcgggagcaggggagaaaggcggcggcggcggcggcggcctccggtctcccccgccctcttcgctttgggctgaggccgccgtgctcgccccgtcctcttcactctgcccaaggtggcggaaacccaaattgatggagcgatggagatggagatggagttgttggtggggatgtggaacttgtcggcgacccacgacatctccggcgcgcgctgccgcgtccttggccacgcaccggaggcggttgtggaggtggacggtgtcggcctggaggtggacgtagtggagcacgtcggtgacgtcggcggcaaccttgaggcgagactgccacgacgcgagcagggtgaaggacgggttgttcgggttgcggtggagcgcgaagagcggcgacgcgtcgaggaggagctcgtaggcgaggaagagcgagccgttgggcgacgcggagacgccgaggaggcgcgcgatggcggcgtggtggcagtggccgaggacggcgaggcgggcggtgacgtgcgccctcaaaatcgacggagatcggtctgaccgaagttgccttgccagtctgaccgctcggatgtcgtcggtctgaccggtatagatcaaccggtctgaccgctgaagctgcttgccgcgcctgtcgtcacctccggtctgaccgccgtgcacccgccggtctgaccgccgctatgccaccggtctgaccgccggtgagttaccggttaaaccgtcgaaacccggtgaaacacaaatcgaagaactgtatagtatccatctagaagtcataatcatgaaataaactcggatatccaaacaaacaacccgaaaccgaaaccgacatagtgtcagccggtcagaccgcgggctacgccggtctgaccgcgcgacacacgccggtctgaccggctaccagagcccggtctgtccggtcacataaaatgacgaatcctgcgatcacct

SEQ ID NO: 49229 - DNA, 201 bp, Oryza sativa
  Clone ID: PAT_MRT4530_51831C.1
gaaaaacctagtctattattaaaaatttggccttgattgacctacaaaagcttgaaattgctagcaactcatttgcctcaacaaaatattcaagttacccgcataagcgaaccctgaagttacaaatacaccagccaatattaaccgcaccaaggtgacatattaaccagtaaaggcgggaaccaattcaaatgtccaaac

SEQ ID NO: 49230 - DNA, 279 bp, Oryza sativa
  Clone ID: PAT_MRT4530_51832C.1
atggagaccggcccgccgtcactgccaacccgacccccgttcgtcgctgccgccaacccgacccccgtccgtcgccgccgccaatgcctatgtggcccctgctcctggagtcaaagtggactttttcccaggcagcaaacatcaattgcagcagcaggagcagtagtggtgcagcagcgggcattgggccttggcccatttcgcgagcagcagcagatcggcaacagccagcagcagaagtatattgtggcaaagtttagtaccacctcggtggtttga

SEQ ID NO: 49231 - DNA, 259 bp, Oryza sativa
  Clone ID: PAT_MRT4530_51833C.1
gacgtgggacgtacccataagttggcaacattcccggagaagttgaaaaagtgtcaatcgattgtttgatatacaacttggtgggcaccacacaatcaccatggacacaaggattgtaagcgcatcagcttggacaccctttaactcttgaatgaatgaggcgacaacaagacccaaagattggtagagtattggaagtgttggccatcgggcttctacagcatctatcttgggttgagaaaacccttgtccagtttat

SEQ ID NO: 49232 - DNA, 1275 bp, Oryza sativa
  Clone ID: PAT_MRT4530_51834C.1
atggaatacgacgatcgggaacggcgacgcgggagaagggcccccggggaggcgctgccggacgacctggtcgaggagatcctcctccgcctgccggcgccgtcgatcgggcggtgccacgccgtgtgtaaggcctggctctcccgcacctctcagcccgatttcctccgcgcccacgccgcccgttcctgcacggccaccgtcgtcaccgccgcggccaccgtggaaactagaacgacgactccctgcggaaggtcgtgcaccaccgtccgcatcagacggcttggccgcaaatgctcgggggcggtggcggcttccctcgccgtgtcgttcgtctcggcgtcggagccggtgcgatccatgacagccgtcatcggcttgtgggacggcatcctgtgcgcagcgcacattctgtttggccccggaagaggcgttgagcggtacgtgctctgcaacccgctcaccgaggcctgcaccatcgtgccggctccggctaccgacggcttcctcgtcggcggttacgcccacccgaccacgtcgcgcttccacatcatgcacaccaacttcttcacaacgatggagaccttttggatcctgcggctcggggagaacagcgtgtggcgcgagactgcacggctgtcttcactggctggcctcgtcatcatcggcgcagtttctcgtggccgtcttcaacagttcaacatggaacgggaggaattccggctgatggaggcccccggggggcaaggagtgcgggacggcaacctgtcgcactcgcacacgatgatgggaatacacatcacccattgccacggcaagctgtgcgcccttgccgacgagccgggcgccaatgcattggggttgtgggtgctcgaggactactccgacccaacaagctggcggcttcagcggaagatcgactactactactcgtgcggcagcgccgccggtgctgctctcgacgacgatccacacgccgccgctgctcaaacttttcgtgcccgcttctcgacagccgatgtggtggaggttctgcccaatggtgtcgatgacgatgacgagggcgaggagatcctgctccagcttggtgacgaggaggtcgtgtacaatgttgggcgcgcggcgtggcgcaggcgggggatattgccgctgactacacgctgcctgatgatgcataggcagtgcatattgccgcgcgaggtgagcttcggtgacgcgtctcaggttccttgggagaaggacatcggcggccactgtttctaccgcatatactag

SEQ ID NO: 49233 - DNA, 560 bp, Oryza sativa
  unsure (1)..(560): unsure at all n locations
  Clone ID: PAT_MRT4530_51835C.1
gtgttctgcagctctgagtcagagcttctggagtncgggtggtccgccggatgagaccgggagggatctttgatccgggccgatcgcagccggtcacggagctcgaggcggcggcgggcggcgccccgtcgacctggagagggacatggacaagctgcaggggtcgtgtggagtgcataattgacactggcggcgagccgacagtgcgccccagccctaggatgacccaaatgaagcactagcaagacttgaaaggagttagcggagttcaagctgcagcaggaagagaacnatctgctccttcgacatatcttgagcctatcccagagtaacttaaagttgttctagtctcctttcttatcttatgcactttgatgaactccatctacttattttagttgtgttgatggttctatgagcttactgtcatgtggtggacttggttatgtaaaatgatgtttggtgctatggtggacttaattatcatcttgtggtaaacttttgtggccttaaatgtgaacatatgtgtactatgttctgtgaaaaaaaaaaaaaaaaaa

SEQ ID NO: 49234 - DNA, 684 bp, Oryza sativa
  Clone ID: PAT_MRT4530_51836C.1
agtgcagcctggtgcacttggctgacgagcagatcagtgggtggcttgtaggcccacatgatgatatgggagttgcgtgaaacgggccaatgcagagtgatgggggcaatgatcgcgggctatatgccccactgtgctgggcaaaatgcaaagctggcggttgtgtggcctaacctgggagaagacacaagcgcaaatgtggctgtgggcataactatggctgcatgcatgtctgggtttggcctggctatacacagatgcttgcaacctggatggcaaggggaccaatttgataacacatgtgggtgtgacaagcgcacaatgagcagccatagcaagcttgaacacaactgcacaatgcaagtgttggggtggatgctgctgacttgtggatgcggatatgctgggctgcaagctgcaaagctgctgattgggcttgttgtaacagtgccatgctgaggatgatggtgatcctgaccactgagggtactgatggggtggcaacccatatgtgacacaattgaccacccttggcagtgtgcttggtgaatggagttgttaacagtatagtggttcggaagttaaaaataagctcagatatcatgcatatgtggacatgtggaaactttgggtgatatccatagaaataaacgttgtctttgcatgatttgaaaaaaaaaaaaa

SEQ ID NO: 49235 - DNA, 1323 bp, Oryza sativa
  Clone ID: PAT_MRT4530_51837C.1
atggactacgacgatcgggaacggcggcgcgggagaagggcccccggggaggcgctgccggacgacctggtcgaggagatcctcctccgcctgccggcgccgtcgatcgggcggtgccgcgccgtgtgcaaggcctggctctcccgcacctctcagccggatttcctccgcgcccacgccgcccgttcctgcacggccaccgtcaccgccgcggccaccgtggaaactagaacgacggctccccgcggaaggtcgtgcaccaccgtctgcgtcagacagcttggccgcaaatgctcgggggcggtggcttccctcgccgtgtcgttcgtctcggcgtcggagccggggcgatccatgacagtcgtcatcggcttttgggacggcatcctgtgcgcagcgcacatactgtttggccccggaagaggcgttgagcggtacgtgctctgcaacccactcaccgaggcctgcaccatcgtgccggctccgtcgaccgacggcttcctcgtcggcggttacgcccacccgaccacgtcgcgcttccacatcatgcacgccaacttcttcacaacgatggagaccttttggatcctgcggctcggggagaacagcgtgtggcgcgaggtccgccgccctgccctcgcgacgatgagggtctgtattaagttcctacatgctccgcctgtcagactgcacggctgtcttcactggctggcctcgtcggcctcatcggcacagtttctcgtggccgtcttcaacatggaacgggaggaattccggctgatggaggcccccggggggcaaggagtgcgcttcggctcgcactcgcacacgatgatgggaatgcacatcacccattgccacggcaagctgtgcgccctcgccgacgagccgggcgccaacgcgttggggatgtgggtgctcgacgactactccgacccaacaagctggcggcttcagcggaagatcgactactactactcgtgcggcgccggcggcgccggtgctgctctcgacgacgacccacacgccgccgccgctcaaacttttcgtgcccgcttctcgacagccgatgtggtggaggttctgcccaatggtgtcgatgacgatgacgagggcgaggagatcctgctccagcttggtgacgaggaggtcgtgtacaatgttgggcgcgcggcgtggcgcaggtgggggatattgccgctgactacacgccgcctgatgatgcataggcagtgcatattgccgcgcgaggtgagcttcggtgacgcgtctcaggttccttgggaggacatcggcggccactgtttctaccgcatatactag

SEQ ID NO: 49236 - DNA, 566 bp, Oryza sativa
  Clone ID: PAT_MRT4530_51838C.1
ccccaaaaaccaacccaaattaggggaccaagcctggagtttcgggccgcgtatctaaaaccccattacccagcaaggcagggggttctctaacaaacgagcgggggcaaaacaccattcaaaggaactaaaaggaacgaccgggggggcaaaacaaactggaccccatcccagcctattccctttcgctgggacccccccagggcaaaaaaaaggggggggcccaaaaaaacaaaaaagaggcgggcgggcaacaataagctaatcagcacctgaatagctaaagccagggcggggaaaaatcttggagggtacaaggaacggaccatttaaacttggggcagggactttttaatcggacgagccctttttttttcctctttcttgcggagggccccggcgctaaattgggccccggccccttccaaaagttttttcttcccacccttcttcctttgaagggcttcccgccttaaaccctggggccccctgaaagcccccggggaagcttttgttcttgcagcttcagttttgaaacaagcatggttgctgagcttgaaaccccc

SEQ ID NO: 49237 - DNA, 3102 bp, Oryza sativa
  Clone ID: PAT_MRT4530_51839C.1
atggatgtggtgtggccgcacgggcacggcgtctggggctcgtcgtcggcgtcgcggcggtcggcgatgctccacggcagccttgacatatggatccacgaggcgcggaacctcccaaacatggacatcgtctccaagaccgtcgtcgacatcctcgggacgaagaagaagaagaaggcggccaacggcgccatgaccagcgacccctacgtcactgtgcagctcgcgtccgccaccgtcgcgcgcacctacgtcgtcaacgacgacgagaaccccgtgtgggcgcagcacttcctcatccccgtcgcgcacgaggcgcccgccgtccacttcctcgtcaaggacagcgacgtcttcggcgccgagctcatcggcgaggtcgtcgtccccgccgagcagctcgaggccggggagcacgtcgagggcgtctacccggtcctcgatcccgccgccggcaagccgtgcgcccccggcgccgtgctgcggctgtcggtgcagtacatccccgtggcgaggctaaccatgtaccaccacggcgtcaccccgggcccggacttcgccggcgtccccaacacctacttcccgctgcgccgcggcggccgggtgacgctgtaccaggacgcgcatgtgccggagggctcgctgccggagatcaggctgggcaatggcgcgctctaccggcaaggccaatgctggcacgatgtctacgacgcgatatcgcaggcgaggaggctcatctatatcaccgggtggtcggtgttccacaccattcagcttgtgcgggacggcggcgccggcgtctcgctgggcgatctgctgaagaggaagtcgcaggagggggtgagggtgctgctcctcgtctgggacgatccaacgtcaaggaacgtccttggtatccagatggaaggttacatgggcacacgggatgaggagacccgtagatttttcaagcattcttcagttcagatactgctctgcccgcgttctgctgggaaaaggcacagctgggttaagcagcaggagaccggaaccatttttacacatcatcagaaaacagtgattctggatgctgatgccggcaaccataaaaggaaaatagttgcttttgttggaggccttgatttatgcggtggacgatatgatacacctactcatcctctttttcggtctctccagacattgcacaaggacgactattataacccaaactttgcggtacttgatgcccaagggccaagagaaccatggcatgatttgcattctaagattgatggcccagcggcatatgatgtcttgacaaactttgaggagcgctggttaaaggcatccaagcgcagcggggttaaaaaattgtcaaaggcaaataatgacacattgctatggattggaaggatacctgatattgcaagcattgacgatgaagtgtattcaagtgacaatgatccagagcgatgggatgttcagatattccggtcaattgattcaaattctgtcaagggttttcccaaaaatccaagagaagcaaccagtgctaataacttaataccgattgaaatagctctcaaaattgccaacaagatttatgccaatgagaggttttcagcgtacatagtaattccaatgtggcctgaaggtaatcctactggtgctcctacacagagaatactttactggcaggattacctgaacttcttctgtcttggcaatcgtgaagcaggcggcagtcctagcacttgcagaggatcaagttcagccaacaatccccaggatcaagctaagaagaaccggaggttcatggtgtatgtgcactcgaaagggatgatcgtggatgatgaatacgtgataattggatcggctaacattaaccagagatccatggaaggaaccagagacaccgagatcgccatgggagcgtaccagccccagtacacatgggcaaacatgctttctgctcctcgtggacagatctacgggtacaggatgtcactgtgggcagagcacattggagcggtggaggaaagcttcagttgcccagagagcctggagtgcacgaggcaggttcggcacatcggggagcagaactggaggcagttcgcctccagcgaggtgagcgagatgagagggcacctcgtcaagtaccccgtcagcgtcgcccgcgacggcaaggtgaagcccctgccgggatgcgccgcgttcccggacctcggcggcaacatctgcggcaccggcagggtatacaccgcttctcgccggcgatctcaggcagcggcgcacggtctccagccgctcccgggctgccgcgaagatcgaaccctgaagggagaatcttctgaatccaacggtgatgaggggattaccagccgcgtagccaagtcgctgcacagcttgatgccaccgaagcggaagagggctgcagccatggagacggcgggaggggacgccgcgccgccgccgcagcagcagcgtcggaacaaatcctcggcggccaacaaggggaagaagggcggcgcttccggcggcggaggcggcgggaggtggccaccggtcaagccgaagaaggatctccaggtcaatcgcctcaagggcacccacctcctcaccgtgccaaacttcttcacttccgctgaggcgaaggcctttgtcgacattgctgagaatattggcttcacgcaccagggcagcctcggacccctgaagggtgaagcttatagagataatgaccggatatctgtgacagatcctttgcttgctcagaccatttgggaatctgggataaacaaaatatttgaggacatcagcatctctggcaaagtagcaaccagcttgaatccaaatatcaggttctacaggtacactgaaggtcagcgattcggtaggcatattgatgagagtgtcgaccttggagatggttcaagaacattgtatactttgctaatatacctctctggcaaaggaagtgcaaaggaatcatcagggcaagctcttgttggaggggagactgttttttatgatcatcgtggaggagttgtcgctgagtgcaaggactggctctactccatcttcatggtgccaaatgcatgctgcatgaagcacgggttgtga

SEQ ID NO: 49238 - DNA, 241 bp, Oryza sativa
  Clone ID: PAT_MRT4530_5183C.1
cccacgcgtccgcccacgcgtccgcccacgccgtgcggttgacgctgtgaactaagatggaaaccaaaactgatatcacgacttactttacaggatactatactatggcaaattctaacgtaaattgcatcggcaatcgtgaggagagtcatcaggagagccatcccagcgaccgtgttacagacacatccacaattgcatccgcaaatgcttatccagattttcttaaggaaacgctgct

SEQ ID NO: 49239 - DNA, 324 bp, Oryza sativa
  Clone ID: PAT_MRT4530_51840C.1
atggcgctgaactctgccgaagatacgcacaatgtgctccttccagatccaccaagtgatcaagatcatggctttggtgagccattttcgagcacatcaccatctatcctagaagcagtcgcgcgtgcgtcgaggcatcgatgcaagaccaaagtcgtcaagtgctctgtgctagctagcgcctccgccgcctccacgggagttcttactacgggcgaaaatgggacgggcattttccgaccacctgcctggcctgaggctcacaagaacatgggagagaaaatggatattcgatactatccaagttcgaatccaaattcgtaa

SEQ ID NO: 49240 - DNA, 3261 bp, Oryza sativa
  Clone ID: PAT_MRT4530_51841C.1
atggcgcttggattgctggtatggatatacattgtgctgttgattgctctgtccactgtgagtgctgcttctccaccaggtccgagcaagagcaacggcagcgaaaccgaccttgctgcactgctggctttcaaagcgcagctgagtgatcctctcagcatccttggcagcaattggacagtcggcacgccattctgccgatgggtgggtgtttcttgcagccaccaccggcagtgcgtcactgccctagatttgcgggacactcctttgctaggagagctcagccctcaactcggtaacctctctttcctctctatcctcaacctcaccaacaccggcctcacggggtcactcccggatgatataggaaggcttcatcgcctcgagatacttgagcttggctataacactctgtcaggtagaatcccagctaccatagggaacctcacgaggcttcaagttcttgatctccagtttaacagtctatctggtccaatcccagcagatctgcagaacctgcagaaccttagtagtattaatctccgtaggaactacctcattggcttgataccaaacaatctattcaacaatacacatttgctaacttatctcaacattggtaacaacagcctgtccggaccaatacctggttgcattggctccttgccaatactacagactctcgtcctgcaagtcaataatctcacaggcccagttccaccagccatctttaacatgtctacgctgcgtgctttagctcttggcttgaacggcttaactggtcctctccctggcaacgcaagtttcaacctcccagctctgcaatggttctccatcactagaaatgatttcactggtccaattccagtagggcttgcagcatgccagtacctccaagttcttggcctgcctaataatttattccaaggtgctttcccaccatggctgggcaaactgacgaatctcaatatcgtctccttgggagggaataaacttgatgctggtccgatccctgctgcacttggcaacctcaccatgctgagtgtcctagatctcgcatcatgcaacctaacaggacccataccgttggacattcgacacctaggccaactttcagagttgcatctttcaatgaatcaactaacaggacccattcctgcttctattggcaacctttctgcattatcatacctgctattgatgggaaacatgttggatggattagtaccagcaacagttggtaacatgaactcgctaaggggattaaatattgcggaaaaccacctacagggggatcttgaattcctttctactgtttccaactgtagaaagctctctttccttcgagttgactctaattatttcactggaaacctcccagactatgtaggtaacctgtcaagcacactgcagtcatttgttgtagctggaaacaagttaggtggtgaaattccgtctaccatttcgaatttaactggcctcatggtgctagcactttcggataatcaattccacagtacaataccagaatcaatcatggaaatggtgaatctccggtggcttgatctcagtggaaatagcctggctggctctgtcccatcaaatgccggaatgctaaagaatgctgaaaagctattccttcaaagcaacaaattatctggctccataccaaaggacatgggcaacctcaccaagttagagcacctagtactatcaaataaccaattatcatcaactgtaccaccgagcatatttcatctttctagccttatccagttagacctatctcataactttttcagtgatgtgttgccggttgatataggcaatatgaagcaaattaacaacatagatctctctaccaatcgctttactggtagcatcccaaattcgattgggcaacttcaaatgatatcctacttgaacctatctgttaattcattcgatgattcaattccagattcttttggtgagctaactagcttgcagactttggatctattccataataatatttctggtaccatccccaagtatctagccaattttaccatacttattagcttgaacttgtctttcaacaatctccatggtcagataccaaaagggggtgtattctcaaatatcacattgcaatccttggtggggaattcagggttatgtggtgttgcacgtttaggacttccatcatgccaaacaacctcttccaaaagaaatggccgcatgctaaaatatctgctccctgctataaccatagtagttggagcttttgctttcagcctatatgtagtcatccgaatgaaagttaagaagcatcaaaagatttcttctagtatggttgacatgatcagcaacagattactctcctaccaagagctcgtccgtgctactgataatttcagttatgataacatgttgggggctggaagctttggaaaagtttataagggtcagctgagtagcggtttggtggttgccataaaagttatacaccaacatctggaacatgccatgagaagctttgatacggagtgtcatgtgcttcgaatggctagacatcggaacttgataaagatattgaacacttgtagcaacctagacttcagagcacttgttcttgagtacatgcccaatggtagcctagaggcactcctgcactctgaaggaagaatgcaattaggtttccttgagagggtggacattatgctagatgtttcaatggcaatggaatacctgcatcatgagcaccatgaagtggccctacactgtgatttgaagcctagcaacgtgctacttgacgatgatgactgcacatgtgatgacagctccatgatctctgcgagtatgccgggaacagttgggtacatggcaccagaatatggtgctcttggaaaagcgtcacgaaagagcgatgtgttcagctacgggatcatgctactcgaagtgttcactgggaaaagacccacagatgctatgtttgtgggggaactgaacataaggcagtgggtttaccaggcgtttctggtagagcttgtccatgtactggacacccgacttttacaagattgctcttctcccagtagcttgcatggcttccttgtgccagtgtttgacctgggcttgctttgctcagctgactccccggagcaaaggatggcgatgaatgatgtggttgtgacactgaagaagattaggaaggactatgtcaaatcgatatcaacgacaggaagcgtggccttgcctgcatatacgaaagaatga

SEQ ID NO: 49241 - DNA, 261 bp, Oryza sativa
  Clone ID: PAT_MRT4530_51842C.1
ttatttatatcgctcttcctcaccccccccggcgccgacacactgatacacgattgaccatgtccctgatatccacttccataactacagtattggcagcgattgggtcaaggctgatttatggggccatataatcccgctatagttgtttgctccaactaatatcgctatccctagtaacacagttgctatcactaggaatgtgccgaaaggacccccacgttggccacctggtgctttcatagtagcaaaattattcac

SEQ ID NO: 49242 - DNA, 622 bp, Oryza sativa
  Clone ID: PAT_MRT4530_51843C.1
gcacgaggcgcttttccaagagcaccatattctgcaggaataaaattggtcaatgcttattgattgcaccatacgataattatgaaaataccactactttgagcaagagtacagaagctgctagtacctggtgccatgtacccaactgttcccggcatactcgcagagatcatggagctgtcatcacctaacaataaccttgcaatgccaaagtccgatacatgtgcagtcatatcatcgtcaagtagcacgttgctaggcttcaaatcacagtgtagggccacttcatggtgctcatgatgcagagtgcaggagtgcctctaggctaccattgggcatgtactcaagaacaagtgctctgaagtctaggttgctacaagtgttcaatatctttatcaagttccgatgtctagccattcgaagcacatgacactccgtatcaaagcttctcatggcatgttccagatgttggtgtataacttttatggcaaccaccaaaccgctactcagctgacccttataaacttttccaaagcttccagcccccaacatgttatcataactgaaattatcagtagcacggacgagctcttggtaggagagtaatctgttgctgatcatg

SEQ ID NO: 49243 - DNA, 554 bp, Oryza sativa
  Clone ID: PAT_MRT4530_51844C.1
cttgatgcttcttaactttcattcggatgactacatataggctgaaagcaaaagctccaactactatggttatagcagggagcagatattttagcatgcggccatttcttttggaagaggttgtttggcatgatggaagtcctaaacgtgcaacaccacataaccctgaattccccaccaaggattgcaatgtgatatttgagaatacacccccttttggtatctgaccatggagattgttgaaagacaagttcaagctaataagtatggtaaaattggctagatacttggggatggtaccagaaatattattatgggatagatccaaagtctgcaagctagttagctcaccaaaagaatctggaattgaatcatcgaatgaattaacagataggttcaagtaggatatcatttgaagttgcccaatcgaatttgggatgctaccagtaaagcgattggtagagagatctatgttgttaatttgcttcatattgcctatatcaaccggcaacacatcactgaaaaagttatgagataggtctaactggataagg

SEQ ID NO: 49244 - DNA, 2037 bp, Oryza sativa
  Clone ID: PAT_MRT4530_51845C.1
atggcgacgacggcggcggcggcggcggaagaggcggtggtggcgctcgacaaggagactctgatgctgatggggtgcggcgacgccccgccggctgcgccgtgcgcggagtgggagacgttcaaggagaacgtgcggccgctgaagcgcggccgcaacgtgggcctcctcaaccgcgccctcaaggcgcacgccgaccccgcccagcgcgccgccctcctcgccgcccggaggaaaatgatcgaggcaatcgacgaatacagcggcgaggatccgctccaaccatggatagactgcatcaaatgggttcaggagtcgtttccgacaggcggggattgctccgggttggtggtgatctacgagcagtgcgtgcgtgccttctggcacgacgaccgctacaagaacgatctccgctacctcaaagtgtggctggaatatgcggggaattgtgctgattccgaggtgatattcaggttcctggaggccaaccagattggtcagagccataccaattactacttgtcctatgcgtcggtaatggagtccaagaacaagctaaagaaagctaatgagatttttaaccttggtattgccaggaaagcaaagcctgtggagaagttggaaactacatacagggcatttcttcagagatcatccaaaaagaaggcacatcctgaggatgacacaactactgatgatcatccagtacgcaactttgggactgtcttgaaccgtggtgaaatcagaggccagcatgcagaaaactctcacctggtgaaaactctgcaaagagttgatgtcaataggccacttgcagtttacacagatgagaattcgttacctagtcatggccttgctagaaccaggagcaacaacacggcctggcagacccttggatcacaagcagatcggaacaaagaaaataacatgaggcctgctaaatggacatcacacaagattcctcagaaggttggatcgagggcagcagttcagccgactcgtgtaagctccattgaagtcttcgtagatgacgaatgcgccgaggaaccagttccccaagtgccaaagagtacaaaaccatctattctgaagcttaggcaagcaacaagcagaaacctcaagcaggaaactgaactgcttatggagaatcctctgcggaatttccctctaaccagccttagataagacccctcaaagttgattaaatctagcactatggtttcccctgtcatttatgcgcaacgtcgcctgtcatatctgatgaatggcatgggaagacaacaagctctcggtgatgcaatgcaagcttggagacggccaaccacttttaattttctggatgctgctctgccttctttaggcatggaaattgaatctgaagaagcaatcgagggcggctcttctcttcatcgccgagatggccccgacgcggtggcgtggctcgctcacggccgggttccagttcttcctcgccgtcggcgtacgtcgtcatcgcaacggcgggcgtggtcgtggggcccgctggggtgggtgatccccggcgagatattcccggtggacatccggtcggcggggcaggcgatgaacgtgtccatcggcctcggcctcaccttcgtgcagacgcagtcgttcctcgccatgctctgccggttcaggtatggcaccttcgcctactacgccgcttgggtcgccgtcatgaccgccttcatcgccgtcttcctgctcgagtccatgcccaccgtctgggcgcgacactggtactggaagcggttcgcgccgcaggagcaactgaagaggagcgagaggtggaaggatagtatagacttttcgtatgtaagggcgagacgccggggtgcgcggtggggtgttgacggtggcaccagactacgggttccagacccgatgtcgatagcggcggtaggcagcgaggtgcgccgcggggtcagcatcgacggtggcatcaacggacggcgaggtctggggccggcgttgatggcggtggcggcgagctgcggcctgtggggttcaagggtttga

SEQ ID NO: 49245 - DNA, 1920 bp, Oryza sativa
  Clone ID: PAT_MRT4530_51846C.1
atgacgaacagcaacaatggcaatggcggcacgaacgcggcggcgagtggatggctgggcttctcgctgtcgcctcacatggcctcctccaccatggacgaacaccaccacgtgcaccaccaccaacagcaacagcagcagcagcagcagcagcagcatcaccagcagcagcaacatggtttgttcttcccttcggtgaccaccgccgccgccgccgccgcgtatgggctcgccggcgacgtcgtggccgccaccaatgggtactactcccagctcgcctccatgccgctcaagtccgacggctcgctctgcatcatggaggctctccggagaaccgatcaagatcatcacgggcccaagcttgaggacttcctcggcgcggcgcagccggcgatggcgctgagcctggacaacacctccagcttctactacggcggaggcggcgccgccgccgccgggcacggccaacacggctacctccaggcgtgcgacctgtacggcggcccggccgcgccgtcgctcgtgaccgccgccgacgaggaggcggccgcggccgcggccgccatggcgagctgggtggccgcgcgcggcgccgccaccgcgtacgccacgggcgccgccgacgcgaacgccgccgagaacgtcctcccctccgccaccgccgcgcagcacctgcaccacccgctcgccctgtccatgagctccggctccctctccagctgcatcaccgccggcgagtacggcatggcggccgtggcagccgccgacggtggccgcaagcgcggcggcgccggcggcggcgggcagaagcagccggtgcaccaccgcaagtccatcgacacgttcggtcagaggacgtcgcagtacagaggcgtcaccaggcataggtggactgggcgatatgaggcgcacctgtgggacaacagctgcaagaaggaaggccagaccaggaaagggaggcaaggtgggtatgacatggaggagaaagcggcgagagcgtatgacctggcggcgctcaagtattggggcccttccacacacatcaacttcccgctggaggactaccaggaggagctggaggagatgaagaacatgacaaggcaggagtatgtggctcacttaaggaggaaaagtagcggtttctcacggggagcttccatgtaccgtggtgtcacaaggcatcatcagcacggacggtggcaggcacgcatcggccgagtctccggcaacaaggacctctacctcggcactttcagcacgcaggaggaggcggcggaggcgtacgacgtggcggcgatcaagttccgggggctcaacgccgtcaccaacttcgacatcacccgctacgacgtcgacaagatcatggccagcaacaccctcctccccgccgacctcgcccgccgcaacgccgccaccaccacctccaaggacgaccactccgccgccggcgccggcgccattgtctcggtgcactccgccgccgacatcgccgtcgccgacaccctctggaaggccaccactgccccgaggcagcagcagcagcaccacgacgacgtcgtgctgtccggcgccgaccaggccgcattctccgtcctccacgacctcgtcgccgtcgacgccgcggcggcgcaccagcagcagcagcagcagcagcacatgtccatgtcggcggcgtcgtcgctggtgacgagcctgagcaactcgcgcgaggggagccccgaccgcggcggcggcctctccatgctcttcgccaagccgtcgcccgccgtggcggcgtcggcgcagcagcaggcgtcgaccaagctcatggcggcgccgctgccgctcggctcctgggtctcctcgccgccggcgtctgccaggccgcccgccgtctccatcgcccacatgcccctcttcgccgcctggaccgacgcctaa

SEQ ID NO: 49246 - DNA, 3743 bp, Oryza sativa
  Clone ID: PAT_MRT4530_51847C.1
gcactgggagagctccagaattgggctcgagtttttttttttttattaggtaatagcaacattggtttttgtttgtttgatgtctccaaaagagagatcaagtacttaaaatggtagcttcgatgagatcacttctacgttgagttggatattccatagtacatctgattcctaatgcatagggtagccagggcggtcatcaaatccccgcagagaaaacatatagtattatttatcagtacactagcatactgaataagatctgggtgaagatgtaagtgcgccttgggtttctagacatcccatagagcggccctctcaatgcatttgcggagagccaccaagctttaatcagatcagcaggccacgtccgctcaacctcgcttacgccttcccgagcccacatagtcatccataagggactggcgtcgcctcttgaaagaattcgatggagtagtttcaccttctgaaacccttaacgcagatcgctttgtcggtgtcatgttcttagccatccttttgtccttccttgcctgcctttcttgctcatcatattcctgattctctttctcaactagacggataagggtatcacatctcctagccaactcctgggtggttctggacttgacaaaccaatcaaatcggaacaaaggcgacatgcggaaggcagctttcagttcatcccagtttccataaccaagcttatgcaccatgcaaagcataaaacggtcgcattcctcattatagaacttccctttgttctgtccatactggattttcaactctaaccatggattcttatagcggtctaacttcttcccgatggctctcataatttcatccttccgtgatatcctggcctctcccctttcaatattcttgataattctatcataatcactcagttccttgtatctctccttgaaaactttagcatatcgttgaacttcctcctctgtcttcccctccatttcagcggcaatactcctaatatcatttcgaccatacttctcacatgcacgaataaatgtgttgaagtctctcctcgtccatgttgcaaaaccctcttctaacaactgctctttctcttcctgctcctccgcagtcaaaggctccagctgatcttcatcttcaccatcaatagtatctttcttctggtttgcttgcataaggtaccggacttccttttcatacaattcattgagcctttggttgttgaagaactggaaatcatgtaggtgcggcattcttggaattcgtggttccctaggttttgcaggtgcaccttggcgaagtgcttgcttaaagtattcagactcagagtagtttctcttcctttctcttctaggtggctctatccagttatcactgaccagtttcttaaaatcaagcttgttttcctccttcaagaaatcaagaatgtaaatggaattaagtaaacttccaaacttatcatcatcaaaatcatacaattccgcagtgtcatccattttaaatttaatagcatcctctgtgaactttttcatttttgcatcaagctcagctgttgtttcctctcctttagctatgatacggtcaatatcctcatctgtaattgtgctgtccttggaactgaataccatttccgcaccaaatcttaccatttgcaacagatcatccttattgacagtcttctgctctgccagtcggccttgttgaatgaccaaagcatccaatgcaagcttcttgtatgccctctcaatcactttctcctcgatggtatactcagtgcaaaatcggaaaacttgaacttctttcttctgacctatcctatgtgcacggtcttgagcttgcagatcagcttgtggattccaatcactatcataaagaaccacaacatcagcagtagcaaggttgatgccaaggccaccagccctggttgaaagcaaaaaaacaaacttttcactgcctggtttgttgaaagcttcaatggatgcatcacgatcttctccaccagtatttccatctatccggcaatactgatagcctctgtacataagataatcttccaatatatccaaaagcctggtcatctgtgagaaaatgagcaccctagaatcacgatccttcagtttgggcagcaatttatctaacagaaccatttttccagcattctcaactagatgttcaccagttgtgtaaggtggaccaggttctgctccttggaataaatatggatggttgcagcacttgcgcaactgcatggctatgttaagcaatcttttgcgttcaccaccagcattaataacctccaaatctttctgaagcagggcacgatagtactgcttttgcatctgagacattccaaccttaaggatagtttcctttttggggggtaatcccttttcaacatcagatttaagccttcgaagaagaaatgggcgaagaaccttatgaagctgttgaacaacctcctgctgatcattttcaccagaaatttgaaaccattcatcaaatgtttcagcagagctaaatatttcaggcaacaagaagttgaggagagaccaaagctcatggagattattctggagtggtgtgcctgtgataaggagacgataattagtattataaatcctcattgtcttggacagaagagaattctcattttttatgcgatgtgcttcatcaataataatgtaacgccagctgaaacgcttcagtgtagttttttctttgattgccatttcaaaactagtgacacacacatcaaattttcctggctgcaataggttctcccttatatggttcctctcttctggattccctaagaatttcacagcacgtagaatagggcaaaaccgttgaatttcctttatccagttgccaagagtagactttggtgcaacaaccatgtgcggaccagttattcccctgaattcatgcagatagcccagcagcgaaatagtttgaagagttttcccaagacccatttcatcagccaatataccattgataccattctcgtacaaccgtatgagccaattaagcccagctagttggtagtctcgcatcttcccctttatacatgaaggctgtgaaagcaagcgtgttccccctgaaccagcaagggcatcttcctcttctttaaggtattcttcatcttcctcctcttctgtcatctttgaggcatggcgtccccttccacgcggtttcttctcttttgattggttccctttggcaaaatgtgcaaatatttcagtttgctgcagtaggtacttcaatcgtcctttccctttattgttcatgtcagcatcaactgcagcattctgtgtatccaatatttcttgtattttctgcttcttcaatttctgcatttccttgagcctggctttctcacgtttccctactactgcacctccttcagcctcatctgcgtcgtcgtcctcccccacgacggcctcgtcgtcctcagtggactgcgactcctcatcgccctccccgggggcggcggcggccgcaccgctttcctcctcttcctcgtcggcgccggcaccggtggtgacggcttcgatctcctcctcatccacctcctcctcttccccaccagccgcctcgccggccgccgccgcgggcgcctcctcctcctcctcatcctcctcctcgccagatccggacccggcgccgtccgactgctcctcctcctcctcgccggaggacgagacctcctcctcctcctcgtcgtacttcaccggcttcgccat

SEQ ID NO: 49247 - DNA, 200 bp, Oryza sativa
  unsure (1)..(200): unsure at all n locations
  Clone ID: PAT_MRT4530_51848C.1
gtcacngtctctccgcctctcccatcccgagcctgtcgnaaaatncattctccnacgcccagatccaccgaccnccgccttgnctcctccgcgtngccgcgccagagcgccccgcctcggcgncgacctnctcntcctggtngnnnggtgtnatgnntttcatnactatanagnccaataaagngaagagngactctgca

SEQ ID NO: 49248 - DNA, 1029 bp, Oryza sativa
  Clone ID: PAT_MRT4530_51849C.1
acccccccacgcgtccgctcccaactcccaagccgcagcgctagggtttcccccagctagggtttccgcagcccccgctgcaaccccgatccccgcctccgacagcgccgccgatgtcgacccccgccgcgggcgagaagccggcgctgaggaagccggtgttcaccaaggtcgaccagctcaagccggtcaccagcggccacaccctcaccgtcaaggtcgtcagcgccacccccgtcccgggccgcgcgcggccgggcgtcgccgccccgtcccgccccccgcgcatcgcggagtgcctcatcggcgacgagaccggcgccatcgtcttcaccgcccgcaacgagcaagttgacttgttgaagcctggtgctacagtgatcatgcgcaatgccaaaatcgacatgttcaaaggctcaatgaggcttgcggtggacaagtgggggcgtatagaggctacagaacctgccagctttactgttaaggaggacaacaacttgtcactagtagagtatgagttggttaacgtgaccgagtaattgtcgttgattcgccccttcccctgccataacaaggaagcatgatgactgagaatattatgaaccctttgcctaagcatgtttatttggtatggtggtagtagataagatcaaagatcgaactgaatttatccatggtatgcgtctactaagtggtgattcctcttgttacctgttgctgcctgtattgctgctgtgatggaacaagctcagcagggtgacatgttgctagagtaccagttatcaatggagttaattgttgcaaatccaaaattaaaaaaaattgataactggtatgcgtctactaagtggtgattcctcttgttacctgttgctgcctgtattgctgctgtgatggaacaagctcagcccacgcgtccatggaagtttttactgatagcataaaaagggaatgccaaacttggagtgatttttgtttaaaagatcgtagcatgggataaggcgtttcgttaagagttctcaatcagtg

SEQ ID NO: 49249 - DNA, 322 bp, Oryza sativa
  Clone ID: PAT_MRT4530_5184C.1
ttgtcaccgttaattgtcaaatgattggattttataatgaacaaacgcctttattacaatgaagacctacaagctttaattttgtgcctgctgccggagcagcattgcggagctcatccatggacagaaatgcagaggtgcgaattctgaaagaaattaattatctcttcttgggtgcaagcctggatttgatcttctccacctccttggtgccaacctggaaggccttggtgagcacgccgtcgggcacctccggcgacgccgcgaagagcgtcatggcgagggactgcgtgccgggcacctggctgttgaaggcggagat

SEQ ID NO: 49250 - DNA, 159 bp, Oryza sativa
  Clone ID: PAT_MRT4530_51850C.1
atgtcgacggcgacggccgtcgtcttcatggccgatggcaaggatgagggcagcggaggcgaggcgatccctctctctcgatttggtctacacagaagtggagttggacggggagagggcaagcccaagtggctgccaagcgggcccaggtcgtggtaa

SEQ ID NO: 49251 - DNA, 617 bp, Oryza sativa
  unsure (1)..(617): unsure at all n locations
  Clone ID: PAT_MRT4530_51851C.1
ctcagatcttcggntgtactcggcttactgctatagacgaccactatagttgaaatacgaccaactcggatttccaaccaaccaaccaaccaaccaaccaaccaacccaaccaaccaacgcgtgatgtttgccgctgtaatgaagagcgatcaaatgaacgtatcggacccctgggccgattttcctggcgagtggattcccgccatgcgcgacgtgtggcgggcttggcaccacaagctcgtcatcgacaccgatggaaaactcgacctggctcgctggatcaaagatccggtggatgagttcgaagaccgcgaaagcgatttttctcgcattcgatgggtcatccgcgtccaccccttttctccggcgaccgatactttcacggtcacgaccagtaggggcacggccactgtcaaacagtggatgagtcaggttgccaacaacaatgccctccgtggcattgttgtccgtggcatccgccttcaggtggatgttttgacttggcgacccaacaagagcatcaacatgcctgccccacaacctcctccccgcagtgccccaggtgcaccgggtgaccacggcgaattgttcgcactccagcgcccaatcgccaaaa

SEQ ID NO: 49252 - DNA, 2687 bp, Oryza sativa
  Clone ID: PAT_MRT4530_51852C.1
ttttttttttttttttcagagacgttaagctcatctggggctggaattttttttctctttacaaaatagtcctagtaaaaaaaatgtggaaggaaattgacaaaaaaaacctcgtgaggtcctgtaattacagggggctacgcccctacgatccaccggtacagcaccatgaacgccgtctcctcctcctccgcccccggcggcgacatcctcaccgcctccgcgtcccacagccatggctcctcctggctgtggctatggtggctctggtagctctggctccaccgggagctccaccgcccggagaaggacgatagggatgacgcggaggtggccagccgttccacgtactcgcgcagccagccgcgcgtcgcgcccgccgcctcggccaccgcctcgccgggaggcggtggagactgctcggctgctggcttgtcttccttgactgcggcggcgctcctggttgtcatgggcgcggcgcgggagacgacggcctcgacctcctcgtcgatgtggtagtcgaacgtgccgagcgagtaggtggggcgggcgttgccgccggtggccgtcgacgcgctgcggttgctgacgctgcccatctcgacgcggaagctcctggaacggtccctgctcctcggctccggcggcggcggctgctcggcggcgaggatggcggagatcgaggggtgcgggagcgtgacggtggcgcggcagagcgggcaggacggggtggtgcggagccacgcgtcgacgcaggcggcgtggaacgcgtggcggcacgccgggagcagccgcagctcggcgtccagcgtgaacggcgacaggcagacggcgcagtccggtgagctcttggggagcgccgccagcgacgacgccatcgtgaacagcggcagcgactcgatcagccgctgcttctcgtcgcccaccacctccttcttcccctcacaaaccccattacgccgcaccggagaagcgtccgccgcctcgacgttgtgcacctcacggcgcgtccgtgggagcggcggcggcggcggcggcggcggcgacgacccctgtaccgcagtgttcatgctgtattatttttggaccgggtcataaagggcggagccttttgttgggccaagaagcccatcagccggtttctccgccgcggccttcctctgcctcctgcgaacagcccacgcgacggcgaaggcaaccaacaccgcaaggaagcaaccggcggccacaccgccgacggcggcgcagacgacgctcttcttcctggactccgatctgcttccgtccaccgtgctgaatacctgcttcagcgggatcggcgggtttggcccggcaaggctgtgggttccgtacttgtggagcttgaacacctcgaggccgttgagtatggcgtcgaagtactccggcctggagctgaggtccgggtgcagcgccaccagcagatccatctggccggagcccgccgtgacgacgaggtaatccgtgtacaccgccctcccgatccctccgctccacactatcacgtccatctgagactgcgccgtctggttgttgatgtagatgaagaatgatctctggttcaccttcgttatcgggtactggatctcgcagaagtggaacctgaggaggtagtagaagccggcgtcgacggggaggatccaggtgaggttgtagttgaggttgatctgcgcgttcgggcccatcgacctcgccgtcgcgtacacgtcctccggtgcggcgtacttcggcaccgacggcgggttgtaccggacgctgacgttgctgtccttcgcgaaggtcacaccgaaggccgcgccgaagatgtagggcgcgtcgttgtcccacgtgcggtagaaaccgccggcgtcgtcccgtggggtgatggcctcgccgccgacgttgaggcggtacatcgtctggaacgccgtgtcggcgcggaggggcatcgggttcgggcgcccgccgttggcgaaggcgggcaccggcgtcgtgaacatgtccggcgtgggcacgacctcgatgccgttgacgaacgcgtagtggtgggacccgtggccgggggcgccacgcggcgagggggcgaaggtgacgttgaggctcgtggcgccggagctgacgttcagcgagaactcgcggacgatgtacgcgtagccgaccgcgagcgcggtctgcgacgcgttgaagtcgcggaggagcgtgatgccgcccgcggtgacgccgaacagcgcgtccgcggcggcggcggcggcgccgaggttgccgtaggcggacgggtagaagtagagacggaggaacacgcggccgggcttgacggggaaggagtaggtgtagctggagctgaacacgcgcgccgtcatgtacggcacgggggaaggcagcgaggggtcctggtacgacgcgtcggccgcgacgccggtcaccgacggcgcgaacgtggacacggcgtcaccgtcccacgcccggccgtccccgtcggtggcggaggcagacgcgccgcagctcaggcgaatttgtccggggacggtggtctctgcttcgccgctgccgctatccgccgcggcaagcgacacgatggccagcagtaagaagagccatcggaacagagtcgatcctgccatgggcgggacgagtagatgctgttcttgctggacttgcgccaattgggtaggccggcgtaaagctcaaat

SEQ ID NO: 49253 - DNA, 1866 bp, Oryza sativa
  Clone ID: PAT_MRT4530_51853C.1
ccccactcccggctgcagtgttttgcggcgatggccgacgctccgccgccggtgctgacgctgcaggtgaagaagggccgccgcggcggggagacccggcagtggcgggcgggcgccgtgctccgcgtcggccgcgtcgccaccggcaacgacatcgccgtgcgcgacgccggggcgtcgcagcgccacctctccatcgagttcctcccgccgccggcctcgcggtgggccgtctccgacgtgggatcctccaacggcaccctcctcaacggctcccccctcgtgcccaccgtcccctccccgctctccgacggcgatgtcatcaagatcggggagtccagcatgctcgtggtctccatcgcgcccgattcggatcccaaccctggccctaggcgctcctcgcgccaatccgccgcagtggtgggggagcaggagaaaccccctgcggtcacccgccgtggcggacggaagaacgctgcagcggcggcggtggcggttgagccgcccattgcggagaaggaagagccagagccggaggaggctccagtggtgactcgccgcggtgctcggaagaaggccgcgcaaccccccaaagcggaggagcacgaggagggcgaggaggaggtggtcgcggcggtggtgacgcgccgctgtgggcggaagaaggccgcagagccccctaaaccggatgaggaggaggagcaagagaaggggaaggatgaggaacaagaggagaaggaggaggaggaggtcccggtggtgacgcgccgcggcaggtcgaggaaggcggcgccggaggcagccgttgcgccaccgccgccgagggcaaggtcgacgagagctgctgctaggagaggcaaggcagtggacacaagcctggatgagagggagagcgagatggccggaaagggacggggaagggctacaaggtctaatgcaaggaagtgtaggatggccgttcctgaggacgatgacgatgatggggaacagcaagagggggctactgctgtggcagaagagcagataaaggatcaaccgagggcaatggcggtgactgacggtgaggaggaagatgataaggtggaagccatggatggagaagttgaacagaatgacaaggcatcagaggaggaggaggtgccagtggcgcggagaggacgggcacgaagagctccaaaggggaaggctactgcaagtagtaatgctcatgctgcttcggacaacgcggttgaggaggaagacggcggtagaggagagggagcggctgtggaagtggagggggagagttctgggagcagcagcttggaaaccatgacactgagggagtggtttcagaggatgaatgtgtacctccctaggatgatcaatgaggctgctgaagaggcgctttcagccctgcgggagaggcatcggcgtatagatgagtacatttcaacgcttgaggattagcgtgattcatggataattaggagctatttggtcaatctgacgtaggggtgatgcctggagataacattaattggaggcaatgctttgctgaagcgccaccaagatttgctgaagcgccacaagagccattaggtgatatttcactgggatcatctcattatcgattccagttccaccaatgccgcaaaaatcattgatgcaatacctgtagcactcttcatgtttactctagttatgtagtaccagtactctagtactcatgaagtaggacctgggttcgtaggcctctatgcaaggcattcaacatgcatcgcagatttcattctgtaaattgcctctctaaggtgatgtttattcatgcctaacctctatctggaatacacgcgacatgttttgaatgtaaaaaaaaaaaaaaaa

SEQ ID NO: 49254 - DNA, 411 bp, Oryza sativa
  Clone ID: PAT_MRT4530_51854C.1
atgtggtcgatcgcccataaccgcgggcacggctattcgaatagttttactctggccagaggtatacgactgtacccagaagacacaatccaccggcatgtcaccgtgtcatcatgcacccatgatgaaaacgtcaccatgtcgagtggttgtgacaagacccttcatataactccctctgaccaatcgcaccacacctcaggtttcacccccacttctcgcaaggcagccgacagttccctctcgtgccacggtgaatccggaagccgatcaaccgaacaccccggccaacccaactccatcacgcccacccttgcctgggaacgtcagttagatgaaagctatacttcaagtcaggcagttacacattcccgcctgtggcaagcgttgtatgtcttccagtgcatcccg

SEQ ID NO: 49255 - DNA, 183 bp, Oryza sativa
  Clone ID: PAT_MRT4530_51855C.1
atgtgcggatgtggagtcagcgggacgacggcttatgctggcgtgaagcaggaatggggcttgatgttcgcggcggtgacttccttgctgccggccgaggtgaccaagggctcgtctttgccatttgttatggtcgaggcgttgtcatgtctcttccaaggagttctggtgctggccgtgtga

SEQ ID NO: 49256 - DNA, 346 bp, Oryza sativa
  Clone ID: PAT_MRT4530_51856C.1
cctctccaggattcccttaccgatggctttgcagcacgccgaggaatctactggtccgaggggtcaattcctgatgccggccagctaaatggcgggtttgacccgcttcacgccaagtgctgctgctgctcgaattcttgcgaggaggccctcgtactcggctgtgttgttcgtgcccctgaagtcgaggtgtattgtgtgcttgaacttatcccctgtaggagatgtgagaatgaagcctgctcctacaccttggctattgagtgcgccatcgaacgccatgagttcttcgacccacttcgcaattctaccgatgatatctttattcctgacgacttctcccagg

SEQ ID NO: 49257 - DNA, 1473 bp, Oryza sativa
  Clone ID: PAT_MRT4530_51857C.1
atggaggcggcggcggcggcagccaagaagcggaggtttggtcggtccacgggcaagggatcgctgggtagtgacggcctcgaccacatcagctgcctccccgaagccatcctcggtgagatcatctccctcctccccaccaaggacgccgcccgcacgcaggccgtctcccgccggtggcgcccgctctggcgctccacgcccctcaacctcgacgtcgactcgctttccacccaggagcgcaagcgcaccatgttcgtctccaggatcctcgcctcccaccctggccccgctcgccgcttgtccctccccttcttccgcctccgcgaccggtacgccaagctggacggatggctccgctcccccgccctcgccgacctccaggagctcgacttcagctacgacatcgaggacgaggaggcgctctacccgctgccgccgtccgcgctgcggttcgctcccaccctccgcgtcgtcgaactccgcacatgccatttccccaacggaatggcaccggcgctgcatttcccacgcctggcgcggctcacgctgtaccgcgtcaccatctcggaggacaccctccatggcttgctctcacgctgctctgcattggagagccttttgctggtggggaatttcggcattcgtcgccttcgcatcaactccccatttctcaggagcttaggcttctctgcttcttcttgggaaggatatcgtgatgccaacttccaggaggtggtcatcgaggacgctccatgcctcgagaggctgatgccactttatcccaatcatggtccggcgaccattcgggtgatcgcggcgcctaaactggaggtactaggtgtgctctctgatggcatatctcaactccaccttggaacaacattttttcagaaaatgattgctgtcaacctgacaacctcgattcgaacggtgaaggttttggttcttgattcaaatggccctaatctggatgtagttgttgacttcctcaaatgcttcccctgcttggagaggctgtatgttgtaattgattataattttgtcaagtattacattgccaagtgccaaccgtctcgcccacataaggttatcaagaatataaggagctatgacccactacatccaatagaatgcatggagctccatctcagaaaagtggtaataagatattatgaaggcaagaggccagatgttgactttgccaagttctttgttctgaatgcaaaagtgctaagagaaatggatttctgtagccctagcaatcgcaatctgaaatggcaggataaccaacacaggcgcctttcattggaaaataaggcttctcaagttgctcaatttacatttaaaactacctctaggactaggaatgagttgactaggaacaggcatacacatgaattgtcaatgtctgatccttttgatttctcttcatgtctatgctcttcatgtcgattcttcttccagttatga

SEQ ID NO: 49258 - DNA, 450 bp, Oryza sativa
  Clone ID: PAT_MRT4530_51858C.1
aatataaggttccgtgatagcggacaatgaggtaataaaaaacctgagaataaaagtgttttatggatacaaattgggtgaaattgaagcagagatcgggaagaagaagttagggaattgggattggagaaatggaatttgggaaggagattcccgatctccgcttccatttcacctttgtatccccaaaacacctctatctcaagctagttattttacctagcttttcattgaaaattttaacagtcggtatagtgctccatcaattctctcaagcaattaaggtcgacttatttacatattttgaccgaccgaacatatatagtcgcatatacattcaaccgatggatggatcgatcggaaacatcttgaactatgttctgcttcgatcgtcgtcttgtcttgagcaataatcaagctgccacatctcaataatctgtagcgagcgac

SEQ ID NO: 49259 - DNA, 256 bp, Oryza sativa
  Clone ID: PAT_MRT4530_51859C.1
gttataaagtttttattatgatttgttgtggggggttttttacatttgggttttgcgtacaaatttaccatgctcaatatttggaaatggcacacttgtgttccaaaagtatttacaactggtaaaacactgaaattttttaaacacagttgttcttttctctaaaatacaatttcgaaaacataaatgttttgcctaagggggggggttattcttctgtgcgcaggtggaattcacgaggggccatgggctaaat

SEQ ID NO: 49260 - DNA, 465 bp, Oryza sativa
  Clone ID: PAT_MRT4530_5185C.1
cagaatcgttagtatgtgatcgtcggggcagggaacggggggggttacttccacaggacgtccgtctagcatggcatggctgacggccgcctttgcatcgtctccaaggagccagctccaccatacgagcggtcagccttgaccaaaggctatctttttcctccggacaagaaaccggctcgcctacctgggttccatacatgcgctggatctggtggacagcgacagactgctgaatggtacaaggagaatggcatagaggtgcctgatgaggatccagctgtagcatttgatggcaaaacgcaaaccttaaagacttcatcggggaaagttctgaaatacggctcacttattatttctactggatgcgaagcatcgagaatacctgagaaaattggaggggaattacctggagttcactacctaccggatgctgctgatgcctgagctctagcatcctcattg

SEQ ID NO: 49261 - DNA, 284 bp, Oryza sativa
  Clone ID: PAT_MRT4530_51860C.1
cggacgcgtgggtatacatgtgcgtgaaaatctctgaagcttaattcatttaccttttacctgcagtacgtgcgtacgtacaaaagacgtgactaggatcgcatgcacgtgcgtggtgtgtaatggtgctatatataaaggcctggtccttaattaatttggtaacgtttttactgaataaaaaaaaaaaaaaaaaaaaaaaaaaaaaaaaaaggaaaaaataaaaaaaaaaaaagaaaaaatttgtaaaaaaaaaaaaaaaataataggggggggcgttttaa

SEQ ID NO: 49262 - DNA, 486 bp, Oryza sativa
  Clone ID: PAT_MRT4530_51861C.1
ccaaccagagagagattttttttttttttgatttttactaaccggtaaccgattgatataacccaggagcaaaccctcgggggccccaactcaaaacccctgggttctaataagggaaaaacagcggagggggaagaaaaccgcggagaaaaggcccaaaaacaccctggaatcccccacggaaacccaaacggaacaaaccctgagggaaatcgcccgaaacccccaagaggccggaccccgggggaaaaaaccccccaaatgaaaaccccaaaccgcgggggggaaaaacaaaaaggtacaattaccccaggcaaccccaattccggggaaaaaccgggccggagggggggccactcccgggattcagacccccccccctggccgaagaaaaaaaaaaggccccggggcggaccaatagaccacgcgccccgccccccctaggaggtggggggtgccccccccttaaccgggcacgggaagggg

SEQ ID NO: 49263 - DNA, 293 bp, Oryza sativa
  Clone ID: PAT_MRT4530_51862C.1
caaccagattgcgtaggcattttaccgcaaatactcattcatctgggttgaccacatttgtcaccactcatgctcattgtggcaaacgcagctgaacaactagaggtctaagcacaccattattactttgcaccagcatacgcgcctagatatgaacacatgcttccaagggaagtgcctaatggacctggctgcgtggtcacataacacccaacctacagcctctacagataacaatgccctggaatgaaaccaaagcaccgtgtccactccataagtaccatattactcat

SEQ ID NO: 49264 - DNA, 327 bp, Oryza sativa
  Clone ID: PAT_MRT4530_51863C.1
atgtggttgacgtccttgtccgcaagtccacttgctgctgtgatcctcacgactgcgcaagcagggagctcaccccagcccgaatccataggacccttggagaagcgcttcatcaatggagacggacgcatcagagctgaagacttctccgaaggtggagcagtgaactcacagagcgcccgcctagcgcttgcacacgaacgccatgtgggcgatgtcgttggtggagattccacgggctgctgctatcgtcgccatggcccgatcagggagctcactctagctggagtccttggggcgctcgcgcttggaggagagttccattga

SEQ ID NO: 49265 - DNA, 3017 bp, Oryza sativa
  Clone ID: PAT_MRT4530_51864C.1
atcggattagtagacgtagttcttgacgaacatgccctccttggcctcggcggcctcgccgtcgctggtgtacttgccgagctgcgccagcgagttggccttggcgcggaggagcagcgcgtcctgcgccgctttcacgttctccggctgcccgccccacgtcttgaggcacgtgttctgcagcgccctcgcgtacgagaacgacacgtgccacgggttgggcccctggttcatcgcgttcaggttctgcgtcgcctccacctccgactgcccacccgacaagaacatgatgccggggacggcaggggggatccttctgtggaggagcttgagggtgtagtcagatacttgctcaggggtggccctgtccttgcactcgcccacgcgtccgcccacgcgtccgcccacgcgtccgcccacgcgtccgtagttctagatggcgagcggccgcccgcgatctagaactaggaaaaggcctgtgtcaaggagagggtagtagcaccttgctctcctttgccttcagagaaaccggaagcaatggcgtctgctactctcctcaagtcatctttccttcccaagaagtctgaatggggtgccacccgccaggctgccgcccccaagccggtgactgtctccatggttgtccgcgctggtgcctacgacgatgagcttgtcaagaccgcgaaaaccattgcatcaccaggaaggggtatccttgccatggatgagtcgaacgcgacctgcggtaagaggcttgcgtcaattggccttgagaacaccgaggccaaccgccaggcttaccggaccctccttgtcaccgcaccgggcttgggacagtacatctccggtgctatcctcttcgaggagactctgtaccagtcaactgtagatggcaagaagattgtcgacatcctcactgagcagaaaatcgttccaggtatcaaggtcgacaagggtcttgtgccccttgctggctccaacaacgagtcatggtgccaaggtctcgacggccttgcctcgcgcgaggcggcatactaccagcagggcgctcgcttcgccaagtggcgcactgttgtcagcatccccaacggcccatctgaactcgccgtgaaggaggctgcctggggccttgcccgctacgccgccatttctcaggacaacgggctggtgccgattgtcgagcctgagatcctcctcgacggtgagcatggcatcgacaggaccttcgaggtggcgcagaaggtgtgggcggagaccttcttctacatggccgagaacaatgtgatgttcgagggcatcctcctcaagccaagcatggtgacacccggtgccgagtgcaaggacagggccacccctgagcaagtatctgactacaccctcaagctcctccacagaaggatcccccctgccgtccccggcatcatgttcttgtcgggtggccactccggagttggaggcgacgcagaacctgaacgcgatgaaccaggggcccaacccgtggcacgtgtcgttctcgtacgcgagggcgctgcagaacacgtgcctcaagacgtggggcgggccacgccggagaacgtgaaggcggcgccaggacgcgctgctcctccgcagccaaggcccaactcgctggcgcagctcggcaagtacaccagcgacggcgaggccgcccgaggccaaggagggcatgttcgtcaagaactacgtctactaatccgatccaatccaatcaagacagtgaacctgctgctgctgctgctgctacgtactacagctactgctatactgctagtacctcgagggcacctgtagccagtgtgtcgtcacagttacaggttgagatcgatggacaaagttaaaactatactgcattaattaattttaccttgagaacatacgtggttcatcatgtatttcatcacatgaatcttttctagagcgtttgatatacatacctcgtgttttgcctctgcaaaactttgcagtaaccaaatcgattcacaggccacacatacaggtagtatacagattcgtctacacacaaggttattgcagaggcaaaacacgaggtatgtatatcaaacgctctaaaaaagattcatgtgatgaaatacatgatgaaccacgtatgttctcaaggtaaaattaattaatgcagtatagttttaactttgtccatcgatctcaacctgtaactgggacgacacactggctacagtgccctcgaggtactagcagtatagcagtagctgtagtacgtagcagccagcagcagcaggttcactgtcttgattggattggatcggattagtagacgtagtttttgacgaacatgccctccttggcctcggcggcctcgccgtcgctggtgtacttgccgagctgcgccagcgagttggccttggcgcggaggagcagcgcgtcctgcgccgccttcacgttctccggctgcccgccccacgtcttgaggcacgtgttctgcagcgccctcgcgtacgagaacgacacgtgccacgggttgggcccctggttcatcgcgttcaggttctgcgtcgcctccacctccgactgcccacccgacaagaacatgatgccggggacggcaggggggatccttctgtggaggagcttgagggtgtagtcagatacttgctcaggggtggccctgtccttgcactcggcaccgggtgtcaccatgcttggcttgaggaggatgccctcgaacatcacattgttctcggccatgtagaagaaggtctccgcccacaccttctgcgccacctcgaaggtcctgtcgatgccatgctcaccgtcgaggaggatctcaggctcgacaatcggcaccagcccgttgtcctgagaaatggcggcgtagcgggcaaggccccaggcagcctccttcacggcgagttcagatgggccgttggggatgctgacaacagtgcgccctgctggtagtatgccccctcgcgcgaggcaaggccgtcgagaccttggcaccatgactcgttgttggagcc

SEQ ID NO: 49266 - DNA, 171 bp, Oryza sativa
  unsure (1)..(171): unsure at all n locations
  Clone ID: PAT_MRT4530_51865C.1
tagcagagatgcggctgggaaggtatcgtgtgctcctttngacacacaaaacgcgaccgtgagaccaagcgaagcagttgcaaccactgtctcggcnnacagttgncgnngatgactaggtggngagngnaagatttcacttcccatctatactatactcgnctcagtggn

SEQ ID NO: 49267 - DNA, 1637 bp, Oryza sativa
  unsure (1)..(1637): unsure at all n locations
  Clone ID: PAT_MRT4530_51866C.1
ccacgcgtccgagcagctcaagcccaccggaggagagagagaaaagaggaaatcatggaggcgatttgctgtggagattcgggtgtgtgatctggtcggatcttgctttcctgggaggaggaagaagaagaggtggaggtggccgcggtgtgatgcggtgggtagtttgcttatatcctcgagatgccgcattagccaagccagccacacccatcatcatcagcttcctctccctagctccattgccgcggcagcaagaaagaaatcaccaggagaagacttcttggtggtttgatatgctttgattgagcccctggagaagagaggaacagaggcttttttctctgcgggttcttcaattattcagggtttcttctggttcttgtctcgccatgacggtggttgatgcggagtcgcggttccatgtcctcgcggtggatgatagcctgatcgacaggaagctcatcgagatgctgctcaagaactcgtcctaccaagtgaccactgtggattctgggagcaaggccttggagctgcttggattgagggatgagggtgatgactcctcctcttcaccttcttcctcctcacctgaccatcaggagattgatgtcaacctgataatcactgactactgcatgcctggcatgacagggtatgatctgctcaagagggtgaagggatcatcttcattgaaggacataccagttgtgatcatgtcttctgagaatgtgcctgcaaggatcaacaggtgcttggaagatggtgcagaggagttcttcctgaaacctgtcaagctcgctgacatgaagaagctcaagtctcacctgctcaaaaggaaacagcagctgcccatggctgctgctgcaccagataagccgccacacaaaccagatgaagctgcagcctcagcagctgcaattgctgaagctgcaacagctcaaaccgatggaatcatcagtgattgcagctgcagcggcagcagcaagaggaaggcggctgcaatggagcaggaggtcatctcctcacctgatcagaggacgaagccaagattgtcctccactagcagcggccttgcagtggagacctgatgaaactgaattaattagaatccccccaactaagaaatgattttggcctctttttctgttttgattttttttatggagctgctcatggaagtatggaaccattagctcctgggggttttaattaatttacttaattagtagtttgaggtgaaaggaaagtccacgtacttttacactagctcttgcttcgatccacaaattttgttgtgccaaaggaacaccatggcaccaagtggtgttcgttagaaaaggagttgtgggaatgaaatggaaggggaagttgtagataaaggcagcaccttggatgcttttaggctaattttaaggcttattattcaagcaaaaaagtgttttgtttgaacttggagaggaaaaagctaagtgctactgctactatgaattgtctagcagattgatggaccaaccaactggtcttttgcaaaaaaaaaaaaaaaancgggggggccctttttagaggaccaaagtttacttccccgtgcttgcaagttaaaattttttttatggggcacctaaaataaaatcaat

SEQ ID NO: 49268 - DNA, 283 bp, Oryza sativa
  unsure (1)..(283): unsure at all n locations
  Clone ID: PAT_MRT4530_51867C.1
ggcattgattcaggcctaccaaaattgggcaaacctaagaacatgatcaacggcacacttattatcacattccaaccaaacacataaatancancatctctcttcctgatgaaaaatggcactacttttctaagtataaactccaacaacaaagccaacgggttccagacataagtgcctctaaccccacatagtgatgggccacatgctgatagctatgtagtcatccatatgactcttaaagaagctccagaaccagcggaacactacttcatgatcccca

SEQ ID NO: 49269 - DNA, 597 bp, Oryza sativa
  Clone ID: PAT_MRT4530_51868C.1
atgttcgtgctggtgcaggcactggtctaccacatcctccgtagctcgtcgagcgtcttctccaaggacagcaagctcggcggggcggcgacgcggcggcggagacacgggagaaggggagggcggcggcagggcgaggtggcgtccacaggcgagcgcggtggcggaggccggagaggcggcgacggtggcaggcgagcacggctgcggatggggagcagcggcgccgacgacttcgcgccgctcagcctcatcgtcgtcggcggctccaggcgcgggcggaggactcctctgataggcgatggcgaccgcgatcaccgcgccgccggcttctcgtcgctcgtccgctgggccgcggcgccgcactcgcgccggccgcacgcatcggccggacggaccgaggtggcgagcatcgacgacgacgaggcgtgcgagctggtgagcggcgcggaccttgtcatcggtggcgacgtcgacaacgagggcgaaggcgtccgcgcgtacctcctccgtctcccccgccggctgcagccgcgcgccgccatcgccgaccgcacgagggggatgaggacagttacaaatgcctcagatttgtga

SEQ ID NO: 49270 - DNA, 882 bp, Oryza sativa
  Clone ID: PAT_MRT4530_51869C.1
gcacgagggagagaggagtccagcgagagtccatccatccacccctcgtgacgtgagggggccgcaccgccgctcgccgctcgccgctaccccatccgccgccgccggccgccgacgaggttcgggggggcgcgatggcgtcgggggtgtcgacgagcatggtgctgacgctgctcggcttctgcggcagcgtcctcttcatcgtcttcgtctgcacccgcctcgcctgctccctcctccgccgccagtcgccgccgccgccgcgcccgcctccccgccgcctcctcccacttcctctcctccgtctacgtcgtcgaccaccaccgccacctccccccctccggcctcgaccccgccaccgtcgccgccttccccacccgcgccttcctcggtgctgccccacgcggacacgcctcggcctcctcctcctcctcctcctccgacgccgccgcccattcgaatgtgaacttggatgatattctattgagcacgtttcagttggtgattgttagcattttcccaattacaccaatattatattctgaatcatttccttccattgttggcagaatttcattgtgtgactaccctgatagcaagcagacaatgtctcctctaccaagtgaagtgataatacctccatgttcccctgaaccatcaaggtcagatcaatgcaattgcctgtttgtcggcacggggcattcaccaaggacatctcaggttcttataaatgaacctgaccagtcgaatcggacattatatagtccatcagtggaaggggataacaacttgccatcatctgaagttaatcctcctggtgaaattaacaaccaaacaatgaaaaagcatgtggagaatcatcgtattcaagacagatcatga

SEQ ID NO: 49271 - DNA, 689 bp, Oryza sativa
  Clone ID: PAT_MRT4530_5186C.1
ttctcctgggtttttttttttttttatcaaatgtttaagttattattacatgtagtcggaatacacatgaagggcgtttgtgctggcaaagcagtgcccctgagcatgacattctggcacaggcatatgcatacactcagaatctctagactgcactaatgatgcgggcgggggaatttagggcgagggtactacacaaattggcacgcacacaaaatagtgctccagacttaccttaacatgggggtgtattattaggcaattattacttattattgtcacacactctcctactagtgcaacggcacacagtgcttattagcacggtttccttgcgttggcctccaggatggtggtaatctgacccttcctcacagtgatgcctgcgttcttctcacccttggcatgacgattccgaagctcagtcccaattgaaataggattgagccctgctttctctgctaatgtgtaaggaatgaccctcaagtgcctcagcaaactccttgatgcagtaactctccatcccttggagctcctttgcccaagcaggcagctgcattgacatctctttttctggtgcaccaccaccagcaatcaaaaacctcttgttcaccaagcacctgttgacacaaagggcatattgaagactgcgctcagcttcttcaattactaaactggttggacccccg

SEQ ID NO: 49272 - DNA, 201 bp, Oryza sativa
  Clone ID: PAT_MRT4530_51870C.1
tggtgccgaaattgttagatgcaaaagccacccgtgtgttaactatgacggatgcaaagtagcacgaacattttaggtgggaggaaactagattttctgagggataggaattgttgtcagggcattgatgtggttacagtacatacatcacatagttttattccctggcctcattagatttaaaaaaaaaaaaaaaaaaaa

SEQ ID NO: 49273 - DNA, 467 bp, Oryza sativa
  Clone ID: PAT_MRT4530_51871C.1
gcaatggctcttactgttcttttaaatctttcacgtgccatcatgtgtactctacagcgtttgttctagaaatatttatccagttccagaattttttatttctactttgataaggagggaaggtgtgcttagttgaatgcaataccaatatgaagttaaaagaaatttggactctaaattacccctttttatcaaataattaaagagtgccctaagtgcaactcctattggagttgtgagtatttgtatacatgaccctgccaagttgccatcattgtccaggaaacttatatcaatatgtcaccccagccactcatctgctatcagaatagggttaactgaaatgtatagatttcttaggaaattagaactatgacaaccaaattaaatttttttcctgccatcgcagggtattattttcttcatgttttttggccttctttatacagatttggaagaccttcatt

SEQ ID NO: 49274 - DNA, 400 bp, Oryza sativa
  unsure (1)..(400): unsure at all n locations
  Clone ID: PAT_MRT4530_51872C.1
tccgggtcgccccgcgtccggttttcnntcttgttcgtgctgtgcctttctcggctcatcgttctgcctcgttcctggtgagctctggtgctacagccacagccgggcatctggggctgcgtgatgctttgctgctggtnttgctttcgtgacggtttccctgtctatgctgacgacattttccttactggcggagcttgccctggtgttcacatgatgatgctttttctgatntggaacgagattgatggcgttctttgcccagttcctcngtttcctttgtgctctgcctcctttgttctttctggtggggcttttgtcccgtgttatcttaatgtttcatctggctggggtttggtgatttctgtccttttgaagcatctcgtngattcttcggttg

SEQ ID NO: 49275 - DNA, 1150 bp, Oryza sativa
  Clone ID: PAT_MRT4530_51873C.1
ttacatctcgttgatggcgtcatggcgatgatgatgcccattggccagcggtgcgcctaggtggggctcggccacgaggcggaacacattgtccccgaccgactccttccaccgaacctcaccaaggccgacggcatagctggacccatcgataactacctccacaacgtggtagtggagatacaatgcctgcatgggagatgcctttgccttcgacggcgccgtggcgatgccacggggcgcggcaaacatggccgccacggggaagagcggcggctgggccagcgccatgctgtccgggatgcgcctcatgaccaggagcatgttgccattgtggagcaaggcaagcctgcggttgcagtgggggatgcgtgtgccgccggagctgaaggctgtcctcatggacgacgattaccatcaggccgcctcgtcgccggggacctcccctcccactcatcggacggaggaggcggtggtgggggtgaggaggaggaggaggaggaggaggaggaggaggagccccggattggctgcagaggcggagcagcgggcgctggcgagcgggagggacgcggccgtgctggagttctactccccgcggctccgccagtgcgcgtcgctgcaggggctcgtacgcgagctcgaggacggcgccggcgggtggaccggctttgcgatcgccgacgccgaggacgaccggtggctccccgagtgttggggcaggggcatcgcagctcattgggttagtgcagcaggaagtgtaaagccagagccgctggagatgggaggaggaaggcagggtgggggcgaggcgcaacagagaccctcattggcggagagaatgggaggaactcagatcaaagtggtcatggaaggaaagggctgtaatggctgggtgctcatcgactcaatggtgaacacatggtggaggacgtgcgtctccaacaacccaagcctccagttcctcgacattgtcgaccgtgccaagacaaccattgatgcaagcaaacaacggggagaaaccacacggattgaccaaatgcacggcagcatacgactgaaaacaacttctgttttcctcgagagctaccgctggcacttcaatcagaaggtgcagacagtttgcgcctggtggatcatgcatacttaa

SEQ ID NO: 49276 - DNA, 403 bp, Oryza sativa
  Clone ID: PAT_MRT4530_51874C.1
aattttactttttttcaaatttttgataagaaagacacattaaaaaaggggagacagggtgaaaactaaaactgaaaatatatatttcaaaattgtgaggcaactgaaacatctgttataaactaaacaaaaataaatatttgacaaatcaactaccaaataatattttctggtgcagaacctcatcaaaaccataaagtgaaaaaaaaaacatgcctaagctgtatttcaacagtcttttccaatctaacagatgctgttgcctgaacacatttagcccattattaataagagcatctgcacatggttgcacttgaacatgcatagttacaaatgaaatttctgaatcagatatataacatgaaaaaagtaactaaagcagactggaacatttgggatttta

SEQ ID NO: 49277 - DNA, 562 bp, Oryza sativa
  unsure (1)..(562): unsure at all n locations
  Clone ID: PAT_MRT4530_51875C.1
attcggcccgagccgcggggaagaaccaagcggagaacgtctccccgccggcaangccgaaaaaggcacggcgaagggangaagcggggcggaanaaagcgaaaaacactccagacctacaanatctacatcttcaaggtgctcaagcaggtccaccccgatntcggcatctcctccaaggccatgtccatcatgaactccttcatcaacgacatcttcnagaagctcgccggggantccgccaagctcgcccgctacaacaagaagcccaccatcacctcccgcgagatccanacctccgtccgcctcgtcctccccggcgagctcgccaagcacgccgtctccnanggcaccaangccgtccccaaattcacctccgcttaagcttcacccctgcatctatctatgttttanttttaatgctatcnatnattggaaaatggatgtttnatcgttaagtttggtatcanatgtcantgatctggaacagtactctgattttaaaccatgtnaatgtnattcctgggttttttnatttttgacccccttgtntctgctggtc

SEQ ID NO: 49278 - DNA, 266 bp, Oryza sativa
  Clone ID: PAT_MRT4530_51876C.1
atggttttcaactttgatgaggatgactgggatgagattgtcgctagagatgcgaccatggatgtcgttcataaccgggggtgtgattttgtggaggatgaattttagtcttaggacttatctatatcttttcattacttatgcttatattttttttatcttttcttattttttgtcatcttttctttctctttatttctttcttcttctcttttttttttattttctttttttttactttttttattttactctttatttttatt

SEQ ID NO: 49279 - DNA, 1263 bp, Oryza sativa
  Clone ID: PAT_MRT4530_51877C.1
atggagagggaagtcgtggtctccgaggacgcggccgcctcctcctcctcctcctcctcctccgccgccgccgcctcgttctccctcgcggaaaccagggtcatctgccgcgtgtgccagaagcagttcgcgcagtacacttgcccccgttgtaacgcccggtactgctcgctcccgtgctacaaggggcatagtgttcagtgcactgaatccttcatgcgtgagaatgttatggatgagcttaagcagatgcaacctgaagatgaatcaaagaagaagatgttagacatacttaaaaggttccacttggaagaagaagatatggattcagaaggcgaagatgagtcaattctgtcagaggagcttattcaaaaagttatgtctggagatgagatcaagcttgaagacctctctgatgatgaaatcaaacgatttcgtcaagctctggcttcaggtgaactcagcaagatgatcgagccatggacaccatggtggaaaaaaccttccgctagatcgatttccctcagtccagatggaagccagcttatcagacaagtgagtgtagaagacactgatacgtcagatccaatggctgacccagagtctagcatcagtgaaatcccagaagggccagaatctgctctcccgtcactcgaacagctaaccagagcggagccatctccgctgcttgcggttcacttggttgatatactgtacagttactgcttcacacttcgcctccacaatggcgattggcgctctgatccttttggtgcctctactgttgcgttgtctgtgtcaaaagtcatgggggaggatgctaaacctgagacagtatctgaagccctcacggcatgtatagaggagacatgctcaccggcttacaggcacaccggaggtttcaggtttgctatagctctcgtggatgatatcatcagccttctcacgttaggaggcaatgcgcttgtttgtgccctctgtgacttccgcaggctcattcatatcggtgagaggatgctcaaggcagagaaattgggcaaggcggagcgatcacggagcacccaaaagcttcgtgccgcagataggaagttgtacttcatgacatgctgggttcatgagcaaccaaatgaggcatggtcgtctttagctcgcctcgttgaggtgcagaaagcatctctggaggagttggattgcgggagtcaatttcaaagggctggtagaaagaacgatgcccaatccaaggttcttattgaggagatttga

SEQ ID NO: 49280 - DNA, 360 bp, Oryza sativa
  Clone ID: PAT_MRT4530_51878C.1
atgagacgacgacgacgacgaggcgtcgccgcgcggcgcgcccaagcagacgagaccgtgagagacacaggtgaccaggcgacagccatagccgcgggcaagagccgaccaaaggcatcacggcccatgcgccgggacgcacgattgggccacccaattcggcccaaaaagaacatgtcggctgctcggcgtcggcaaggcccaattctggcgccgcccattagacagaataataatgacaggtgcgcggtacgtgccagaatcggcacgtcagatgtgcagttcccctgcggccaaggcagagggaagctggaagaagaagacagtagacagtacaactgtagcagcgatgaacagtga

SEQ ID NO: 49281 - DNA, 491 bp, Oryza sativa
  Clone ID: PAT_MRT4530_51879C.1
ctagatgtaggggtggacaggaagctcgtggctcgttagctcgctcggctcgtgacaagcttggctcggctcgtttgattttcctaacaagccgagctggcatttcagctcgttagagataatgagccagctcgagctggctcgcgggcccctagccgccaccattgaccagtgcatccccttgccgattgcctgattccccaatccccatggcgccgctccccatcgtgcacatcgacgccgctccctgcagccgccaaccccatcgccatcgggcattggcgccgccgccaacacccacatcgccatctgcagccggtgccgccgccgccacctgcgtctctcccctcaagctattgagatcgcgatgtcgtctcccctgccggctgcccaaagcccccaaccctcctaacaccagcgccagcggagaatggtgggcaacagcaggtaacaaaggagaggccaccggatgtaggatggcgtcggcatga

SEQ ID NO: 49282 - DNA, 423 bp, Oryza sativa
  Clone ID: PAT_MRT4530_5187C.1
gtcgactctagaggatccccgttgccaataagcaacggtaagaagcggaaaccaacacgctatgaattagatgtacaagcacgtgaagagaagaaaaagcgtaagcataaaggattaccaaccggctctcgtaatgtaataacagagcaaaagacagcgtcagcaaaagttaaaaaggatccacgtgttggcagccgcaaaaaagtgccattaatggtcgaatttgtcaataaaccagaaaaaggacaaatgattaaacccgtaccgcttgaaccatcaaatcacgccacaaaagcaacggtttcaccggaagttgaattaacgcaattagaaaataatgaatgtttaaatcaattattggatcagttagaagcagtttgtgcttatcatattagctgtcctgatcgtatttactatggcagg

SEQ ID NO: 49283 - DNA, 192 bp, Oryza sativa
  Clone ID: PAT_MRT4530_51880C.1
atgcggttgctgctgcatggtctgctgctggctgctgctgcatcggacagagaggagaaggttcagagtgcagaggatcaggagaacaggaggaagaagggaagttttgctccatatgtgtggagagatctggtgtggaaggtggttcgtcgggttaccgtcaaggttaaatgcaagtacatgacaaactaa

SEQ ID NO: 49284 - DNA, 801 bp, Oryza sativa
  Clone ID: PAT_MRT4530_51881C.1
ccccccctttttttttttttttttttttttttttttttttttttttttttttttttttttttttttttttttttttttttttttttttttttttttttttttttttttttttttttttttttttttttagtataaaacacaatcttaacaacaatttaagtactcagtccgtttaaaaacaaaggacaaacagatccattttgtcaatggactattaccgatgaaatgacaacagaaaaatattttttggctcgctcgcaggcggcccaatctgtcttaaaatagaattatttagaggctaaaaattctcatgcgactcaaccaaaaaaaaaagcatacgtgtatgttacttagagctggataccactcttgtagacagagccggccgtaaagctttcggggatgacatcgtcgacgacgcggtacccgccattcttgacgaggaagcggacggagaaggggcccttgagtggcgagccgcttttgatcgtccaggtgttagacgatgattccttcagcgccgtccagtcgctggcacccttctccttgatctccacctcagagatggcgacgttggtgatgagttccaggctagttgcgctagagccctcattaaccttgaaggtaagctcggtggcgtatgagccaacgacaaacagtgtcgccactgctgcggcgagcaggaaggaggataaggaggccattgccaaggtagctagttagctggagtaatcttgtttgtttcttgataatagagggatggatcgacggacgcgtgggtcgacgcgggaattccggacc

SEQ ID NO: 49285 - DNA, 569 bp, Oryza sativa
  unsure (1)..(569): unsure at all n locations
  Clone ID: PAT_MRT4530_51882C.1
ttgattgcgccgggacgccaaggagagacaacagacagggagaccacagagagaagaggcgcggcagcgagcgccccgccggcggcgcgtgcgaaggagcgcggggggnaaacaggcgcaccgaaacggggcagcgccagagcagagnccaggaccgcgacgaacccccaagcacaagaacacgccaaaaggcgggaagagaaaaagaaaagacgggggaccgcacacccccgcaggcgggcggccaggggccgcgcgaaggcaagggaggcaaacccccaagccggggaagagggggaccaggggcgagcgcccaaaggaccccaacggagcgaggcaaaagccccgggcgggggagcaggacaaagccacaagcccaaaaaaccacaagaaaaaggggagacacgggggcagggaaaaaaaaagggggcagggaaaaagaaacaaagggcacggggccgctaaaaaaaggggcaaaaggagagaggccccggaaagaagagaaanggggggaagacacctcaaaagggtgggaatgggcnacagtacactggaagcaggaaatataa

SEQ ID NO: 49286 - DNA, 209 bp, Oryza sativa
  unsure (1)..(209): unsure at all n locations
  Clone ID: PAT_MRT4530_51883C.1
ggcgcgtaggcaaagcngggaggaaggattagggtttaggcggcggccatggcagctgaggagcagactccgcgaaccaaacccagcaccgggaacagcaagaagaggaagaagcncaggaaggacaagtngggccancntatcatcgacgccgncgatcgcccgncggttgagccggagcntttagccanagccggagcntttcccaa

SEQ ID NO: 49287 - DNA, 2164 bp, Oryza sativa
  unsure (1)..(2164): unsure at all n locations
  Clone ID: PAT_MRT4530_51884C.1
atggcacagctagcctctgctcaaattggatcaggtttgtcagctcaataccagtcgaaacagacgaagaatttcatattagcctgcatccctttcaaaaagctggaaatgccatggtggcgcaaaaagtcagcagatgagagcgactcaggtacgatagccaaggacatgcatgttctcatggccgcgggatctgatcctattctgtggcaaggacctgattcgtttggccggtttgggacttttcaaggcaagtatgtaggagaaacccttatgcatgcactctccgaacttgaatccgcattcaaaaaactagccaccgacgatgacttccagagagagttggcaggaatcttgaaggactatgtgggtagactaagtcctctttattttgtagagtcgcttacggagcattacaggcgcgagaatggcactggtcctctcatatacctcaagagagaagacaacaatcacacaggagctcacaagattaacaacgccgtggctcaggctctctctgccaagcggttggggaagaagagaatcattgctgagactggagcgggtcagcacggtgtggctacagctacggtgtgtgccagttttggtttggagtgcattatctatatgggtgctcaggatatggagagacaagcacttaatgttttcaggatgaaacttcttggtgcagaggtgagggaagtacattctggaacagcgactttgaaggatgccacctcggaggccatccgtgactgggtcacaaatgttgagaacactcactacatattgggatcagttgcgggtccgcatccataccccatgatggtgagagagttccataaggtgattggcaaggagacccggagacaggccatggagaagtggggtggcaagcctgatgtcttggttgcttgtgttggtggtggatcaaacgccatgggtctcttccatgagttcgttgatgatcaagatataagaatgattggagtggaggctgctggctatggtgtagacactgacaaacatgctgccactttgacaaagggagaagtgggagttctccatggatcattgagctatgtgttgcaggatgatgatggacaagttattgaaccccactccattagtgctgggctggactaccctggtgttgggcctgagcatagctttttgaaggatattggacgtgctgaatatgacagcgtgacagatcaggaggcactggatgctttcaagcgcgtctctcggctggagggcatcatccctgctctggagacgtcccatgcgctcgcctacctggagaagctctgcccaacgctgcccgacggcgtgagggtggtggtgaactgcagtggaagaggagacaaggatgtccacacagccagcaagtaccttgatgtctgaaaaaactctagaggggctaaaaaatgatagcttttccatgagcagttttgaaagggtgcaatacaacagcagcaattgattagagctttgttatttggataaaaaagtaccaataatgcttggaagttcatattagctacaagagtatctttgtttgtttgtctttgtatctgaatgatgttattggccggaattcgtgcactagagacatcccatgcgctcgcctacctggagaagctctgcccaacgctgcccgacggcgtgagggtggtggtgaactgcagtggaagaggagacaaggatgtccacacagccagcaagtaccttgatgtctgaaaaaactcttagagggactaaaaaatgatagcttttccatgagcagttttgaaagggcgcaatacaacagcagcaattgattagagctttgttatttggataaaaaaagtaccaataatgcttggaagttcgtattagctacaagagtatctttgtttgtttgtcgttgtatctgaatgatgttattggcggagttggtaaatataactaaataaacaccaagctttctccaaaaaaaaaaaaaaaaaaaacgagggggcgcccggtacccaattcgccctatagtgagtcgtattacaattcactggccgtcgttttacaacgtcgtgactgaggaaaaccctggcgttacccaacttaatcgcctancagcacatccccctttcgccagtctggngtaatagcgaagaggcccgnaccg

SEQ ID NO: 49288 - DNA, 386 bp, Oryza sativa
  Clone ID: PAT_MRT4530_51885C.1
ctttcttgtccaacaatgactagtatctacccatgggtataaatatgtacacccggggtcattctaaattatctcaacgatcaatacaactactcttggcgcatcgccaccgtctttaccgagggtgcatcggctttcgatcttcagctaaggggtaagtcttatgttccgtcagtcttggccatcgtattggctacattggcgtcgttcaaggctacatcagtacattcgacctcttggattgctctggttcagttgatatatttgcctatttatttatcatatatcttagttaatctagttgagcatcttaatttgatcatattggctgagatttgttttagggtttatgctggtatcgactaaattatcttgctagattagat

SEQ ID NO: 49289 - DNA, 423 bp, Oryza sativa
  Clone ID: PAT_MRT4530_51886C.1
atgtctcctctacccgtcgcccccttcgccttcgcctctcgtcgttggaaaagccctagcaccgtgtaccctagctttgccgtcgccgccgccgctccagccgtgcgccgccgccgctccagccgtcgctgtcgctcgggaagaccgccgtcgggtttccgccgcttcttcttcgtcgccggcgccgtcctttgctcctccgccgttgttttggtcaccggtgagttcgccgcgtcgcgctctacccgttggtgccctccgttcgcgtcgtcgagccgtcgttcgccggcgagcgtgcgccgcccgagccgtctgctccgccgagccgccgccgctgtcggtgacgtcattgctgacatcatcagggtcgtccgccgtgagccggtcgtggaccgttcgatctcggccgtccgttttggatag

SEQ ID NO: 49290 - DNA, 177 bp, Oryza sativa
  unsure (1)..(177): unsure at all n locations
  Clone ID: PAT_MRT4530_51887C.1
gcgtacttctactatctcggtgctttntggctagcgttcttccagctaaccatgggtgtgaaggggaacggngnctntgcncctttcgatgcttttggtcgntgttgttttcggtgtcagtttgtgtcgcctgtcctgctgcngcggccggtgcttcncccatcttttgagctcccc

SEQ ID NO: 49291 - DNA, 879 bp, Oryza sativa
  Clone ID: PAT_MRT4530_51888C.1
atgacgtcaccgacagcggcggcggctcggcggagcagacggctcgggcggcgcacgctcgccggcgaacgacggctcgacgacgcgaacggagggcaccaacgggtagagcgcgacgcggcgaactcaccggtgaccaaaacaacggcggaggagcaaaggacggcgccggcgacgaagaagaagcggcggaaaccttcgggtcgacgacggcgacggcgctccggcggtcttcggcggcggcgaaggggcggacgaggacggcgacgaccttgcgaacccgacggcggtcttcccgagcgacagcgacggctggagcggcggcggcgcacggctggagcggcggcggcgacggcaaagctagggtacacggtgctagggcttttccaacgacgagaggcgaaggcgaagggggcgacgggtagaggagacatcgggggtccttataaaggggttggaaggcggcggcggaggcccacggctgccggcgacgagaaggaaaggttgaagattcggaggaaagagaggaatccgattcgacctcgaatccacaagtttccaaaccgaattaggcgaagattccaaaggagaaaaggaagaggagatcgagaagatcatttgccctcaaccaattcggccggagaaggaaagacatggccgaatttggaaggagacggcggcggctctcggctagggtttgcgggcggcggcggcgcgaggaggacgacgaccctgacaagcgggccccacctgtcagcgacagcgagagagaggagagcggcggctcggcggattgggccggctgggccgagggaaagagagagagggaaagagaggggttttgggccggctttcggcccaaagccaaaagaagacttt

SEQ ID NO: 49292 - DNA, 4532 bp, Oryza sativa
  Clone ID: PAT_MRT4530_51889C.1
ctaccttgactgccttgtgccttctatatcttcagtcggagccttgagcatctgctcttcattccctgtgccttggagtgttggatccaggacctcaagcatgtttcccttggacttcatttctagtacccatggaacaagttcctctgatgtagagaggattgaaacaggccgtcttcctgtgagtagctcaagcaggaccactccaaaactgtacacatcgcctcttaaggtagcaacccatccttgtccatactcaggtgggatgtaacctagagtgccgactagctctgttgtgatgtggtttttgttcggaaggatcaatcttgacaacccaaaatcagcgacataagctttgaattctttgtcaagtagaatgttgctggacttgatgtcacggtggacaatgtgaggcttgcagacatcatggatatacgaaagaccctggcttgctcctcgtgcaatcttgaaacgtgttggccagtcaagaaatgagctggtttcgtcatccctattatgaagccagtcgtccaggctaccattttccatgtaagaatatatgagtagcctcgagtttccctggatgcagtatccccacaaaggcacaagattgtcatgctgtgccatggatagggcttcaacctctgctgcaaactccctttccatgaggcacatttctccattgagcttcttgattgcgagtgtggagccactgggtaactcagctttgtacactagcccataacctccacatgctataatattctccttatggaagttatctgtagcctccatgagatcagtgaatgtgagtttgtttgcttctccactgcctcgtggtatcattaccaacaaatgctctggatcagaggtgaacgaaccggcctccagatttccactagtgttgcttttgttttcgattttgggaattgcatccctgagcgagaaaaggaagtgcgccaatagcaaaacaattgcggcccctccaaaaagcaccccaaatactattgcaagaatgacccttttgttcaactgttttttggatgctgaggcttcttctgctgatttgcatttgtgagtgagcatagagccacacagctttgggttaccatcaaagctggaatttggaaatgtactaaactgagctcctatgggaataggaccttcaaggtcattgtttgaaacattgaatgctgaaaggaagttcaggctattcagttcaccaggaattgaacctgtgaggttgttattggataaatcgagaactcgcagacttgtgaggctgcaaactgattgtgggatctgtcctgataaattgttgtggttcaagtttgtgagctttgatagccaaagtggtattcttcctgataatgaacagtggtctactgagagagcctggagattctcgaaaccatcaatggtttcatcctgtggaatgacctcttccatgaagttgtacgcaataaacagggtggtaaggttcgtggagctcttaaggatctgaagagctcttgtgatatttgtaaaagaattgttactcaaagataggaacgagaggtacttcagcttgcctatttctgatgacagctcaccgtagaaattgttatacgagagccgcagtgcaatcaagttgctacatgagtagatgctttctggaactttaccactaaagttgttcatgtcaatatctaaagttttcagattgggcaatgtggagaagttgaccttgcctagatctccgctgaagctgttgctcttgaggttgatggttgtgagatatttgcaattgcccaaagccgatggaagctcaccatgcaagttattgttgtccaaatggagctcctgcaatctactgagctgacctatagtatctggaatcatgccactgaagttgttccctccaagatcaagtactaccacattactgagttttactacaggtgtactaccaatgtttccttctaaattattgttgggaaaagagaggcagtccaacgaggtagcattgaagagttcgtctgggagagtcccactaaggttgttgttgccagccttgaggactctgagcatggagcaatttccaagttcagggggaacgcccccactgaattggttgtaactgagctcaagcacagcgaaggatggtgagttggtgcagaaattagttggtatatgcccactaaagctgttgttactgacattgagtttgaccagatttttcatcactttccatgtggaggatggaaactgtcctttaaacaaattgcttgagatgtttagtacctgcagtggcctggcaggggttgaagatggcaactcatcgagacctccattcaggcggttaaagctgatgtcgatgacaatgagacttctggaagacactaattcctgcggtatggcaccggatagcaggttgtaggacagattgaggcgcaacaatccagtcaggttgccaagagatggtgagatgtgcccctcgaggctcctggaaggcaatgaaacttcagtcacggtcttatcttggctgcagtttatcccttcccattcgcaacaatccatgccatccttccatgacatgctgaggcccccatccggcggcgacagggtggccggatttgcggtcccgtctccctctcctgggcttccgccaccacccgcgggcgcttctcctccaccgggaagcctgccgtcgcgcgacggcgactcccttcgactgttcgacgcaatgccagggcaggcctttagcatttgctcttcacaccctgtgccttgaaatgttaaatccagcacctcaatctgctttccatttgataccatctcatcacctttcaatgtagcaacccatgcctgggcgtactcaggtgggatgtaaccaagagtgccaactagctcagttgtgacatgagttttgttgggaaggatcaaccgtgataatccaaaatctgcaatataagctttgaattctttgtcgagaaggatgttgctagatttgatgtcacggtggacaatacgaggcttgcagatattgtggatgtaagaaaggccatggcttgccccttttgctattttgagccgtcttggccaatctagaattgtgctggtatcatcatccttgttatgaagccaatcatccaggctgccattctccatgtaagaatatatgaggagcctcgagtttccctggatacagtaaccccagagtggcacaagattgtcatgtcgtgccatggagagcgtttcaacctctgcactgaactccctttccatcagacacatttcaccattaagtttcttgatggcaatcatagagccatcaggtaactgtgccttgtagactaatccataacctccacatccaatgatgtgctcctggttaaaattgtttgtagcttccacaatgccagtgaatgtgagcttgttttctgcttccttgccttgattcatgagctctccactgaaattgttgctattgaggtcgatggttttcagacttgtgcagttgctcagggttgatggtatgctcccaaacattttgttgttgttcaaatggagttcctccaatctgttgagctgaccgatagactctggaatgttaccactgaagttgttctctccaaggtcaagggtagccagcttaccgagtttgacaacatttgccccttcaagtgttccttgtaaattattgtttggaaaagagaggcactctaacgaggtagcattgaagatttcatcagggagagtcccactaaggttgttatggccagccttgaggactctcagcctggagcaacttccaagttcagggggaatgctcccactgaattggttgtaactgagttcaagcacagctaaggatggtgagttggtgcagaaattagttggtattttcccagtaaagctgttgttactgacattgagtgcggccagatttgtcatcactacccatgtggaggatggaaactgtcctgctaacaaattacttgagatgttgagtacctgcagtggcctggcaggggttgaagatggcaacttgtcgagacctccattcaggcggttaaagctgatgtctatgacgatgagtttgctggaagacagcaattcctgcggtaggacactggatagcaggttgtaggacaggttgaggcgcagcaatccagtcaggttgccaagagatggagagatgtacccctcgaggctcctagaaggcagtgaaacatcagtcacggtcctatctgttctgcaggtgatcccttcccactcgcaacaatccacgccatccttccatgacatgctgaggcctccatccttagaaagcccggtgaggaaattgaggagggagttcttctcctgcttggagaaatccttcggccagaacagaaacagcatggggaacacaagatgattacagaagatcggctgcacaaagaccaattctagaaacagcatagaggccatttccagttcagacgactgtagtgctgtactgctgtgctgcacgtcgtacacgtcgaagtctgaagaggattgctgca

SEQ ID NO: 49293 - DNA, 480 bp, Oryza sativa
  Clone ID: PAT_MRT4530_5188C.1
cttgcaagttactattggatatattatgtaggagtgtaagggatgccaaaagtttgaatcaaggcatttaacaaaattccatcccaccctgagccatcccaagactcgtcccgagaagaaaaacatcctgcattaataaggaatataaagttcttccttaaacactggtaaatatagcagtgtcgatcagctgccacttacaataacatagtaacaagttttaagcaacaagtgaagcctgatcaccacaatgtcaccaccaccattttggccaaaaccccaacttaccaacagagccacatacctttgtgcaccaccgttgtataggtatatcagacgagacaaggcgatcaacaaggtaaaagagcagcagagaccaggcgtgcccaccgacattttggttcccctactaagtaattttaggcatggtagtatatacggtatgtgcactgagaagtgaggacgacgccaagagctcca

SEQ ID NO: 49294 - DNA, 1034 bp, Oryza sativa
  Clone ID: PAT_MRT4530_51890C.1
gcggcttaatcaatcacctcatcacacactcttagctaagctaagctaagctaagctagagctaatacaagagcaaattaatggcggtcgcgagaggagttgcactggccgtcgtgctcgccgcggcggcggcgatcctcgcggcgagccccgtcgcggcgcagggcggcggcggcggcggcggcagcggcagctgcatgacggagataatcagcctggcgtcgtgcctgggctacatgtccgggaactcgtcggcgccgaagccgtcgtgctgcacggcgctgtcgagcgtggtgacgtccaaaccggcgtgcctctgcgccgtgctcggcggcggcgcctcctcgctcggcgtcaccatcaacaacacccgcgccctcgagctccccgccgcctgcaacgtcaagacccctccggcgagccagtgcagcactgtcggcgtcccgatgccatctccggcgacgccggcgacaccggcggcaccggcggtgccaagcgagactccggcgggaaccggcgggtcgaaggcgactccgacgacggcgaccaccaccaccgggcagagtgcttccggcgggagcgtcggcaaggcggcgtccatggcgaccgtcgtcgtttcagtggcgtttgcactgatccatccggccggcgggtggggagacggtcaccggggcatggctggagaggatgtccggcagccggcgacgcgggagaaggggagggtggcggcggcgggagcacagggggagcatggcggaggcggcggcctccggtctccccgacctcagcccgtcttcaacaccgagcaccgccgccgttcttctcccctgctggccaccggccacgccgtgagccaccaaggtcggggacgcggcggccgagcgtggaggagcgaagggtctaaaccaaacccgtcggtgcaacggcgaatatgattaatttctgcatgggttaatttaagccgctcgatttggttgtgtccacgtgtccctaatcggcttaaatcatggtgggttgcgaatttttacactatt

SEQ ID NO: 49295 - DNA, 437 bp, Oryza sativa
  Clone ID: PAT_MRT4530_51891C.1
gcgcaaaccatatcgctgcacaggccacacatactggttgaatgcagattctcctacacacaacgttattgccaaggtgaaacaccaggtatgtatatcaaaccctctaaaaaagatacatgtcatgaactacatgatgaaccacgcctgttctgctggctaaatgaatctaatgcatggtagttctaactatgcccatctatctcaagctgtatctagtagacgacacactggctacagagccctctaggttctagcagcgtagcatgagctgtctgacatgccacctgctgcgccttgtacagtgcgttgagaggattggatcggataagcatacgtagatcttgactaacatgccctacttgacctggggggcctacacacatttggtgaacatgcctagctgcactaactagaacagcttgtcgcagaggagc

SEQ ID NO: 49296 - DNA, 252 bp, Oryza sativa
  Clone ID: PAT_MRT4530_51892C.1
cgatctaaaccttttttttttttttttagcaaaatgagattttcaatacagctgtttccgcataatacaagcagctatggagactcccggacacagtgcaactctagaaattcacggtagctaatgtgtgcatgaaatgatcaccacatcctctaaatgtgtaagccctagggaacttaaatcaattttgtacactatagtggtccagaatgcatggcataaatcctgcaactgcatggtatgcgagggcca

SEQ ID NO: 49297 - DNA, 1263 bp, Oryza sativa
  Clone ID: PAT_MRT4530_51893C.1
atggtcggtgccagcaagaaggttgcctatgtccttctgctgctgctggcgctggccgccgccgcgctcagcgtcgtcgtcctgcacaaggtcagggagcgccgcgcgtttgctgttcttctccgggagcgcgaccggcagctcatctccacgcggatcctcctccagaaaaatggtttgatgaaagagaaggcgtttaacaaggagatgaagaggaagttggaagaactgaaggccacaacatcttccctaaggactcagaagacagacctgaaaacgaagatcaaaggactagaagccacagccacaactctgaagaacagagagaaagaactggaagcagttctcgcagagaaaaatagccgcgtcagtcaaatggaagcaactctcacagataaaaacagccacatcagacaaatggaagagagagccgcaggcacaaatcctgaccagatggcagctctgatggagctcctgcagcagaaggaagccgagcttgaagagatcaaggtcaggttccaggattacaagacaacggaacggaagagcgtcggcagtaagagcactcatgttcaatcaaacaacgcaaatgcaagacctgacaatgctgtagtcgaaaaggtcacaagctccagtgatgctacacccactagagcagaagaaaagagttctaagaataccacaacagcagaaagtagacacccaaaagacacatctttagaagaaaagcaagtgaaatctgcaactagcaaggaagaagatggcttacaagacaaaacagatgatgccattgaagatattgatgatatctacggggaaagtcattcaaagaagatcgaatttcctcggcggaacaaaaagtttttgactaacagtggagtagacagccaagatgaagaactgcataggatagaacacccagggaactccctagaccaggacagtgatcgcgtcaggtacaataaactgttggagaaggaaattgataaagtttctggtgaaaccaagaataaaaagagtattgatggtagtttggaaaagatatccaagcatagcttaggtgatgccaataaaaacggattgaaacaaactgtggaagacatggctggtggtactgctgctgtgaagcccaatatgtctgtaaatgatgatggaactcaacaacagaataagagacccaagaagaagaagaccagatccaagaagaagatgatcgattctgcaactactaatagtagtagtgaagttacaaaagaaaagtaa

SEQ ID NO: 49298 - DNA, 270 bp, Oryza sativa
  Clone ID: PAT_MRT4530_51894C.1
atgggcaccgaggagacgagcagtgggaggaggaggaggaggcaggacagagccaggacggcgacgaggtcacgaggcctcctctccattgcgcggcgcatgcaggagcaaaagcagaagcaaaccgagccagacaaagccaagaacggccgcgagggcgaagagctcgccgctagctacgtctcgccgatcgtgttggatgagcccatggctctaagctacgagaggtggggccttgatttagagctgggaggaggcggtggaggctag

SEQ ID NO: 49299 - DNA, 369 bp, Oryza sativa
  Clone ID: PAT_MRT4530_51895C.1
atggcgtttgtggctgcgactgaggacgaggatgaggaggggccgattggtgctgggccgggggcccacagaggcggaggcggaggcagtgtgatgcctgctggtggtggagcctgcaggagttgcgggaagttggcgtccctgaacaagctgtcccaccggtcggagtcggaagcagtggaggagaaagcgctggcgactgagactccagatcagtcctcgatgctttacgggcgagctggggcggaggagttgatcatggcatcttcggccgaggagttggtcatggcgttgccagcagagtacttggtcaagcgtccccggcggaggacttggtcgtggcggcacgatgcatacttgacgtcttga

SEQ ID NO: 49300 - DNA, 978 bp, Oryza sativa
  unsure (1)..(978): unsure at all n locations
  Clone ID: PAT_MRT4530_51896C.1
atggagagcaatcgacagcaatatgtgcattgcttcttgttgaggcaaaaggctgtagtgatacttctggttttgatcctcgtctggttgaggaataaaaatggtaaaagaagtaaatgcaaaggggtacggtatgggcccctgatccatagggatgtatggagaacaagtgaattaattaggttgatcgacacttcagataggatatgcacacaacaattgagaatgccccgtcagttattctacaggctctgttctcgtcttaagaacaagggactactagttgacacctttcatgtttcagtagaggagcaagtggcaatgtttctgaagaagggtggacaacatcattcagttccatctgtaggattctcattttggcgatctggtgagacaggctgtattggggcactagacggcacacacatcaaggcaagtgtgccagccaagaaggtggataggtttagaggccgcaagtcataccccacacaaaacgtattggctgctggcgactttgaccttaggttcacatatattctatcaggntgggaggggtcagctcatgattctcttgtcttgcaagatgcattgtcgcgcccaaatgggaaatattttttggctgatgctggatatgctgctaggccgggtatattgccgccatatcgtcgtgttcgatatcacctaaaagagtttcgtggccctcaaggtccaaaatgcccaaaagagctattcaactatcgtcattcttcacttcgaactacaattgaacgagcttttggtgctcttaagaaccgcttcaagattcttatgaataagccattcatacccttgaaagcccaagcaatggtggttatcgcttgttgtgcccttcataattggatattggacgatggacatgatgaatttgtctccgatgaggatacgtggtatgctcgcctaccaaggagtagtaaccgtgtcactgacaaaggggctgat

SEQ ID NO: 49301 - DNA, 3518 bp, Oryza sativa
  Clone ID: PAT_MRT4530_51897C.1
tcacagagtgacatagccaccatcggtagcacatttgcgcccaaagtaatctatagcctaagctttgatactttcatcactagggcatgtaacttgtgttttttcttacaaagtactacatacaacatactgtgcccaacaccaactgatgttactataaacagagtaccaacacaaacaatgcagggtaagcataaatacaacaatgttgtagctgtgtcatcattactattgtagtacgataccgggttgctctagcctttaggtcattatcttcacagaagctcaagccttgcatcgctgcttagtgttccatgtactgaaatgagggtgggctaatcttagtcctctctccataagctccacgaatctcaacttcccgccattcttgaacaagcgcacagcaacaacacatcaaatgtgataggaaatcatcaatgcaacctcccgcaatatttagcttttgacgaagctttctcctcacacagcaagtgtaacaacagagggataatgtcagggaatatgccataatatcattgcatgcttccgacgatgacatgggcctgttcttcgcaattgaagcaatctttgagaatgttccacaggggaaaaagaatgttctcaaacacaaagatgtccgatgggtcaatgttaaatttgcatgatgttgcatcaaaaccatagccactttttcctaaggctgcacagatccaactacatttttccttgcatagcctgaaatgccaatggacttggcttctgttgactgagagtcatcatgatatgtttttgcactatcttcactgacttttgtgtgattagagtcagctttatcagaaaccttaggagtggcacatttctctggaatcgaacttgccacagttttagtcactcctaggaggtgttgaataacctcacattggcccatatccatgttgctttgtgatctttgaagttctcctagtgcctactccataggcgaattgtaagtaaaacagtacatcagcccctttgtcagtgacacggttactactccttggtaggcgagcataccacgtatcctcatcggagacaaattcatcatgtccatcgtccaatatccaattatgaagggcacaacaagcgataaccaccattgcttgggctttcaagggtatgaatggcttattcataagaatcttgaagcggttcttaagagcaccaaaagctcgttcaattgtagttcgaagtgaagaatgacgatagttgaatagctcttttgggcattttggaccttgagggccacgaaactcttttaggtgatatcgaacacgacgatatggcggcaatatacccggcctagcagcatatccagcatcagccaaaaaatatttcccttctggtattttaagaccatttgggcgcgacaatgcatcttgcaagacaagagaatcatgagctgacccctcccaacctgataggatatatgtgaacctaaggtcaaagtcgacagcagccaatacgttctgtgtggggtatgacttgcggcctctaaacctatccaccttcttggctggcacacttgccctgatgtgtgtgccgtctagtgccccaatacagccctcaaaatatggatagaatttgtttgggttgctggtgatcttagtatgtgtatcggtagacctgacataaatgagttctcgagctaactcacacatggcccgcaacacaatatgaaaatacctactcactgtctcaccagatcgccaaaataagaatcctacagatggaactgaatgatgttgtccaaccttcttcagaaacattgccacttgctcctctactgaaacatgaaaggtgtcaactagtagtcccttgttcttaagacgagaacagagcctgtagaataactgacggggcattctcaattgttgtgtgcatatcctatctgaagtgtcgatcaacctaattaattcacttgttctccatacatccctatggatcaggggcccataccgtacccctttgcatttacttcttttaccatttttattcctcaaccagacgaggatcaaaaccagaagtatcactacagccttttgcctcaacaagaagcaatgcacatattgctgtcgattgctctccatctttggaacccggaatattggggagaagagtaatggctggaccactggagatgcagaggatttcgcctgctgccttgcggaacatcgttgcagaccctgcatggtggacatgttgtcagcatgtataaaactttttctgtccatatttacaacaaggtgcaactcacgcaacttgccaagaattaggacactacgacacatgacaacaatgtactgactggatgatggcaaggcacgcttccgcttttcgccaacctcagacttatcaccttctaatttttgcctacgagaattatttcttgactggacttgcttctgttttgaacttgatgcatgctgtctggaaatcttcacttttctcccaggcggtgtggcttgcaaatttgttgatttgtcccttgaaggagggtcttgggacctacattttctgttcttctggttgatatcctttttgttgatctgactggtcataggctgaccatgtttgagttgttcaatttccaagtctttctccttcaccaaggaaagcatttcctgtagcttatcctcaagaattgatatgttcattttggcatcaacagcttctgcttgtaatctgccgatctcgttgcccttattttgatcttgcagctcttctaaattcttctgaagcttttgtgcagcttcagtagcttgtgctgcctctatttttttcttcttaaggagatcagtataatcattctccattgtcctcaactggttccacacaaaatccttttctgcacgtaatgcagaaacttccttttccttttcagagctcaaagtcttgtaggcgtgctttagtttttttaactctgctcttaaatctcttggactgtgaatgtggtgatcaacagtgttttcagcaagttctgcatgcctttccacttccttcagtttttccttcagttcatagttttctgcagccaaagcagctatagaagttctgaagtcctccaaatcattctccgtgagttcagcaatcttctggtaggagcgggcctcccgctccttgtccccaataaggatctccatgttggccgcctcatacctcttcctgatggcgtccgccttcctcgcctgctgcagggaggactggaggcggccgacgcgggagaccatgaagtcgtgctggatcttgacgaaggccgcgaggtggtcgcgctccgcgacgagctcctccacctgcgcctgcgtcttgcgcagcatcgccacgatcccgtcgtagatccgcagccactccgcctgggcgcccttgccgctgtcccccgccggcgcggccaccctcgcgccgcgcccacggccgccgccgccgccggccatggatggattttgaaatttggaaagggagaaggatgggagacgaggggagag

SEQ ID NO: 49302 - DNA, 391 bp, Oryza sativa
  Clone ID: PAT_MRT4530_51898C.1
tttttcaccgactctccgtggtccgatccctcggggccgacgccgccgtgagggtgttggcgcgcgcggaggacgtcggcgatggaggtggaacggatcacggcggagatgggcggggacattgacgtgagcctggactgcgccgggttcagcaagacagtgtcgacggcgctggaggcaacgcgcggctgtggaaaggtgtgcctcttcgtgatggggcacaacaagatgacggtgccgctgacgtcaggggctatcagggaggcgtacgtagtggggatattgcggaacagggacacgttgacgctgtgcatcgagtttcttctgagcttcaagatcgacctgaatcctttaatgatccaccggttcctgatctaacaggaggactttg

SEQ ID NO: 49303 - DNA, 374 bp, Oryza sativa
  Clone ID: PAT_MRT4530_51899C.1
gcggtaatgagcggggctgtgaacaagctctgccgctgctccttcccgagatacagtcgcgagttcatcgaacacgggcacccgcgttacatatctcttggaatcaatggtcgaggacaagaagacatcgctccttcgccatgtcctcaagcgacttgaccctacggtcgttgcttcccctgcgtacgtcgcttggatcaatgttcggacgcaaggacgctcgccgctttgccaagcagtggaaaatggagacaaagaggccgtggagattctgtgtagcttgcccgggatcgacgttgacagtgctatcggctcagctcgcgatcgcgccgtatctcccgccagtgttgctttcgagcgccgagatattgccg

SEQ ID NO: 49304 - DNA, 716 bp, Oryza sativa
  Clone ID: PAT_MRT4530_5189C.1
gtaaaaaaaccgataattatgtatgaatgctagccgcgcaattgcgcgggccacccagctagttatattactagtttacaaaaagaataccctgcaacgcaaccaacgctacgcacaagtcatcatatgatagtccgtcttgtcaagatgagaggagctacaacaccattggttttggttacagggtggtggactggtgatgacgcaaaatagagtacgcatcacaaagataaagatgctatgatctcttttgtccgcccttgcgctctttccttctcttcaggcccatccagatctccaatgttgtcatgatactcctcaagtatatccttaacgtcatccttagtcagtttgttctgtcttagaagcaactctattcttgttctcatctgtgaattgccagagtgccatatatgccccagaataagtgcaattaactgaagtgtgtaaagaccagcttctagcttgcgattgtagcgctcatcttcatccatctctagatcatctaaatcaagactgtcaagtctttcagtctcagctttcactctttctgaataccttgtgtaaaactccatcaaacggtctatcttttcacattcattctcaacaaattttcctagtaacctgattcttcgtgaaccttttgtaataccaccaaacaatgaagcaattagtgaaatgacccgttcttctagtgcttcctgataactctcttt

SEQ ID NO: 49305 - DNA, 529 bp, Oryza sativa
  Clone ID: PAT_MRT4530_518C.1
acaagtccatcgtcatttcatgtctgtaatatgctgtgccaacgtaccatcgtgcaacattgtagtgatacctgcaaagaagtgtggctagtgtgaaattatactggtctaggcaacagttcataggatgctctgcaaggaatatcataaaaacactttatcctggcatctatgtaaaatagacatgatttgggattactataggagaatcttaacaaggagcacattcacagtccattcaagttcaattcagttctggtattataagtggatctgatgatggggttagtgaaagatgccatcttctcgggtcagttgatgtgcattcagtatatatgaagaaacatatccttgtgacattcatttgtgtaaactcttagcttagttgaccacatagataaagatggaatgttaaaaggagtatttgttcatgatgtaattgtctcctctgtaattacagcccaaaaaaacgttgtttttgttctatacagtctcttttctcgaacacgtgttcaaaaaaaaaaaaaaa

SEQ ID NO: 49306 - DNA, 282 bp, Oryza sativa
  unsure (1)..(282): unsure at all n locations
  Clone ID: PAT_MRT4530_51900C.1
gcccgccgccgcacccgcctccaccatggcggccgtctcgaggggcctcctcgcgcgcctccgccacctctccatcgcgggcccacgcctgcccccttgctgncgccccttctccgccgagcccctcgtntcccaccccgacgacgacgagncngccgccgggggggggngcngngnangngtnatcggaagggggacggttcatagaggctcgggcgggggtaatgggcccggactcgcggcggaccggcntgatcggngtcaagtncggaatntnggcga

SEQ ID NO: 49307 - DNA, 232 bp, Oryza sativa
  Clone ID: PAT_MRT4530_51901C.1
gaaaataacacacatctgacaggctatagggcacaattttttacaaactcgcactcataatatcctacactgacccggtccgttggatcaaccaacactcatatacctatgtccacataattacaactgagtcagacgcccaccaagacatgagccgtcacacgggatacaccgtttatgtgtccatagtgattacggactttcgcattggcaatatagctatacctcattt

SEQ ID NO: 49308 - DNA, 4374 bp, Oryza sativa
  Clone ID: PAT_MRT4530_51902C.1
cccatcaatataaatttgatcccccagaaaaaaaggggagaaaattggacaaagaaccaatcaaatcaaaccgaagtcctaaataataaataacaaataggcctaacgattactgaccagactagaccatgtgattttggtaaaagggcaaaagggcacgagtagtatgtacatgagttatgcacaagttggagatgagttggacaaaaggagaataggaagatgttttgcattgaaaggatcaccactcttgatagtcctttctttagtgtaggaaggtaaagccagagttctccctgatcaaaggcggcatgtcaacatctgttacctcaatttctttcattgactttgagatatcatccaccgaaaacggaatgcttgaatcatcgtccagcaagaaagaactgctcactgcgttattcgagtcttctgtcatcattatcctcatacttgagatgacctctgacgaaacagtatgggttccatatttatcatcccaatacattgtgctgattcggtatagctgttgtatgcttaggacaggagcataaatcgttggtaatttctttcagtgttttctttggcttttgatgaattacaaggacatccaacagcctgcctaatatgcttcaattcttcccaggaagaacctgcatactcctcagtcgcataaatacaccactgctctaattctgccagtccagctttgacatattctccattgctaaatgaacagcactctcgtcgaagaagcagactgttaaacaactgaacattaataaatgagaagatttgagtgaacaccttgctgattaagaatgaagggacctggatgcaaagaccaagtaatggggatatttccttcttcaagttgtctcttatcatgccatagattttctcaaggaaagctgtaagctgctgcttgaaaagcagagcaggatacttggcttcaacttgacgaagatcacctattcctcccatcaagcggctagccagaaaaggacggccagcactctgtggtgaagctctcattccctctatagcagtgcctattgtttgaattatacggtcaaaaacaccagtcctttcaacttcaaatgatctccaatgcagaaggcatctgtatataaggcaagcagcaatgggcctcccactggagaaacctagatcttgtgatacacatttgatcagcatatcttggttttcctgttgcttctcgttgagtgatttttgtggcttctcctcagtctcaggctctttagggttgagtgagataggggtgatatcaggtaacggtttcacttctccatacggagctacaccattctccggagttttaagttggaagggagacttaggatatgcagctaatgattttgccgtaggagaaatagcaacagcctgttgacgtagcactttgttctcagactccatgttagttgctttctcttccagcctgtgcttcaaatttcttgatagttcttcatttctccgttcagcttcagcatattctttctttgcagtttctgttgcttgcctttctgtttgcagcaaagccttcagttgttcaacctctgctgtcagtgagttaatcttttccgtgtcttcgaccaatacaggggtctctttgattactggaggtgcctcttctattgcctttctagctgcttctctttccttaacaatcatagcctttgcttcttcaacttgctgttgcatatcatgcaatgtctcttgcagcttagcaatttcctgggcttttgcttcctcaaggtcagtccttaaccgcttctccagtccaaggcgccatgtcagttcttcaacacgcttctcaagtttatccttggcctccttaagggcccctgtttctctcgcagccatttttagctttctaagctctcttcttgcaagcctttgtctccatgcacactgataagtaagagctgctccttgcagattcttgtaatgtgcatagtctctgtggcaacgccatcgagcttggatatggacagctgctttagtttcctttctgaatctgaactctttgcgggcagacattgcccttaatcctgtctgcaacgtgattgcagcctcctgtagttgtaaataagacacgcgagctttgtgacgacgaacattcttttgtatcttcactgctgatgcttcccgcctcatgcattcgtataatttacgcgccaaggtccctctaacgaaagattgtagctgtgttgctgatcttctgagcgaaacaaactgtttccgtgcgatatatgtagagatttgtctctgtataattcttgctgctcttcctagcacttctgctcttcgtgcatccagatcagccatctgtccagctctcagaaatacctttgtttttccgatctggtagttctccagccccattttttccaaaatcttctggcatgcaattttatcatcattgcttccttctagaacttcaggagcaagaacaccaaagcgattaacaaattcatagaatgttttccttgtgggatatccagcacagctgatcctgatagcttcaagaacacctccgcatcgcagttgttgtataacatttgtgttctcaaaaatggctggctttaggaggttatttggcttcacacatctaatataatggggttctgttgagctcaaggtctccatgagagattgaagttgcagattttgagacagagggaccgccttgtttgacttgctaagttgcttgaaacgtgacccgattgatgaaaattttgaagattttgcagtctcttcagggagtgcaggaaataaagcagctacgaaaggacaagaagaagcattcagcaaatcctgatgttcagccactacataatctttgttcttgtctaggaaaaaatcagcctggtacgtcaccttatcaccagcataatgaacaattgtaaaatctgtgcgtgaaagcttcggtttggcaaaccgtttgttattcttaaatgttgtatacaacttctgcgcaaacgtctcatgtgtcgatctaggaaacatacatgcttcatccagaagtgcgatcaaaccacctttcttctcaatcaagtctaacacatcttgattatcaacaaactctatgtaactccagtttatctcctctctggtgtattcttcttgttccattttgaacacatgctggttaaaatgttgttgcagcttttcatttgtataattgatgcacaactgctcaaaactgttaattttgaaactctcaaaaccatatatatcaagaacaccaatcaactgttttgagtttgggtcctgtccaatggagacattgatcttctccacaatccaatcaaataatcgggagtatattgtttttgctaatgcatctctgctaacaagtgcagaagcaggatcaagtgttctagttataatttcttcaggagtaactattactcgtgttatcagtgctttttccagattatcgcaatcacacttcaacagttctgctgcagtgttaaggtggaacctggatttgtcatccttgatcacagatgaatcaatttctgttcccttagcaaaatttatatttccaagatgaagtatagcagctacaaccctgaatatagcttcctgctcttcctcattgattccaactatgtccatggcccttcttgttgctaaatattcttcagcatcattaattccttctacttcaatacagcttgactgattgaggtaatgaaaggatctagcatcggccaacttataccttgtgtatcctcgagttattgttccgcacagtctttgcattaccaaaagcttcaagaactgggtttgactgtaagcaacatctgcaactgcgaagacatgaggactcagctccccaaaatctgcacctttgtattgttccatcatatgggtatcatagagatgtggcaatctttgaaatgggtttaccgcaatcaaaatgctgccagtgtaagtatatatttcatttagctcataacgggtagcaagattctgtagaacaccaggttcatgtaagtatgataatcttgtcatatcgtccactcctcctggtggagcttccatatccttggggaaaacttttgatttatttgtcttaacctttttcccatttgaagtctgcacatgaacttcattgtcttttatgctaacaacctctccatctatccaggctagaattgggtcctcgacccaaacatgagaaccaacaataatattaacaggagtccccattttatcatgcaattttcccacagcaaaaacacggggtctcatcaagttactactatccaaagctccaaaccaagttgctctatcccaattttgcatgagtccaggtttctcgtaaggtggcaaactaggcagcat

SEQ ID NO: 49309 - DNA, 129 bp, Oryza sativa
  Clone ID: PAT_MRT4530_51903C.1
atggatctaatgcgcgagacaaatgggtggtgtgcgagcgacaacagtggtcgaggcggcaaggcaggtggtaacatctcttttatggccattggcagccaggagctcggtggcatagcgatccagtaa

SEQ ID NO: 49310 - DNA, 4617 bp, Oryza sativa
  Clone ID: PAT_MRT4530_51904C.1
atgctgcctagtttgccaccttacgagaaacctggactcatgcaaaattgggatagagcaacttggtttggagctttggatagtagtaacttgatgagaccccgtgtttttgctgtgggaaaattgcatgataaaatggggactcctgttaatattattgttggttctcatgtttgggtcgaggacccaattctagcctggatagatggagaggttgttagcataaaagacaatgaagttcatgtgcagacttcaaatgggaaaaaggttaagacaaataaatcaaaagttttccccaaggatatggaagctccaccaggaggagtggacgatatgacaagattatcatacttacatgaacctggtgttctacagaatcttgctacccgttatgagctaaatgaaatatatacttacactggcagcattttgattgcggtaaacccatttcaaagattgccacatctctatgatacccatatgatggaacaatacaaaggtgcagattttggggagctgagtcctcatgtcttcgcagttgcagatgttgcttacagtcgctttggtaagtttgttgagatccaattcgacaagactggacgcatttcaggagctgctatcagaacttacttgctggaaagatcccgtgtatgccaaataaatactccagagagaaattatcattgcttttatttcctttgtgctgcacccccagaggatacacagaggtataagttggccgatgctagatcctttcattacctcaatcagtcaagctgtattgaagtagaaggaattaatgatgctgaagaatatttagcaacaagaagggccatggacatagttggaatcaatgaggaagagcagggaacagaaattgattcatctgtgatcaaggatgacaaatccaggttccaccttaacactgcagcagaactgttgaagtgtgattgcgataatctggaaaaagcactgataacacgagtaatagttactcctgaagaaattataactagaacacttgatcctgcttctgcacttgttagcagagatgcattagcaaaaacaatatactcccgattatttgattggattgtggagaagatcaatgtctccattggacaggacccaaactcaaaacagttgattggtgttcttgatatatatggttttgagagtttcaaaattaacagttttgagcagttgtgcatcaattatacaaatgaaaagctgcaacaacattttaaccagcatgtgttcaaaatggaacaagaagaatacaccagagaggagataaactggagttacatagagtttgttgataatcaagatgtgttagacttgattgagaagaaaggtggtttgatcgcacttctggatgaagcatgtatgtttcctagatcgacacatgagacgtttgcgcagaagttgtatacaacatttaagaataacaaacggtttgccaaaccgaagctttcacgcacagattttacaattgttcattatgctggtgataaggtgacgtaccaggctgattttttcctagacaagaacaaagattatgtagtggctgaacatcaggatttgctgaatgcttcttcttgtcctttcgtagctgctttatttcctgcactccctgaagagactgcaaaatcttcaaaattttcatcaatcgggtcacgtttcaagtgttattcaaaattcctagcatgtgagttctcacatatccttctgaccttcccttcgtactctcctttggttgccataatggcggcgtatgacaacactgttgctcactttcctcctgctatacatagtgacatagtcattaggtctgcattgctgctgaccttttttgtgtttacattcctgctgtccaactctcagctgcaacttcaatctctcatggagaccttgagctcaacagaaccccattatattagatgtgtgaagccaaataacctcctaaagccagccatttttgagaacacaaatgttatacaacaactgcgatgcggaggtgttcttgaagctatcaggatcagctgtgctggatatcccacaaggaaaacattctatgaatttgttaatcgctttggtgttcttgctcctgaagttctagaaggaagcaatgatgataaaattgcatgccagaagattttggaaaaaatggggctggagaactaccagatcggaaaaacaaaggtatttctgagagctggacagatggctgatctggatgcacgaagagcagaagtgctaggaagagcagcaagaattatacagagacaaatctctacatatatcgcacggaaacagtttgtttcgctcagaagatcagcaacacagctacaatctttcgttagagggaccttggcgcgtaaattatacgaatgcatgaggcgggaagcatcagcagtgaagatacaaaagaatgttcgtcgtcacaaagctcgcgtgtcttatttacaactacaggaggctgcaatcacgttgcagacaggattaagggcaatgtctgcccgcaaagagttcagattcagaaaggaaactaaagcagctgtccatatccaagctcgatggcgttgccacagagactatgcacattacaagaatctgcaaggagcagctcttacttatcagtgtgcatggagacaaaggcttgcaagaagagagcttagaaagctaaaaatggctgcgagagaaacaggggcccttaaggaggccaaggataaacttgagaagcgtgttgaagaactgacatggcgccttggactggagaagcggttaaggactgaccttgaggaagcaaaagcccaggaaattgctaagctgcaagagacattgcatgatatgcaacagcaagttgaagaagcaaaggctatgattgttaaggaaagagaagcagctagaaaggcaatagaagaggcacctccagtaatcaaagagacccctgtattggtcgaagacacggaaaagattaactcactgacagcagaggttgaacaactgaaggctttgctgcaaacagaaaggcaagcaacagaaactgcaaagaaagaatatgctgaagctgaacggagaaatgaagaactaatcaagaaatttgaaggtgcagagaaaaagattgagcaacttcaggatactgtccagaggctggaagagaaagcaactaacatggagtctgagaacaaagtgctacgtcaacaggctgttgctatttctcctacggcaaaatcattagctgcatatcctaagtctcccttccaacttaaaactccggagaatggtgtagctccgtatggagaagtgaaaccgttacctgatatcacccctatctcactcaaccctaaagagcctgagactgaggagaagccacaaaaatcactcaacgagaagcaacaggaaaaccaagatatgctgatcaaatgtgtatcacaagatctaggtttctccagtgggaggcccattgctgcttgccttatatacagatgccttctgcattggagatcatttgaagttgaaaggactggtgtttttgaccgtataattcaaacaataggcactgctatagagggaatgagagcttcaccacagagtgctggccgtccttttctggctagccgcttgatgggaggaataggtgatcttcgtcaagttgaagccaagtatcctgctctgcttttcaagcagcagcttacagctttccttgagaaaatctatggcatgataagagacaacttgaagaaggaaatatccccattacttggtctttgcatccaggcgccgagaacatctcgtgctagtctaattaaaggatctcgttctcaagcgaatgccttggcccaacaaaccctgattgcccattggcagagcattgtgaaaattctaacgaactacttgaatgttctgaaagccaattatgtcccttcattcttaatcagcaaggtgttcactcaaatcttctcatttattaatgttcagttgtttaacagtctgcttcttcgacgagagtgctgttcatttagcaatggagaatatgtcaaagctggactggcagaattagagcagtggtgtatttatgcgactgaggaggtaattcatcaaaagccaaagaaaacactgaaagaaattaccaacgatttatgccctgtcctaagcatacaacagctataccgaatcagcacaatgtattgggatgataaatatggaacccatactgtttcgtcagaggtcatctcaagtatgaggataatgatgacagaagactcgaataacgcagtgagcagttctttcttgctggacgatgattcaagcattccgttttcggtggatgatatctcaaagtcaatgaaagaaattgagggatcacaactcactagtgggaaggtagttgttgactcgcccaccaacgatatatggcagattggcaggtacgaggtgcaccggtcactagcgagcgatgcatccgaaaatcacagtttctcagtgcagcagacggctccaaaacggatggactgcttggatctgactcagtttcattactccctccctccagaattcatcgtgttcgcattgagaccaaaggaggagaaaatcgacccatactctatttaa

SEQ ID NO: 49311 - DNA, 200 bp, Oryza sativa
  unsure (1)..(200): unsure at all n locations
  Clone ID: PAT_MRT4530_51905C.1
agggaggaaaacagaggcacagtaaaggaagaagccgggcacgcaggaagagagggagcaggagtacaagaagagagcaccaggaggagagaggagccacgcaagcaagccagggacccagccaacaaagagcgagagacgcacacacagacagggagaacaacggacgaagagaggggnaatagcaaagggcaaggcca

SEQ ID NO: 49312 - DNA, 5046 bp, Oryza sativa
  Clone ID: PAT_MRT4530_51906C.1
ttaaatagagtatgggtcgattttctcctcctttggtctcaatgcgaacacgatgaattctggagggagggagtaatgaaactgagtcagatccaagcagtccatccgttttggagccgtctgctgcactgagaaactgtgattttcggatgcatcgctcgctagtgaccggtgcacctcgtacctgccaatctgccatatatcgttggtgggcgagtcaacaactaccttcccactagtgagtttttttttttttttttttttttttttccaatgtgatttttttttcaactatgatcttctttgcaatttacaatacggtgaagattgaaatgaacgacaccggagacccgacacagatgcggaaaaccttttccagacgctaagaggaacacgagcttttccaataacaaagctcggggacctgaccagggaggggcatccggcccctcccattacaatataaatttgatcccccagaaaaaaaggggagaaaattggacaaagaaccaatcaaatcaaaccgaagtcctaaataataaataacaaataggcctaacgattactgaccagactagaccatgtgattttggtaaaagggcaaaagggcacgagtagtatgtacatgagttatgcacaagttggagatgagttggacaaaaggagaataggaagatgttttgcattgaaaggatcaccactcttgatagtccttttagtgtaggaaggtaaagccagagttctccctgatcaaaggcggcatgtcacatctgttacctcaatttctttcattgactttgagatatcatccactgaaaacggaatgcttgaatcatcgtccagcaagaaagaactgctcactgcgttattcgagtcttctgtcatcattatcctcatacttgagatgacctctgacgaaacagtatgggttccatatttatcatcccaatacattgtgctgattcggtatagctgttgtatgcttaggacagggcataaatcagcctgcctaatatgcttcaatgcttcccaggaagaacctgcatactcctcagtcgcataaatacaccactgctctaattctgccagtccagctttgacatattctccattgctaaatgaacagcactctcgtcgaagaagcagactgttaaacaactgaacattaataaatgagaagatttgagtgaacaccttgctgattaagaatgaagggacataattggctttcagaacattcaagtagttcgttagaattttcacaatgctctgccaatgggcaatcagggtttgttgggccaaggcattcgcttgagaacgagatcctttaattagactagcacgagatgttctcggcgcctggatgcaaagaccaagtaatggggatatttccttcttcaagttgtctcttatcatgccatagattttctcaaggaaagctgtaagctgctgcttgaaaagcagagcaggatacttggcttcaacttgacgaagatcacctattcctcccatcaagcggctagccagaaaaggacggccagcactctgtggtgaagctctcattccctctatagcagtgcctattgtttgaattatacggtcaaaaacaccagtcctttcaacttcaaatgatctccaatgcagaaggcatctgtatataaggcaagcagcaatgggcctcccactggagaaacctagatcttgtgatacacatttgatcagcatatcttggttttcctgttgcttctcgttgagtgatttttgtggcttctcctcagtctcaggctctttagggttgagtgagataggggtgatatcaggtaacggtttcacttctccatacggagctacaccattctccggagttttaagttggaagggagacttaggatatgcagctaatgattttgccgtaggagaaatagcaacagcctgttgacgtagcactttgttctcagactccatgttagttgctttctcttccagcctctggacagtatcctgaagttgctcaatctttttctctgcaccttcaaatttcttgattagttcttcatttctccgttcagcttcagcatattctttctttgcagtttctgttgcttgcctttctgtttgcagcaaagccttcagttgttcaacctctgctgtcagtgagttaatcttttccgtgtcttcgaccaatacaggggtctctttgattactggaggtgcctcttctattgcctttctagctgcttctctttccttaacaatcatagcctttgcttcttcaacttgctgttgcatatcatgcaatgtctcttgcagcttagcaatttcctgggcttttgcttcctcaaggtcagtccttaaccgcttctccagtccaaggcgccatgtcagttcttcaacacgcttctcaagtttatccttggcctccttaagggcccctgtttctctcgcagccatttttagctttctaagctctcttcttgcaagcctttgtctccatgcacactgataagtaagagctgctccttgcagattcttgtaatgtgcatagtctctgtggcaacgccatcgagcttggatatggacagctgctttagtttcctttctgaatctgaactctttgcgggcagacattgcccttaatcctgtctgcaacgtgattgcagcctcctgtagttgtaaataagacacgcgagctttgtgacgacgaacattcttttgtatcttcactgctgatgcttcccgcctcatgcattcgtataatttacgcgccaaggtccctctaacgaaagattgtagctgtgttgctgatcttctgagcgaaacaaactgtttccgtgcgatatatgtagagatttgtctctgtataattcttgctgctcttcctagcacttctgctcttcgtgcatccagatcagccatctgtccagctctcagaaatacctttgtttttccgatctggtagttctccagccccattttttccaaaatcttctggcatgcaattttatcatcattgcttccttctagaacttcaggagcaagaacaccaaagcgattaacaaattcatagaatgttttccttgtgggatatccagcacagctgatcctgatagcttcaagaacacctccgcatcgcagttgttgtataacatttgtgttctcaaaaatggctggctttaggaggttatttggcttcacacatctaatataatggggttctgttgagctcaaggtctccatgagagattgaagttgcagattttgagacagagggaccgccttgtttgacttgctaagttgcttgaaacgtgacccgattgatgaaaattttgaagattttgcagtctcttcagggagtgcaggaaataaagcagctacgaaaggacaagaagaagcattcagcaaatcctgatgttcagccactacataatctttgttcttgtctaggaaaaaatcagcctggtacgtcaccttatcaccagcataatgaacaattgtaaaatctgtgcgtgaaagcttcggtttggcaaaccgtttgttattcttaaatgttgtatacaacttctgcgcaaacgtctcatgtgtcgatctaggaaacatacatgcttcatccagaagtgcgatcaaaccacctttcttctcaatcaagtctaacacatcttgattatcaacaaactctatgtaactccagtttatctcctctctggtgtattcttcttgttccattttgaacacatgctggttaaaatgttgttgcagcttttcatttgtataattgatgcacaactgctcaaaactgttaattttgaaactctcaaaaccatatatatcaagaacaccaatcaactgttttgagtttgggtcctgtccaatggagacattgatcttctccacaatccaatcaaataatcgggagtatattgtttttgctaatgcatctctgctaacaagtgcagaagcaggatcaagtgttctagttataatttcttcaggagtaactattactcgtgttatcagtgctttttccagattatcgcaatcacacttcaacagttctgctgcagtgttaaggtggaacctggatttgtcatccttgatcacagatgaatcaatttctgttcccttagcaaaatttatatttccaagatgaagtatagcagctacaaccctgaatatagcttcctgctcttcctcattgattccaactatgtccatggcccttcttgttgctaaatattcttcagcatcattaattccttctacttcaatacagcttgactgattgaggtaatgaaaggatctagcatcggccaacttatacctctgtgtatcctctgggggtgcagcacaaaggaaataaaagcaatgataatttctctctggagtatttatttggcatacacgggatctttccagcaagtaagttctgatagcagctcctgaaatgcgtccagtcttgtcgaattggatctcaacaaacttaccaaagcgactgtaagcaacatctgcaactgcgaagacatgaggactcagctccccaaaatctgcacctttgtattgttccatcatatgggtatcatagagatgtggcaatctttgaaatgggtttaccgcaatcaaaatgctgccagtgtaagtatatatttcatttagctcataacgggtagcaagattctgtagaacaccaggttcatgtaagtatgataatcttgtcatatcgtccactcctcctggtggagcttccatatccttggggaaaacttttgatttatttgtcttaacctttttcccatttgaagtctgcacatgaacttcattgtcttttatgctaacaacctctccatctatccaggctagaattgggtcctcgacccaaacatgagaaccaacaataatattaacaggagtccccattttatcatgcaattttcccacagcaaaaacacggggtctcatcaagttactactatccaaagctccaaaccaagttgctctatcccaattttgcatgagtccaggtttctcgtaaggtggcaaactaggcagcat

SEQ ID NO: 49313 - DNA, 468 bp, Oryza sativa
  Clone ID: PAT_MRT4530_51907C.1
cccacgcgtccggaaaaatacttttttcttcatacttcaagatctattacctctaaatgaggaaagagaaatatcaatatgaaatgaatggcctaaaataatccgggagtactataacaaaagctcatgttatttaacatatgtgagagatattgcttgcttgactttcatataaaatggtaccacaattctacttattgatcacttactatgcattgataataattatgataatataattaatttagcttatagcacacctctatttggaagaatgaaggaaatgaatttctaatttacaatatattaataataacaatatgtatcatgttatgcaatatggctacaattgtgaattatttgttgttgcatatgttgcttcaatataatgtattgttgttactagaagcattttgaatagttgaattatagcattccatgttatatattttgatactactagttgaa

SEQ ID NO: 49314 - DNA, 258 bp, Oryza sativa
  Clone ID: PAT_MRT4530_51908C.1
gagaggaaagaaacactcatacacaggatcagcttacttaaacgcttacaggcgggacctgggaagggtggaagctacacatattcacattaacagtttatttaactcactttcatcacgacacaggggcatattctaaagcacgcacagactatactgggcgtattctacgctagccaaaccagaattatctacgcacaaactactggggttggactcgttcaccttcaaaagagcctgtctagtcactcgcttaac

SEQ ID NO: 49315 - DNA, 666 bp, Oryza sativa
  Clone ID: PAT_MRT4530_51909C.1
atggccatgtggtttcccggcccaacccgcaaggcccatggggcacggtggcgcagtactcgtgtaagtgcgaaggtgggctttgtgttgggccgatcggactcctcctgcaacaccacccccgcctgctccgattccgacgacgaggaggacgacggcgaggtggggagcgacgctgatggcggaggacttgccgctcccgccgccggcaagaacccgccgccgctcgccaagaacccgccgccgctcgccggggactcctcccctcctcctcgccgccgccaagaacccgccgccaagaactcgccgccgctcgccaagaaccggcacgggagacatggagccgttggcgtcgaactagacgaggccagccgccgccgacggagtccgtcccgctcgaggtcgccgcggccggagagatgccgagctccaccgccaacaccgccgcggataagctacggcggcggtggacggagacgacgcgggagggtgccttggccgccgctgcttgaggtcgccgcggtggaggaggcgcggcgaggcgcgcgtgagacggtgcggtcgacggggaggaggcagcgaggtcgacggggaggaggcggcgctgtcgaggagaaggaggcgaagaggcgtgggagggaggagaagaaggggcggcgcggctga

SEQ ID NO: 49316 - DNA, 123 bp, Oryza sativa
  Clone ID: PAT_MRT4530_5190C.1
atggtgaagatcaccagatcggccgggcatgtgcgaggaatgggagggcgacgagcttgtggtgtggaagcggcagaccagatggagaatggccgcatcctctacggcggcggccgtccatga

SEQ ID NO: 49317 - DNA, 502 bp, Oryza sativa
  unsure (1)..(502): unsure at all n locations
  Clone ID: PAT_MRT4530_51910C.1
gctnggttagttttacgaactcgaatgcctgtctgagctagaacttcgcatgacacagcatagtttcttggaaacataaggagagcacaggaaattggaatatgcaggacatctcacggatgcactcaaaatcatatatacccattggcagaggcgacgctagactttggcatgaaggtcttcccagttcccatgaacttgtaggcattgcaagcctgacatttgtggcatcctgttgctatgcttttttggttgtaatgtattgcttcccttgctttgagacaatgaacaagtcacacgagctttctttgatctgaagcatctcttgctgtcaagcataggtgttggctggtcacctgctatggcttttagccagataagagcaagttttacagaaggggtaattgtcacatttaattttattcatgtaagataagagaacatctaattttattcaagtagtcgtaatctatgtaaaaaaaaaaaaaaaaaaaaaaaaaaa

SEQ ID NO: 49318 - DNA, 787 bp, Oryza sativa
  unsure (1)..(787): unsure at all n locations
  Clone ID: PAT_MRT4530_51911C.1
ccggccgggctagaacacaccatgtatatttaaggtaacatagttgattaactatagaacatctacaaatagtgcaatttatgcaatagtgttcaatgtaaaaatatatggaacatgatcctgacctcagattgtaagtccagaacctctatgctcttactcattgcaagtgcaagcagctaaccaatatattgccgtttttgctttgagtatcttgtaatgaacgtgtgatacaatgcaattagctactgcaagttggaagtcatgatccaatttcaaagaactgcaattgattgataaaatatgtgacaaacggaatacagaacaagcattgaggtgtaaaaaccaatttgagaagtagaccattagcaatatatggatttgagatccatcagaaaaatatgaatgcggcagtccacgcggggaggatatctagcgaggatgcggcggcgcggcggcagaacatccggggaggaggaggagctagcgaggaggagaagcgaagtcttcgcgtgtggagcgatgtcttggcgggtggaggaggagcgaagtatccggcgtggcgtggatggatggatcgtgcggtggtgaaatcaagcgcgcagatggacggtagagatcgattcgggtgatttggtctgtaggattggagggggacaactgctcctttttatattagtatagataaccaagataaagaatcattcaactttatgatcgacttgctaataatgnntatnnataatagttctaantaacattgtcggctacctaacgcacattacag

SEQ ID NO: 49319 - DNA, 6261 bp, Oryza sativa
  Clone ID: PAT_MRT4530_51912C.1
atggatgatgatatttcatactcacccctacaaatgatcccgcacacaacagggcaagcctcaagccaggccaaatccgcgttgaacggttccatctcaactttgcttactagaggactcaagctttctcaatgggggcaaaagaaaatcagctacttcaggctacaaattcaaattgcaaatgaagatattctgaggttagatgtggcacaagaaagcaggttgctgaccgaccttgaacgccgactgagggctgccttgaaggggaaatgtctcgccttggcctctcttgaaagaataagagtgagacaaagagcaagaattcgaaacctcaaggagggtgatgctggcactgcctacttttacatgaagttgagggcaagaagaaggaaggctttaataccaaggcttgagcacaatggcaaagtggccacgacacaaattgacatgcaacagttagcttgcgaatactttgaaacaatcatggggcaggcagaaggtgattcaaagcaatttaacttgcagtccattcagatggctaaaggaaacttggcatcctttgatgaaaacttcactgaagaagaggtctgggcagcaataaaaaatctgccaactgagaagtcgccaggccctgatggatatacttcgctcttctaccaaaaatgctgggctgtaatcaaggatgaccttttggcggccatggggaaattctgcactggaaatagccaaaatcttgaattgttgaattcagcacaaatcacactcattccgaagaaagaagcgccaaccatgttgaaggactatgggccaattagtctcattcatagcttctccaaattggcaacaaaagtaatggcacggcggctggcaacaaggttggatgatctggtaccccacacacaaacggcattcatcaaaggcagatccatacatgaaaatttcatatttgtcaaaggtatggctcaacagttccaccggcaaaaaaaggaagttttactcctgaagcttgacatctcgaaggcttttgatatggtttcatggagctttctgctgaacatgctgaaatacagagggtttggcccgcgctggaggtcttggcttgctgcacttttcttgacagcacaaacaagcattacaataaatggggatgactcaagggcaatcaaaccagcaaggggactgtggcaaggagatcctctgtcgcctcttctcttcgtcttggtcatggacacacttcaagcaactcttttacaggcaaagaggcaaggaatactttcagaactgaacaccagaaaacgtctgccaaacatttcagcttatgccgatgatgcaatgcttttcgtcaagcctcagaggaaagaagtgctactgatcaaagcagtcctagacctgtttggagcagcatcaggtctgaaagtcaacctcctgaagagctccatcacgcctatacactgcaaccaacaacaattagatatggtctctgaactgctcccatgtaaagtcgaggaatttcccattatctacctgggactgccactatctatgagaaaaccaaccaaggcagagctacaaccagtcctagacaagttagcaggcaaggttgcaggttggaagccaaaattactgtcacctgatggtcgactttgcttaatcaagagtgttctgatggcattacctgtgcacttcctatcagcgctgcaaatgccgaaatgggcggtgaaagaaattgaacgcaaatgcagaggattcttatggaagggacaagaggatgtaagtggaggacactgtctagtggcctggaaaaatgtttgtgcgccagtacagaatgggggattgggaattcgaaatctcgacgcctttggtcaagcgctaagactaaaatggttagccaaaagtcttgagcaaaaaaatcgaccgtgggccaagtcaggatataaacttggagaagacgtggagaaaatctttaactcagctgctgaattctgtgttggaaacggcaaagacacaaagttttggacagccaattggctaaatggtggaagcattgcttggcgatggccggtattgtccacttatgttggccgctcacagctgacagtggcacaagctttaaccaacaacagatgggtcagagatctgcaaggtgcactctccaatgaagccatggcacaattcttccagctctgggatgaagtacacactgtcgagctaaatctagaagaagacaccattcgctggaagctttcctctgacggacttttcactgtatcttcagcctatagccttttcttcatggcaagagagatttgccctttcagcgaacttatttggcacatcaaagctccatcccgagtgcgcttcttcctatggttggctgccaaaggtcgctgcctaacagctgacaacctgggcaagagaggatggcagcatgaagattgctgctccctttgtcagagtgaagcagaggactgcctacatctgttcgtaacgtgcgctttcaccaggagagtatggaggatgatgcagggatggattggaatcaatttcctcttgcctacagagaacgaaccagccctggcagattggtggatgaaggcgaggatggcttttcggacgggctacaggagcatcttcgacagtgttttcgcgctaacatgttggctgctgtggaaagaacgcaatgcgcgtgtctttgaacagaaatttcgaagcatggaacagcttgtgcaagatatcaaggaagaggccattgtctggaagacggcaggagtgttcacaacgtgcaatagcgagatcacggcttttgccccaatctgttttcgacagcatactgtcgttgagagccttttagataaaattagacacaaaagatttctgcttgtattggatgatatctgggaagataaggacaggagcagatgggataagctgttagctccactaagatttaatgaagcaaatggttgcatgattttagcaacaactcaaaggacatcggttgcaagaatgataggaacaatgcataaggttgaagtgaatggcctgagtgacacagagttttggttgctcttcaaagcatgggctttttttggtaacgagaaccaggagcatgatccaactatgcagtccattgggcaacacattgctaaagcactaaagggcaatccactggctgcacggagtgttggtgctcttctaaacaggaatgttagctatgagcactggaggaaagttcagtacaaatggagatatcttctagaacaggatgatgatattctaaccatcttgaagttcagttatgaatttctaccggtccacctgcagcagtgtttctcatactgctcactgtttccaaaggatcacaaacttagaggggaaaatttggtccgtgcttggatatcacaaaattttgtggagtgcgaatgccattccaagagattggaggaaacagggaagcaatatttggataatttagttgattggggcttcctcgaagaggttgagtcacactacattatgcatgacttaatgcatgacttggcagaaaaggtttcatcaaatgagtgtgctattatagatggattgggatctaagaatataccaccaaatgtccgtcatttgtcaatcataactactgcttatgatgagaaacgatcttgcgattttcctagtagtgagaagtttgagaacatactacataagatcgtgcctttgcaaaaactcaggaccttgatgttctttggtgaaagcagcataatgttattaagatccttacatactttatgcaaggagtcaaaagaaagtgcactcaacgattgctggtgttgcaacttgacctctcttcaggaactgatattcaaagttcaagatgctagtaatttcaatataggacaacttcgatctatgaatgagctcgtaatacttggaatttctcaacttgaaaatgtgaaaactaaagaagaagccaagagcgcaagattgattgataaagagcatcttcaagagttgtcgttgtcatgggatgataaaaacatgaactctggacctactgcagagaaaacaagagacggtgtgtttgagggtcttgagccacaccacaacctcaaacacctacagttgactcgatacagtggtgctacatcgccaacctggcttgccagtaacgttaagtcactgcaggtacttcatctagagaactgtagagaatggcaaattattaactctcttgaaatgcttccagtacttaggaagttgaagttaatcaggatgtggaatttgatgtcagtctcaattccttcttatttggaagagttgatcttagttaatacaccaaaactggaaaaatgtgttggcacttatgggtcagatttgacttctggtctaagggtattggtggtgaaggattgcccttgcctgaatgagttcaccctttttcacagtgactatttccacaccaaccagaagttatggtttccgtctctcaacaagctcaccatcggtcattatcatcgtataatatcatggaaaatccttcctttagaagaaatgcgagcactcaaggagttggagttaatggacgtgcctgttgttgaagaattgtcagttccttctctggagaagttggtgttgattcaaatgcctagcctgcaacgttgcagtggaataacaacttcatctctaccggtttcgacctcccaaatacatcagaagaaattgataaaattgctgtcaatcaaccaaccaacagaaacagaagcaaccagcagtttggcttcagtagagacagcctcatctagggatgaacagattctgaaaattccatgcaatctccttcgttctctaaagtggttgcgaatttgggaatgtgcagacctggaattttctggagtcaatagaggattttcaggattcacctctcttgtgatgctacaaattagggaatgccccaagctggtatcatcattggtgaccgaaacaaatgatactaatgtattactaccacagtcacttgaacatcttgatatcggtcctcttccagcaaacctgcagtcctactttcctaaaggcctgccctgcctcaagaagttaagcctaaatagcggcgaatatttgaagtctgtacaattgcattcatgttcgggtttggagtatttgcagatctcgcggtgtccacaccttagtgtgttggagggcctgcagcacctcagctcccttcgaagattatgcatccagatgaatcctgagctgtccgctgcatgggatcttaaactgtttcctctgtcacttgtagaacttggggtcagaaaagtcgagggcagcttccattcccgctctctgtcctgcctcccttctatcacaaagttagagatacaggatagtccagaattggtgtctttacagctaggatactgcacctcactggaaaagctagagattacaaattgcaagtcgcttgcttcgatcaagggcatccagtccattagaaaccttaggtacttgaaagtactcttcgcccccagcttacctccatatctgcatggggtctcagggatctggtctcgactggaaactctccagattagtaatgcagctgtgctatccacgcccctatgcaaacagctcacagctctacgtgagcttatgtttttgggtaagcagggggagggatatgacggcgagaccatgaatctcaagtcacttcctacgaacctacaaagccttgactgcctcgacgagttgtatatcagtgtgtgtccgagcatcctaaggctaccacagatgggcctcccaccttcgctccgttacctatctttgtaccgctgcagcgaggagctctgtgtgcaatgcagaatggcagaaactgctaacctcagggtcggcatttactctgcatcggctattcccaggcctggttatgctagcagggagaagaatggaaggggagaaacatgcctcggtggctctgtaggatggactgcctggagggctgcgccatcaggtacctggtatagacttcttggtggcttggcgcaatcgtctacacgagattggacaactgcacgcagaatgtatcggtattggttggtaggccgtaggcctataccattcacaacccatgtgacggtgtcccatggaatagcattcctgtgtcttcacaagtacatatctattagcagcgcacatatggtgtaccctgccttgcctgtcctcatatggcagccagcctgccagccatccatcgtcaagttgctcagtatatag

SEQ ID NO: 49320 - DNA, 471 bp, Oryza sativa
  Clone ID: PAT_MRT4530_51913C.1
atgccggagcgcggcgccaagaacgggagcacggcgtcgggcgacgccgacgcggggggcggcgcgctctccgccgccgccgccgccgtgatgctgttgaacctccggcgagccgactgccgcggcagactacaattacctcaactcagtgtcaactctgctttcgtagatgggagttcccaacacggcggcacactggaagccaagggaaggcaattaggtaaaaacccctcgctggacacaatcacgcgcacaaactgttcgagggaattccgcgctgaaacaggcacagcttcgtcgcatgatattttaagtgagaaagctaatcaacggtctcttttttttgggcctgctttgggagcccatcatcgtggaaaggctaggaatcatgggccgccaaaacaggccttaaagatcacaattcttccagtagacacctgttacggtaaaattaccagattaggcaaataa

SEQ ID NO: 49321 - DNA, 3652 bp, Oryza sativa
  Clone ID: PAT_MRT4530_51914C.1
ccaggtgctactcctacacattattcggcatattcaactttctttgctttttctcaattctcaactacagttttcatcgtgttttgtccaaccacttctttgaaaacatcagacgatacaattctatgtttgctatgacatctatgggtgtaaatatcatcaactcaattaatgatggtcatggcccttacattttcaagattagtgggcagctatgccaccgaattggatcgcttattccaaagcatggtgcaagaccagaatattgtcaattatacatatttgacactgagaatgaaataagaaatagagtggctgttgcttcacatagagagatgagttttgaaccaaatgaggatattgttgcatctttgatgaccatgctcaatgcacacaacccagttgttcagctctttcgaactgctcgtgataggctgcatgatcaaggcactaccgagaaaggtcgtgacttaatagtagaggatcactcattgcagcttcaaagggtaaatgaaactcattgcaaatttatggcaatgcaatacccgctattgtttccttatggagaggatggttttcatgaaaatctcaagtatagacaatgtcaccgctcaggaatgatcaaacggaagaaagttagtttggtagaatactttgcatatagattgcatgatagagatgatgacttcaacaccccattgcgttgcaagaggctcacacagtcatatgaggttgatggtttttgttgtgtcaaggatagccgcttgaaccattataggaaaaaaaaaacttttcagctgaagtataggagtagcccctataaagctttacttgatacagtcagtagcggcattattgatgcttcatcggtaggccagaggattattttgccaggttcattcactggaagtccacgctattactaccaaaattaccaagattgtgtggctctctgtcgtagatttggatgcccggatcttttcatcacttacacgtgtaatgctgcttggccagagataacagaagctttagcatttataccaggacaacaaccttctgatcggcccgatattgttgatcgagtttttgaaatgaagctcaagctgtttgttgatgatataaaaaaaatatgagttctttggtcccatactcggaattgtctacacgattgaatttcagaaacatggtcttccgcatgtccacttgatagtgtggcttaaaaaggatagaccccttgatgccgatcagatagacactttcatatcagcgcagttaccagacccatctattgaccctattggttatgaggctgtctcacaattcatgattcatggtccttgcaatattccaggttcctcttctccttgcatggctgatggtaaatgcactaaattctatcccaaggaattttctgacaaaacagttgtgctacctaatggccatgtgattgataatccatgcaatctcataacaaaattgactgcatggtttgaggcaaacaagacatatccagaggctcgacaacacacatttgtagagttccctgaacattggacatggcatggtgatggaaaattttggaaaccgcgtcgtaatgcccgtggaaaggttggccgtatagccaatgttagtcctaaccaaggagaaagattttatctgcgtatgctattgcatattataaaaggggcacaagacttttctgatcttcacaccatggctggccaactatacccaacatttcgtgctgcatgtcaagcattaggtttacttggtgatgattgtgagtggtccaatgctatggctgatgcagcacaatgggcattaccataccaacttcgccagctatttgtcacattacttcttttttgtgaagtcactgacccaataaaattgcttgaagattatatcaagccaatgggagaagatttggcatatcgtactattcggcccacacaaggtatctctcaaccattagtgcagcaacacattaggtcatatgtcttggatgaattagacaaattactcaaagattctggatatagcctaggtcacttcaacttgccagagccagaacaccatgattacaatgttttgaacaacaggttggtagtggatgagctctcttatgaccttgatgctactttagtagaagcaaatgagcaacttaacaataaactcaagtcagagatctatttatgatgccatagaacactcagttctgaatggttcaggtcacactttctttgtatatggatatggtggtaccggcaaaacatttctgtggaatgcacttctcaataatataagaagtcgtggaaagatagccttagcagttgcatcttctggtatagcagctttgttgttgccaggtggtcgaacaccacactcacggtttagaattcctatagatattcaagagtattccatgtgtgctattaagaaaaatacacatgtcgctgagctcatagaaagaacatcactaatcacatgggatgaggcacctgtaaaccataagcactgttttgaagcacttgatcgaactcttagagatatcatgccatcaaacaattgttatctaccaaacaagcaatttggtggtgtcacggttgttctaggtggtgattttaggcaaacattgcctgtcatcccaaatgcaaataagcagcagatcctcaatgcttcaatcacacgatcccatttgtggcagaattgtgtggttctccatttaactgaaaacatgagacttagatgcccaacactttctcaggttgataggattgaattagaacagttttctcactggcttctttctattggtgatggcacactacctaatagcatgccaacagatcgacctgacacaacatggatccaaattccagagtatcttttgttacctgctcaggaaagaaaccttacaggtttaatttcttttgtctatgagtaaacaccagatgcctcagaattaccagcctatttgtgtcagcgagcaattttggccccaacaaatgaggtggctgctgctataaatgctcagattattggccagatagctaatgaggaaatgtcatattatagctttgatacaattgatgataccacagctaactattgcactcttcaagacctgtatcctccagagtttctcaacacggttcgcatgagtggccttccagatcaccatttacaacttaagattggtgtcccaataatgttacttagaaatttgagtccatccaagggcttatacaatggaactagacttattgtgacgcagctcactcatcgtgtaattgaagcccaaataataacaggaagcgctaaaggttctaaagcttatatccctagaattgtttctgtttcgacagacccgaaatggcctttcaagatgagacgtcgtcaatttccagtgcgtgtttcatatgcaatgacgataaacaagagccaaggatagagacttagcaaggttggtgtttacttgccaagtcccgtgttctctcatgggcagctttatgttgccttctcccgcgtaacatcttcaaaaggattacgaatcctcattgaaaataactctgctgagtatgaaagaaagacacataatgttgtgtattctgacattttccatgatatattaagccaatgttgtcagttc

SEQ ID NO: 49322 - DNA, 1120 bp, Oryza sativa
  Clone ID: PAT_MRT4530_51915C.1
ccgccggcacgccggccgggacgcgtggccggcgacgaggagacgctgactgaacgaacccatcgaccgactagctatctagcgtggctacgcggacactcagagacgagtcacactctcactgaacgaagctacctagcttaattacctagctactcgatcgatgatcagtcttgagatatggtgggggcttgaacggtaaggtggtggtggcggttgatggtggtggcgatggtgggtggcggcgccggggggcgtcggcgggcgatcacgtgcggggcggtggggggtcgggcgatcgcgccgtgcatctcgtacgtgacggggaggggcggcctcacccagggatgctgcaacggcgtcaaggggctgaacaacgccgcccgcaccaccgccgaccgcccggcccgcctggccggtgcctcaagaccctcgccggcaccatcaagtctccttcaacctcggcgcggccgccggcattccccggcaagtgcggcgtcaacgtcggattccccatcagcctctccactgactgcagcaaggtagctagatcgattaatcctgcttggaccgaccgatcgaatatcgatcgatgctggctgcagtgataatagcaatattgtacagtaaatatcgctgcttaagaggctgtatctctctattctgatattatgtgcactccgggcgtcgctatttaatttcttgaatctgtacacctctctgttagggtaatcctagtttatgaaagcttccccatcagcctctccactgactgcagcaaggtcagctagatcgattaatcctgcttggaccgaccgatcgatatatcgatcgatgctggctcgcagttgatcaactagccaaaataatagctacagtaaaaataacagctggggcatatcaatgcagcgctggtcatctctctctctatctctgtatactttatgttgcacgctccgtgcgtgcatgctatcttaattttcttgactctgtacaccgctctgtgtacgtgtaatcctacgttgatgaattgcatcttgtccagacttggacctagctaactacgtactccagcttggcagcttcttgccgaggcaatctgtagtaatttccttgttac

SEQ ID NO: 49323 - DNA, 772 bp, Oryza sativa
  Clone ID: PAT_MRT4530_51916C.1
tcgtttatattgcagctagtgtactgcactgggcgatttgctctagctagctcgccgttagccacccatggctgcttctcctgcttccactgccgccgccgtcgtgaatgcgccggcggccaccggcgggctgctgctgccgcgggggaggagtagttggagttggagttgctgcaacaataacaattcttcgatggggaggaggtggcgggcggcggcggtgggggaggtggcggcggaggggaacacgtacctgatcgcgggggcggtggcggtggcgctggtggggacggcgttcccgatactgttctcgcggaaggacacgtgcccggagtgcgacggcgccgggttcgtgcgcaagggcggcgccacgctgcgcgccaacgccgcccggaaggacctcccccagatcgtctgccccaactgcaacggcctcggcaagctcggccagatcgacaagtaatcatccatctctacctacctgcttcatcgacgatccatccatccatccatcatcatccagctgccagcttctgatcagtcactatatacatgtgtgtatctcaccatctgtctacataactatatactataatcgttagtttggaacgctggaataattccatatatatggtctaattccagtgttccaagccggcaatcgctacttaaattcaatgtacttgtgttgctgagctactttgtctctgatatacatattcattgtctctcgctgctcttccgtttaatggaaccaaaaaaaaaaaaaaaa

SEQ ID NO: 49324 - DNA, 435 bp, Oryza sativa
  Clone ID: PAT_MRT4530_51917C.1
ctagaactgggtcactatgactacgaggctatagctactggacatgctgaacgtgaagctgtggaggaacacactattaaagtggggatggttaccatgggacatgggactgatgaggatattaatggcttgatgtatgggtgagagtaacagcataaagagtgaatcatatcctgagactcacttgtaatattgaagctctaactttctactacgtttatatgataaagtatgacggagttgattctgtgtgcaacgttagaccagtgggcgtatgcaaaagatttatataagtacgattcatgtgattgaagctcgattcatgatcaaaatttctttaagcatgacataaatatgtgcatatatatgcacaaaatttgtaaagtatacgaatggtcaaaacgttggtcgaacggtttacagcgtcatacatta

SEQ ID NO: 49325 - DNA, 465 bp, Oryza sativa
  Clone ID: PAT_MRT4530_51918C.1
ctaccccttgtggtcgttgtctgatggagtatttttcttgtacttttttgaggacgcccttgctgcagccaccctcctccactggctaaaggtgggtcccaccaccactcccatccccatccaacatctctccctgccggcgacgaactgagggcatatgccggccatgagcgccccccgccaatgtcgtcgtctaggccaccgtccgccgtggcagtcgtcgtcgtcgccgtcgcgcctcacgcacgagccgtcgcagccatcgccgctgctgcgcagggagccaccgccgcctccgcctcgcgcgctggagccgtcgccactgccgctggatcgatgggtcgatgcccgccggcggccggcggcgaccacggcggggaccagctcggagaggccggcgacggtgtacactccggcgcagtgcgccaccgccgacagcaccagcagcgccgccgaggcgcgcat

SEQ ID NO: 49326 - DNA, 382 bp, Oryza sativa
  unsure (1)..(382): unsure at all n locations
  Clone ID: PAT_MRT4530_51919C.1
aagcccccgccggccccgcgcagaccagggaccgcgagaaggccgggancaccagccccaccgcccgcnaccgcagcggccaggaggagcaaccggaacgnncaaanaaggggagagggacgaacaaaatcgtttcnccccaccacacccccncnncnccccccccangacccgaaggacaccaaaaccccccccaacaagctcgccgtgcgcaagcccaccggcggcctcagcaccaccaggggatgcaccggaccaaagtcggccaccgaaccgcccaacggatccacagaccccgactcaacggtgaaccaaatcgaggcccccaccaagaagaagggcaacaaggaaccaccgctagtaataaactccctccacaccc

SEQ ID NO: 49327 - DNA, 1599 bp, Oryza sativa
  Clone ID: PAT_MRT4530_5191C.1
tcacaaagataaatattctatgattttttttataccgatttttatgtatgaatgctatgccgcgcaattgcgcgggcccacccagctagttatattctcaagtatatccttaacgtcatccttagtcagtttgttctgtcttagaagcaactctattcttgttctcatctgtgaattgccagagtgccatatatgccccagaataagtgcaattaactgaagtgtgtaaagaccagcttctagcttgcgattgtagcgctcatcttcatccatctctagatcatctaaatcaagactgtcaagtctttcagtctcagctttcactctttctgaataccttgtgtaaaactccatcaaacggtctatcttttcacattcattctcaacaaattttcctagtaacctgattcttcgtgaaccttttgtaataccacattgtgaaacggaggaagtatttagaaaatcaaaggttgcatcctcacttccccaaacaatgaagcaattagtgaaatgacccgttcttctagtgcttcctgataactctcttttttgtttttcttgttcacaggaatccatgaacgcagcaaaagcggtcttcagcccaagtacatcaacaaagcgctcgcaagcaggtgggaacctagtcatggcaaaatcgagggtccggatggcagagctgtatgccagcttcttctgcttcatgatgatgatcatgagctcgacgccctccgccttgacaaatctttccttgttctccatgggcatgagcacacagcagaggcaatcgaagaggttctcgagcatctcctcctcatcagaggtctttgggtccctggacttgtacatggcaacggcctgcagcaggccgtcgactccattgatgttgcccaggcgcttctggttggcggggctgtcctgtaggaggatggcgaggatctcggaggcgtactgcttgttggcatcgaactcgcgggccttgaggcgggcgaggagccagcggagaagcttggtgcggtcgcagacaatgtcggcgagttgggggcggagctcgaggaggttttcaacgacagagagggtgtggtggacagcctcggcttcgtcggggtcggcctcggagaagcgggagagattgtggacgaggaggtcgagggcgttggcttcgacgagggcgtcggcgagggagtggaggccggcgaggtcgtcggggtcgtcggagtcggtgaggtcggcgaggagggaggcagcggcggcggcgaggtcggcgttgtcgtgggtgaggagggaggagagggaggaggcgaggccgagggggacgaggtccgggaagaggtccggggcgccggcgaggaggcggaggcggtcggtctcggcgtggagggcgatctcggagtcggcgaagcgggcggggtcgtcggggtgcttcatgcgggcctcgaggttgtcgcgccggacgcgctcgaaggcgagcaggaggcgcttggcggcgcggaggtcgagcacctccacgtcgtcggcgccctccagggaggagaggtccaccgcccccgcagcgccgtcgtcgtcggcgtccggccgcttgcgcttgtgcgccgcatccat

SEQ ID NO: 49328 - DNA, 891 bp, Oryza sativa
  Clone ID: PAT_MRT4530_51920C.1
cggacgcgtgggtcctaagagcagctcgatcctaccacatcgttaagaaagccgtatagtagagtaaattgttaatggcgtctccggccacctcttccgctgtcctcgtcgtcgtcctggtggcgaccctcgccgccggtggcgccaacgcggcgaccttcaccatcaccaaccggtgctcgttcacggtgtggccggcggcgacgccggtgggcggcggcgtgcagctgagcccggggcagacgtggaccatcaacgtgcccgccgggaccagctccggcagggtgtggggccgcacgggctgcagcttcgacggctccggccgcggcagctgcgccaccggcgactgcgccggcgccctgtcgtgcaccctctccggccagaagccgctgacgctggcggagttcaccatcggcggcagccaggacttctacgacctgtcggtgatcgacggctacaacgtcgccatgagcttctcctgcagctccggcgtgacggtcacctgcagggacagccgctgccccgacgcttacctgttccccgaagacaacaccaagacacacgcctgcagcggcaacagcaactaccaagtcgtcttctgcccataatgcatcatctcatgcatgtaactaatgtagtagtatatgtatcatgggacaataatataaataaaaagttgatgaataaaacgacaccttgatcgataatcatccatggacgatatcgatgcaggtggacatataatataatatatatgcactcgaccacgtgtgcaattgtttaatcttaaacttgttcaaaatatagagtattatgaagttggagtcgattggacctcaagctttcaaatgaaagcgtccgagtaataaagatatatatactccctccatc

SEQ ID NO: 49329 - DNA, 2253 bp, Oryza sativa
  Clone ID: PAT_MRT4530_51921C.1
atggctcctcgtgtcatcgtggacacgtaccctcgtgcatgcgcgcatggtgttcaacgcctagctcagctcaccgctctgttcgcgtaccactataaataccggcagctaggtagcaagctattgatagagagaaacacaaaggcatcaatgatgatggggaagtcgtcaccatcaacgtcgccggtgtacgccgttgccgccgcgctgctgcttgtgtacttgatggtggccatgggcgccggcgtggtggaggcggcggtggtgccaccgtcgaggtgcaacccgacgctgctgacgccgtgcgcggggccggcgctgtttggggggccggtgccgccggcatgctgtgcacagctgcgggcacaggcggcgtgcctatgcgcgtacgcacggagccccaattatgctcgtctactccttccactaatcaccaatcatcagcaaatcagcagcttccatctcctccccaaagccatcgtcttcgtctccaccctccccgggccatccccctccctcccgccatcgccgcgcgctcgaagctcgcctcgcctcgctacaggcgcggtacaggcgcgcccagcttccggcgaggcgccggggcggctcggataatcccctcagttgaaccagcaagtgacagacctaatggacatggaaggtcctcaaattatttggaaagggctatagtacttgatgaaatgatgaagtcaacggtattttctgcggttgctgtttctattggttatacattacttggatgggattttacaaccgttttgggtaatccttctgctgaggctaatatccacatgaagaaggaatttggtttgaacaacggaccttctattgatggaataattttagcagtttcagttttcgggtctatggcaatcacagtcttctctggatcgctattagagtggctcggcagacgaataatattctccgatggccagtgcttcgagatgacactgataccttcaccttactagatgatgatgatcggcgcaatctttgctccttcctagatctactttgccttaatggtcatgtactaggcagagtcacctagttggtttataatatatgtaaaaattaatgacgcccgaaattccttacagtggcttagagggaaagaggttgatttcgatagatctacaggacaaattgctctgagcgcgaatgggctgaacacgaaaacgaaaacaactgttggaggacatgctgttggtgctgttcgaagtcaaagttttcttggaactagcacaaaccagatgtcgcgccacagtactttctattggcacctgtcagatccattagttgatcttcttggaagcatccatgagagtatgtcggaattaggagctgggcgaaacagctacttccctgtcttcaacagttttaatattgtggaacaagaacagacgagtgagcagagggggaatgatagtcttcaacaatctagggaggcatattctgctgaagaaggcaataatggagataatttgcaagcttctctactttcccaagtagcaagtgctgaaacaaacgatataaatacatcattcacctctgaagggagctcgtcatatttgagaagacatggtacatcaacatcagggcttgcgcaagatttaatatcttctttgcatgatcatgacattgaagaagatgacgaagaaattcatatagcagcattatctagccagcctgcacttggtgcaggactgcatccatttcgacaacaaatggttcggttgtctgaaacagctgacataaagcctaaatggagggtacttcttcagccaggagtcaggcatgccttgtgttatggaatgctgattcaagctcttcaacagactactttcaatttactgcttcccggtgatgctaagtaccattgggctcagtggggcatgtgcgatttatgcattcgtgtgctgcttggttctcgtgttcgtctacttaagagttccagagacgaagggtcttcccttggagctcatagcaagaatcagtggccttctccgatacactcctcaaattcttgaacaggtcggagtaattaggttgttttcagacattggacttgatttccatacagaatcgatcctcataagtgcccttaatgcttcgctgatgctcccctgtataactgctgcaatgatactgatagatgtctgtggaagaagggttcttctactggtcaggatccgcttgctaacattatcagataggtgccatatcttt

SEQ ID NO: 49330 - DNA, 241 bp, Oryza sativa
  Clone ID: PAT_MRT4530_51922C.1
atgccactgcttacactacagcaagcgagccgcgtgcgtatacataaactgagcgagtcgtggtcaccgtggaacagatcatcagcaagcggcgacgagaacccgatcctactggtggcgtcctggggagaagaggacatgacacgtaccccggcgggccggacacgttgcggggagaggctctactcgtggcgctcttctggaacgtgcgcgagcgcctccgtgttccatggaatctgcg

SEQ ID NO: 49331 - DNA, 468 bp, Oryza sativa
  Clone ID: PAT_MRT4530_51923C.1
ctgacgcgtgggttttgtttgcagttagtggaactgagtttggttcttcctattcagatacattgtttcctgcatgatcaatgactcaaatctcaatgaagataggcatattgctattccaggttggttatctgaatgtgcgcaggtttgcaatttgcatatcattggatgtatatggttgataacttgatatgggagtaattgggaaatctgcgataaggtatgaaccttcccttttgaagcatttctacagcactattgaagtaccacatagtttttttggccatatttatttataaccatgcaaggaataataactcttcctaattagggctaatttttttgtacaaactctatgattaacagaattgttctaatttgaaacagagctctctggcttagagcttgatcagtgagttaaactaattgtagaatacgtgagtaccgaacatgttataatttgaagca

SEQ ID NO: 49332 - DNA, 526 bp, Oryza sativa
  unsure (1)..(526): unsure at all n locations
  Clone ID: PAT_MRT4530_51924C.1
gtggccatggggcgatctgtgcgggtggtgctggactcctccgtcctcctcgacccatccggtgttacagcggaggaggaggaggtggtggtggcgctgcggcctggggcggaggcgctgctgcggcgcctgcgatactccaatctccgggtggcaatttgccatccggagggcttgccaactaatgaggttttcttgagaagactgcaaaattgtactcctttggatatatgccacttacatctccaagtgggagcaatttactaaatgagttgatgttagaatggagtggaacgaatttttgcttctatgtgacttcaggagttcatgaaggtctactatctgaacttcagaatcacaactgggaagttattgccatgggtaatgaagatgtcataaagaactctggagttatacatattagcatgcttcaagagttacttatcactttggcaacttcaataaaaaagggtaacttttcttggcatcaacttatgcattntagtggtataatgcatttaatttt

SEQ ID NO: 49333 - DNA, 657 bp, Oryza sativa
  Clone ID: PAT_MRT4530_51925C.1
atgcaggcaaaaccacttgggggttgtttggatcaaacgggaacgttcaggggtaatcgcttaagcacctcccaatttggagatatggatgatgagtataacgaacaagacaactgggacaacgacaggactgagaatcatgtggtcgaaaatacaaccaaacttaattaccattcatacatgaacagacaaacacgagccaaatggtccaaatctgaaacggacaagttttacgagggtcttcaacaatttggtagcgattttgcaatgatacagcatctcttccctgataagagccgtaatcaggtgcgacaaaaatttaaagctgaggagaaaaaacatccaatgcaagttcatgatgccataatgcatcgctcgagagataatttgtattttaaagaagtaatcaaaaagctcaacatcgaagatgtccagccagatatcaacaatacacatgaacaggagggtacatcaaatgaagaggaccctggaaataagaatataccgggtggattaattaatgaggaggaagaaaatggtttagattggtcagataaagagctggacatgcacagatctgaggtcgaagagaaggagcacgtttctacaaatgatgatgatgatgatgatcttggtgatgtttttgattggtactaa

SEQ ID NO: 49334 - DNA, 264 bp, Oryza sativa
  Clone ID: PAT_MRT4530_51926C.1
atggtggtgaccacagtagcggcggccttagactggccagatttgtcacctgcacccatgagagcggcagatccctccagtccagggatggcgggagcagcggtggcggcatacgggcttaggggtagcggcatgctcgggaagagcggatctgccacctgcgggctctggagtgatgacgatgatgacctcgtcgagggctgcaatgacggagccaacaagctgcccgctgctagctgcgacaatgacgggctgcggcggtga

SEQ ID NO: 49335 - DNA, 2922 bp, Oryza sativa
  Clone ID: PAT_MRT4530_51927C.1
atggcttgccgcctgcttctccgccgctgcctctcagccgcggccgcctcgtcggcggcggcgcggttcgccgtgaggcacgcccacggggagcttgaagtgagcggatgcagcgcccgcatccgcgatctcggccgcctcggccgcgtgggggaggccagggaggtgttcgacgcgatgccgcgccgggacatcatcgcctggaactccatgatctctgcctactgccacaacgggatgcccgacgccgcgagggacctctacgacgccatctccggcgggaacatgcgcacgggcgccatcctcctgtcgggctacggccgcctcggccgcgtgctcgaggctcgcagggtgttcgatggaatgctcgagcggaacaccgtggcgtggaacgccatgatcagctgctatgtccagaacggggatatcactatggcacgaaggctgttcgatgcaatgccgagcagagatgtctcatcatggaactcgatgcttactgggtattgccacagtctacagatggtggatgcaaggaatctgtttgagaaaatgccagagcgcaatttggtttcgtggacagtaatgatttctgggtacggtcgaatcgagaaccatgggaaggcttgggacatcttctgtaagatgcaccgtgaaggactgctaccagaccagtccaattttgcctctgcgctctcagcagttaagggtcttggaaaccttgatgttctagagagcctccgtgttcttgccctcaagacaggctttgagagggatgtggtcatcggcacagcaatactaaatgtgtattcaagggacacgagtgtgcttgacactgcaataaaattctttgagagtatgattgaaaggaatgagtacacatggtcaaccatgattgcagctttatctcatggaggccgaatagatgctgctattgctgtctatgaaagagaccctgtaaaatcaattgcttgtcggactgcacttatcacaggccttgctcaatgtggtaggattgatgatgcacggattttatttgaacagattccagaacctattgttgtgtcctggaacgccctgattactgggtacatgcagaatggaatggttaatgaggcaaaggagttgtttgataagatgccttttcggaacacaatatcttgggctgggatgattgcggggtatgcacaaaatgggagaagtgaagaagctctgggtttacttcaagagctccataggagtgggatgttgcctagcctatctagtttgactagtatcttctttgcttgttcaaatattgtggcacttgagacaggaacacaagtgcattcccttgcagtaaaggttggttgccagttcaatagctttgcatgtaatgcactcattactatgtatggcaagtgcagaaacatggagtacgcaagacaagtattcagccgaatggtaactaaggatattgtgtcatggaactctttccttgctgcacttgtgcagaatgatctgttggatgaggccagaaacacatttgacaatatgctcagtcgggacgatgtttcttggactaccataatatctgcgtatgcacatgctgagcaatccaatgaggccatgggggctttcaaaacaatgttttgtgaacatgagttacccaactcaccaattttaactatacttcttggtgtatgtgggagtctaggtgcttctaagattgggcagcaaatccacactgtagctattaaacttggaatggattcagaacttatagtagccaatgctctcatatcaatgtatttcaagtgtggctgtgcagattctcgtaggatttttgatctaatggaggagcgagatatttttacatggaataccatcattacgggttatgcacaacatgggcttggaagagaagccatcaagatgtatcaacatatggaatctgctggggtgttaccgaatgaggttacctttgtggggcttttaaatgcatgcagccacgctggtttggtagatgaaggatggaagtttttcaagtcaatgagccaagattatggactaactcctctgccggaacactatgcttgcatggttgacctgcttgggcgaacaggtgatgtgcaaggagcggaacaatttatttatgatatgcccattgagccagatacagtgatttggagtgctcttcttggggcatgcaagattcacaagaatgcagaaattggtaaaagagctgctgagaaactcttcagaattgagccatcgaatgctggcaactatgttatgttgtcaaatatatattcttccctagggatgtggggtgaagttgcagaggtacgaaaaattatgaagcaacaaggtgtgataaaagagcctggttgcagctggacacagataaaagacaaaatgcactcctttgtcactggcgataagcagcatgagcagattgaagagatagttgctaccctcgaagaactgtacactttgttaaaggctacaggctatgtgcctgacacagaatttgttctccatgacattgatgaagagcagaaggagagctcccttttgtaccacagtgagaagcttgctgttgcttattgccttcttgctacacctaagggcatgcctatacagatactgaagaaccttagaatatgtggtgactgtcatacttttatcaagtttgtatctcatgtcaccaagagacaaattgacattagggatggaaatcggttccatcattttaggaacgctgttttgattgcgcatggacttgtatgcttgtacagttgtacaccatgtcagatcagagctgtaggagatttgaacacgagattgcagagtcatatggtgcaggccaatgagtggatgaagaccccgacaaatgataagtatgtttcagaatttcctttgtcattgaagatactgagttga

SEQ ID NO: 49336 - DNA, 226 bp, Oryza sativa
  Clone ID: PAT_MRT4530_51928C.1
cgaaaccgtctatagccaactctaaacaaaagacccccccttacccacaacctagatagaccctggtgataagggggcccgatgtaagcgcttggattgtttcggccctcgctttgggtgattccctcataagaagaatacgcactatccccgcttttcgtgttgctcaaccccctaaaaagagggttgtttgtgaaagcccaaggcttccagaccattgttggtc

SEQ ID NO: 49337 - DNA, 1596 bp, Oryza sativa
  Clone ID: PAT_MRT4530_51929C.1
gggtgatcggtggcgatgggggagggcgcggcggggtcggggtacgtcacggagggatgaggtcgagaggggttcgccgtcgaggagggacggcgtgggcgccgccgaaggaggccgagctccgggcgacctactgctccttcatccgcgacgtcggcctcaggctgcagctgcctcaggtgacaatcgcgacggcaaccttgctctcgccatcgcttttatctccgacagtctcacgccaagaacgagtggcaggtaaaaaaaaaatgcagttcttcagatacggattgcgcacaatttgttttgcccacttagttgtggcactatccaatgttgaaaatcttcctctcaggttatagtgacaaccagaagtaagttcttgagaagcagaaagagctcattttggtaggggagacgctgttgctttcaacaattaggtttgatttcaacatacagcatccttacgagccactaaagctcgctctcaagaagctgggcattttccagatggaagtgaaacaagttgcggtgaatctaataaatgatgcgattcggactactttggttgtgcagtttaaacctcactacatagcagcagggtccctctaccttgctgctaagtttaataattttagacttccttctgatggaaaagtatggtggcatgagtttgatgttgctccaaagcagttacaagctgttatccaacaaatgacagagctatttatgggaagaaacccatgctccatgggtcctgccatcaggccaccgccaactccaagtctgatggagagacagcaggtgatcaggccaccaccaactccaactctgatggagagacagccgataatcaggccactgccaactccaactctgatggagaatcagcacataacacactctttgggcgctgttatgaggcatacgcactcttcaataagaagtctaagcaataactttgatagagaggcttctaggtctttgcctttgaacattccagctaatcgcaaatcaactgtttgcccagcaaggaatgaaggcaatcagtcactgcgaatgcatatgggtcatagcaatggcagtgatgcaaggtttgagaaacaatattcccggggagctctgaaagcagatcatgtttaccatgttgtcagcggacagaaggatcttcatgtgacaggaatcagggacttggttaggcagaagagaacattccatgaagttggagagcatccagctcctattgataaatctgacactaagtcctggatcaggaagcgacatggaagaaatgtgatagtttttgacactaagtcatcatcttggaagaaacagaagctgtgattttagagaagttagtcatatctatttgtaaagacccattgtctcgatctatagtttcccaccaaaacaaaggtttcttagaatgatgagatgaagtatcatcatgaaagatgatatggatcgagtaacttaatctgctggcgtacagcaattgctcataatttgccttgggaagacaacaaagtgattcagattcatatttcaatgataatttttgacgttgttaagagtaaatcgcggcggcggcaggaggtg

SEQ ID NO: 49338 - DNA, 459 bp, Oryza sativa
  Clone ID: PAT_MRT4530_5192C.1
atggcgctcggcgacggcgatggcggtggtggaggtggagacggctgcactcggcactcggtggcggcgcgggacaaggagagcggcggcggcactctgcggcggcagtggcggcggcgggagtggaggtggcggcgcgagggggcggaggcggcgctcggggacgcgcaggcggcgggagtggaggcggcggtggcgctcggcgacgtggacgggccggacctgggaggaaggggaaccgccgccgccctccccccttcttctggccagacctggggagggaggggaaccgccgccgccgccctcccccttccctccggccggatctgggagccccggtgcatcgccgtcgcccacccatgcctcgccatcgctgacctcgcgctcgccgttgcccaccggccccgcgccttgccgtcgccgccccccagaacgcccacggtcgctgagggagcttag

SEQ ID NO: 49339 - DNA, 516 bp, Oryza sativa
  Clone ID: PAT_MRT4530_51930C.1
atggaagcgcatctgcgtgtcttggtccaggtgatggctgttgatttctcaagtcagcagctgcaaacggctgctagccgtcaggatcaacgctggaagccttgctacaagaacatcaagtggatcgaaggcgatgcacttgatttgcctttcacagactgctacttcgatgctgttacggttggttatgggttacgcaatgtggttgacaaacccaaagcaatgcgggagatatttagggtcctaaaaccaggatcaagagcatctattctagattttaacaagagctcatcacttttcacaacgtcattgcagagttggatgatcgataacgttgtggttcctttagctagtggctatggactcactgaagaatacaagtacctgaaaagttcaatattacactatctaacagaaaaggagctggaggagttagctaaagaagctggcttttctgcagccaagcattatgaacttggtggaggtctcatgggagacttagttgcaactcgctga

SEQ ID NO: 49340 - DNA, 634 bp, Oryza sativa
  unsure (1)..(634): unsure at all n locations
  Clone ID: PAT_MRT4530_51931C.1
gagcccacaacttcaaaacttccctnnnnnnnnnnnnnnnnnnaggaagaaaaaaggggcaactatgatacaaaatccataacaacccccctacagccaaaaataaaatttatgcgtcagttaaaagagtacattggccatacttttcctttgggcgaccacaaacttggcagaaactaaaaaaaatggtgaactggtacatcatgaagctcaaaagatgacacaattggtcattgggattcatgtgctattatccaaaggagtgacgtagcaagagtgaggttgcaaatggagaaagtcagtaatcaaagcaaaactgaatattcattctgatagagctggaattaggtgctgcatatcttagttccactgagaatgtagcccccaaatgagctcatttgcatgcatgggtgagttctagatggaagtacctggtattcacgcagccaaggctctgttatttgcaatccaatagccattttctcaagctgtaaattgtgcatgcaagttgcaagaggctgaagatattggtgataaatagcaaatggagcagagtttgctaaaaggggcaagacatctctaaccaatgcccaagtatccaactccggagcagcaatgattagactagagaaac

SEQ ID NO: 49341 - DNA, 519 bp, Oryza sativa
  Clone ID: PAT_MRT4530_51932C.1
atggaggcggcaggtggcctccgcacgggcgaccttttcctctccctctccgtcggcctccaaccggtggcgcgcaaatccggtcggggtgagttggcggcggtggccaagggaggcagcggcgggcggccaagggtttccggcggcgacatcaccgataacacaacaccaatgacaaattggtgccggctggaaaaccggcacaacgggatccatagctcctgcccgattttcacgaggtcagggttggagatgttgctcacggcggcgatctcctggatggtgacgatgacggtgtcggtgatggccgtgtgggacggggtgctcaacggaaggccgttggcatcgaagagaggagcctcatccgaagaggtcgtggagggtggtgttctcgaagctggtgaggggctcgatgtgaagttagtggctgatgcgaacgacgcgaggaagaacaagaggaggatagccgcggaggagaatgatggcaccatgataacaatagctataggctatagatag

SEQ ID NO: 49342 - DNA, 1267 bp, Oryza sativa
  Clone ID: PAT_MRT4530_51933C.1
ggattttagtattgaactataaactccagcatccagctaatggaaatctcacacctttaatttacaaccatcctttgaaaggattgggacacatttgacacgcaaagccaaagccaaatacagctcctcatcttccatttctttgaagctcatgaatcaaatcagtacaaaccaaagaacaaacagtacaataaatactacagtactagccactaattaaccacatccaaagctacaggctacagctcgagcgccggtgagacatgaacctataaacatttgctactcgctggagcttaattcgtttagaacgtttatttgtttccaatcgaattcacatacaataatttctagtactacccagctggttaacaggctagccgagcgtgccggtgctatcgtcgtcgtcgatgccggcgaagaaggggtcgcggaggagctcggcggcggagggccggttccggggctggccgatgcagcgctcgatgaaggcgcggagctcggggtccctgatgcgcttgagcgcggcgggggggacgccccgggtgacgctgtggtagatctgcacgacgctgtcgcactcggcgtagggcatctcccgcgtcaccatctccagcacgcacatcccgtacgagtagatgtccaccgactccgtgtacgtctccgtgtacagctccggcgccatgaactccggcgtgcccaggatcgtgtgcgccacgtgggtcttgtccacgatcgccgccagcccgaggtccccgatcttgacctggccggtgttgccgttgatgaagacgttgctgcagttgaggtcgcggtggatgatgcaggggtcgtgggtgtggaggtggtcgagtccgaggaggatctggcgcgcccacttcttgagcgccttgacggagacgtggcggtggcggtcgcggtactcgcggaggctgccggaggtgcagacctcggtgatgaagttgagcacgccggcgtcgcggtcgagccagaccttgtggaagccgatgatgtgctcgtggtggagggagcggaggaggcgcacctcggcgtggaggcgctccaccatggccgggtcgcggtcggcgagcgcgcgcagccgcacgcggttccacgccacctcgatcccttcctcctggtcgaacccgcggtacaccttcttcacggagccgaggccgagcacgtcggcgtaccgcccgaaccgccccgtcgggtccacctcctcgaacgcctcctcctcctcccccgccgacgccgacaccgccat

SEQ ID NO: 49343 - DNA, 1626 bp, Oryza sativa
  Clone ID: PAT_MRT4530_51934C.1
atggccgccgcggtcgccgcctccccggcgcaatcccgcaagacggagacctacaccgacaccaagcgccgcgacgacgtccgcggcctcaacattgccgcggggcgcgccgtcgccgccgccgcgcgcacctccctcggcccacgcggcatggacaagatgatctcctccagctcctccggcggcgaccaggccgtcatcatcaccaacgacggcgccaccatcctctcccgcatgcccctcctccagccggccgcccgcatgctcgccgacctctcccgctcccaggacgccgccgccggggacggcaccaccaccgtcgtcgtcctcgccgggtccctcctccgccgcgcccagtccctcctctccgccggcgcccaccccaccgcggccgccgacgccctccacctcctcgccgcgcgcgccgtggaggtcctccacggcatggccatccccgtcgagctctccgaccgcgacgccctcgtcaagtcggcatccaccgccctcaactccaaggtcgtctcccagtactccaccctcctctccccgctcgccgtcgacgccgccctcgccgtcgtcgacccggcccacccgtatctcctcgacctccgcgacatccgcgtggtgaagaagctcggctgcacggtcgacgacaccgagctcatccgcggcctcgtcctcaacaagaaggccagccatgtcgccggagggccaactcggatcggggacgccaagatcgccgtgatccagttccaggtctcgcctcccaagacggacatcgagcacagcgtcgtcgtgtcggattacgcgcagatggatcgaatcctccgcgaggagcggaattacatccttggcatggtgaagaagatcaaggcatccggatgcaacgtcctgctcatccagaaaagcatcctgcgtgattcagtcaccgatctgtcgctccattatctcgcaaaggccaagatcatggtcgtgaaggatgtcgagagggacgagatcgagttcatcaccaagaccctcaactgcatgccaattgctagcatcgaacatctccgcgaggacaagcttggtcatgcacatctggttgaggaaatctcggttggtgatggtaacaataacaagattgtcaagatcactggcatcaagaacatgggaagaacagcaactgttcttgtccggggatccaaccagatggtgatcgacgaagctcagcgcagcctccacgacgcattctgtgtgatcaggtgcttggtgaacaagaggtttctgatcgctggtggtggtgctcctgagatcgagatgtcgatgcagctggctgcttgggcgaaggagctgagagggatggagagttactgcgtcagggagttcgccgaggcgctcgaggtcatcccttacacgttggcagagaatgcagggctcgatcccatctccactgtcaccgagctccggaatcgccatgccaagggcgagaagaacgccgggatcaacgtgaggaagggtcggatcacgaacatcctggaggagaatgtcgtgcagccactgctggtgagcacgagcgccgtcacgctggcctgcgagtgtgttaggatgatactgaagattgatgatattgtcaccgtgaggtaa

SEQ ID NO: 49344 - DNA, 1302 bp, Oryza sativa
  Clone ID: PAT_MRT4530_51935C.1
atggtgcacgaaacaaagttggatctcttgttgaagaagatggaggagaacgagcggaagagagcggaagcagaggagcggactcgtgcagatctagcggagctcaagaaggtggttgaggcgaggttgccgctagtggagaagcgtgtggaggaagtcgcttcggtggtcggatccttgagtacgaaggtcgaaaacatggagggtactctgctgaaacagggaagaatggagaagaaaccagctgatgtgaaggaagagcaattcacgccccaatcgtcgttccagattcaaggtatgcgagatcccactttgaattctgcgaataatttcaattttgagccaattgcttcaccggggtcgggtagtgcaaggacaaatttgggaagcagcttgtcaccgatgacgtgcccgcagttcaatggagataacccccagatgtggagagctaattgtgaagtttattttgatgtttatggaattccgcctaacaattgggttaagattgcaactctgaattttgtgggaaacgctgccttctggttacaatcagtgaggaatcagctgataggggtgacgtggtatgacttatgtgaaagggtgtgtgccagatttactcgagatcgacaccaagcattgattaggcaatggttgagggttcagcagactacttctgttgcagagtatgttgagaagtttgatagcatcatgcatcaactgaatgcttatgaaaattctgctcccattgaatattttgttacaaaattcattgatggcttaaaggaagaggttcgatcagttatcttggttcagaggccccaagaccttgatactgcttgttccttagctatgctgcaagaagaggctctggaaggactgaaggctggaagttacaagaagtcagaacagatgggaaattatatcaagtcagtaccgaggtctgcatcacagacaactttgttctctccttctccacagaaggtcaactcatcagcggccctagaggccactagagctaaggaagacaaggttgcatcacttaaggcatatagaaagtctaagggtctttgttttatatgtggggaccggtgggggagagatcataagtgtgctaatgcagtacaactacatgtagtacaagagcttatggaagctatgaacattgataatgaagcaagtcctgaagtggaaacacctgttgaggaagaagtgagtctgcttgctatttctcaacaagccctgaatgcacagcccaatgcaaatagattggagttagaagtggctagagtttcagtacaatag

SEQ ID NO: 49345 - DNA, 465 bp, Oryza sativa
  unsure (1)..(465): unsure at all n locations
  Clone ID: PAT_MRT4530_51936C.1
taacagacagtgatgttttctgtttgctgtcaaaattgttattgggtaaaaaggagacacccactgagccagaagatgcncaatgaaggtgaacaaacagatttgctgctcaaattcagagcacttggcagttcgcacaagtgaaagaggttgttgctggttcaggtaatcaggtcccagttttgggccgtatatgagcccctgacaagttgtcgacatcgatgagagatctttccatttcagttcttcaagcactctacccgcttgggaaacatcagtctggttcagtttgctgtcaaaactacccatatcaaaatttagtaatgccaaactttgatattattaaatttcagttttgtatgtatttggtttgtgccctcaccaaattttcaagtgtttttatgagaggaaacttctgaaaattctgaagctgggtagagtggcattagtaaaaaaaaaaaaaaa

SEQ ID NO: 49346 - DNA, 3753 bp, Oryza sativa
  Clone ID: PAT_MRT4530_51937C.1
atgctggccatcgtcatggtcgccgtcggcctcatgttcaccgcctccttctgtaaggaatgggagataatgttgataatgccgataacatggatgaacaagaggaaaagctccggaagcgcacctagcccattgttcttaggcacaaggccaaaaaggctccgatcaaaggtgtgggatgacttcaagcccatctacatcgacgggaaggtagcgagggctgagtgcatgcattgccaccaaattttaatcagcaacagcgccaatggcactagtaacctgctaaagcaccaggccaagtgcagtccccatccccagaaaaggccaatgcaacagaaacttccgtttctgctatccagccagaagagtctgacggcacccaattctgatccaacgcagaaaaagctcccattcttgccgatcagccaaaagaaatgctcaggtccagcagatgcaatgcctcaaaagaaggatcctgccttgcctaacagtatgaatgacacaaattggaagagtcaggaggttggcaagagtgggtctcctgaagaactcgcaacacctgagcagaagaatcttgccttgcctgacgtacccactaataacaatcggaaggatcagcctcatgatgaaaatctagtgcctaaacagaagtgcaatcctactgtagtgaatctgaagaatcctgaggttgatcagagtggatcaaatggactcatccagacaatggcgatgtgcgggtacctgccaatgatgatgtacaataataggtttaggaagtgtgttccttgcttaaattctatgctcccgatgccatctaacgatagcatgtttggtgactttatgcaactgtttcataacgaaaaggctaagctgaaggagaagttttctaccttgagcagtcgggtttgcttgagtgctcatgtgtggcaccatgatccactctcagcctatttgtgcctgagtgttcattacattgataatgaatgggagaggcaacagaagatcatcagatttcgtcaggtagatccttcttgtaatgcaagggaattgagtgatgttatcttgagagctattgaagattggggtcttcgtgataaggtttttagtattacactggatgatgaatttgccgatgattccgtggcttcaaatgtcaaggaccatctccagaaatggaactcacactactcaaatcagagcttgtttgtggtacgatatggaacttatttacttgatcaagttattcaagtggggctggatgaacttgacaaaagtatggagaagtcaatgaagtgttctaagttcacggagggcttcacctcttcagcagtaagaaaagcaaaccacaactatgcagagtcagcgaaggactggagcaatgcacgtcctatttgtgataccttggagagttttcaccagtatatggacacaatgcatgattttccccgtccaaggcacctatttgacaaggtggaagatactaacagtacttctgagactagaaatgaagttggtgtgaatagggatgacgatcggctgaaatattaccatcaacatcagtctgaaatttcaatttgtgagcgaccgatgactgagcttgatcagtacttgctagagccacgtctctctaaaggtgagcctgatgttcttcgatggtggaagggacataacctgacctatccaacggttgctcgtatggcacgtgatatattggcaatgccatgccgtacaaattgcaatgtagcaataagaactgcaaaatttgctaaatgtgaatcacgcagtagtcacgatattgaagagcttgtttgtcttcaggattggctcacacctgacggattcaaatatgaaaaaaatgcacaaacgacgacttgttcagacaattttgggcattatgccaagttaatagtggtgtttgttactgatggagtcctcttatggtttacaaggctaaaatatatatccctttctttgctaattcctgagagcagcgctcccccctatcttcagagactaaacccttggacggccaccggagcacctggtctagcagtgcacactggtatggatgatcaggagtgtgactgtccaagcggcgtcggcaaacaaggggataaagaactgaatggtatgaaaaatgaggttgacgatgccaatgacaaggttgaacaagaggaaagctcaggcagcgcgccaagcccattgttcttaggcacacggccgaaaaggctccagtcaaaggacactcccacagacacaaatacaaagaacctgcaggttgatcagaatgtgactgataagctcgttaggatatcgctaatgcacgggtacgttccgtcgatgaggaaccatgatgaattcagtgagtttgttgcttccttgaaccccaaggtcgagctgccatctgatgttgacctgtatttgtacttcacgaggctgtttgaggaagaaaaggccaatcttaagaagcagtttgaatcttcgaatagtcgggtctccctgagtgtttatgtttggcactatgatacacactcaccgtatttgtgcttgagtgttcattacatcgatgatcagtgggagagtaagcgaaagatcattgcattccgggctgtggattcttcttgcaatgcaaaagaattgattaaagtcatattgatagctattaaagattggggtcttcttggcaaggttttcagcattgcactggatgacacattcattgacaattcagtggcttcagatgtcaaggacatcctccaaaaatggaacttgcggcatgcagatcaaagcttatctggaaaccagagcttgtttgtggttattcaggtggggctcaacgagcttgacaagatcatggaaaaatcaaggaagttctctaaacttgacaaattcatggagaagtcgagaaagttttcttcatatccaaagggccccgctcctttagcattacagtatccaaatcatagatatgcaccatcatcggaagactgggttaaggcagagaatatttgtgagatattggatgattttcataaacaaaaggacgaaatacccaaacatcacagtccacttaaactctttgacacgatctggcatgtgaagaatgttgtgcaccgtaaacttctttaccatgatgacaaagagactacctatgtgtgggaaaagatgcaagaacaattcaaagaacaatggaaagtctgttgcttacatatctgcatgcctatgatcatagatcctaaataccgcctggaaatcatcaagtcacatattccgcttgatttggacaatgacatgatagattatattgaagaagtaaatgacatattactcaggctcttccatgaatattctggtcaggttgaagaccctaactgcacttctagttctgaaactagtggcgggcattctttgtatccagatgacaagttggtatttcattaccttggttctgaatttccacagtggtggcgaccgatgactgaacttgatcagtatttgcaagatccatgtctctcaaacgataggatcgatgttctgcgatggtggaaggaacatagtatgatatatcctacaatctctcggatagcacgtgacatattggcaataccttacggtgctgattatgaggtagcaacaaggactgcaaaactcgcacttgttgagtcagatggtagccactttgttgaagagcttgtctgtactcaggatttgctcagatcaggcggttacgcaaatagagttgtcattcggtga

SEQ ID NO: 49347 - DNA, 525 bp, Oryza sativa
  unsure (1)..(525): unsure at all n locations
  Clone ID: PAT_MRT4530_51938C.1
ggtaattaggnctttttgagnaagtctggctgancaaggaaggggangactcaacgaacggcccacggcctgaacagtgtcgctgttcggtgggcccggcggccacgaggagcagccgttggcttcttcctcactgaccgggactctcgcctcgcggacagcgatccgacgacgtcgacctgctttggcttcgcgctttccacggccacggcgccgcctgctccggccgcctccgcgaaagcgtcgttccctttcggaacttggaaccaaagcttgtgatttcaccatggcgacgtgatgggatcagagcacaaccagagtttcccaaaccgccgggactagagttaccgcagccccggcggtaaggacggtaaccgcacgaaacctgtgtaaaatttatcattaattattttttaaatttatttgaatttaagaaggttaaaaaaaaaaaaaaaaaaaaaaaaaaaaaaaaaaaaaaaaaaaaaaaaaaaaaaaaaaaaactcgagactagttctctctctctc

SEQ ID NO: 49348 - DNA, 360 bp, Oryza sativa
  Clone ID: PAT_MRT4530_51939C.1
atgcgccaatgtgttgactccgtccgcgcccctgctgagccgctcgccccttatctgggaggcgcgctcttcgaccgcctcgagtgcgcgtgccgcaaggaacttgaaccgcacatgcgctgtgaagagctagatatgttggtgttgcacgaggagctcgggccgtcccatcaggagaagctacaacaggcgaaaatggcgctggagatggatgttttcccaccttccttcctcctcctcaccttagccaaattcgagcttctagcccagggccaacaatctccaatccacttcggagcctcatcgttgagcctcgaccgtgcgatggcagcgctgacagatggaggcgaagcgatgtga

SEQ ID NO: 49349 - DNA, 163 bp, Oryza sativa
  Clone ID: PAT_MRT4530_5193C.1
ggcaggtaaaaaaaacgaaagacagccatcgaaggattcatatttccaataccctctcatattacctcactaaaaaatagcacgtatgtctatgattcaaaccgctatgctgtaaaagatgatgctatgatggggacaaaggagaagaatgcctgtggaaaac

SEQ ID NO: 49350 - DNA, 465 bp, Oryza sativa
  Clone ID: PAT_MRT4530_51940C.1
aaggcagtaactaggaaactgcttacatttgaaggcttaacgattccgaactgtcaaaacataatagcgcctgtctaaggcccaaaacgaaaagatcatgcctatctagatcctatgccttttctattgcatgttggtactcaatcagcttatgatgggcgaaaaataaagaaaaaggaaaacctccatgattgaacgactgatacgtgtaagtgattctatacctccctggaaaactgattgacacagatgaaaccggtccatgagaaacaccctccgcttgcacagtacctgtgtcactttgtacatcctctctagaaacatgacgctgatagagggccaagttaccaaacctgtatcctacatatggagtagctcgaggaatggtttcgtctgcgcctgtcgcatcaagaaatgacccggtaaatactgtgttatgttaacacaatgcatgattcagaaaat

SEQ ID NO: 49351 - DNA, 1088 bp, Oryza sativa
  Clone ID: PAT_MRT4530_51941C.1
ctgcaggaattcggcacgagggacaaattattcggctcacacttcgcccccaaatgctcgcaagcatctcccgatccctcactcgccgtcgcccaccccttccgctttccgccgccgccgccgccgcagcagcagccatgtcgtcgtccgccaccggcgtgaacgtctccgaccgtccgatttccccggacaccacccgcgtcgcctgggtcgggacgggcgtcatgggccaatccatggccggccacctcctcgccgccggctacgcgctcactgtctacaaccgcacggcctccaaggccgaggggctcgtctcccggggagccaccctcgcggaaagcccgcgcgcggccgccgccgcagccgatgtcatcttcctcatggtcggcttcccctccgacgtccgctccacctccctcgacccctccacgggtgccctcgccggcctcgccccaggcggattgctcgtcgacatgaccacttccgaccccaccctcgccgcggagatcgccgaggccgcggccgccaaaagctgcgccgccgtcgacgccccggtctccggcggcgaccgcggggcccgcagcgcgacgctctccatcttcgccggcggcgacgcggccgtggtcgcccgcctggcgcccctgttcaagctgatggggaacgcgctgtacatgggcgggccgggcgccgggcagcgcgcgaagctgggcaaccagatcgcgatcgcgtccaccatggtcgggctggtggagggcatggtgtacgcgcacaaggccgggctggacgtggcgaagtggctggaggccatctccacgggcgcggcggggtccaagtcgctggacctgtacgggaagcggatgctggagcgggacatggcggccgggttctacgtgcgccacttcgtcaaggacctcgggatctgcctgtcggagtgccaggccatggggctggcgctgccggggctcgcgctcgcgcaccagctctacgtgtcgctgctcgcgcacggcgagggcggcctcggcacgcaggcgctcatcctcgccatcgagcggctcaacaacacctgccttgacaagaaaccggagtga

SEQ ID NO: 49352 - DNA, 345 bp, Oryza sativa
  Clone ID: PAT_MRT4530_51942C.1
gaaaagcagttctcctgtaaggaatttcattgatctgaatgatgatgctctaaatgaagacaattcagagtcatctgtggtgtcacatgaatgccatgtggtctccttacagaacaaccatggtaaacgcaaatttgtcattgatttagaagtgcctgcttgtgaagaaggtgtggcctgggattttaatcaggaatgttctccttctggcaaacttgatgtaactcaggaggcttgtgatgcacactttacatgcactaaaattgcagcagagagcattattgcttttgccatgcatgtgccaacaattgcagagacgcctgatgatatgctgcagtggttttg

SEQ ID NO: 49353 - DNA, 405 bp, Oryza sativa
  Clone ID: PAT_MRT4530_51943C.1
atggacgcgggccgatgggcgaccggcgacgggaggcggccgtggcggcggcggcggctagcgagccatgagcggacgaggggcccggagggcgggaagccgggaagggaggcggcccgcggccaggcggcggtccagcgccggcgcgcccgccggggaggtggcaagacgggccagggcgccagccgccaggcggcggtcctgcgccgacgcgccgacaggaggcggctaggtgacggtccagctccagtgccgctgcgcgctcgcgccgacggggaggtggtgacccgcgagccagcgaggccgcgagggcgcaaggacgctggtccgctggacgcagcttgcagcagcagcagccagcagccagtgattgaatatttgaagttgaaattgccaaattggtaa

SEQ ID NO: 49354 - DNA, 555 bp, Oryza sativa
  Clone ID: PAT_MRT4530_51944C.1
atgatacaggtgttgcttccaaacagtacatgcgatgtagggtatttacaacattatagcttacactacaatgttgctctagtcagtacccatcacagttggaatgctcctccaggtgggattggagggcctcttgttgatttggacgggaatgttttgggcatgaacttctatgataagaagataggaaccccttacttgcgatggcatgtgattacagctctgctgaagttgacttcggtagttaccctagaggggccactcccatgctacgcaggagtatatctacctggctggaatggaggtgacaatgccaacctaaacagggtttttgatcagactgcatgtacttcaaaatattgtttcgtgcttccccaatctccacctgttgcgcctgactggacaatcgaaacaggtaacagtgtcacgctaaacaggtggcccgtgcccctgccatattggcgtcaacctgacgatatggaggaggaagaacccccacgtggctttgaggacatgtacacatacgtggacggagtcagattgtgtaacttttag

SEQ ID NO: 49355 - DNA, 825 bp, Oryza sativa
  Clone ID: PAT_MRT4530_51945C.1
atggccgtggagaacggggcggcgctgttcggcgaggaggagctgcgggacgtgagcggggtgcgggtgggcgacaggttcgtggaggtgacgtgcggctgcaccagcgcgcgctacggcgacgccgtcggccgcctccgcctcttcgcctccggcgagctccaggtctcctgcgactgcacccccggctgcgaccaagataagctgagcccggcggcgttcgagaagcactccgggagggagacggcggggaggtggcagaacacggtgtgggtgatggtcaagggggacaaggtggcgctctccaagacctgcctgctcaggtactaccacaagaagctcaagtcgtcgtcggccaacggcggcggccgccggccgccgtgccaccgcgacgagttcgtccggtgcgccggctgcggcaaggagaggcggttccggctcaggaccaaggaggagtgccgcctctaccacgacgccatggcgcgccatgactggacctgcaaggacatgccccccgctggcaggtgcagggtgagagtgagctgcgaggaggaggaggagagggcgagcaggaaggcgtcgagggggtgcacgcgggcggcgacgtgcaaggggtgcgtgagaacttgggtacttggtcgtcaatggcatagcatgaacgtggaagctgtcgcgtcggcattatgtacgttcacatgcgccgcagatagagatggctttgacgtgaggaccgtggtgtgcagtgtgcagacagtgcagacgtatagaggctctctacaagatatccatgtcagcatattttcctacatggaagagattaaatga

SEQ ID NO: 49356 - DNA, 1730 bp, Oryza sativa
  Clone ID: PAT_MRT4530_51946C.1
gtagtagaaaggagagaagagaggagtattaggggggaggggatggatcggcaatagatgtacgcggatcgacggtcgaaagagtttatcgacgatgtgcattattttctgagggtggccgaaactaacaagcataagggttttacccgttgtccatgcactaaatgcaaaaaccagaaggagtattctacatcaagaactattcattttcccttgtttgagacgggcttcatgccgagctataatgtttggacctcacacggagagctaggggttcaagcagaagaagatgaagtagaggacgagaacattctggactgggctcattatggtggatttgaaggaaacacaacggacgaggtggacggggctgttgaagataacgacgctgcaaatgatcttggtcagatgttgcgggacgtcaaggaaaactgcgaaagtgaaaaggaggtcaagaaattggaacgtatgctagcggaccacaagacgccgttgtacccaggttgcgaacaggggcacaaaaatttgggtaccactcttgaattcttgcaatggaagacaagaaatggtttcaggtttcagtgacaaggcatttggcgagttattgaaactagtaaagaatattctcctggaggaaaataagttgccaaaacaacacacgaagctaagaagatagtctgccacgaagctaagaagatagtctgccctctaggactggaggttcagaagatacacgcatgtccgaacgattgtatcctctatcgtggtgaggagtacgagaacctagaagcatgcccggtctgtaatgcactacgatacaagattagacgagatgatccaggtgaagttgacggacaaccttcaaagaagagagttcctgctaaggtattgcgatacttcccattggtaccgaggttaaaacggatgtacttgtctacaaaacttgcaacacatatgcgatggcacaaggagaagttagtagatgatggatataagagacatcctgctaattcaaaagaatggaaggacttcgatgggaaattttcttcatttgcattggacgcacggaacatccgacttggtcttgctagtgatggatttaacccatttggaaatatgagttcttcatatagcatctggactgtagttcttgttatatataacttgccaccttggatgtgcatgaaagatccatatatggtgatgtctatgataattcttggcccaaaagcacctggtaatgacattgatgtatacttgtagccatatgcttccacaaagcagacttttaatttacgtgctgctttgctttggacaattaatgattttccagcatttgaaaacttgtcaggcattagcacaaaaggtaaatatgcatgtccttcatgccacactgaaacctgctaccacagacttgttaatgggcacaaatattgttatatgggacatcgccgcttcttgccgaggcgacatgtctggaggaacaatgatgcttcttttgatggccaaaaggaaaagcgaagtgctccaaaaccattgtcagaagatgatattatttctcagtatgagaaattcgaacaggtttttgggaaatcagggaagaaaaggaaacactctagtacattgtatggtacttgaaggaaaaagagtactttttttttccaactcccatattggagcaagctgactataaaacacactggtaccttgccgttcttaacgccaagcaa

SEQ ID NO: 49357 - DNA, 839 bp, Oryza sativa
  unsure (1)..(839): unsure at all n locations
  Clone ID: PAT_MRT4530_51947C.1
cggacgcggcagctgagctgagctagctatagccatcacagcaagtgtcaggtggaaactagcttagatagagatggctccggccttcgtctccgacgagcgcgccgtcgcggtgtcggtggagaggctgtggaaggtctgcttggacgtgcactccctgcccaaggtctgcgccggattcatcgacgccgtcgaggtcgaggggaatggcgggccgggcaccatccacatcatgaagcttaaccctgccgcggacgcagggagcgtatacaagaccaaaatagtggtgtgcgacagcgcaactcacgtgctaaaggttgaggtgttggaggttaagagcagggtgggcaacctcaagtcgcactcgacggagacgaagctcgaggccaccggcgacgccacctgcgtggccaagctcacggtggagtacgagctcgaagacggcgcctcgctgtcgccggagcaggagaagatgatcgtcgacggctacttcagcatgctccagatgatcgaggcgtacctcgtcgctcaccctgctgagtacgcctaaaaatattgtggtcatgttactgtggcgtggtcgcatgtgagaagaattattctgtgtttaaggttatgtaataatttcagtattgtgtttttgcttcatgagtgaataaaatacacataagaatgtgttgtgtttgatggttaatatatatggaagattgtggatcagtgtaaaagtagattagaaatataataatatttgtgagtttatttgattacggaggttatctgtactttttataaagttataacactaaaaaaaaaaaaaaaaaaaaaaaaaaaaanaanaa

SEQ ID NO: 49358 - DNA, 456 bp, Oryza sativa
  Clone ID: PAT_MRT4530_51948C.1
acgggtacaaaaattagagtttggggagatgcgtggttaggatcacgccctttcagataacaatacccttctcgatagaaacactcaactgtagcagaggttatgagtacaataccacttaatatctcatttaggcgagcgattattcgacctaaattgttttgttgcaataatttaatttggcaattggccatggttaccctatcaaacgaagaaggccttcgtatggtcgttacataaaagtggcagtatttttgtttcatcgacgtaaacggaggcaatgaactaaggttccgcaatttaaagttttcatttggttccttcgtagaaaaataattctaacaaaagataatcttgctaaaaggaatgaaggagaaacaaacaatgttgatttttttaatatacaagagacaattcaacacttgtttcttgattgccatattgctcattttacat

SEQ ID NO: 49359 - DNA, 315 bp, Oryza sativa
  Clone ID: PAT_MRT4530_51949C.1
gcgcgtcgagtgttcacctcgtgttgtaaactgtttatatagtcatcatcatcatgtatttccagtgtgatttgagtaattaattgacagatttgcttcaagaaaaaaaaaaaaaaaaaaaaaaaaaaaaaaaaaaaaaaaaaaaaaaaaaaaaaaaaaaaaaaaaaaaaattaaaaacaaaaaaaataaaaaaaaaacaaaaaaaaaaaaataaaatactccaaaaaagtaaagggggtgacaccttctccttccaaaccaaaggcggggggtaacccccacattatttgatgcccttacggttaggatttccc

SEQ ID NO: 49360 - DNA, 610 bp, Oryza sativa
  Clone ID: PAT_MRT4530_5194C.1
ttctgaactcccccccatgtatttgcttctacctttggggagtatttgtcatctgctcagtccagtgggaatctcagtctccagtaagtttggtcatgattgagagcactatagccttatatctcaccccagctgcttgacttcagccagatagaaacaattacactttttttgtggtatctgtgtaacatactgctactcccctctctgtttttgtctggtagctttgctgcccactttttagatctatcttgcttgtcatgttttctctactttagttctttaacaacaccttctgcaatgcgttccgttttggcaattatatgatatatatgttttctgcttattaatcttgaaccaggttgaaattaatatattgatgttgtatcatcaccagagcggtctttcttagtctgtcaatatctttcttagagctaaacagttatattcttttttggtgtctacttagcaacatgccatctcttcagttattgcactgacagagcatggacacaaccttttgtctttgagaaggtgtgctgttttaacattatatttctaaattttagtaagccgatcatttagttcttaaaaaaaaaaaaaaaaaaaa

SEQ ID NO: 49361 - DNA, 514 bp, Oryza sativa
  Clone ID: PAT_MRT4530_51950C.1
aactagtggatccccgggctgcaggattcggcacgaggtctctctcttccctctcaactcctctctctctctctctctccttcgtcgtctcctcctccccctctgctcctccccctcgtggcgcctccggcttgccgcgcgcgcccgcccgaccgcgcccaccggcgcgagccgagggtacacgaggagttcggcctttccggtttccggttgtgttgtgaggagtggcggcggcggcggcgaggcggcgacgaggcgacgccattgcggggtgtggcgcacaccacacccccctcatcgccgctggaccggcatctctgcgtgtgattgtgtccgagaagaaagaggaagtcgtcgtgcgtgcgtcccctcggcgtcgactgctgtattgatgcgatggagcagcgtgaggatcataccaaatcatcagaacctgcattcattccatccaaaaggactcatcagatgagaaacatatgggcatggggaggtccttcttcaactacagtcaacg

SEQ ID NO: 49362 - DNA, 342 bp, Oryza sativa
  unsure (1)..(342): unsure at all n locations
  Clone ID: PAT_MRT4530_51951C.1
ccaaatgacctcttgtctagctagtctgatgatttnttcancttcagattgatggtggtctcgcgtcnaggctggttggtgccgtggatgaaagacgcagcnncatgtcctgcaggaggccaagtcttgcgccatgaatgctgcatctggancgcccccggtgacaccgctgacccaagcngcgacngtgaccgcgctcgtcgtctcnctcgagacnccncctncggggggtgatttactnttaaaggcatgggtcnttcntcctcgttcccccccggggcccccatcnttnttcntnccttggtggggcggccgcggcccccngcnnggaacnnccccncc

SEQ ID NO: 49363 - DNA, 1675 bp, Oryza sativa
  Clone ID: PAT_MRT4530_51952C.1
tccccgggctgcaggaattcggcacgaggcaaaccggtctgaggacggcggctgcggcggcggcggcggcggagcgggagacctcacctctgcgcccctcgtcgcaccaccaccaccgagtcatcccgcgtccgcggcgtcggcgaggcgcatcgaggcggaggtcgccggcgcgaggcaggctcctctccccctccaacccccaacccaaaccctgcacgacctgccgcgccgccgccaaacccgagggccatccggaggaggagcaattcggtgtggctctggtggatttcatcgatttctcgacgctaccgcataaatccggctcggcattgattctgggtttggagcatctcgaatttgttgggcctccactggatttaggtttatgaagctctaggagtataggttttcattgcttgtttgccagtttgttagagcaaggatgggaatggactactacaatatcctcaaggtgaaccgcaatgcgacattagaggacctcaagaagtcataccggcggctcgcgaggacgtggcaccccgacaagaatccaactggcggcgcggaggctgaggccaagttcaagcagataactgaggcctatgaggcaaggacatgcccatgcatcttaacgggatctaggagaagatgggccaatgattttacggtactaagtgatccagaaaaacgtgcaatctatgaccgatatggtgaagaaggcttaaagggaatgcctccacctggttcacagagccggacttccgcagctgctggctcaagtggtcctagtaatttccggtacaatccgagcgaccctgatgatttctttgctgagttcatggcaagcaacaaaccttactccttcgaccaagaacgaacgcggttccaaccacgatcacagtggacagcagggaacactagaggtgaagcatcttctgcttcacataaggaaagcagtaccagtacaagtcaactagaaaaaccaccagctattgagaaaaccttactgtgcactcttgaggaattgtataatggaacaaaaaggaagatgaagatcactaggaatgttgcaaatactgatggctgggcgagcggcgataggcacggatgggcggcgagtggtgacgggagcgactggaatgacggtggtgaagctggcctcaccggtgtccgcattacctccgggggacgagttgtgctattgacactctttgttaagtttctgtttgcactaaaggtagaaatcgagacagaggtcttacctgttgaagtgttgcccggctggaaaaagggaacaaagataacatttcccaacaaaggcgataggctatctggtcagttgccacaagacctcaccttcgtcatcgatctgaagccccacgatgtgtacctcctggaagggaacaatcttgtagcaacccaggtgatccctctcgtggatgctcttgctgggacaaccatacatctgaagacccttgacggcaggaatcttcccatcagggtggaggaagtcgtgcgtcctgggcatgagattgtgctcgcgaacgaagggtggccgatcaggaaggaaccggggaagaaggggaacctgaagatcaagtttgatgtgaccttcccgacgaggctgtcatcttcacagcgtgcagccatcaggcagatcatgggtggttag

SEQ ID NO: 49364 - DNA, 3222 bp, Oryza sativa
  Clone ID: PAT_MRT4530_51953C.1
tttttttttttttttttttttcaaggcggctttttgtttttgtttttatttcacgaaacattatttatcttatcttttcgagaaataacgggtttaattccataatatttatgacacccagagcaatgtaggcagttctagcattttaggatagtagaatgtacctactcccagaagtagcataccacaaacccaagcgtaccaacgattatcagagtacagccataagcagtggcaccaagttcatgaatttgccaagttattcatgtataatcatgagagtaacgcgaggcccaattaataaaagttccaaaaggccaccagcctaagcagatgcaccaccacggcggcactcgttcagcatatccaggtagaattggcacttgctgatgtcacttccatagttgttgatgcagtcttggaaggccttggaatggatgctgcatgagtcagatggagtggcgttggccattggggtggcagaggcagcagcctcggagacaacagtctcatgctgaatggtacggggacccattacagcatcaacagccctatgtgccatggcactaccagtaccaaaagccatgccttgagcaatagtggaaccaattcctcccaggatagagccacctccgttctgggcaggagctggaggaggagcctgccttgctggctgcggagggttcctcacgggagcagcacgtggtgcagggcgagaccttgctgagctgcggcgagccatggcggtcggcggcggaggagaagacgaaaccctagatggcggcgcggcgaggaggggagcgagcgaatgaagagggcagcaacgggtcgggaggttcccggccggtttggcatcaatccaagagtaaatcatattgcaatcccaatattttaagaaaacacaaataggaactgaaatccagatccacacaatgctgaagtaactgaactgccgtttaacaaagataaagacagacttccccacaggttcaagttccaaaacacaccaagtacatactacatcacttgcagtctcagatataagatgccaaccaagttaagaaacgacgccgtcgctcagggtgagagcagctagctgatcagttggggtatttgcctgctgctgctgagcattacggagaacttccatagcctcagcgaccttggccttaagagcatcaggtgactcaatgagatggagaacttcagtctggtccatctccaaaagcatgccagtgaccttcgctgcctgatcatgctccagctgatcaacaagcgggtataaactttcaccaagcatcagtctttgctgatctgggggtgaattggccagtgcagaggccaatgctccaattggaacctgcggtggtgcaccagcatcactgagaggcattcttcccatctcatatggggatggcactaaacctccaacaccacggaatgcattgtctggcatgccacgaccagaagcataacggtaaccaccacgactaccccttggaagcatttgctggtggcccattggcattggttgctgaattccaccagtgcctgcacgccttccagctggacgttgtggttgttgaccttgctggaccataggcatgacaaaatttggaattggtccaacactaggcctcataccaggaatgagatgttgctggaagccaaatccaggctgagggttaacaaaagctggaggtggctggccataaaacagctgttggcctacaccagggacaccagggggatacatgggcatacgaggagcaactgaaggaggcatcaccataggacgcatttgtgagaactgtgcctgaagccttgcccttctttcttccttgcgttgtgcaagtgctacatagagaggtttactgccaatcatcttaccattcatagccacaagagctcgtgaagcatcttcagcagatttaaatgcaacaaagccagatcctttactaacaccattcaaatctcgcatgaccttacaagaggtaatagtaccaaaatcagcaaaaatttcttttaatttctcatcgtcatcgatgctatcatccaagtttttcaaatacaagttagttccctggttcttatctgctgcctctttgatgttcttctcaaatttttctttcaattccatctccctctctgacttcttctgtgctctacaaacataccattccttgtcatcaaacttcttgccattcaaatcttcaacagctcgagcagcatcatctggattttcaaagttaacaaatccaaagcatctagatttcccatcaccttcacgcattacaacgacactagttatgggtccaaatttaccaaaaatttcctttaaattatcttcagttgttgattccgataggttctttacatacacattgttaaatttgggattgcctgatacattttccctctcctgtttacgaacaaaaggccctacatacacctttttgtcattcaaaagcatcccattgagcttactgatagcattctgggcagcttcttccagctcaaactgaacaaaaccatatcccttcgactctccagacatttccgtcgcgactttacacgaaagaatattcccaaatacagaaaatgtgtcatagagagctttgttatctattgacttgtcaagattcttaataaatatgtttgctgctccacttttacgtgagctggggtcacggttagaatacattatcctgataggcttcccgttaataggagtgaagttcagcatttccaatgcccttgcagcatcggcgggactgctgaagttgacataggcgtaacccagcgacagcctggtattgacgtcccggcaaacgcgcaccgataccaccgatccgacctggctgaagacgtcgaacagctgcgcgtcctgcacgctcacgtcgaggtcccccacgtacagcgacgtcgcctggaaggtcgccgcagcggcggcagcagagcccgcagccacgaccccgttggcctgcggcggcgcgccaccaccctccgccgccggcaccgcctgaacctgcgccgccatcaccggggagggggataggtggatccgatcgaaggatagggttccggcgatattttttgggattttcgggggtaattttgcggattttttttttggttttttagggtttgggtaagatgggttgggaggaagacaagggtttcgctcccaactgcggccggacgcgtgggcggacgcgtggg

SEQ ID NO: 49365 - DNA, 399 bp, Oryza sativa
  Clone ID: PAT_MRT4530_51954C.1
gacactatagaatactcaagcttgcatgcctgcaggtcgaaaactaataccctctatccgatgccctcctgatacttcaagaagccacccctagctgccgagttccttacgacagctcgtcatgaccatacaaccggggctaaatacggaggagtaccctccccaggaaattaacttaggactatatacacgcgcagaggaatagacgtactgagctgtcaccatcagcggcctacctctcatccacagcacgcctaaactaccagatactactttaataacatcgtcatgacatagagtaattgcataagcaaatattatacctgtacctatgcatatcctagataagttagcagtataatcagtataacatgaacataaaataaagttggcattcat

SEQ ID NO: 49366 - DNA, 1463 bp, Oryza sativa
  Clone ID: PAT_MRT4530_51955C.1
acccgtccgcatccatcaagttggtcatcgagctcgagctgaatctaaacctttgcaacaatggcggcgcgtgttgttgtggcgttcgcggttgcgtccgccatgttcgtggccgtctccggccagaagttcaacgccatcttcagcttcggcgactccatgtccgacaccggcaacctctgcgtgaacggcccccccgccggcctgacgctcacccagcctccctacggtcgagaccttcttcggccgcgccacctgccgctgctccgacggccgcctcgtcgtcgacttcctcgcggagaagttcgggctgccgttgctgccgccgtcgaagaggggcggctccgacttccggcgaggcgcgaacatggcgatcatcggcgccaccaccatggactccggcttcttccagtcgctcggcatcggcgacaagatctggaacaatggccccctcaacacccagatccagtggttccagcagctcatgccctccatctgcggctcatcttgcaagacgtacctgtccaagtcgctgttcgtgctcggcgagttcgggggcaacgactacaacgcgcagctgttcggcgggtacacgccggagcaggcggcggggcagagcggcaccatcgtggacgggatcgggaagggggtggagcagctgatcgggctgggcgccatgtacgtcgtcgtccccggcgtgctccccgtcggctgcttccccatctacctcacgctgtacggcacctccaacgccggcgactacgaccagtacggctgcctcacccgcttcaacaccctctcctcccgccataactccctcctccaggccaaggtctcctccctccagagcaagtacccctgggctcgcatcatgtacgccgacttctactcccacgtctacgacatggtcaaatccccctccaactacgggtttagcacgaatttgagggcgtgctgcggggcgggaggagggaagtacaactaccagaacggcgcgaggtgcggcatgtcgggagcctacgcgtgctccaacccgtcgtcgtcgttgagctgggacggcatccatctcacggaggcggcgtacaagcagatcgccgacgggtgggtcaacgggccctactgccacccgccgatcatgccctagatcatcgccggcggcggcgacggcggccggaggatggccggctagctgctgctgatttgatttgtttagcagaagaagagaagaaaaatggatagcaagaggaagaagaagacatcttgcgatcgactgggaaatgaataagatggtgattagttgattttcgttgtgggtggttaatttgtttttgttttaggtaatgcacatttgtgtagtatgtatgagattgggaggcaatttaattatgtgttgcaattaattaattaaatcttagtaaaaaaaaaaaaaaaaaaaaaaaaaaaaaaaaaaaaaaaaaaaaaaa

SEQ ID NO: 49367 - DNA, 159 bp, Oryza sativa
  Clone ID: PAT_MRT4530_51956C.1
agaattacagagagtattaatcaagtcgattacatcataaatcaccacaagcaggggccccaaccacacacacacatgttccagccacacccatcagcagcctttctccagtggcccacacacacgtgttgtcatcacagtgccactgcccacagtgcc

SEQ ID NO: 49368 - DNA, 224 bp, Oryza sativa
  Clone ID: PAT_MRT4530_51957C.1
aaaacgccctgggaggctcccagaggaagttcagggcgccccacagtaaaccacgagtatgtctcaatctaggaaaccttgtcattggggtgcacacaaatcaaaccgtcggtcgcaaaagggtttccccgtaaatttgtgggaccacacaagaggtatgtgtgctctgttttcaccgttgccctcgcggaactgagagaatagtgaaagtcgtggagttgcac

SEQ ID NO: 49369 - DNA, 326 bp, Oryza sativa
  Clone ID: PAT_MRT4530_51958C.1
gaaaaaaaaaaaaaaaaaaaaaaaaaaaaaagaaaaggaaaaaaaacggggggggaccctagaaaacccaagctgaactacgcaggcatgcaacgttatagctattttgatagggaaacataaattgaagtaactggggcgaaatttacaacctggggaaaaggaaaacccggtcagaacccaacaaaatagactagcaggaaatataaatttaaaaagctggggtaataaataagagacccaaaccaatcaaccttccaaacagtaactgcaccctgaatagagaataaaacgcgccctgaagcggcaaaaaaaaatcggccaac

SEQ ID NO: 49370 - DNA, 763 bp, Oryza sativa
  unsure (1)..(763): unsure at all n locations
  Clone ID: PAT_MRT4530_51959C.1
atccaccccaaggaagcatgaccccgccgctcccgcgctccacacggangtgacgcgccacaccaggctcccacgcgctcggcccacaccgcacccgcgagnccggaaagcacagccacccccccgacacaaccgnccggcgcacgcggagggcacgcgaggcgcgcagccacacgacacgcgcacgcgcgcgccaagccacacggggccngcnccccccgcgccgggccgccggccgcccgcgcgacgcccggccgcgccgcccgccgcgcgggccgccgccgggcggcgccccggcggcccgcggccgcccgccccccgcgcccnccgcccccgcgccccccgccgcgggcgccccgcgcggcgggcgccgccgcgcgnccccgcggcggcgccgcccccgccggcgcccccggcgcccgccgcggcccgggccgcgccgccgccccgcccccgcgggcccccgcggngggggggcgggccgcggccccgccccccgccgccgccggcggccccgcggcgncngccgcccgccccccgcccgccgcccccccccgccggcccccccgcccgccccgccgcgcccccccccgccccccgccccgccccccggcccgccgggcgggcggcggcggcccggcgtgggccggcgggatggaggccggtcgccggcggcctcgccctcccctcccccagatccggccggaggggaagcggcgagatgggtggctggccggcggcgggatgggaggccggcaggtga

SEQ ID NO: 49371 - DNA, 523 bp, Oryza sativa
  Clone ID: PAT_MRT4530_5195C.1
atggggaaagatgccacgcctgcaggcaccgatccggtagagctggcgcgatccacgcgttcgttcgtgctcggacgccaagacgctcacgctagttcgacgccaacaacgcagtgggcttatagaggacccgctactgcgccgagaccatattcccgaagctggactacagggccgaccctgcggcgtagacggagattgccaaggacgatcaaggcgtgagctgaaagatccatcacatctaccgaggtacgcagtgccaggatatgctcaccacctgtgtggagtacgatcgttaaccagaggaagctcgcggggcggtactatgatcgtgattgtgcgcaccagacacggggagctctgctgcagcaatacggtggacgaagcgaatggggtgcatgattatgtagtgcatgatggcgagcaacgcgccgagctatgcatacagcggtttctaggagctattaacggacgaggagaggaagctgccgaagggccatgatggcagtaggaccatgaaggg

SEQ ID NO: 49372 - DNA, 768 bp, Oryza sativa
  Clone ID: PAT_MRT4530_51960C.1
atgggcgaggcggagctgagcctggcggcggtgcgcgacgcgctggtgcgggaggaggactccatcgtcttcgccctcatcgagcgcgccaggcgcccgcgcaacgcgccggcatacgcggccgccgccgccgccggcggccgatccctcgccgagttcttcgtccgggaagccgaggttctgcacgccaaggccggacaataccaaaagccagaagatgttccattctttccccaagatctcccttcacctctatttcctaccaaagattacccaaaggttttgcactcttttgcatcatcagtcagtgtgaatgatgcaatatggaagatgtatttcaacgagttgcttccactattcactgtggatggagatgatggtaactatgcagaaacagttgcattagattttgcatgtctgaaggccctgtcaagaagaattcatattggtaaatatgttgctgaggtgaagttcaaagatgcttcccaagattatagtccactaatccgtgcaaaggataccaaggctctgatgaatctgctaacattcaaggcggttgaagagaaggtgaaaaggagagtagagaagaaggccaggatatttggtcagaatgtcactttggaggacaatgctgacaagcaagaaggcaatgcaggtgacagtgagtgcaaagttaatcctgaagtgctatctaagctatatgatctgtgggtaatgcctttgacgaaggatgttgaagttgagtatcttctccgccgtcttgactga

SEQ ID NO: 49373 - DNA, 2343 bp, Oryza sativa
  Clone ID: PAT_MRT4530_51961C.1
atgggcacgtcaacatctcaagttctaaatcatgtcagagtaactcttgaaggttttgggctttttcagcaggatcccagtttagaagagtctgatggagaggacattggtgttccagaagttggcatggtgtttaataaccacatggaggtcaaccgattctaccgaaggtatgctcgccgtgttggctttggggtgtctgttaggaggtcctcattttcacaagagggcacctgcttatatctggagctcatgtgctgcaaaggagggcggccacgttatgagccaaagttcaggaaacgggcctcttcaaccactaactgtccagccaagatcagagtaaagctatggggagataaattgttgcatgtagagttggcaatccttgatcataatcatcctgttagcccagcaatggcaaggtttttgaactcctataagcagctatctggccctgcaaagaggcgattacgtatgggtggccctggagctatgccagtggaagaaccaagcaagatgcctgttgataagttgggtgcacttgaggagcttttgtttggagagagcaagcaccatagttttgttgagaggggccgcttgaagctccaacctggagattcagaagcccttcggcttttctttactcgtatgcaagccaaaaatgcaaacttctttaatgtcattgacttggatgatgaaggctgtgtcagaaatgtcttctgggcagatgcacggtcaagatccatgtatgagttctataacgatgttgtcacacttgacacatcgtatgtggtcggtaaatatgatatgcctcttgcaacttttattggggtgaatcatcatggccaatctgttttattgggttgtggcctgctttcagatgaaacagcagaaacctattcatggctatttaaggcttggatagcatgcatgtctggtaatcttccaaaggctatcatcactggccactgcaggggcatccagagtgcggttgctgaggttattcctggagtccatcatagaatatgcctatttcatataatgaggaaggcgacagagcgattaggtggtctgtcggagtacgcagctatcagcaaggctttccaaaaagctgtatatgattctttaaccatagatgagtttgaaggaaattggaatgctctgattacatacaatgggcttcagggtaatgactggctaagatcaatttatgagtgccgatactcatgggttcctgtttttcttaaagatacattttgggcaggaatgtctgctacacaaagaaatgaaaatatcattcctttctttgatggatatgtagatttgaaaaccacattgaagcactttcttgggaagtatgagatggccttgcaaagcaaatatgaaaaggaggcccaagcagattttgagacattccataagcagtgcccacctgtgtcaaaattctatatggaagagcaactgtccaaggaatggattttccttgaagatggtaaaaggactatgagcaagatctttacagtgacaaataacacagataaaaatgatttaacttgtatctgtggaggtttccagtttaatggaatattgtgtaggcatagtctctcagtcctcaagtttcaacaggttcgtgaaattcctccacactatgttcttgataggtggaaaaaggatttcagacagttgcatgtgatggggcgtccttcaagtgatgttgttccaaacaatcgtgtggatcgatatgattatttgtcaatgagatgtctgcagctagttgattcagcagtcctatcagataaatatcgtcttgctttgagattggtgagggagatggagaagtttatgttaaacagcaacacgcatgatgatacacaaccaaggatcaagtctcgcattcctaaagcaaataaaccaaatacagtggttggtcaaaatctggtaaacgttggcacttacaatggaaatgataggcccaaagcaacaacagaggcttcttcattaacacagggattggatgtccagaagggaggagcagaaaagggcatagttcctgctggttacattggactgccagctaatgttcagcaattcgtaggcagtcaaacagcgattcgcccaagcattgtgtatatggttccgagtggtgttgacccacaggcatttggaaatggtgttctgatgcctgttgtgtaccagcagatgttccaggtaccccagcagccaaatggaaccatgccagatacttcagcaaatggaaaaaggaagcggcctcgtgcccagaagccaacagaggcatctgaacagtcaaatggaaccccggcaacaggacccacatctgggtag

SEQ ID NO: 49374 - DNA, 369 bp, Oryza sativa
  Clone ID: PAT_MRT4530_51962C.1
atgagaaagtgtggtggtgcgaatggcatcaatgatgggaagcaggagacgatttcaaagaggagattgttggggagggcagatttggtcctgaccaccattagcagaggtgttgtcagtggcagcggtgcgccgctgaccaatggtggggaggacggagtttgtgggcaagggaaaggagggagaacatggtggtttgcatggacacaatttagcagcgggcacaatgtggggcagggattttgtgacatgatccttagggccctatatcctctacgtgctattgaagggagaaatgttgaattgggtttgatatgggctagctgcggtgagagaattaaacggcaaatcacttcaccgttcaattaa

SEQ ID NO: 49375 - DNA, 141 bp, Oryza sativa
  Clone ID: PAT_MRT4530_51963C.1
atgcccctcctctgccttaaggtcagcctcgggcccggctctgtcctgggccccgggctcaccctagcccttgaaggcagatcgggcctcgttgggcccaccacgcaccacgtgccttgggtgctcaccggcgacgcctag

SEQ ID NO: 49376 - DNA, 5698 bp, Oryza sativa
  Clone ID: PAT_MRT4530_51964C.1
ttttttttttttttttagtccatcaaaaaatcatttacatattgaccatggaaacgacagcgagatttcagaacttgtatatcatggcagagccacaaaaacattatcggctaatgttgctggaatcaactaaagtcaaatgaggtgaaggctatttttcaaccctggacttcactccaggatgatccaaatgaagaatggcgcttgggcttggccgtgctcaatctctgcagcacaaaggcttcagatcacagccaagatggatttgatgtactttgttagtgctagcatccgtttgaagttctctaggcaactcttcacttcctctgcatatttacaaagacctgttctgagttctgactaacatgagcacactggttcaatctacccaaatgtgggtcctgttgccggggttccatttgactgttcagatgcctctgtggcttctgggcacgaggccgcttcctttttccattgtgcgtgaagtatctggcatggttccatctggctgcgtggggtacttggaacatcttgcgtggtacccaaccaggcatcagaacaccatttccaaatgcctgtgggtcaacaccactcggaaccatatacacaatgcttgggcgaatcgctgtttgactgcctacgaattgctgaacattagctggcagtccaatgtaaccagcaggaactatgcccttttctgctcctcccttctggacatccaatccctgtgttaatgaagaagcctgcatctctgttgttgctttgggcctatcatttccattgtaagtgccaacgtttaccagattttgaccaaccactgtatttggtttatttgctttaggaatgcgagacttgatccttggttgtgtatcatcatgcgtgttgctgtttaacctaaacttctccatctccctcaccaatctcaaagcaagacgatatttatctgataggactgctgaatcaactagctgcagacatctcattgacaaataatcatatcgatccacacgattgtttggaacaacatcacttgaaggacgccccatcacatgcaactgtctgaaatcctttttccacctatcaagaacatagtgtggaggaatttcacgaacctgttgaaacttgaggactgagagactatgcctacacaatattccattaaactggaaacctccacagatacaagttaaatcatttttatctgtgttatttgtcactgtaaagatcttgctcatagtccttttaccatcttcaaggaaaatccattccttgacatcgaatgtggatatgaggccatcaacattaatgaaagatacatggcagtacattattgcttcaatttcatcttggaatttcttgaagatgttatgggtgtataccttggacagttgctcttccatatagaattttgacacaggtgggcgctgcttatggaatgtctcaaaatctgcttgggcctccttttcatatttgctctgcaaggccatctcatacttcccaagaaagtgcttcaatgtggttttcaaatctacatatccatcaaagaaaggaatgatattttcatttctttgtgtagcagacattcctgcccaaaatgtatctttaagaaaaacaggaacccatgagtatcggcactcataaattgatcttagccagtcattaccctgaagcccattgtatgtaatcagagcattccaatttccttcaaactcatctatggttaaagaatcatatacagctttttggaaagccttgctgatagctgcgtactccgacagaccacctaatcgctctgtcgccttcctcattatatgaaataggcatattctatgatggactccaggaataacctcagcaaccgcactctggatgcccctgcagtggccagtgatgatagcctttggaagattaccatacatgcatgctatccaagccttaaatagccatgaataggtttctgctgtttcatctgaaagcaggccacaacccaataaaacagattggccatgatgattcaccccaataaaagttgcaagaggcatatcatatttaccgaccacatacgatgtgtcaagtgtgacaacatcgttatagaactcatacatggatcttgaccgtgcatctacccagaagacatttctgacacagccttcatcatccaagtcaatgacattaaagaagtttgcatttttggcttgcatacgagtaaagaaaagccgaagggcttctgaatctccaggttggaacttcaagcggcccctctcaacaaaactatggtgcttgctctctccaaacaaaagctcctcaagtgcacccaacttatcaacaggcatcttgcttggttcttccactggcatagctccagggccacccatacgtaatcgcctctttgcagggccagatagctgcttataggagttcaaaaaccttgccattgctgggctaacaggatgattatgatcaaggattgccaactctacatgcaacaatttatctccccatagctttactctgatcttggctggacagttagtggttgaagaggcccgtttcctgaactttggctcataacgtggccgccctcctttgcagcacatgagctccagatataagcaggtgccctcttgtgaaaatgaggacctcctaacagacaccccaaagccaacacggcgagcataccttcggtagaatcggttgacctccgtgtggttattgaacaccatgccaacttctggaacaccaatatcctctccatcagactcttctaaaccagaagagtcttttctgcttgtctcagtaacttcagagctacaaggtacctaccctcggatatgaaccctagattaagcacctgacgagactgtgtaaacaagatatcatgacgctcgattatgccatcaggtagcacatcaggtagcatttcatcatttttgcaaagcgcatcagcatgcaatttcttatagtctcttttccagcgatcaagaacaaaccttattggaatctcaaacatctcctgcaacttaaacacagataatatatgtctacataggattccagtgaattgaaagaaaccacattcacattcacaattaacaagctcttgcttgcaaaagtaaacctcataattccttccctccttctcctttccatcttccatgtatgagcattctttcaccacaaaggtgacaaattgtccatcaactttagttggcataccatcacaatacatcgttgctttcaactcgtcctgagatttcttgaacatgttgattgtgtattctttggccagctgctcttccatgtaaaactttgttacagtcaaaggagtcctatgggaggattcttcatcagcttgcaactctttcttgtatttgttctccaatatgatctcatatttactgaaaaattgcttcagggaagttttggggtacacaaacccatcatagtatgaaacaatagactctccacgctgtgaaactgacatccctgcccagaattggcctttgagataggcgggtgcccatagctgccgatgctcatatagggaactaaggcattcattttctccaagtccatgctccagaataatcttcttccaatcagcttcaaactctgaggctttcagtgacccataggttactttcttcagtgctttcttaattgttttgaattctgcatgtgctttcaagttctctgctacatctttcataatacgatacagacaaaggcggtgtttaacttgggggagaacatctctcactgcatctaaaatagcattgtaatgctcagtgattattgcatctgggtagcagcccttcatgcatgcaaaaaatgccctaaataaccacacataactgtcaacacctagatctgaaagtaatccagtaccaaacaaaacaggctgaccatgattattcaccccagtaaagaagacaagtggcagatcatatttttcggtcaagtatgaagtgtcaaagtaaataacatcacgaccatagtaatcatgtgctgcctgtgacctagcatcactccagaacaagttccttaggcgcccttgtttgtccaaatctactaagtagaaaaaatttggattcttgttctgcatgctcccaaaaaacttgtggatgtactcatcatctccttccccaaatttaagccttcctatctcagtaaagctcccttgctctttgtcacctatgggaacattcctacgcccttttgatcttgaagcagtttcctcattcttggcatctgtcaatttcttataacagttcatatgtgacaccgaggattggttcggtggatggttgtgatcaagcttagcgtcatcaatgtgaagccatctatcttgccttagcttcaacgaaatcctagctggacaatttatcttcgttgattctctagacagatagcatgcgtttgccctccctcttccagctcgactgcatccaagcaccaacctccggcacacccctgacttcaagtaggacgacttcagaatgattgctgaaaagccagaatccgcggcatattgcttatagtacttcagcgcgtcatcataagttttgaatctcaatccgacccggggcgcattctcatccaccttgccactcccaccgtcttcctgctcactatcattgtcatcgacgaggatcacctctttgccttcgtgcaacgtcaactccgccacgggattacctcccaaatcctgggattcctcagcacccttcagcaatgcaccattctctggcagctccgagctcttgccatccaaacgagcggccacgtccacgattggcaactccgccggcaacccctctaccatattcctcttcactccactagaatttgcagtgcgcggtggcgaaacttctttcgtggaaacacgagcagctacaatccaccaggcatcatggaatgatggaaatccagaaggaattgtacgggacacctccgaattcggcgcgagctgggatggattcaggtgggaggaggccgcggcacgggcggcgtcgcccacccccaaaagacctgctcgccccggccgtgcgcgcgtggagaggccaggcggccggactggggaggcggcggcggaggctagggcggggcgcggcgcggccgtggccggggtctggaaggaaggggaggaggccgtagacgacgccgtgcctgcggtcttctccgccgtcggcgcgctcgaggagacggcggcgccggctttcgctgcgtagattggagacagagtagaatcgagactcgagaagtcgagggagtagagtaggaagggaggaataatagatgaaggggaaagaggggcatatttgtaattcaccactttctcggctctttttgagaattctatagtacctttgtagcagcctgcttcttcgtcccagtcaccgacatggacgcggctgaagtcaatcttagcccattcttccttgatcagagcctggagcttggcccgcttggcgagcaggtaggcggcgctattcttgtcagcttcacggcagacctcggcgtgggacttgttgagctcgccgtcggagtactccttcgccgcgaggcgctcgtcggccggcgagagatgcttcacctcctccggggtggggcacgtctcctccatcttgagagccatgctggcgtcgatgagcggcaccttctgcccagcgaacgcgctgccgccctcagccgccat

SEQ ID NO: 49377 - DNA, 443 bp, Oryza sativa
  Clone ID: PAT_MRT4530_51965C.1
atggactgatcaccaataccttggttggaataaaaaataaccttgacaaaccaatacaaactgcagcccccccagatccaaatgctcctctatggaacatgctcaaaatgtcctagaacctgatgataagatgagactgggactacacctttgcaagccagaattccaagctcatcgtggttttcttataagcatgggtcaagaaaaccttgagcgttgggtctacaagttctgatccggtgatgatccaggtttctagtgagttacaagtgcatattggttgcaaaagctattcgtggttgattagggtctgatttttgttgcacccttttggttatgcaattgctgcactatgtgtgtttaaacaattgctaaatattaatttgggtactatagtgtttcatgctatgacatgctaaaaaaaaaaaaaaaaaaaaaaaaaa

SEQ ID NO: 49378 - DNA, 291 bp, Oryza sativa
  Clone ID: PAT_MRT4530_51966C.1
tcgatcgataaagcacgtgcttgaggtgattcgatcgctggtgtagtcacatgcatggatagaacagactctagggtgattggctctactgtattcgacaaacttgaggctgcatgggcgaaggctatgctttctcttcctgcaagcacggcgtacagtgatcggcagcggatttgcagagtactgactacactggacgtgagcataatgatcagtaccatatggatcaggctggaaacgtgagaacaagaactaatcgttcaggctgtgcgcaaggagggatatcaagcg

SEQ ID NO: 49379 - DNA, 273 bp, Oryza sativa
  Clone ID: PAT_MRT4530_51967C.1
atgaagaaaaataaggtccagttcttccccaaaccggcagtcctccttcctaccgagctgatggtggtgctctacgtcaccattttcaggttgattggctacaaatcttgggaatggttggcaattgaggtgaaggtggagaggggttgtgttgctcgatgtgttcactggttgaaggtgattgttgtgcccatatctatctcacctacttccaccttctcttacttattaccaggaggtgttaggaatgctgcccatacttctccctgttga

SEQ ID NO: 49380 - DNA, 324 bp, Oryza sativa
  Clone ID: PAT_MRT4530_51968C.1
tgtcatccagtgcgtaggtgaggctcatcgcgggggatggtttaggaggatgcactgatccaccggagaagccgagggacatttgcaggaatgtcatgcggaaactgactactggggagacttcactggtagagcgaagtggaacggaatggatcgtagcgctgacggactaatttgaggcagactgcggggagactctggtgatctagatggatctggagaacatctcttagtgtgataagtgtggagtatttgttgaggaattaaggacaccatccacaatgagggttgtgtgcactcattgacccgggctaatgaccatgc

SEQ ID NO: 49381 - DNA, 1959 bp, Oryza sativa
  Clone ID: PAT_MRT4530_51969C.1
atgaggaccgctattgtgaaccattcaattcaaatgttgtacagcatgatgttccgacttctgagtacaactgttttccaacagttaggtgatgacaaatcacctcatgcagaagatgatgaggaacacaaggctgaacctttgcttcagtggagtacctcacgagaaaacgaattacccctaaaagtggatcctagtaattgcaagcattgcactcctagctattgcctgctaccaaagaattgtgtgactctccagtcaagctaccaaactgaacttggaaggtctattttaaatgattctttggtttctgttacatctggacgtgaggattgctacaagttcagaactaaaaatcaatatgaagaaaacatgtttaagtgtgaagatgacttgtttgagagtgacatgctattgcagaggtttagagcaactgctgactttattgaggatcttcaatatcggtttggcagcaatgtgaaaattcaagaacacctaactcctctacataagaggtgcattgaacagctatatgatgattctggcattgacatgcttgatgctttgtcagaatctgagaacaccagttctgctcttgctgttatactttctcgtctaaatcagaagataggagatttctccgaggcacgattatccttgaataaaatgtgcccagatactgttgccaataattactacagatcacttgatcattgtagtccctccttcaaacaactagacatggaaaggatgagcccaaaagctttgctggcagaaggcccgcaaatcagtcggatcaaatctcatactgatattcacattcatgaggacgtaggcgttatcattaactatgcatatagtagaagttgttctactgaagataagccaatgatgaattggacaaagttagtaaaggcatttgtttctgtgaagtttcaatggccagacttgaaggatacagtttctcgcagaaacgtttgtgaacattgtgggatgagcagagattttctcaataatattcctgttgctgtgcttactaatgagtttgttttttcttcaaaggaagtggaaagtctaagagccaagtccaatgagtctacttcttcgcttgatcattttgacgcggaggttgaggagggtgagttcataccagatgtagaaaatatacagttgcgtgttcgatgtttgcctaccaataattctatgcatagtacctatggacattggagtggatctgaagagcataaatcatcaagagatgactccaacaatgaggttggaagttcagaatattttggaagaacatctaaagaatgtgatgcaaacagaggaatatcttgttgcactctggctgtgctctgccggcttctccaggttatgtacgagagactactagtagctaagaatctttcagaaggagcaagcacccatgattcatatgcacatttcaaggagaaactctgcagcctgattgatgggtctactgacaattggaactttgagcagcactgcttgaaatttcttgggcccaactcctacgtactatttactttggataagcttatcgatcgtgttatcaagcagatttgcaagatatatccaagccgtgaagacagctctgtccttcagcggcaagagaggtcaagaagaacatttaacattttgaaagacccagctttgccggcaagaagaacaaactcgtccaaagagctgttgcatcatcaaaatgcaagaggcacatcaattgagttgccgaagcaaggtcgtgaggaagcaaaaggaggttgtgagtcccatggtgacactggaaaaatgaaacagaaccattttcagagaagccctgcagaaggctatagatttgcaaggatctttcaacacaaaatgtgcacggcacaacagctatttgaggatatctggagggaagcagaaattttcatggagaagcaggacacagcataa

SEQ ID NO: 49382 - DNA, 450 bp, Oryza sativa
  Clone ID: PAT_MRT4530_5196C.1
atgactactcattgttttgtcaacgtctacttcatcttcaccaacatgtcaaacgctggagacaatagcaacactggagacaaggagaaggaggttccatcaacaccaacggaggcaatactgcctcaaactccagcggagggccattctcggggcgactccaaggtgcacagaagacggacccggcgacgggcaggagcatgggcgaagctcgtggagcccggccgcaaggggagcaacgacgaagctcgtggtgcagccgcaaggggagctgcggcgactctgaccacgggctgtggatttggtcccgagagtcgttggcgactgacgatggggagaggacagatccggcggtgggcgggaggtgtgcgggcggtgaaggagagtggcggtcacggcagatccagcggcggctgccatgacggcgacagccgggctcaaaggttctag

SEQ ID NO: 49383 - DNA, 311 bp, Oryza sativa
  unsure (1)..(311): unsure at all n locations
  Clone ID: PAT_MRT4530_51970C.1
catcttcacgcaacgaaacagcagcagcngctcaagctaaagctaaagctaaaantactacgttgtttctttccgtcttcgtcggcgggatctgaaacagccccncggaagcaacgccggcgnaagcccaatnaacccccnacgaanatnctcaagggaanttccacgccctccaccccatcnnaggccnttctccacctcctttccggcgggggggggcccccccttcncctgcgttcgccgggccacgccccgcggggggcctnntcttggcttaccaannaggatgtttctgntgggntgggaataac

SEQ ID NO: 49384 - DNA, 889 bp, Oryza sativa
  Clone ID: PAT_MRT4530_51971C.1
ctagccaactctgggggtttcagcgacggtggcgctgccaaagatgcggacgcggttggggcgcagatcccgggtcatcggcgcccccaccggcagcaccacgatgtcggcgtcgggcttgtccttgagaatcgccgccttcgcctcctccatcgtcatccccaccacctccggccacgacctcttcgccgccgccgaacgcacaccaccgcccattctcgccggttgaagttcaggaaatacgccgcgcttgcccgctgctgcggtgaagggagcaacgcctgtgagcggccggttgttagcctcgacgggttccttggcctcaccaacgcctccacctgtcacaccgcctccgccttgtgatgtggtgaagggaggtgagcctccgggtggctgtgaagagagcagcgcccacgagccgccagttgatagccacaatggattccttgggctcaccaacacctccaccgacggcaacgccaccaacaggttcatggctgtggagctggacgcagtgaagcaacgggtatgcgtcacggcgtgctactcaccgccgtcgttgttgccattgtcggaccctggggccaatgacccgccctcgaggaacgccacgaagtcgctcagcgaccgacgaaatattatgtcggtggaaagatttacaaaaatagaccctgctgcccttcatttgggcggcaagctgacgtggcacgcggcactagttctttttgcatctgagccccttgcttcccttgcgaattttgcacgtggccccgattcacagccccaaaacgaccgtcatgtgtccatgtgccacgtcaacttgccgcccaaatggagggcggcagggtctatttttgtaaatcttttcgccgatataatatttctataa

SEQ ID NO: 49385 - DNA, 198 bp, Oryza sativa
  Clone ID: PAT_MRT4530_51972C.1
cccttggagcaaacggccaacccgcggcgagaggcggtttgcggcctgggcgctcgtacgctgtctagacgccggaccccctggactcggtcacccaactgcagccaccggtctcaggtggctcaaccgcggaggtaccggaaatacacacgacctgggatacgcaagacccaacctgcgcgctagaggcccgaccct

SEQ ID NO: 49386 - DNA, 611 bp, Oryza sativa
  unsure (1)..(611): unsure at all n locations
  Clone ID: PAT_MRT4530_51973C.1
taaagaagggaggatccttgaagaccactacccgagggatgtggttggccactttgttgaaggtgttgcctgtgagattataagaaggcacgcccagagtttggcacgcactggttttctccgaaccacaccaccacgttcctgttctccacatggagtttgcccggatgtagtttcacacccacgctggattggatgaagtatattacccagcacgagtgcttggctatcctgtttcttccgctgatcacgctggggaggaaccacggacttattgcccttaactcctatggttttatggtancctcttagtttgccacgtgcttgtaccacgttagtttcccttggccgcgagaaactgagccactagggatatgagttgatgtgtgagagcggaaatgctgtgtgcccacactggcatgtgcttgcgccatggctgcactgcgtgatgttgagtgactatgattagtgaaccattgggttgatgtcgaggattatgcttgtggtgcattgaccatgaaccaatgcttaattgctatggtaccctttgactgagttgctatgatgtcatcgtcgtcagaatttcccctgaaaaaaaaaaaaaaaaaaaa

SEQ ID NO: 49387 - DNA, 776 bp, Oryza sativa
  unsure (1)..(776): unsure at all n locations
  Clone ID: PAT_MRT4530_51974C.1
cagcnagagggntaaaatatcgatcagtagatcactttttttttttttttttttatcagaagctgatttcctacaaaaaaaatataaggcagccgttcactccatcggaaacccttcaaaatgggcagtatacaaaccacggaacaccctcaaggataatccgtaagctaaagttaccggctccacagcttgaatgaaaataatcgaaaaacaggtataagcaggcaatataggcacaaatagcaaatcgaaaagggcgcgtgaatacgaaatttttttcaattgagctttcttcatggcatttgaaggggcaagatctttctgaaattggaatccaggaaacgcaaactctacaaaatcagctcgaattgagaatacgctgtatacgctcagaaaagtaccatttaatgattgaggacagcaacgtactgaatcgataggaaattctcatccagcaagaaatcatggatctgtacagaaagatgactaattgcataggatatacccttaattatctgatgacagcttatctctctcctcagctctatgagacaggggcagaaaatgaagcgaatcgagattcaacaactccatacaactttgcggttatcgaggaagccaacactcctgctcgtcttgaactcaatcccccaagccaacaaaatgatgctgagcaaaccacacctcctaaactagggctccaattgcatccatgattacctgacttgtgcactctgcagatactttgtagtcctcgtgccgattcctgcagcccg

SEQ ID NO: 49388 - DNA, 366 bp, Oryza sativa
  Clone ID: PAT_MRT4530_51975C.1
acgccggcaacacggggggcacaccggcgggacacaggagcggaagcggcaccgcgaagccgaagccgtaactgaggatggcgagcgccggcaccgtcttggggaggcgccccctgacgccaacggagatccagaaactcgccggcaactggacggccctgaggaggacggaaaaccactcgccggagtagatgtaaatgacgccgaccacgaacagctccacgaggatcccggaaagcctccaccaccgaaaactagagcccaagaaactagacgtagacgaaagaaagggaggaggggctggcgaacctaaggcggaaagacttcccctgctcgacaaagaacacgacaggggcgcaccggctc

SEQ ID NO: 49389 - DNA, 509 bp, Oryza sativa
  Clone ID: PAT_MRT4530_51976C.1
tctttccaaaccggggaaatcagctccaatactgccaattgcctccgacatgccccagtttgggaccaattgcacatcttcggacgcttgaccagtcagttgcaaacacgaaggagaaggtaaagggatgggcatcgtccctacgatactctcggtcagtgacacataccgcttatacctatcctccacccctcgatgatcaatccaacgtttccgaaacttgcagtgatagacggcgaaatacaagcgctcgatcagatggagctccagaggcgtgcagagttgcgcaagcagaagtcattcactatggcggaagctgagcatcatacaccgagagcagactcggtaccgcactgaacggcaggctcttttaaactcacgacaagcgtgtttgacatcatgaaaactgtacgtgaataaggcgtattttatttatcatggtagctactgtgtcatgcagctactgttgaattacacaaatggcggtaaaagacaaaaaaaaaaaaaaa

SEQ ID NO: 49390 - DNA, 301 bp, Oryza sativa
  Clone ID: PAT_MRT4530_51977C.1
aaagctggaacgcctgcaggtgccggtaccggaccgcagggcccggccagacccacgttatcgtttgacaaagaccacagagagagaacgacacattgaagcgaaaaaggaagagctagagacagtggctgaagcagcgatcgcgttgcaacatgaagtaatggaacaacttctccggaggaatccatattaagggatgaagattgctgacgggcactcccaagcgcgaacgaaggcaaggattggcgcaagacaatgggagagggcgaggacgatagaaagaagccaacacagaacaaag

SEQ ID NO: 49391 - DNA, 482 bp, Oryza sativa
  unsure (1)..(482): unsure at all n locations
  Clone ID: PAT_MRT4530_51978C.1
tggagctccaccgcggtggcggccgctctagaactagtggatcctccgggctgctggaataatgcacgacagtactttaacctactccgagaggaagcgttgattctacaagtggtcatcgggcttgtttgaaaagccagtggctgcgaagctacacgtgtgccggattatgactgatctcctctaagtcagaatccaagctagtaagcggcgcctgagcccgacgcccgtcccgacctacgttaggggcgcaagcccccaagggcccgtgccaccgaacaagccggcccggccgacgcgcacgtggccggccgcctcgaggcgctaataggctcaagaaggtgctgcgcgataacatccatgggataaagaaacctgctatccgtaggctggagaggcgggctggtgtgaaacgcatctccggtctgatctacnaagagacccctgctgtgctcaagatcttcctttngggggggcccagn

SEQ ID NO: 49392 - DNA, 1250 bp, Oryza sativa
  Clone ID: PAT_MRT4530_51979C.1
agactgcccacctatcttcttgctagccttctcgaatcttgggtgcaagattccgtccccctcccttccttctctcgggccacccctctcccctcccctcggcccagctccctcctctcctcctcccgcctgggcctgccccggcccaagccgagccgcagccctcccgcgcacgcgcgccgcacgcgcgttgaccgcgcacctcccacgtgggtcccgcccgtcaggcgtccccgacctccagccgccggcctccttcctctctctcctgtgaaccctagcgccgttcctccctccaatccgatcgcccggaacagccgcgccatccccggccaccttccatggccgccggccgccattcccgcctccgttccgccctctcccgtggccagctccctccccgcgcctataaaatggaaccccctccttccgttctctcgttttagcctcctcccgcgtctccccgtggccacaccacccctccccgccgtcgtccgctctctctcgtgccgccggccgcctccagccgcctctccctcctctgtcgtgcgtcggtaggccgtgccgtcgccatcctcggcgtcgcagccacctcctctcgaactcgccgcacgacttcctgcaaccccacaacgccgcgcgcgcggaggtcggtgtcggcaagctctcctgggacggcaccctcgccgcgtacgcgcggaggtacggcgagaagaggtcccacgactgcacgctcaagcactcccgtgggccgtatggggagaacatctaccggggcagcgccgggcggcggcggacggggtaccgcggacgcggtggcgcggtgggtccgcgagagcgcctactacgactgcgggagcaacacctgcgtgccggggcggcgttgcgggcactacacgcaggtcacgtgggcacggaccacgagggctcgggtgcgccgccgtgacgtgcgatagcggcgccacgttcgtggtgtgtagctacgatccaccgggcaacaccaacgggagaggtccgtaccctggatgtggggattatgattcgttgtccgtcgactcgccactcatcgtcgagccatctcgcgaaccccaccacccagagcaatgccccccctccctagatctacatgccactagtgggaggccgatggagagggagaggaagagggagaccggatcagcgccccgtcacctctggggagcccaccagttgcctcccttggccactgccgccaccaccaacataatcgg

SEQ ID NO: 49393 - DNA, 199 bp, Oryza sativa
  Clone ID: PAT_MRT4530_5197C.1
cggacgcgtgggcggacgcgtgggcgaggccgcggcggccacggtggtgtgctgcgcggacgatggcggcgctatccgcgcactgcgattctttgattcacacgcgcagtagcatcaccagatagcaccagtacttcaatgttgacgcattcttcattcacaggatacgctactgctgagcttataactatacaaattt

SEQ ID NO: 49394 - DNA, 216 bp, Oryza sativa
  Clone ID: PAT_MRT4530_51980C.1
atggagcctcgggtgcgattcaagaacgctactcccagaaacttgatcacatttcccagctcagtgatatgtcgtacccggtcaggagagaacgggcagcacggggaggtggcacgagatgagacggagcggggtggccgccagggccacgacaatgcaccggtggcggagcaggtgcagaggctttcatcacgcggggttgagggcagtagctga

SEQ ID NO: 49395 - DNA, 330 bp, Oryza sativa
  Clone ID: PAT_MRT4530_51981C.1
agccaccaagcatgcttccagggagctgaccaaactgcacacacgccaagtatatgcaaggaaagcttgttttcagtttcaaagtggcaaaacaaacaaacataaagaacccgcataaaggcttgccagttaaaggatgatggagtgctccaaagaaaggacagaggcaccaagtgtcccaaccatttgagggggaaagagctgactccttggaaacagttagctgggattttgtgaccacttaaactgtgttgggaatggacccatgcactaatgcaccttgggtggaaatgtgtggggccccatcttggttactctactttaaccaaa

SEQ ID NO: 49396 - DNA, 2230 bp, Oryza sativa
  Clone ID: PAT_MRT4530_51982C.1
atgtccgaggaggacgacgaccagccgccgccgctgccggcgcagaagcggccgcgcgcgtcgccgccgccggaccaggtgctcgacaacgtcctcgagacggtgctccagttcctcgactcggcgcgggaccggtgcgcggcgtcgctggtgtgccgctcgtggagccgggccgagtccgccacccgcgcctccgtcgccgtccgcaacctcctcgccgcgtccccggcgcgcgtcgcgcgacgcttcccggccgcgcggcgcgtcctcctcaagggccgcccgcgcttcgccgacttcaacctcctcccgccaggctgggccggcgccgacttccgcccctgggcagccgccgtcgccgccgccgcgttccccgcgctcgcctccctcttcctcaagcgcatcaccgtcaccgacgacgacctggacctcgtctcccgctccctccccgcctccttccgcgacctctcgctcctcctctgcgacggcttctcctccgctggcctcgcatccatcgcttcccattgcagggggctgcgagtgctcgatgtggttgactgcgagatgaacgacgacgacgacgaggtggtggactgggtggcggcgttcccgccggggacgaccgacctcgaatcgctctccttcgagtgctacgtccggccggtgtccttcgccgcgctcgaggcgctcgtggcgcgctcgccgcgcctcacccgcctgggcgtcaacgagcacgtgtcgctggggcagctgcgccggctcatggcgaacacgcctcgcctgacgcacctcggcaccggagcgttccggccgggggacggccccgaggatgtggggctcgacatcgagcagatggcgtccgcgttcgcgtccgctggccggacgaacacgctggtttcgctgtctggcttccgcgagttcgagccggagtacctgcccaccattgccgccgtgtccggcaacctaacgaacctcgacttcagctattgcccggtcactcccgatcaattcctgcccttcatcgggcaatgccacaaccttgagagactatatgtgcttgattcggtgcgtgacgaggggctccaggccacggcgaggacttgcaagaagctccaggttctccatgtgcttccattgaacgcacttgaggatgccgatgagctggtgtcggaggtcgggcttactgccattgctgagggctgccgagggctccgttcgacgctttacttctgccagagtatgaccaacgctgcggtgatcgccatttctcaaaattgcgtggaccttaaggtattccggttatgcataatgggacgtcaccagcctgaccatgtgactggggagcccatggatgaagggtttggtgccattgttaggaactgcagcaagcttactaggctctccacatctggacacctgactgatcgagctttcgagtacattggcaagtatgccaagtcgctccggacgctctctgttgcgttcgctggagacagcaatctggcgttgcaacacatcctccaggggtgctcgaagctggagaagctggagataagggattgcccatttggggatgctggcctcctctccggaatgcaccatttctataacatgcggttcctctggatgtcaggttgcaaccttacgctgcaaggttgcaaggaggtcgcacggaggctaccaagattggtggtggagctgataaatagccagcctgagaacgaaaggaccgacagcgtggacatcttatacatgtatcggtcgcttgaagggccaagagaggatgtaccaccattcgtgaagatcctataagctgcttctgcagagtggcacttgatacgctgaatgcggcctaagcaacaagggaaggtaagatagctggagtcaggcgtatgatcattttttgtatgcttgaagttggaaggagttctaaagccatctatcagagctgcaaatggttaaattgttgtactactagtagggggggcatcggtatatgcaaaattttctaccgcaagatcataagtgcatcagagcaggcttcttcgagggggcttcatcccctcagttttgtttgctgctctgatggccttctgtttgaggggggcaatctatctatgccggcacaaccaccatggttcctctaatttttttcccaactgaagcttgtcatcagattaaattcattaacacatttcctgtttcttgcctttataaaaaaaaaaaaaaa

SEQ ID NO: 49397 - DNA, 376 bp, Oryza sativa
  Clone ID: PAT_MRT4530_51983C.1
gctagatcaactttttaaagaatgcccgcgtagctgaaaacatatattttcaaatcatatattttttattgtacgtttttttaccatatttgtgaagattccactgggtccttttcctcaaagacatggactcatacagagtccatgtctatgattcaatggataaagaggagtctacttttgacaaaatttttgaagtgatagacaaggcttaggctcggttccgtgctttggacaaagggtcttggaaagaaaaacttggccggaggtttaatattccatgtgcaaagtaggaccaggggaataacttgtgcggctacaacgtttgcgagtatagccacacattgaactcgggcaacgacgaggagcgtgagat

SEQ ID NO: 49398 - DNA, 199 bp, Oryza sativa
  Clone ID: PAT_MRT4530_51984C.1
ggggggtaaaagccggggtttttttttttaaaaaccctggccccccttgggggatgggcccggagtcccttatgagatccccctggtgattgatgatccctccaagcttggtgggggtcccttcaacattgtttgacacacccccaccctggcaacgaaaaagacggtttttttttggcgtcaaaacaaaagggaaggc

SEQ ID NO: 49399 - DNA, 390 bp, Oryza sativa
  Clone ID: PAT_MRT4530_51985C.1
gaaaaactgaatcttgtgaattgtgatagttttgtgatgcaaagaatagccgttgtcatttgtcaagctttttagcattaaaagggcgctgaatatatgactagtcgtcatcagttttcccaataaacagcttgcctccatcttgtcataatcgaagtcacatgtttcatggttggccatggtagcacttgatcatatgaatatagaataggctacgttatgcaataggcaaagttaggttatgaatttgcgaaacttcttttggttttaaaacacaaaccttgttttttggtctcagagtagaacaagcctttacggtagttgccagttaaaaaggatttgatgtcccttcattttgcttcagtaattcttgtgagatcctatttattc

SEQ ID NO: 49400 - DNA, 478 bp, Oryza sativa
  Clone ID: PAT_MRT4530_51986C.1
ggctgaaaaagaggattatattccatactgcttggggaacaagtcatgtatacatcagctgttcagttaatgctccacatttcaccctcttattgtgtacatacatacatgctataaaaagttgtaattagttttcacaacaacaacaaaaaaaaaaagcttttgtgcaccacagtgatcctcctctcctccattatattttacacacgttgctgcatctcctcagttatattttcccacgttgctgctttggtagcttgttatttgccaacctttgtatgtgactactttatatgtgacaaaaaaaaaatccatcccattacatgttcttgcatttgtaaagatagaaaaaaaatgttccagttgacacataggctaggtgtattgaatggtccaatattcatttcatatgtagaatcattattgtgatattctcacaaaataccattgatctaaagcgccacgatatgcacaggaa

SEQ ID NO: 49401 - DNA, 714 bp, Oryza sativa
  Clone ID: PAT_MRT4530_51987C.1
atggagggttgcactaggaacaacagcagctctctagcaagggagtcgtgcccccttggttgcgacgatggcgttgacgatgacgacagcatcaactctcttgcaggggagccatgtccccttggttgcgacggcagcgctgatgacaacggcaacatcagcagcagctctccagaaggggcgtcatctcccatcggttgtgacaacgactctttaacaggggtgtcgtctcccatcggttgcgacgacgttgaggatggtggtcaggccgccgctggggacgatgggattagcctccttggcgaggtcaactgggcagtgcacatcgggacctattttcctcatcatcgggccggtgcaaggaatggaggcactggggacggtggtcggggctgcgttggggatggcggtcacgtcgacaatggcgagggagacggctctccggatggagtaggggcggccattggttacagcggcacgggggttagtggggcagccggggggaagtgggaggggtccgggagacatatcaaaggctcctccggcgagggcacgcatgcgatggcgtgcggagatgcggcatggtggcggacggatatacgacgtggcggcactgggaatgtggtgctcaaagaggagaaattggggcgtgctgacttcatgctaagcccgcggcttgtagcgcaggccgggatgatgtgcgatgatcgatga

SEQ ID NO: 49402 - DNA, 716 bp, Oryza sativa
  Clone ID: PAT_MRT4530_51988C.1
aaaaaaaacagagagagaaagatcaagagcatataatctatatatacacacaggcacgtcgcgagtaaatttcacaaaactacatagactacgtggatccgatactccgatcccgacccggccatgagaaggcaaggaggcaactgcgaggtcaactcctccatcgccctcctccaggagaggttcaggaacctgcagaaggtgagggagatgagggaggggagggagcagctgctgcagacgccgccgtcgccgacggcgacggcgacggcgatagccggtgcaactaccactggtgctgctgcgtcatcgtccggcggcgagcagccgaggtggttctcgcacccggagctggtccggccgtcgtcgaggccggcggcagcacagcgagccaccgccgacgacgatgctgccgccgttcgtcagccgccggcggtgagcgttggcagggcggcagccatggttttgcagagctcggggtgtaggagcgatgtggaggtggacacctcgcttcacttgtgaagaagtgaaaattaagtagatagctagtagtagctagatgcttatttagctcggccgaattaatcattttttcccccctttgatccttctagttcttgtttttctcttgatcgatcacatcttgtatgcgctcgtggatgctgtcgaatttgaattaatttggttctagttcacgttgattagatgtttagatg

SEQ ID NO: 49403 - DNA, 348 bp, Oryza sativa
  Clone ID: PAT_MRT4530_51989C.1
aaaccaggaaaacaaacgggggcgccccaaaattcccttggggggccccaaaaaaaaccagaaccccttttttctacgggggggaaaaaaaaaaaaacccccacccaggaacagaccaaaaacccaggggggtttaaaaaaaaaaaaaaccccctttggggggggctcgagcccccaggggctcttccctattggggggggggaaaaaaaaacgccaaacaaaggggcattggccccaggcaatcgttaaaggggttcaggggcctttgaaggaaaatccccactttgccggaaactttaatttttggttgcgaggggatacaaagaaaaaggggggtccctcacagc

SEQ ID NO: 49404 - DNA, 356 bp, Oryza sativa
  Clone ID: PAT_MRT4530_5198C.1
ggactcaaaatggcctaatgcatttttaacatcccggcctcagacagaaaactccaatcacccagcccaattttacaaaccaccaagaacaagaatattggaaagaacaaactagtcaaaatcaaataaatttaaacatggagaggggaaaaatgaaagaaaagggaaaaaaggggtaaaataaaaggaaaagaaaagaaatgcatgcccatggttagtttccttgaccattggggtccgaacaccgttttacaagagggtagccaacaacgggggctaaacccggggaccccccaaccgacggcccttggccttgggggccccgggggctttgggttcttcgggccgggggggcc

SEQ ID NO: 49405 - DNA, 468 bp, Oryza sativa
  Clone ID: PAT_MRT4530_51990C.1
atggcggccaagctgacccaagaacaggtggacgagtgccgagaaatcttcgacctgttcgacagcgacgaggacggtcgcatcgccgccggcgagctcgtgacggcgctgcggtcgctgggccagaacgtcgacgaggccgaggcgcggcggttcctggcggacgccaccgccagcggcggcggcggcggaggcggcggagacatcgacttcgcggcgttcctgtcggtggcggcgcgcaagatgaggcgcggggcgacggagaaggagctcgcggcgtgcttggacgtgttcgacgacgcgcggagcggggtgatcccggcggagcagctccggcaggcgatggtgtcccacggcgaccggctgacggaggaggaggccgacgagatggtgcgcaaggcggatcccgccggcgagggccgcgtcgagtacaaggagttcgtcaaggtgttgatgaacaacaagtag

SEQ ID NO: 49406 - DNA, 744 bp, Oryza sativa
  Clone ID: PAT_MRT4530_51991C.1
cggacgcgtgggttccaatttgctaccagctgacgctttgacacagcaattaggcgaaattcttgatctctctctctcatccatggcggccaagctgacccaagaacaggtggacgagtgccgagaaatcttcgacctgttcgacagcgacgaggacggtaagccgccaccaagattagtttccccgtcatccaacctgccactgatcgtcctcgtcatccgcaggtcgcatcgccgccggcgagctcgtgacggcgctgcggtcgctgggccagaacgtcgacgaggccgaggcgcggcggttcctggcggacgccaccgccagcggcggcggcggcggaggcggcggaaacatcgacttcgcggcgttcctgtcggtggcggcgcgcaagatgaggcgcggggcgacggagaaggagctcgcggcgtgcttggacgtgttcgacgacgcgcggagcggggtgatcccggcggagcagctccggcaggctatggtgtcccacggcgaccggctgacggaggaggaggccgacgaaatggtgcgcaaggcggatcccgccggcgagggccgcgtcgagtacaaggagttcgtcaaggtgttgatgaacaacaagtagcagtaatactcctagctgttttgttttgttttgtttttttatgcttaatttgtttgcgaaagatatccatgtggttaatcaaccttggtaatggatgttaagaagtatatgcgatattattccagcg

SEQ ID NO: 49407 - DNA, 351 bp, Oryza sativa
  Clone ID: PAT_MRT4530_51992C.1
tcactgcgcggggccgccgcctccctccaccgccgcgcggggcgccgccgtcgcccgctcccgcctccctcccccaccgcgcggggcgccgcccccgcgccacgccagaccacctccgccgcttcgctctgtctctttgacatggacgaaccgggaccggccaacagctttttcaacggccacccgggccaacaacttttcaaacggccacccgggcctagctgatcccatcagccggatcacccagcccgtggggatcagccacgtcgggagacctccaagtgtgccaggaagcccaggggggtcctctccgacaccaccccggcgaatccacatgtctctcggcatcat

SEQ ID NO: 49408 - DNA, 181 bp, Oryza sativa
  Clone ID: PAT_MRT4530_51993C.1
tctacagtggctcgtactcgtacggcggccatataccatccgcccgacgccgacaagacagctcgcgcgccgcccacgagcacaagccttgccccgcgcgcgccacccgaatccaccggcacccgcggctcctcccctttttcgcgtggccgacggcgagccatacgcgcgcgcggcgcac

SEQ ID NO: 49409 - DNA, 162 bp, Oryza sativa
  Clone ID: PAT_MRT4530_51994C.1
atgaagattactcacagccgtgtccagtcgagccagcctcttccggggtaccagaactactttggcaaggggcagcagccaccttcccactaccagccatcacaagatcaccaccccaactccacgaggatgatgacccaggcaatccgacaagcttctaag

SEQ ID NO: 49410 - DNA, 112 bp, Oryza sativa
  Clone ID: PAT_MRT4530_51995C.1
gggctgcaggctatttgtagactaatcacactcttattgtactacatatagttcactttcacacctatgatctgttcactgaacctctcagctaggctgtagtattatgaac

SEQ ID NO: 49411 - DNA, 2437 bp, Oryza sativa
  Clone ID: PAT_MRT4530_51996C.1
ttttttttttttttttttgggtggagaagaaaaagggaaatacacttttttcattactttgcccttccatttcatctgtgtattttctttccagatgccaaaaaatacaatcggaaagaacatagctctatcattgtagaaatactaacaaataattttagagaaactaaagagaggtaggtgggtgtggggaacctgaatgaatttatttacacatgaggagaccttttaagtaaatctatcatctgtaccgcaccatgagctgttagctgcacagcatcactccatgatcaccaggggatgttcaacgttctttggtctattatttcatctctacaaactccttgtatgtttgcacaatatgttcatatcgccagaggctcaacttgcactggtgtacctgttcagaaggctggtctgggacttgcagatcttcccttagattgtcaaatcatatgagcaattccaggcctcagttgtgtgagatgcgtccgcaggctggactcctgtacctgtagttttgctgccatagctaataattctctgcattcatcaagcatggccttttcttgtcttgctataactgaaagttctgataccaaatatgtcctgtcctcaacctttggaagcatacagcgaaccgctgatcccaaaccttgcatgatatcaacagcagagcttacggcattcttaagagcaactacatcagcctttgctcctgatgtaactggaagacgcaatgtgcttgcttttagagcttcagttgcgtggaataatgaaatactgttctccttttcaagtgctggccattgttcaaggtaatcaatctgctctttaagaatgccatgtagcttcaactcttgttgtatgcattgaaccatgattcttctcatattaacaacatcccgcaagttcgaggtattcctcaaaacattatatataatactctcagctgtcactttttggaaagacatagtatcttctgcataagcatttacaaagatccattgcaagtatctattataagacaggtgcaattggtggatattttcaatttggctggagttcttctttcctttttttgcatcaaccatgtagctaataataggtgacgcaacacctgattgaatacttccagcactttgtgaccggctaggtgttgaaggccttgtccgagatgggctctgaaaggacctagaaatagaggatgtaactgaagaggccttgcttggcgaagatgagcgatgaagaacaggaacaggtaaagtaactgccctacttggacggctaacggatttacatctctctgttgactgtgaataagcatgacagcgagagtctactttgtcatctcttccacctgcatgaatagccaatctccttgctacctcatccaatgatttattaaaccctttgcctgtgccttcagaagcaagcgtcttccttggtgaaacacctctagaaatatttgttgaagggactgatctgccagctttgtcagacatgtcaatactccttgacaaaatattgctggccacacggccactctgcattgctggccagcggtgttgttcgattaccctcctaggttggtcctctgagggttgagcattctcacattgttcaccaatgttcttccttctcagaggactcctcttcctctcggctataacactagcttgccccttcgtttgatccaaagatccactggggactaccttatcctttttattaccgggggtaaccacagattctgactggaaagaggaagataggtttcgcattgctggccacaagccatcagtattccttgtgcttgttattcgcctagaactcttatgtccctctgtaacagtattacgaactggtgtgacagaccttgatgcaggggtggagggtgttgacactctagaagaaggagttgagggccttcttctgtctgctgattgagctctttttggttctggtgtgcattcatttgcggaggtccgcccaggacttggtgatgtgcatctccttgctgtggtggcagcagaatgagcagacagaccattcttgtacctggaagcaacatctctcccacggtttactggagaagcattatgcttctcggatggaactagcggtggtcttagagtctcattgagaataccagtcttcttcacatcactcttgaggacatccatgaagaatagcaacttccacagtagtaacaacgtcaagatgattcatgaaacttgaaccccttggcaaactgagatctcagcgatcgcggcgagaccccaaactgccctcctcctcctcctcctcctcctcgccgcagcgccgccgggtcgtggactcgtgggatctcgtggacaagcagccggcgaaccctcgcggagtcgccgctactagtccaccactaccgatcctcgtgccgattcctgcagcccgg

SEQ ID NO: 49412 - DNA, 1620 bp, Oryza sativa
  Clone ID: PAT_MRT4530_51997C.1
atggcggcggcgaacggcggcgacagcaaggggttcgaggtgccgaagctggagatcaagttcaccaagctcttcatcaatggccgcttcgtcgacgccgtctccgaccggcaccacccgccggcgcccccgaagtccagccgtcgctcctcccctagccaccgcgacggcatcccggctgcctggcccccacgccgagccgccaccgaggcctggacgacccaccgcgccatgggctggcgccgggcgaccaggccgagcgaagaagggagacgctacgaagagaagaaggcctcgccgccgccttccctgcctgctaccggcttcgccgccggcgggctccagcggcggcgaggcaagacattcgaaacccgtgacccgcgcaccggcgaggtcatcgccaagatcgccgaaggagacaaggccgacatcgacctcgccgtgaaggccgccagggaggccttcgaccatggcccctggccaagaatgtccggctttgcgaggggaaggatcctgcacaagttcgcggacctggtggagcagcacgtggaggagctggcggcgctggacacggtggacgccggcaagctgttcgcgatggggaagctcgtcgacatccccggcggcgcgaacctgctccggtactacgccggcgcggcggacaaggtgcacggcgagacgctcaagatggcgcggccatgccacgggtacacgctcaaggagcccgtcggcgtcgtcggccacatcgtgccgtggaactaccccaccaccatgttcttcttcaaggccagcccggcgctcgccgccggctgcaccatggtcgtcaagcccgccgagcagacccccctctccgcgctcttctacgcccacctcgccaagcttgccggcgtccccgacggcgtgctcaacgtcgtccccggcttcggccccaccgccggcgccgctatctcctcccacatggacattgacaaggtgagcttcaccggctcgacggaggtcggccggctggtgatggaggcggcggcgaagagcaacctgaagcccgtctcgctcgagctgggtggcaagtctccggtcatcgtgttcgacgacgccgacctcgacacggccgtgaacctggtccacatggcctcctacaccaacaagggtgagatctgcgtcgccggctcgcgaatctatgtccaggaggggatctacgatgcgttcgtgaagaaggcgaccgagatggccaagaaatcggtggtcggagatccgttcaacccgcgagttcatcaaggccctcaggaagaaatgtcgatcgcgcaagaggaaatcttcgggccggtgatggccctcatgaaattcaagacggttgaggaggcgatccagaaggcgaacagcacccggtacggcctggctgccggcatagtcaccaagaacatcgacgtcgcgaacacggtttcgcggtcgatccgggcaggggcaatctggatcaattgctacctcggcttcgaccccgacgtgccgttcggggggtacaagatgagcggcttcggcaaggacatgggcatggacgcccttgagaagtacctccacaccaaggcggtggtcacccctctctacaacaccccttggctatga

SEQ ID NO: 49413 - DNA, 1167 bp, Oryza sativa
  unsure (1)..(1167): unsure at all n locations
  Clone ID: PAT_MRT4530_51998C.1
gactccatagggcgattgggatcctcgaggccggccgggnnnaaaancatgctcataaacaactggttggcttcccttcccgttcgcctcgcgcggcgccgtcccccctctctctctctctctctctctctctctctctctctacactgctcacgcctctctctctctctgctcccaaatctgcgtgggagagagagagagagaaatccagtggggggagggattggtctctggaggggatctagcagcagcagcagcagcagccatgaacatcttcaagaagaaggtcgaccccaaagaggctctcaggaccagcaagagggagatgtcagttgctacacggggagttgagagagagattggctccctgcaaatggaggagaagaaactagttgctgagattaagaaaactgctaagacaggaaatgaggctgcgaccaaaatcctagctcggcaacttgtgaggcttaggcaacaaattgtcaatttgcaaggcacgcgggcacaaatacgtggagttgctactcatacacaggcaatgtacgcaggcacttcaatatctgcaggaatgaaaggtgcaagcaaagcaatggcagcaatgaataagcaaatggaaccaacaaaacagatcaaggttatgagagaattccagaaacaatcaaatcagttggacatgacgcttgaaatgatgtccgatgctatagatgaaacacttgataaggacgaggcagaagaggaaacagaagaacttactaaccaggttcttgatgagattggtgttgatgtggcttctcagctgtcttcagctcctaaaggtcgtattgcggcgagcaacaggaaagctgagagcaaccaagcacgaaatgccgctccccccagaaataacgtggagcctgaatcctctgctgaagttgacgacctggagaggagactggcttcacttcgccgcatctgagcagctgataaatatatagtgcatctataattctatatgtaaatttgtttcactcaacatagcttgtctgaatatgtgcgagtagagtattgtaggcaaacaacaagatttaaataacataattgaaccttcggattttctatggaaggatgagcatttgtccaattttggaagataaaaaaaaactcttttgattaaaaaaaaaaaaaaaa

SEQ ID NO: 49414 - DNA, 350 bp, Oryza sativa
  Clone ID: PAT_MRT4530_51999C.1
ctccaaccatcacataccagagtgggatctttccaaacattgaaggagctcatcaatccaatcatccactagtttttttaatatgacttatctcaccctccatatcaagcaaactatatttatctccctacacctacattataccatatcaattcaactgaccaccatacactagaccaaatatacatcggactgtatagatcatacatcagactccacccaaaggaaccactcagcacttcacctgcttcagcccatgaaataagtaaatcgaacagcagagccagcatctacctccttttactaggtaaacaccaagcccacatcatcatacatgctctcaccaacaa

SEQ ID NO: 49415 - DNA, 335 bp, Oryza sativa
  Clone ID: PAT_MRT4530_5199C.1
gtaaaataaaactgtgttgcatatggtctcttgttatggctgcaaactgactcaacacccagctgaaaactgtcattattggctaaacccccacagggaaatgccgggtgctagcttaatcaggaactgactcatatacagcttggctctactgcaccttgacacgcattgcctgcatcggaacaccgatgtatatactcacacaactgccaactttcaatggcacaagccttgtacaccctcgacttaaaatcttgcagcgactcctttgagcattttacgataccaacatgttattgctaccacaaacatcaacacctgccaatgtgcaatgc

SEQ ID NO: 49416 - DNA, 1125 bp, Oryza sativa
  Clone ID: PAT_MRT4530_519C.1
accggtgacccattcgcctacctccaggaaaacgacactattcgaggtttgttgttgagtcgtagattttgcataagcttcaccggacaaaagctcgccaaggagttctctgtcatcgctggtgtctgcctgatcttcctcttgatgaccctcccaggcggcgagaaacaatggagaggacaaggagacttggagaaggacttagagtcatggaggatcatcgaggacgtccaagtcaaggtggaggccccaaccaagtcgacttcgagtgcaattcggagtctaggaccagtctgcactaaaacgggcacccagttgtattctacattgtttttgtttgtgttcttcgattcgcaaacagggattagccttctcggcgaggtcatccgtgtttcgacacaggataaaagcttacgcatacgaaaactactctggatactgagggctccatttggtgaaagtcgaggcgacctcttcgagcacactagaatcatggatgaatctaaaagggacatggaaaagatgtcggagaatgtaacagctgcagcgcaagtcttggcccttttctccgtcctcatcacaactgtaacatttgcatcggctttcacgttgcccggaggctaccgatcagccggcgacgatggtggtgccaccggcacaccggtgcttgctaggcatgggagctacgctttcgatgcgtttatcctcgccgacgccctggcattcgttttctcgttcgttgctacggccaaactgctctatgccggagtgcctgcttttaacctcgaaagtcgcttccacagtatcgattgtgcatacagcctcatgatgaactgtggaagatgcttggttgctgctcttgccttgggcctctacgtggttctgcttccaccagttggccgaacaattgcgattgagatcggtgtcgtgatgattatgcttgcaattgctgcgttcaccaaggattcggaaggctgtgttgatccgatctcaataagcgtttctgttatgagacgaaacagccggaaactgtcatcacgggatgtgttgctctccattctttatttgttggaacgattttggtccttcgtactaatattgggcaagggcaaaggccaagattaa

SEQ ID NO: 49417 - DNA, 309 bp, Oryza sativa
  Clone ID: PAT_MRT4530_51C.1
tcaggaggcccgaatccgaatacaaaacgtgtacaacttgatctcttgtcttctatgggccaaaagtgacgtggtgaggtagaagtagacttggagaagttcttggtttggtccccaatcaacttctttaatcatccatacattagttacgctcggtctcttttccttcgcccaagtaagtacctcttgagtagctgtagcaccattatcattaccttttttctcatcttcagaaattatcagtgcttggtcaattgaacattcttcaagcatgcatggagctatagataagtcttttttcctcttcat

SEQ ID NO: 49418 - DNA, 390 bp, Oryza sativa
  Clone ID: PAT_MRT4530_52000C.1
ggggtggctaccaaccatgctagcattattataattatcaaaacaagcaagaagcatgggggaatacaaaaatagaacaaatacaaccaaagaacaaaaaagcaccaactgaaaaaacctaaaaaactagaaaaaaacatcatctggtattctggctatggcaacaccactagctaggtaaaaagctagctagaggaagtcaaaacgcatgaggagcctgacagacttggacccggggccccggaaaacggggaaaggcacagcgcggatgccctggttcagctcccacactggcaggcatgtctgccccccaaaggcatgcttctccgacatggtgaactcaagaacctcgatttttaaaacagccagcttcgggactggcagagggaa

SEQ ID NO: 49419 - DNA, 1862 bp, Oryza sativa
  Clone ID: PAT_MRT4530_52001C.1
cgcgtccgccacaatcaagagtacataagactccatctattacacgaggataccaaataaaagtttaacaaaacggttaaagaagaacaacagtctaagcctgatggttttaacttccaatttctctctccacatctctctgtgtttcttttatttctcctctgctcgcggcgatggcggcggcgaacggcggcgacagcaaggggttcgaggtgccgaagctggagatcaagttcaccaagctcttcatcaatggccgcttcgtcgacgccgtctccggcaagacattcgaaacccgtgacccgcgcaccggcgaggtcatcgccaagatcgccgaaggagacaaggccgacatcgacctcgccgtgaaggccgccagggaggccttcgaccatggcccctggccaagaatgtccggctttgcgaggggaaggatcctgcacaagttcgcggacctggtggagcagcacgtggaggagctggcggcgctggacacggtggacgccggcaagctgttcgcgatggggaagctcgtcgacatccccggcggcgcgaacctgctccggtactacgccggcgcggcggacaaggtgcacggcgagacgctcaagatggcgcggccatgccacgggtacacgctcaaggagcccgtcggcgtcgtcggccacatcgtgccgtggaactaccccaccaccatgttcttcttcaaggccagcccggcgctcgccgccggctgcaccatggtcgtcaagcccgccgagcagacccccctctccgcgctcttctacgcccacctcgccaagcttgccggcgtccccgacggcgtgctcaacgtcgtccccggcttcggccccaccgccggcgccgctatctcctcccacatggacattgacaaggtgagcttcaccggctcgacggaggtcggccggctggtgatggaggcggcggcgaagagcaacctgaagcccgtctcgctcgagctgggtggcaagtctccggtcatcgtgttcgacgacgccgacctcgacacggccgtgaacctggtccacatggcctcctacaccaacaagggtgagatctgcgtcgccggctcgcgaatctatgtccaggaggggatctacgatgcgttcgtgaagaaggcgaccgagatggccaagaaatcggtggtcggagatccgttcaacccgcgagttcatcaaggccctcagattgacaaggagcaatacgagaagatcctcaagtacatcgacatcggtaagcgcgaaggcgcgacgttggtcaccggagggaagccctgcggcgaaaacgggtactacatcgagcccaccatcttcacggacgtcaaggaagaaatgtcgatcgcgcaagaggaaatcttcgggccggtgatggccctcatgaaattcaagacggttgaggaggcgatccagaaggcgaacagcacccggtacggcctggctgccggcatagtcaccaagaacatcgacgtcgcgaacacggtttcgcggtcgatccgggcaggggcaatctggatcaattgctacctcggcttcgaccccgacgtgccgttcggggggtacaagatgagcggcttcggcaaggacatgggcatggacgcccttgagaagtacctccacaccaaggcggtggtcacccctctctacaacaccccttggctatgatctgatgatgaacagcacagaaagattaattacagtggaaaaaaataacatttctatatatacagctgaaaggttgggttatatttgtggttagttgattgcttgtatcaaatatcaatttgtcggaataaagacagtatatttcagttaaaaaaaaaaaaaaaaaaaaaaaaaaaaaaa

SEQ ID NO: 49420 - DNA, 426 bp, Oryza sativa
  Clone ID: PAT_MRT4530_52002C.1
cattcaaggtcatggttatcggtatgcgttcaggtacaaagtagtacagacaatggcgggggcggcatgcggttcctccaaccagcacggccggcaccgtggaatatgtaggttctatacatgcttaaagccaagagacaaaaggcaacagagattttgtctcctgatgttgggggtgtgtacatcatcgtatctctaaacataggatgagtattacactgaagaagagaaaaaaaagaaagcacgagaaccctactgacctcgatcagttgccttcgacaacaggaagctctctctctctgcgcaggagttctgctgcgtcgcaaaagacaccacaaaagatgtatggagggaatggcggaaaactctggttccgaagctctgctgcaacggcagtcactcagggtatcgccacggcccgatggg

SEQ ID NO: 49421 - DNA, 559 bp, Oryza sativa
  Clone ID: PAT_MRT4530_52003C.1
cctctgctcgtgtttgatcctccttagtcaaagttataggccaatatcaatctgacagtcgcatctcctactacagcaacatagtgctcagcccatgccagtgagttcgtaaggcaacagtatgagcatagtggcaacccccttcctggcaaccagctgacgtcttgcaattggataaaccaacccagtgcatgcagcagcagtgttggccaacagctccaggctggtgagcactaacaatgctcacctgatccaggccattagtgattgttgcaagcgatgtgtgcaacagctacaactgcacgcaatgttcagtcggtgtctgactcttgatcagactgcaagctgcaagcccaaactctgttggaccttcaacctgtggccatccatgatggtggtatctaccctaactactatagtggctgcccaggagccttggccactgttggtggtgtctggtactgaattgtaaccaatataatagttcgtatgttaaaaataaagtcatacatcatcatgtgtgactgttgaaacttagggtccaaaaaaaaaaaaaaaa

SEQ ID NO: 49422 - DNA, 325 bp, Oryza sativa
  Clone ID: PAT_MRT4530_52004C.1
aaacggttaaagaagaacaacagtctaagcctgatggttttcacttttcaggtgagcttcaccggctcgacggaggtcggccggctggtgatggaggcggcggcgaagagcaacctgaagcccgtctcgctcgagctgggtggcaagtctccggtcatcgtgttcgacgacgccgacctcgacacggccgtgaacctggtccacatggcctcctacaccaacaagggtgagatctgcgtcgccggctcgcgaatctatgtccaggaggggatctacgatgcgttcgtgaagaaggcgaccgagatggccaagaaatcggtggtcg

SEQ ID NO: 49423 - DNA, 646 bp, Oryza sativa
  Clone ID: PAT_MRT4530_52005C.1
acgcaaatttagtggtgtctacttgtgatgcaagactcaagctcaacgcccaaaactgcggtgtgacctgtcaacttgcccatccatatgtgggtatctgaccctgaactactgatagggctcccaggagcattgccactgttgggtggtgtctggtactgaatgggaacaaatataatagttcgtatgttaaaaataaagtcatacatcatcatgtgtgactgttgaaacttagggtcatataaatctaaataaaatcatcttacctaaaaaaaaaaaaaaaaaaaaaaaaaaaaaaaaaaaaaaaaaaaaaaaagacaagaaaaaataacagaacttaaaaaagaaaaagaagcaacacaaaaaacttaaaaaaataaaaaaaaaaaaaaaatgggggcgctcttttttaaggacccaacttacttacccggcgttcgccaacgattagttttttttttgggcaccctaattacaattcactgcccggtgttttaaaacctggttcttggaaaaactcggggtgtccccaattaaaatgcttgccagaaaatcccctattgccgctgagggtgaaaataaaaaaggcccgacggtatcgtccttccaacaagttccccccccattttgggatatggaacccccc

SEQ ID NO: 49424 - DNA, 230 bp, Oryza sativa
  Clone ID: PAT_MRT4530_52006C.1
cttcggggccaaccgccttttttttttggggactcggcaacaaaccagggcagaatgttgaaacgggacccccgagggtaaaaacggtcttagggaacaaggggagctggccaccccccacaaaggctgtttccattgacacccccaaaaaacggcaaaaaaacgggggtccttcttttcgcggacaaaaaaaccattaaccaacttgacccgtttagaaaaaggggggg

SEQ ID NO: 49425 - DNA, 227 bp, Oryza sativa
  Clone ID: PAT_MRT4530_52007C.1
agaaaaatgaaatggggcattatcaaaagctctgatcatttaatctcctgaactatctatgcccatgtaatagacactctatatgatagacttgactaatagaagtcttaagatatatttgcaaattcctctaaaaaaaaaaaacaaaaaaaaaaaaaaaaaaaaaaaaaaaaaaaaaaaaaaaaaaaaaaaaaaaaaaaaaaaaaaaaaaaaaaaaaaaaaaaaaa

SEQ ID NO: 49426 - DNA, 446 bp, Oryza sativa
  Clone ID: PAT_MRT4530_52008C.1
cccacgcgtccgcccacgcgtccgcgacgagggggacccacctcgcgtgtgggcgcgcgacgggctctaccccggcacggccttacgcgcagcctcggcgaccaagccgacgaggctgttggtgtcatcgccgaacctgaggtgaaaagtgtagagatcactccagcccacctattcttcgtcgtcgcaagcgatggcgtgtttgagtttctctccagccaggatgtcgtggacatggtggctgcatatgaagatccccgggaagcttgctcagcaattgctgcaaagtcgtacaaactatggctggagcatgaaaacaggacggatgacattacgataatcattgtgcacatccgggattccgaaaatggagccagaaaatgaacggcagcagctcgggagcggtgcaaccagagctaactgtatttgtaccgtcagaagctagc

SEQ ID NO: 49427 - DNA, 228 bp, Oryza sativa
  Clone ID: PAT_MRT4530_52009C.1
atggagcaggagaggggatcggggaagggtgtggggggcgtcacctcgagcgcattcggctcaaatcgtccagtcccggctgccgcctatgggattcggtggattttggcggggggaagcggagagacggcggaggagggcgacgacgacgaggtggtggagtatccagaagtgacaagcatggtaatactaaccgtgcatacacttgacaaagttgccaagctctga

SEQ ID NO: 49428 - DNA, 366 bp, Oryza sativa
  Clone ID: PAT_MRT4530_5200C.1
atggcggccatgacgccggccggcaactccgacactccgcctcctcgacctgttggctctgccgtccgcgacgtcggcaagctgcttttcaaccactcggcgtccgtctccatcctcgccggccgtggccgcagccgctccccgcgctcgcgaacgcacgctgtttctgtccagtatcacatcgccatagtgtcgcccaagccctcacgccggcatcgtcgacgacctggccgtcaccaccagcctctagggggcagcaacagcgtggtttgtgagctcacggtgccgcgcttcctctcgtcgccgctccagccggtcggccaactccgtggcaagcgtggccttgtctcagtctcgtcgtcgtga

SEQ ID NO: 49429 - DNA, 942 bp, Oryza sativa
  Clone ID: PAT_MRT4530_52010C.1
caataaacttagcttattccccctcaagcctctagtagtttcagtttcagtaggactgtagtttttcccccagctgattttgccccacagcagcaacgacccatttcgctagaacacaacgcatttctgcgttttttttttggctggaaatggatatattccccaagcgtgacaacaacttttgagtgccagtgtgtgtgtgttcccctcccctccctgcttaattacatcatctctaacgtaaatgattcgtgatcttcaacgggaggaaaatgacgctctcttcgacctccagagcggttttcctcccgagacaaaaagcacaaatccaaagctccccaaaaggctgtacaaaatggcaaaaagaagaaaaaaaaaagggagatcgaatgatcccacatcggaatccgacctcgaggcgacggtgtatatgagcgtctgaccgtgctagctccggagcgcgaccgcggcctcgtgcacgagcgagccggtggcctgcgcgacgccgtgcgcggcgctctcggcggcctcccgcggcgagccagactcggacatgcggcggacgaaggcgacgaaccggcgccagttgtccgggtggaagaggtcgggccccatccggaggtaggtgaaggcgaccatccggtcctccgccgcgcggtcggcggcggcggcgaccacctggtcgtgcgccgtgccgtcgtaccgcggcagcgcgttctccccggcgagcccgacgcccgccgcgcgcgccgcgggaaacaaagaagtgatcaacagatgaaccaccccaaaaggaaattgtttttttttttcttttttgcgatcgacacagccttgatccgaacagaactgggagagatcggattattgggaggttggggatgggaatatatctaaagccaaaaaaaaaaaaactaaaattattaaaaatcggacgcgtgg

SEQ ID NO: 49430 - DNA, 447 bp, Oryza sativa
  Clone ID: PAT_MRT4530_52011C.1
gtgctattttgctgtggttcatgaatctttgctttacctgtaaagctgtggttgatatagttctttgggagctggattctcttggtaattaactcaatcacctctgtcattggtggattaactgtcttcatgcacctttacgccatacatgctttatgtagtgtgtaggcctcagggataaaaatgtatttaacaatatggtgtatatacaagcttaggcaaaatttccagatacaaacttactcctttagccttctcctaaaaattgcttactattatttccctggagctgtcctcaattttctcaacaacgctcatattctagatgtattagttatagcaaataatgtgattgctcagcaggaagttcaaggatatctgaatatttgttggcaaatgatgtgttcagtcctaagaatactcttgcactgtttcaagctttggttc

SEQ ID NO: 49431 - DNA, 154 bp, Oryza sativa
  unsure (1)..(154): unsure at all n locations
  Clone ID: PAT_MRT4530_52013C.1
ggccgcctcttttttttttttttttttgccaaaagagcatgcctataactaaggttagttntgggcaacatacccacaacccttctcaaccatctcaaagtttgcccagagttaatacatattgtagaagaatgaaatggtttagcgcatgtta

SEQ ID NO: 49432 - DNA, 1156 bp, Oryza sativa
  Clone ID: PAT_MRT4530_52014C.1
atggcgatgcgatggcgacaagaatggcagcgacaggcagtggtaacggccgccgatagggaggtgcggctattttctagggtgacacggaacaacgtggcggccgttatccctcagctcgatgtccttttcttgtttgcttgtactgcatccggcgtgcgtgcggcggagagggcggccgacgcaagcgccgccggcggagagggcggccgacgggagcaccgcaagggaggaggtgagttcatcgggccggccgacgggagaggagcacaccacccggcgggaaaggagggagaggagcggcgctgtgtccaacaccggagccaatatgttgccctgaaaattatttgcaaatatgagatagatggtgatttgtcaaataccatatcattcctactcaaccacagagcccaacatatggcagatgctcctacaaatatgagtttactcttcttcttgtcaaccctcaaaagccaaccatcaaacatattagatatggttctaggaagctctcagggctttcacagtgcagtgacgggccattcagcctggggagaccaggtcggagattctcctccacatcggatctttgcggtgcttcctgaagaacggggagctaaatgttgtcaagagtctcatcagaaattacagcctacaggcgccggcgtctgcacatcccgccgcaaataccgccatgccggatgccatgccgcgctggctcctggctggctattcggctgtcgctgtgatcgccgcctcgtgctatggaaccagaaagaaatagaaggtgtggctgcaccatccttcgcagcaacgacagggccgacctccttccggacggcagcgagctcccgccggcgggccgcagtgaagcgccacagcacgggagcgtccatgcggccgcacatccaccggaggccccacggacgtcggcgggcgggggctccgcggactcggcctccgcgacggccgcggacagcgccgtctcgacctcggcgaggcgcacggggacggcggccttgcaggcctcgagtgacgcgagggactcgaagcaggcgtcgtggcaagcggcgaggagttgctggtgggagtcgaggtgagcgaggaggcgccggacctcgccgggggcggcggcggaatcgccggtggtcgccat

SEQ ID NO: 49433 - DNA, 3492 bp, Oryza sativa
  Clone ID: PAT_MRT4530_52015C.1
atggctgccaggtacataaaagacgagctcaagactatgcacgcattcctaagggccgccgaggttacaaaagagaaagatgaactggttaaagtatgggcagagcaagtgagggatctagcatatgacattgaagattgccttgaagagtttacaatccatgtgaagcaccaaagcctctcacggcagctgatgaagctccggcatcgccaccgaattgctgtccagattcggagcctcaagctaagggtccaagaagtgagcaatcgaaacatgcggtataattttattaagtctgctccttctagagagatggatgacttttcaaccaacatggaaatgactcgctaccaagctgctcactatgttgatgaagctaagcttgttggatttgatgggcccaaaaaggagatcctgaagatgatatcaggcagtgaagatgtagaagtccagacaatttggatagttggagctggaggtcttggcaagactactcttgcaaagaaggtttatgaaagctcaaatatcacaagcatgttcccatgccgtgcttggatcactgtatcacagtctttcgatgtcatggatttattgaaggacatgatcaagcaactcctaggaaaagagtcactggataatctctttacaaaatataaagaggtgaagataaaggagaacaaccttacggatcacctaaaggaatggctcagaaataaaaggtattttcttgttctagatgacttatggagcacaaaagcatgggattgcctcaaacctactttatggggaaataatagggaaggtagccgacttgtagtaacaacaagaaatagagacctagccgaaggcagttctagcccactagtctacccccttcaaacattacatagagaagatgctaccaaattgttgttggcaaaaaccaacaaaagtttatgtgacataaacaaagatggaatgaatgaaacatttgaaaagatactaaagaaatgtggaggtctaccactagctatcatcacaattggtggacttctagctgccaaagatgtcaaagagtgggatggattatatgcacaaattccatcggaacttgagaacaacccaagctttgaagtaatgaggcaggtgttagccttgagttacaagtacttgccatctcatcttaagccatgctttctatatctaagcatctttcccgaggattttgagatccaaaggaaacgtctagtgtatagatggattgcagaaggttttattagagctagagatggggtaagcattgtggatgttgcgataaaatattttaatgatttaatcaaccgaagtttgatgcaaccatcaagagtgaatatggaaggaactatcaagagctgtcgagtccacgatatcatacgcgatatcatgatatcaatttctagagaagaaaaatttgtgtgccggatagatgataaagaaacttgtctgatggaggaaaacatccaccatgtggccttctacaatagcaatagctcagagatagccatggacttgaaccaagtccggtcattaacagtgtttggtgagagacataaagaactaacacctttgctatgttcaccccaagtaaggatgttaagagtcttggattttcaaggagttagatttggaatgacacaaaaagagatggaccatatatggtcggtgctccacttgaaatatatgaatattcggtgtgactacaatcttcctaactccagtggatattcaaaaatttacagaattccaaggtctatagggaaattacaaggcttacgagttttggacatatcaaatacttgcataacatcactgccaactgagatatgtgaactccggagtctcaatatcctccgttgtacaagaaaagaatactacgagttctttgatccatctaaacctatacaatgtttatttgctttatcgtgcattcctgtaacgatggctttggctgattcagaccagcgtcatgaaataactgctgagctacacatggcttgttctactcgctggtttagtacatgcggtgtgagggtacctatgagaattggaaacttaaaacagcttcaagaactagggtatgtggatatcaggctaactagtagcaaagcagtgaaagagctgggggagcttagccagctaaaaaaattaaggttgcgaataaatggtgccacacaacgaaaatgcaaggtgcttcgtgaagccattgagaagctctcgtcccttcaatctctccgcataaatgctttcgacgtatcttcattgagaaatctcgagtggctacattatatttcctctcctcctccctttttgaagaacctcactttggaaggatgtattaaggagattgactggcttagggagttcacacacctggtgaagattcacttattcggaagcaaactgaaggaaggtaaaacagtacagatactcggggaactgcccaacctcatggtcctgcagcttcggtggggcgcttatgttggggtgaagctattgttccgagcagaagcattcccaaaactcaggaagcttgagattcggtttctagaggacctaagagagatgagatttgaggagcgcacctcgccccaaatggaaacaatagaaatctctcactgcaggttggaatcagggattattgggattaagcatcttccgaagctcaaggagatttcactccgttggaactgtgaagtggcaaggcttggccagctgctagaagaggtgaaagcaaaccccaatcgtcctgttctgctattgtataacgacccatccaagcacgacttaggggacacccaagaagggtcaggtacaccagtggaagcaaatgaacccccgaagaatgtgggcgagagctcgcaatccaaccaagcttgtgtggagtttgagtacaacggcgcacagcctgattggtttctgaacctcaccctgttgctgatgatttgctttctgagagccagcagcaatacaaagaatgaagtgatcttattgataacagcttgtgatcgcaaatatttgggcccgtattcatctcaagggctagtcgcacagccccaagtgcagcattgcaattggccaacttcgttgttttcacaatccttcttcatcctatggtggtgtgacaacgggaatgatcgtcatcctaatagcctagtctattttgaaggaaagaaacaacagtgttttcaacaatataagagcaaatcctgggcagaagtggctgccgctgctgcagcagaactgaagaagcagcaggccgcaatccaggtagcttcccttgctaattggggattttcacattcatgctgtgttagcaggttgggttggctaagagaaaaggcacaactaaatatgctaaatatggtttcagttgaccaaccactgtgcctgccagttgctgccattggaaaattttccctggtaggccgaagtagctatggtgctgatgatgagggcatgttgcagccaaactaa

SEQ ID NO: 49434 - DNA, 2020 bp, Oryza sativa
  Clone ID: PAT_MRT4530_52016C.1
atctctggcaataggttacagctcaccttcgagccatctctagttatgtttttttttcagagggggttaaataaccgcctttgatgatcctggagtagcacaaccacatgtattgatgcgttagcataactatgatgtggtttctgaacagtttctgaaagccctgtgtctagtagtgattatgaattacttgaaaaaaaggggaaaaactaaaatacatacacatgctacaagaaaacatataatctgctgtttttttaagaatggcaagtgttctgtctaagttcactaagctctacaaaagaaccacccttcatagtccttaaggtggcagtcaccttggaccagacaatgtgtctggagggagatttgcaacagagtcattgcgagcctcagaaacgccctgtcctccttgcaggcttgcctgcacaatcgtcttcctttgccatgcatcccagtgctccgcgataccgtcttctagcattgtcaccaccgttgacattctggggcggcttggagcggactcctgggtgcagagcagcgcaatctgcaccagcaacctcatctcctctcgcactccctgttccccaccattgtagatttccagtaagtttgggtcaatcagcacctccagcctgtcctcttccagcagtttcttcaccctaaaatggactgtcaccttttcttcatctacatgaccaacgagatcatagcccctttgcccactagtgacttcgaaacgcatgattccatacccaaaaacatcagttttatctgaagttcttcctgcagtcaggtactccatgggaatgtgccccaatgtccccatcacgccggttacaacatgggaaactttgtaatccataattctagccagaccgaaatcaccaacaactgcttcaagtttttcatccaacaaaatgttagcagctttgacatctcgatggataattttgggatcacatccttcatgcaagtaagagatccctcttgcagaccctaacgcgatttttcttcgtgttggccagtcaagtggttgttgtgaatcagagcactctcgtaagcgtgtctcaaggcttttattctccatgtaaggatacacaagcagccgctcggtgggtgtcatacaatacccctggaggcgtaggagattttgatgcacggccatgctgatgatctcgacttccattaggaactgccgctctccagttccaattcgatcttcatttagtctttttattgctatcaatgaaccatctaacaaccttcctttatagacctttccaaagcctcctctccctagcaaattagtttgactgaagttatctgttgccacctgcagttctctcagtgtgaaccttctaagctgacccagatgaacttctggagtttcttcttctagtaggtcaaagaattggtcatgtggtttacgccgccaccaccatgcgaacaatacaataggagcagcaaacaacatggcagcacctgcagcagctccaccagcaattgttccaatgctggatgcactacttcttcctgatggcaccgctgctcccgagttatttgatggcgaatcagaagaatttgcgaaagtacgtgggttattggagaaactgattggggtgaagtgtgaaaatgaaccattggtcggtattattcccgacaagttgttatgtgacaagtcccgcccaagctcgctaggtattttcccgctgatgctattgccataaagttccagggattgcaatgcttgcagctgccaaatgtcgggcttcaactcgccggacagcgactggttcccgagatccagcctgatgacctggttccccgggccacaggtgacatggaaccaggtgcaagggttgggcgcggacgcgtcccagctctggaacgccgcgttgccgccggcgaaccctgccatgaaaccctgcaaggcctccacttcggaggtggggaggacggcggcgaggcggcacagcaggaggacgaggagcaggaggaggcgccgccgcgcggccat

SEQ ID NO: 49435 - DNA, 414 bp, Oryza sativa
  Clone ID: PAT_MRT4530_52017C.1
atggaggactcacctgaggacggtcggctcagtggtggcggcggcgggctcggcaaaggaggagcttgcggcggcggtgccgggctcagtggagggcggcgccggtcggtggagatgccggtcggaggctcgagggaggacgacggcggtggcggcgggctcggtggcagcggcgcctggctcggtggagggcgtcacctgtcggtggaggcggcgccgggctcggtggaggcggtgggctcggtggcggcggcggcgggctcggtggcggcagtggcggtctcggtggcggtggcggcgatagaggacgacggcggcgaacggcagcggcagttcagggatgaggaggagtggcggcaaggcggatccagcgacggctcggagacgaggaggttcgggcggtggatccggtga

SEQ ID NO: 49436 - DNA, 732 bp, Oryza sativa
  Clone ID: PAT_MRT4530_52018C.1
cggcacgagggtcgacaacttcatcccaaaagatcaggctaatgatcccagcatgcccgcgccgttgtcgctgccaccgccaccgccaccgctatcctactcaccggagggcgcaagcccggggatctgctacgcgtcgtcgcaagggacagcaatgcagagcgtggtgacaagcaccaaacacttagaaacggcgccaacatttgcaaaccaccatgtcatcccacgcgtccgacttgatgggtttcacagtgctcattctcaggcagggagctgcatgtgggaggatgacctgcagagcgtggttcagatggggttcaggggcaatacatgatagattagatagatagataaacagatgagagcccccaatcatggccatggtctctgaattgattcggggacaaatcagtttcaccaatcaaagccaggagacggtcacccggggaggcatgtcgggtgcttggaacacttaacacgagggggttgggtttgagctacctccaacccaatcattggatcatccctccatgattgtacatacaacccccccaccttcaatgtgggggaagaaaatggaagaaggagaagggataaaatgccctacttgcccattgcctcagctcaaagatttgtaccacggcgaggccgaggcggaggcggaggcgaaggcaaaggcgaagacgaaaaaagaaaaagatttagttttcttcatttgctcttaggaatttt

SEQ ID NO: 49437 - DNA, 288 bp, Oryza sativa
  Clone ID: PAT_MRT4530_52019C.1
atggagatggatcaacgcctctacaaagctcgatcagaccttgagcttgaagctgtagttgttggagcggattcggatccgcctgccggcgacgaggttgtcgacgacgaggttgcaggtcgccttcccggtcatcttccacagcttgatggcgccgaacttgatgcggatcggcacgcccgcccacaccgtgctgtgatctggtacaacaaacttggtcacagaaagacccgaaggagcacgcatgcgtacacatgggcacatgctggccagatcatatcagattaa

SEQ ID NO: 49438 - DNA, 219 bp, Oryza sativa
  Clone ID: PAT_MRT4530_5201C.1
atggaaagaactccgttgacatggcaacaagctaaagacaagcaagaatttgcatcatggactgttaaatttgaatccactaaggaggagaacaaccagttcgtgtcagccttctcaactcaaagtgagcttcatggacatgagcgggagcttgccatctggatcttggaggtgttggtacctcaccttgatgcgatctccgcgcctcctgatcactga

SEQ ID NO: 49439 - DNA, 163 bp, Oryza sativa
  Clone ID: PAT_MRT4530_52020C.1
tttccggtaagctcgcccgtatccagctctaccttcgccggcggtgaaacggaggcaggataggtctcctagcaaaggttctaaagaccatatctcttcaaactggataggaagcttacttaatgaagacacaatttggattgacttttagtgacctaaaccc

SEQ ID NO: 49440 - DNA, 433 bp, Oryza sativa
  unsure (1)..(433): unsure at all n locations
  Clone ID: PAT_MRT4530_52021C.1
ancactaaatttncaaatacggccatccccatatattatgcggcgtgacatcatgcaaatttatgtggtgtatgtattatcagataaattcttttatgttcatttccagctcgatttacggctgaacagtgaatataatacctggcttggtagcgaggaagtaatacgcatgaggtaaagtatccgccaaaattcgaacttttacaacacaaggcatggtgctccgacatgataataacttttgtagcgttcggcagccatcgatgctgttaaatatcacggcaaagctgcagcaaattgagctgctgcagccgtagcgctgcggcaaaattgcccttcgaagaagcccatagatactgacttgtcctgtctgaatgtatattgtttgagattaagcgaatagagtagtttaattaaaaaaaaaaaaaaaaaa

SEQ ID NO: 49441 - DNA, 120 bp, Oryza sativa
  Clone ID: PAT_MRT4530_52022C.1
atgggtcagcctcgtcgatggcatatcgatcccacatgggcagggggctgcgggcagcacgatggcaagatggacagccagcagggtcagcccatgcaggtgctcgtgttgaaaacgact

SEQ ID NO: 49442 - DNA, 1107 bp, Oryza sativa
  Clone ID: PAT_MRT4530_52023C.1
atgaccaagcaggagattttgctcgagaagaagcgggtgatcaccgtccagggccgcgacaaggccggccggcccatcgtccgcatcgtcggcaagaacttccctgcgcgggagctgggcggcggcgggcacgcggaggcggcgctgaaggggtacgtgcggaggcgggtgacgccggcgatcggggacgcggagttcgtggtggtgtacatgcactccggcgtggatcgccgcgagaacttccccggcgtcggcgcggtccggacggcgtacgagtccatgccggcggctgtcagggagaggctacacgccgtgtacttccttcacccggggctccagtcccgcctcttcttctccacccttggccggttcctcttcagctcaggattgtatgggaagctgaggtacgtgagccggttggagtacctgtgggcgcacgtgcgcaagggggagctggacgtcccggaggcggtgcgccggcacgacgacgagctcgagcaacggccgctcatggactacggcatcgaggcgagcgaacgcacctccaaaaatggcccaaaaccacactgcacacctccgtctccaccaaagcatcgccgccatctcaaccacatgaacatggccaggagcaacctcctctgctgcctcggcacgcggcgtgaagataatgctcggcaacgccagacgcggcccacgcctcggcctcgcctacgccggttgatgagcgggatgaagcgtgtcttcggtcggtctcctccgtgcggccagacggccgtggcacccgactccggcatcgtcgtcgtcgaaccaaggcgtcagacggctgcgcgtcgtgtggggaaaggagcgcgcgacggaggtgtcaacaaccgtgaggagatctcaagagaggaggccgcggcggccaccatccaggccggcttccgcggtcacctggcgaggcgggcgtttcgcgcgctgaggagcctggtgaagctgcaggcgctcgcgcggggctcgtacgtgcggaagcaggcgggcgtcgccatccggttcatgaaggtgctcgtgcggcttcaggtacgcgtccgcgcccggcaacttctccacaggtccaaggatcagtag

SEQ ID NO: 49443 - DNA, 330 bp, Oryza sativa
  Clone ID: PAT_MRT4530_52024C.1
ttagtagttggtagtgaggtgcaccagcctcaccgttttcctcatcttgaacggctccctgcagttggatccaccaccatccacaccacgtccttcaatgtcgatgtctcgagagaagacacagtgtgccgcggtggccgacggacgagcgcacgacaccgctgtggtgagctggccggggtgacctcgcagcctaggccttgtgtttgttgggctatcgagccattcacatgctattggtttatcagcgtaccgagctggcacaagaatggcccatttaccaggctgggccaggccaggccgcccgtcgtgccaagattctagacccat

SEQ ID NO: 49444 - DNA, 364 bp, Oryza sativa
  Clone ID: PAT_MRT4530_52025C.1
atgcggggtggagaaacgccggggacggggatgtggggcgggggactccacaacggtggaggtggatatgacgacaacgctcgatccaatgatgggcgcgcggcaaaagggattcagcgacggtggaggacgcggtatcggtggcggcgatctaggaggaggtgcgggacgggagggaggtgtggtgccgcggcgtattgcggaggccgaggggactcgcgacgaggaggatgagccgtggcgaagggggagcggcgcggcgatgtggggcggcgctagcgtgtttttttttcccgctgattgcggattgcgagcaatccgtaggaatcgcgcgtgggtggtgcagagggatgcggaggagtag

SEQ ID NO: 49445 - DNA, 261 bp, Oryza sativa
  Clone ID: PAT_MRT4530_52026C.1
atgtcattggctcagggtgcgccggtccacggtagacaaagtccacgggaccagggaagggtggcgcaccacgtggcgctcacgggcacagctcaagccggcccggcggccatggcgatgcggcggcgcggcatgaagcagcggcagcgcggggtcggccaccggcggagagcggcggcgatgcggcgacgtggagtggtgctaagagagggagacatcggtcctcatcgaggggttcgccagtgcggaagaaggcgatga

SEQ ID NO: 49446 - DNA, 150 bp, Oryza sativa
  Clone ID: PAT_MRT4530_52027C.1
atggcaacatcctccgacggtgcaggcggcacgggcggcggccgacgacatggcggcgcacgggcagtgaccagcggcgcagcggttgttggcgacgcgatgcacaacagttatacggttagaaaagtaatgcggaaggagttttcatga

SEQ ID NO: 49447 - DNA, 324 bp, Oryza sativa
  Clone ID: PAT_MRT4530_52028C.1
atggcgccgcagaacaaggaagacaaagcatcggccgccaatattgatccaaaactgccaatcagcgagagcgatgaggcgagggcacacgctgccaatgtggcaaccgacaagggggagtgcttccgggccaaccggtggctaagcctcggcctcgtcgtcttcctctccgccgcctgcgtcttcttcgccttcaccgacagcgtcctctacaaggggaaggtctactatggcttcgccctgccgactaggctcaacctcttcaacctgaacaagaaagaagagcagaagctgttcaaggacctagagcccgagctcgattag

SEQ ID NO: 49448 - DNA, 1059 bp, Oryza sativa
  Clone ID: PAT_MRT4530_52029C.1
ggctgctgagaactcccccttatgtgggaagctgaagaaaaagggttatgaagccctgtacatggttgatgccattgatgagtacgctgctggtcagctataagtgagtttgaaggccatgaactcgtctatgacaccaaggaaggtctgaatcttgatgagagtgaggacgagaagaagctgcaggaggaactcaaggagaacttcgagggtctgtgcaaggtgatcaaggaggtgctcggtgacaaggtggagaaagatgctgtctctgaccgtgtggaggactctccctgctgactagtcactggggagtatggctggactgctaacatggagaggatcatgaaggcccaggatctgagggactccaccatggacggctacatgtcgagcaaaaagaccatggtaaccaaccctgttaattccatcatggacgatctcttcatagctgcctctgctgacatgacctacatgaatttgaacgacttgctgtatgctgctctttctatacttgtcctccttaatctcgagattttatcctctaagacccctaaaaccttttgtatctagatatccatttgtatttttaatgtcaagcctgaacccttgacaccttactaatttgtccttctacgtactcattatatcgctcattcttatcagacattgctacacgtattctactttctccgtttgtcgactacatcctccacatatattattccccacccttcccttggctgatatcctgcctttcatgctgtgttatctccccgtccattaatcgctgctcgattttatacctttattcagtctaaaccctgcaacaaacttcctactctctactctccattgatcaaaacatatgtttcgaccatttcatactcgatgtattttttgttaagtttaagagtacttgacttgttgttcattatactagttccactggtatactatgtgaactcacgtttcttgcttatatgtatatttgttgatttattttattcactctattgattatcgttattagagttcctcgcgcccgaccataccccgatg

SEQ ID NO: 49449 - DNA, 3554 bp, Oryza sativa
  Clone ID: PAT_MRT4530_5202C.1
atgagctttggaaatcatatcatcaactggataaaagcccactacgaatttccttttcaccgcgacaaaacagcgcaactgtaccatccacgtcgatattatgtgcctagattccaagacaaagaggcggtgaaactgatcttcacggagcgttttcctaatgcgacccggttgtgtctgtccactgggtcgcagcaaatgctggctcgtgagagcagcagcagttacaaaatcagcatgtacgcatcaatggagaaaagtttgccggcgtcaaccgtcaaacatttttctaagagaaaaacaaagagggaggacaacgccggcgtggagctctatcgcagtggccttcgtcgagatgggagaatccaaccgtctgggcctgcgaggcgccagcccagatttcgtcgtcgcggcccgctacagatgggctgccccctgctctccttttacatgttgctaggccgaattggctgggccaattgccgggatggcacagtgaggagagagcggtacagtgggcagcagcacggccacgtgcagcgtgcgtccaaccccaagccgtctcgtgagcggtggtctcgcacgccacatgatctgcagctgatgatgatggttgatgagctgatgttgagtgaacaaaagggatggaggacacggccgggcacgcggctggccgccgtggtccgccaatccggcaagatattatggcagagatgataagcaatcccaatggtgatggcgactgtggtaaggtcctctcggtcatcctggtgaagcagcgcacctccacctacggcccggacatccctctcctcaggctctatgtcaagcacgagaccaaggacaggatacgagtccagatcacggacgcagacaagccgaggtgggaggtcccctacaaccttctccagagggagccagccccgcccgtcaccggcgggaggatcaccggcgtgcccttcgccgccggcgagtacccgggtgaggagctcgtgttcacctacggccgcgacccgttctggttcgcggtgcaccggaagtccagccgcgaggcgctcttcaacaccagctgcggcgcgctggtgttcaaggaccagtacatcgaggcgtcgacgtcgctgcccagggacgcggcgctgtacggcctcggcgagaacacgcagccgggcggcatccggctgcgccccaacgacccgtacaccatctacaccacggacatctcggcgatcaacctcaacaccgacctctacggctcgcacccggtgtacgtggacctcaggagccgtggcggccatggcgtcgcgcacgccgtgctgctgctgaacagcaacggcatggacgtgttctacagggggacgtcgctgacgtacaaggtcatcggtggcctcctcgatttctacctcttctccgggccgacgccgttggccgtggtggatcagtacacgtccatgatcggacgaccagccccaatgccgtactgggcatttgggttccaccaatgcagatggggatacaagaacttgtcagtggtcgagggcgtcgtggagggctaccggaacgcgcaaatccccctcgacgtgatctggaacgacgacgatcacatggacgccgcgaaggatttcacccttgatcccgtgaactacccgcgtcccaagctgctggaattccttgacaagatccatgcacagggcatgaagtacattgtcctcatcgaccccggcatcgccgtgaacaacacctatggcgtgtaccagcgcggcatgcagggcgacgtcttcatcaagctggacgggaagccatacctggcgcaggtgtggcccggccccgtctacttcccggacttcctcaaccccaatggcgtctcgtggtggatcgacgaggtgaggaggtttcatgaccttgtgcccgtggatggcctctggatcgacatgaacgaggcatccaacttctgcaccgggaaatgcgagatcccgacgacgcacctgtgccctctgcccaacacgacgacgccatgggtgtgctgcttggactgcaagaacctgacgaacaccaggtgggacgagccgccgtacaagatcaacgcctccggccagacggcgcggctcggcttcaacaccatcgccaccagcgcgacgcactacaatggcatcctggagtacaatgcgcacagcctgtatggattctcgcaggccatcgcgacgcaccaggcgctgcaggggctccagggcaagcggccgttcatcctgacgcgctctacgttcgtcgggtcgggcgcctacgccgcgcactggaccggcgacaacaagggcacctgggagaatctccgctactccatctccaccatgctcaacttcggcatcttcggcatgccgatggtcggcgccgacatctgcgggttctacccgcagccgacggaggagctctgcaaccggtggatcgagctcggcgcgttctacccgttctccagggaccatgccaacttcgcgtcgccgaggcaggagctgtatgtgtgggagtccgtggccaagtcggctcggaacgcgctcggcatgcggtacaggctgctcccttacctgtacacgctcaactaccaggcgcatctcaccggcgctccggtggcgcggccggtgttcttctcgttcccggacttcacgccgtgctacgggctgagcacgcagtacctgctcggcgcgagcgtcatggtgtcgccggtgctcgagcagggcgccacctcggtgagcgccatgttcccgccggggagctggtacaacctgttcgacacgaccaaggtggtggtgtccaggggcgagggcgccgtgaagctggacgcgccgctcaacgagatcaacgtgcacgtgttccagaacacgatcctcccgatgcagcgcggcgggacgatctccaaggaggcccgcgcgacgccgttcacgctggtggtcgcgttcccgttcggcgccaccgaggcggaggccgagggcgccgtgtacgtcgacgacgacgagcggccggagatggtgctcgcggaggggcaggcgacgtacgtccgcttctacgcgacggtgcgcggcaaggcggtgacggtgaggtcggaggtggagctaggcagctacagcttgcagaaggggctcctcatcgagaagctgtccgtgctcggactggagggaacaggcagggacctcgccgtccatgtcgatggcgcgaacgccaccgccattgcaacgtcgaggccgtactttgcaggtgccgaggcggagctgcacgggcaccgcgacgtggagggacacaagaagagcgtgatggtggaggtgggagggctggcattgccgctgggcaagagcttcaccatgacttggaacatgcagatcgaagcatagatcgaagctttcttatgctttcatctgcatttctccattctgtctctctgattattttaggttctagatcagcaaggttatgtcaacgtgttcaacgacacaccaccatctctgattctcttctgcatttgaatccttgtggaaataaaacatgattctaaacataaaaaaaaaaaaaaa

SEQ ID NO: 49450 - DNA, 510 bp, Oryza sativa
  Clone ID: PAT_MRT4530_52030C.1
atggcgaggcgcaacggcggatggtggcaacacttatcgatttgtttttcgaaagcggatcggatggcgtctgaggcgaatgccgcaaccgtggtggatggtgcatctccaaacgacgactcgggagagagactgtggggacaggagagagatagggagatacagacatggagcgatgaagccaaggccagcaacggcgaggcacaccttcttcctgagcttcggagcagtagaggagggtgccgaccgacggcggtgcacgcctgcgccggcaaggtcgtcgtgcggcctggggatgtgttcgtgacacgccggccgatgtggctggcgtgtgtatacgccaagtgcggacacatggtggccatgacgaaggcgttcgacgaaatgccgcaccggggcgtgccgtcctggaacgcgctcatcgtggggctacgcaaggaacggaaggtttcctcaaggctcaaagggtgtttcatggagttgcggcgcagggacaggaagtgccgctaa

SEQ ID NO: 49451 - DNA, 1820 bp, Oryza sativa
  Clone ID: PAT_MRT4530_52031C.1
aggccgaaaagcagcagttttgagcttcatcccaacctgcaagaacactgcaagaaacttcaaacaacagctgatcgacttgcttctagtttttacgtcgacgaaattttcctaagcaagttcattgattcattcgaacagatcagacgccttgacaactgcctgaactaaaacggttaaaactacaagaagctacagcatgtcagattcacagcaaacgactcggtcgacgaagagttttgagcctagcagacgctggctatctggaggcgacgtgccaggtgcacgaggtgccacgtcagcgccatcaggcacagcacgttgcacagagacgagtagccgttcagcttcttgagccgctggttcagcgtcgccacccggctcttggacgtctgctcgtccaccggcgccgccgccgccgccgacttcgccgccatattgttgttgcctgccggcttgcgcgccgccgccgtgggaacggtggtggtggtggccgtgttgcccgccgcgacggtgaccgttggcgggtcgacgatgtcggccatgtccctccccctgccttcctccttctccaccttcatcctctcgaacatcactttggtggcttttggctccaggagcagcatgttggcgaggaccagggcgagcgcggcgaggaggttgacgctctgggcgcgcgcggcgagggagctgcgctcgcggccgagcaggtgcgccgcgagcgcgaggccgacgccgtacgccacggcgcggaagtacatcgggaacagcttgctctgcaccatggcgagctgctgccggggcagcgccgcggcgaggacgtagctggacacgaacgtcacccacagggacgcgccgtacgccgcggcgaaccccagcaggtgcatcaccgccgtcgcggtgcgcgccgcctccctgggcccgccgccgaggaggtgcgcggcggcgtcggacgccacgtcgcgcgccctccgcgcgatgtcggagaggttgctggccgcctcgccggccttcgccttcacggcctcctcggcccgcgccgccttctgcgccgcgcgccccgcggcgtcctccgtgcactgctcggctctctcggcgacgtcggagaccctgtccttggcgtccatggcgcgctccctagcgctctcccgggcatgtctcgcggcgtgagagaccttgtccttggcattcctcacggtctctgctgctccgtgctggacgtgagacgccctctccttggctttgcccgccgcttcggagaccttgtccttggctcccacggcggtctccttcactttggacgcagcgtcgaacaccttgtcctcagctatctccttagcatgcgagagcgcctcctctgcacctctcgccgcctcctccgcgccgtgctcgcctgccgacgccttgtccttcgcgccctcctccgcctccctggccgcgccgcagagcctgtccttgcaccgcttcaccgcgccgaacaccttccccgtcgcgctctccttggcgtcggacatcttctccttgccgccctccgccgcgtcggccaccctgtcggccgcgtcggagactgcgcccctggccttgtccgtgagcctgccctcgccgccgtcgagggagtcagggggcaggacgtgcgtctccttcacggcgtcgccggggtacagcgggtgctcccgctcgtactcgacgatgaccacgcggcgtccctcccggacgacgtgctcgccggccgtggacggcggtggcgtcggcgccggcgaccacacgccggccgcggccagggtggagagcacgagcccgatggccaccacgttcatcat

SEQ ID NO: 49452 - DNA, 573 bp, Oryza sativa
  Clone ID: PAT_MRT4530_52032C.1
atggcgaggcgcaacggcggatggtggcaacacttatcgatttgtttttcgaaagcggatcggatggcgtctgaggcgaatgccgcaaccgtggtggatggtgcatctccaaacgacgactcgggagagagactgtggggacaggagagagatagggagatacagacatggagcgatgaagccaaggccagcaacggcgaggcacaccttcttcctgagcttcggagcagtagaggaggaaaaccaacgccgacgttgttcttgaaaaacttccatcttgcatcgttgccaccaccattactgtatcagcaacataaggtgcacgcctgcgccggcaaggtcgtcgtgcggcctggggatgtgttcgtgacacgccggccgatgtggctggcgtgtgtatacgccaagtgcggacacatggtggccatgacgaaggcgttcgacgaaatgccgcaccggggcgtgccgtcctggaacgcgctcatcgtggggctacgcaaggaacggaaggtttcctcaaggctcaaagggtgtttcatggagttgcggcgcagggacaggaagtgccgctaa

SEQ ID NO: 49453 - DNA, 279 bp, Oryza sativa
  Clone ID: PAT_MRT4530_52033C.1
atgacatccggggttggaccaaagaatgcaactgcagtggcggtggggcccggctcagcagggagacaaatcgatgggtgggtcccacgtgcagcacttgagcagctgcctcttgcaggggtgacatggagggtttccagaaaaataatcagtcttaaactgaaaaaggaagatatattactttccaaaggaaccgttggtgcagcaaagaaattgttcttttttcctgaggataatacttttgggttagttatatgtgatatactagtatgcgtctaa

SEQ ID NO: 49454 - DNA, 549 bp, Oryza sativa
  Clone ID: PAT_MRT4530_52034C.1
atggcgacgaagctcgcagcgacgacaagcggacaaggacgtatgtaccttgatcgaaggagagggtgccgccggtcacgagctcccggcgccgacacgttccctgccgggccggctgcggccacgctccctgccgcccgcggccaggcgcccgccgccgcccacggcccgccgcccgccactgccccctcgaccggcgccagccgcccctatctcgccaccccgcgcccgacgcagctggccgccgccctcccgacctgcgtcggccgccgcctcccgcccgacacagccggtcgccgccgcctccatctcgtcgcctcgcgccaggccgccggcggcggcctccatcccgtcgccccgtccggggccgccatggccggcctccatcacgccgccccgccggaggggaagggaggggaggaggagatgggagctcgctccctccccgatccgctccgctccggcgccccctgccgccgctccgttccgccggcgcgcccgtggtcctgtgtgtccccccacatcttctggcgcaaccggcaaccctag

SEQ ID NO: 49455 - DNA, 761 bp, Oryza sativa
  Clone ID: PAT_MRT4530_52035C.1
aatcctccttttcctttgggccaagtctggcccaaagcctccctctctctccctcggcccgcggccaaagtcctcccttcctccctctctttctctccctctccttctctccctcctcttgggcctccccctcctggcccactccctcctcctccctctctcccccgggccgcctctccctcatctcctcctgggccggccgcccggcccaagctgagccgctcccttcccgcgcacgtgcgccgcacgcgcgttgagcgcgccccttcccgagctcccccgcgaccacaccacctctccccgcctcctccttctctttcctcggtgccggccaccctccagccgcccctaccgcctcacccacgcgccgtccggccgtgccgccgccttccccggcgtcgcagcagcctcctctcccccggcctgccctccgttttgcacggagacccttggaggtgcgcccccgccggcaactgtggcgttgccgccactgttccgcctccggccgccattgtcgcgtttcccatgcgccggccgacgtcgccaccacctctctcggctccgtgacgctgccctcatccccggcatcacctcctcctcgcccgaagctcgccggagtggcctcctcgtcggcgtccagtacctccccgcctccggccggctcctgtacgtcgccggtacgccgatcgacgtcgcagcgttgtcctctcctccagctgctcctctgtttcgccggaatgccgtcgcccgttgtaacgccc

SEQ ID NO: 49456 - DNA, 2549 bp, Oryza sativa
  Clone ID: PAT_MRT4530_52036C.1
ctcctccctcttgcttgttagtttcctcgtagctagtggggtgagggtgtgtgtttggttggtgagcaatggcggcggctcgcggtggaagacgacgacgaccgtggtcgtcgtcctcctcctgcggctctccgtttctgatgatgctgatcagctgtttgctgtggctgcaccgggaagcagctccgtcgctcgccgccgataccgtgaccgtcggccggccgctctccggccggcaggtgctcgtgtccagaggtggcaagttcgcgctcggattcttccagccagataactcgtcgcagcgttggtacatgggcatctggtacaacaaaatcccggatcacaccaaggtgtgggtcgctaacaggcgggccccactctccgacccggacacgtcacgcctcgccatctcggccgacggcaacatggtcctcctcgaccgtgccaggccaccggtctggtccaccaacgtcaccaccggcgtcgccgccaactccaccgtcggcgtcatcctcgacaccggcaacctcgtcctcgccgacgcgtcgaacacctccgtcgtgctgtggcagagcttcgaccacttcggcgacacgtggctccccggcggcaggctcggccggaacaagctcaccggcgaggtgacgcgcctggtggggtggaaaggctacgacgacccgacgccggggatgttctccctcgagctcgaccccggcggcgccagccagtacgtgatgagctggaacggcagcagccggctgtactggagcagcggcaactggaccggcggcatgttcagctccgtgccggagatgatggcgagcaacgccgacccgctgtcgctgtacacgttcaactacgtcgacggcgagaacgagagctacttcttctacgacgtcaagggcgaggtggtgctgacgcggttcgtcgtcgatgtcaccggccagatcaagttcatgacgtgggtggactccgccgcgcagtgggtgctcttctggtcggagcccaaggcgcagtgcgacgtctactcgatctgcggggcgttcggcgtctgcgccgaggacgcgctgccggcgtgcagctgcctccggggcttccacgcgcggcagccgcggcggtggctgcagggcgaccacaccgccggctgcgccaggagcaccgccctgcaatgcggcggcggcggcggcgcgcagccggcggcgcagaagacgaagagcgacaggttcttcgtgatgcccaacgtgaacctgcccaccgacggcgtgaccgcggcgagcgcgagcgctcgcgactgcgagctcgcgtgcctcggcaactgctcctgcaccgcgtactcctacaacggcagctgctcgctctggcacggcgacctcatcagcctccgggacacgaccggcgccggcaatggcggcggccgcagcatttcgatccgcctggccgcgtccgaattctctggcaacgggaacaccaagaagctgatcatcgggctcgtcgtcgccggagtcgccgccgcggtgatcctcgccgtcgtggtcacggtcctcgtccggagaagcagaaggctgaaggcgttgcggcgagtggagggctccctgacggcgttcacgtaccgtgacctgcaggtcgcgaccaagagcttctcggagaagctcggcggcggcgcgttcgggtcggtgttcaaggggtcgctgccggcggacgggacgccggtggcggtgaagaagctggaaggtgttcgtcagggggagaagcagttccgtgcggaggtgagcaccatcggcacgatccagcacgtcaacctgatcaggctgctcggcttctgcaccgagcgaacacggcggctgctggtgtacgagcacatgccgaacgggtcgctggacaggcacctgttcggccatggcggcggcgtcctgagctgggaggcgaggtaccagatcgcgctgggcgtggcgagggggctcgactacctgcacgagaagtgcagggactgcatcatccactgcgacatcaagccggagaacatcctcctggacgacgcgttcgccgccaaggtcgccgacttcgggctcgccaagctgatggggcgcgacttcagccgcgtgctgacgacgatgcgcgggaccgtgggctacctggcgccggagtggatcaccggcacggcgatcacgaccaaggccgacgtgttcagctacgggatgatgctgttcgagatcatctccgggaggaggaacgtggagcaggggcaggacggcgcggtggacttcttcccggcgacggcggcgcgcctcctgtttgacggcgacctcaagggcgccgtggacggccgcctcgccggcaacgccgacatgggcgaggtggagagggcgtgcaaggtggcgtgctggtgcgtgcaggactcggaggcgacgaggccgtccatggggatggtggtgcaggtgctcgaggggctcgtcgacgtcaacgcgccgccgatgccgaggtcgttcaaggtgctcggcgatccgtccaactacgtcaagttcttctcggcgttgccgtcgatctcatga

SEQ ID NO: 49457 - DNA, 1085 bp, Oryza sativa
  Clone ID: PAT_MRT4530_52037C.1
gtttttcaaacactcctgccagccacggcctctgcccctccataactcctctcctccttcccccatttggccatctttgcccggacgatcggaccaagcaagctgcaagctgctgctgcttccactccatgtgccccagagcagccatggcgagagcttctgctcagtgctttggagaggaggagtacatcgacctggatctcagttcttgccgggggttcgagttccgggtgtgccggagcgcggcggcgccaccgccctgcggggatgagatgctcttccggggcagcaggctgcacaaggccaagcatcagcaggaagctgacgcgggcggcggcggcggaggtggaggtggatgtggcggcggcaggaggagcaccgcgacggtcgcgccgtggcatgctgctgctgctgttgcggggatccgcaatgcgcagcccgcggccaggatgcaacgacagccggacggcggcgccaccggccggcgcaagaagggcgccgccgggtccgtgcacgcgaagctgcaggcgtcgcgtgccttcttccggtccctgttcgccaggacctcgtgctccgacgagcaatgccacggcgtcggcgtccgggccaccaccaggagcagcagggcggccaccgcggctagcggagcggccgggtccgtcaagccggcgccgtttggccaaatcaggaacagctacggcagctgcagcggcaggggggcggcggcggcgccgaccaccctgaggagcagcattgagcaggagaagctgatggacgaggaggagcacgcggccagcgtccgccagcgcaagtccttctccggagtgatcaagtggcgtcctccgccggcgcctgcagccgcagccgcgaggccgccgccgccgccggcattcccgacgaggaggagctcctcggcagcgagtgacccgccgctgaagcgatgcagcagcgcccggtccgagtcggaggggctcatccagggcgccatcgcctactgcaagcgctcgcagcagcagctcgtgctcgccaggaagagcgtcagcgacgccgccctctgctccctgcaattccaaatccagctctag

SEQ ID NO: 49458 - DNA, 693 bp, Oryza sativa
  Clone ID: PAT_MRT4530_52038C.1
atgcagccgtcgccctcgctgtcgtactactcgtcgatgctgtcgccgaggaagctcatgcagcgcgcgttccgccgcagcggcagcagcaagtcatctcgccggaggaatagcaaggacgacgtcggcggcgacaactcggccagtcggcctcggttaacggcaaggtctccgagtcgcggcggtgcaaggcaagatctgctggaggtcatcccggagaaggtcaaggggagcagggtgaagacggcgatggagaagaggttggaggaggagcagcctcgccggtgggagatggcgtggtggagcaacgacgtgatcgaggaggcgcggagcaagctgctggagaagcggcagtgcagcagggtgaaggcgctcctcggcgccttcgagaccatcatggatgccgagcccgccggcgacggcgccaccaccatcgccggcaagccgcagcactacctccatcgacggcaaaccgcagcactacctcccaggcacccagctgcctacccaaacgagaagagtgagagggagagagagagaggagaaagggagagccggagaggaggcgagagggtgatgacgtggtcagctgatatgtggggtccacgtgggtctcacgctaactcagcagccacgttggacaaaaccgggttgaaaaccgtcaaaggacctcgcgtgactggttttgattag

SEQ ID NO: 49459 - DNA, 195 bp, Oryza sativa
  Clone ID: PAT_MRT4530_52039C.1
atgccgtctgtgactgtgagtgtgcccggctgcccggcataccaaacattggagaaaaaggacaatatggcactcttttttcacgcgggcgcgctcggcaccgaccacggcaccgacgacattcgcgccgcgtgcatcgccgcgcttccggctgcgcgcgtcgcaccgccgccacaccaccgcacgacgcggtag

SEQ ID NO: 49460 - DNA, 648 bp, Oryza sativa
  unsure (1)..(648): unsure at all n locations
  Clone ID: PAT_MRT4530_5203C.1
cccaccaaacgtcgcccgctgtgtagtgctttttggcctcaacatcgttaatcggtntgccacatcttcccacagtgtagcgttcattcacaaatggataagtatctcaaatcaccaacagaatcgatttattaccactccaattcaaagttcgatcgcgccaacgccttcgtgtaggtgaaactgggagcaccgttgctcgtcccggaccccacaggctaattcaccgtcaccgcattcgacgccaaccactgccccggcgcagtcatgttcctcttgaggggcgcctccttcggcagtgtccttcacaccgaagactgccgcctcaccccggacttctgcttcgtcgccgcagactaggtcttcctcgactgcacaatcgccgcctgctctctccacttcccctccaagcacgactccatccgccaggtcatcaattgcatctggaagcaccccaatgcaccggtggtttatcttgtgtcagacatgcttggccaacacccccacactcatggaggtgtcaaaggtgtttggatccaagatttatgtagacagggacaagaattcagagtgttatcacaccctctccctcgtcgcgccgtgatgnngtnttgcgggagcgccagtcccctcaactagttgtcgcag

SEQ ID NO: 49461 - DNA, 218 bp, Oryza sativa
  Clone ID: PAT_MRT4530_52040C.1
ggagctaagctctgaaatatatcaagacgaattcccagaagggccgaatcgatttccatccatatctacggacacatccatcccttttttttccctcctcttctcatctatcaacttcttctttcttcgtgttcttcagctctgctagctactaaccctcggagcagctctctggaagaacgggcggcggcggcggggtatatcatggtgatggtggg

SEQ ID NO: 49462 - DNA, 152 bp, Oryza sativa
  Clone ID: PAT_MRT4530_52041C.1
agccaaccaaggaaaagatggatgtcaacgttgttagcaatcctggagtcttcttcttctcagtccttgatttttgtgacctccttggagtacccttatgcattgaagattttggcctctgcttcatctctcacaagtgctccatctgtgaa

SEQ ID NO: 49463 - DNA, 1631 bp, Oryza sativa
  Clone ID: PAT_MRT4530_52042C.1
cccccccgaccgcctcctcgtccggaattcccgggtcgacccacgcgtccgcaaactcatcatcgtgtagttttaggccatctgagggcctttgaatggctctcggcctccttcatttttcatagcatttgtgtagtgtgtgcaaatccatcatcgcatcttcatatctgaagaaatgaaggtgaccactcagctcaagcccatggcctcctcgtcgacgtcgccgtcgccgtcgcggctgccgcggagcgcgagcggcaaggcgcccacctcgccgccgtccagctccaacgcctcgcgccgccaccaccagcagccgccgcgggcctcggcgtcgacgcccgccaccccggcgccgtcgcgccaccacctcaggtcgctgtccatcagctgcatgacgatcaggaccgacgacgactcgccgccgccggccgccacccacaaggacaaggcggcgacggccaagccgctgtcctactactcgtcgatgctgtcgccgaggaagctcatgcagcgcgcgtcccgcgcgttccgccgcagcaagtcgtctcgccggaggaagagcaaggacgacgtcatcgtcggcgtcggcggcggcggcggcgacatctcggcctcggtcaacggcaagggctccgagtcgtcggcgagcgtgccttccttggatgcgatcactaccaccgacgacgacgtccatggcggcggcgcaaggcaagatcagcaggaggtcgtcccggagaagatcatacacgaggcgaacacgccggtggtgatcgccgtcgcggcggtggaggaagaagagccgaacacgatcaagtcgccggagccggagaaggagatcgcgaccaccgccaccaccatcatcgaagaggaggaggtggtcgacgacgacgagcccaagaaaggcgacgccgctgctactccagtgcccaccgactcgcctgccgccgcctcctcgacggaggaggacaagttcgtcgtggtggtgaaggaggaggacaagttcttcgcggtggtgaaggaggatgacaagttcgtggcggtggtgaaggaggcgatcaagaagcagcgtgacgacgacgccgacggcgacgagctggtgcggaggttcaaggggagcagggtgaagacggcgatggagaagaggtcggaggaggagcagcctcgccggcgggagatggcgcggcggagcaacgacgtgatcgaggaggcgcggagcaagctcctggagaagcggcagtgcagcagggtgaaggcgctcgtcggcgccttcgagaccgtcatggacgccaagcccgccggcgacggcgccgccgccaagccgcagcactaccaccctcgccgttgattaaggaggaggaggccttaattgaaggagattaataaccactaatgcttgcttgcttcgtaaattcgccttttggatttatttatttactgctccgacttttcgtcacacactatactactgcatcacggagtaaatatatgattattctgtgatgatttaattaaggagggagatgatagaggaggatgatgtactcattttgtttcagaaaaatttctgcactgaaaaaaaaaaaaaaaaaaaaaaaaaaaaaaaaaaaaaaaaaaaaaaaaaaaaaaaa

SEQ ID NO: 49464 - DNA, 1130 bp, Oryza sativa
  Clone ID: PAT_MRT4530_52043C.1
ctagggctgacacgttgaggcgtcggggccagctggggtctccaccgtcggctccggtggacggcgaggcacgtttgggccagccggggtctccaccgtcggcttctccgccagccaccgaatccccttcgtccacgctcccaacatcgccaccagctccgtctccgcccatcgggtcattggcctcggcatcacctctaacgacgacgacggcctcacgggtggctcgaccgcgtgcggctgcgaagcaaggcgacttggttgacggcggcggcggtggcggcgactgcttgcgaggtgcggcgaggcgacgacggcgatggctggagggtggttcgaccgtgcgcggttggtccatgcgatggctgcgaggcacagtgaggcgacaacggcggctccttgctcgaccgcgcatggcgtagctgctccgcacagggcctgacgcgacgagatgacatggtcgaagggtaaattagtccgaggatatttctttctactccaaactaacaccgttatcctagccgccgccacccgttcgctctccctctgtcgcgccgccgcctccgcctccccctcgcgccgtcctcgtcgccgagtgccgccaccaccccctcgcgcctttgccacctcctccgctgccgccatcgccggtcactcttccacctgcacgcccgccggtccccaccccgacgacatcgacctccacgcccaccggccgcccaaccccgacgaactcgtctcctgcgtccctcaagcccgcaccggcggcgccgacgccgccgccgcctcctcctgcggcgtcggcggttggagggtgggatttctttaacccgttttacggggcgcccctctgccgccatcgccgccgccgtgtccacctccgccgtcgtctcggagcgccgttgccgtcggcgaggcgagcagccatctccgccgctgcctccccctccccctcgtgcgccgctgccgtctcatcgccgtcttcgagcgcctccgcctcagggccggcccagcagtgcggccgcactaggccctcaaactcacaggtcccccacctagctccgtaagaatcgtaaagagcgatgccagagccgcttattccaaaacgcgatacgtctgagattgccgcc

SEQ ID NO: 49465 - DNA, 312 bp, Oryza sativa
  Clone ID: PAT_MRT4530_52044C.1
atgcccccatggagggagaggggtatcattgccaacgcccccaaggaggttacgacgcccaaaggcgtcaccgctgccagcccgatgaaccatcaggcgaggctttcgcccagaacccatgcaaccttgcttgaagttcgtcgcccatcaactcaggaaccatctcgcaagcagattagcacgaggcctccaccgcaccacgtcggcacccctccaccggccgaccaccacacttgctgcagagagctgccgccacccctaggaactggcccaggcctcctccgtcccaccatctgccggcctccttgctag

SEQ ID NO: 49466 - DNA, 327 bp, Oryza sativa
  Clone ID: PAT_MRT4530_52045C.1
atggcgctgaccttgggaaactcagcgcaagccaacctggcgctgaggtgggacttggccgtttcggccttggcccagaccagcaagccttctggatggcttgcgggctgggacctcagcgtcagcaaaaatggcgctgaccttgggaaactcagcgccagtcaacctggcgctgaggacctcagcgccagccataatggcgctgactgtgggaaactcagcgccagtcaacctggcgctgaggtgggacttggccgtttcggccttggcccagcccagcaagccttctggatggcttgcgggctaggacctcagcgccagccataa

SEQ ID NO: 49467 - DNA, 187 bp, Oryza sativa
  Clone ID: PAT_MRT4530_52046C.1
cccacgcgtccgatgagctaagtggtggggcacggcggtcgaccactggccgctcacctattgccccaccgctccggtgatcgccctcaacggatgaccggtgttcttagctcgccgaccagagctgcacacggtggtgtatgtacgtagcaagaattcgggtttggattgacgaaaaaccatgtat

SEQ ID NO: 49468 - DNA, 1094 bp, Oryza sativa
  Clone ID: PAT_MRT4530_52047C.1
taaaagttggaagaagcctttgagagttctgcactctgcacgcacagacaaacgccacagagcggctgcagcgctgcagctaatactagctcgaaacttctttgacccgaagaaacatccccaactggcagctaggtatcatggtgaaggaggaggagatcatcacagaggcagcaggagcaagaggctacatggagatgcttgggcttggagaggaggccgccgactacctgatgtgcctgtctccttcttcctacctgtcttctcctgctgcttccaccaccacagctgtggcttctcctacctgtgcctcgtacttggctcctcacccttaccaccacctgctaagcttcagtggtcaggatcagtaccacggtgatgacgtctttgggttacagtattacggcggcgatcaagtaattccggcggtggttccgcagaagtccagcccgaccaccgagtgctcctcctccgtctcctccatgtcgtcctcgccgacggccaccgccatttccagctctaagtcaccggccttcaagaagaagggatcgagaggttgtgatcagaggaaggctactgctcctgctgctgccacaaccacaaacaagagacccagggtgaggagggagaggctcggagagaggatcatagcgctgcagcagctggtttctccgttcgggaagtctgatacggcctccgttcttcacgaggcgttgggatacatacgcttcctgcacgaccaggttcaggtcctgagctcgccgtacctgcagcgcctgcctccctctgctcgcgtcccggagcaggagagaggcacgccggcggcggaggagcaaccgccggcgctgcggccgagcgacctgaggagccgtgggctgtgcctggtgccgatctcgtgcaccgagcatgtcgccggcgccggcgccggcaccggccacggcaacggcgccgacctatggtcggtggcggcgggcatggcgaaggcgacggcgaccgtgacggccgccgtggagaggagcaaggaggcagccgccgccgccgccgccactgccgcattgctgcgtgctgatcgtccagggcagcagctggcctaa

SEQ ID NO: 49469 - DNA, 223 bp, Oryza sativa
  Clone ID: PAT_MRT4530_52048C.1
tttcttttttatgcagcacacaaaccgaacccgactagggggggctttactgtgcattagcggggcgaacacccgtaagcaagagaatacactggagcaacacacccggatcacggccgcgaacccccacacggcacactttgcagagcgcacatggcaggataggaaaccccacatgggaggggggcctccacccctagaagacaagtgggcctaacggaag

SEQ ID NO: 49470 - DNA, 291 bp, Oryza sativa
  Clone ID: PAT_MRT4530_52049C.1
atgatggttgcgacggttggaatggtcggtaataccatccacccgtcattggggatcaatcccagccatccatccaaaccctgcatccatcggcgccacgggaggttcagccaaaccccccgagacatgggttggctcaacccagcccatcttcgactggcggcctcctttgttgtcctccttcgtagacttgtgaattttggcccaatatgttgtgttatttctaagttcttgacccattcatacataagtctggttcttgacaccgtccgattgatttatcgtctgagt

SEQ ID NO: 49471 - DNA, 322 bp, Oryza sativa
  Clone ID: PAT_MRT4530_5204C.1
tctcgcctgctacagtaaaattcccctttgtggaccctttttcctcctcgattccggcggccttgtcgccggtgacgggagggagaggggtcgtccccctcccctagtttagtatagtagccgggctagcctcgctaggtcgggcttttcccgtttctcgtttctatggcgatggaagttgaagacggtggcggcggcgcgattgaggccggtgaccgaggaggcgacaaggttggcgacggcggcggtgcggatccggctcgcggcggccgcggcggcgcggattccagtctgcggcgactgccggggcgcggaccagctc

SEQ ID NO: 49472 - DNA, 2454 bp, Oryza sativa
  Clone ID: PAT_MRT4530_52050C.1
atggaagaggagaagagggcaagggcggcggaaagggatagggctatcgtcaggagcccgcggaaagggaaagccccgcggatcgagccgctggatgcggatgattctggatggggcggcgatgcctcgctggaggtgtacagggaggccgcggcggtggcaaccagaggcggcgccggcggcggcggcgagcggtgcgagcacatgacctgcagcgagcatgacgttgcggaaatcgtgtccaagattgcgtcctggggcgacccggtgtgccaggatgaaacctgtatgtgcaccgagaggcacctcatgatggtgtgcgtggaatgcgatatgcatttctgcattggaaggtttgccaagaagtctaagccgcgaggacacatcgaggagcatgcgttcgacgatgggcatccggttgcgctgtggtacgaagatccgtatactggttactgctttgagtgtgaggatcccttgaccattggtggtgaggagggtgataagggaatgaaggtcaaaggcgaggaaggctgtcgcgcatctgggtctgatagtgggcatggctgtgtcatcggcgcatctgggtctggtagtgggcatggctgtgccatcagagggataccgaattttggaaacacttgctacttgaatgcggtgttgcagtgcctccttgtgcttggaaagctgcgggcaaggatgtctggaccggacgctccgcctccatcggggatgcttggtataatactgcatgatctctttgttgctacagaaagtgtgagctatacacgagacctgctggacccagtgatgctcttgggttgtgtgcgccactataaatcagagttccaaggcaatactatgcaagacagccatgaattgctttgctgtttgcgtgatagtttgattgaggaggaaagtaaaacgaggcctgataacatgcaacaggatgctcctagtgctgtggttcctacagttattgattccatatttcgtggtcagctgtttgttaccactctgtgcaaatattgctcatttgagtcagtttcacagggttcacaggatgcattctatgatctctgtgtggcattaccactacagaatgaaagatgcatatctcaacagaagattgccatcgaacaatttccaacaattgacaagactaacaccgaaaagattcatgcaatttctggaggcagtgatcctcaggttcccgcttcagaattgggagatatggtcatggtgaaaacatcagagcctttggtagttgattctaacccattggaccagatcgcacaaagcaaggatgatgtacattgtcctttgcagagtccaataaggaaggagaatgtgctgataacatcagaccgtgaattagagagaactaagagtgctattcttgatagcatcaagccagaagatagtatagaagccaagatggacactttgtcaggagaagttactacagaagacaaggggaaagatcgaaattgtgatgtagtttatgatgaggcagatgatatcaactctcttgcgtcaattgaggagttattgggattgcatttcaaagagatggtagaaaagaggtgtgagaactgttccaatgtcgctcagaaggcaagccctataagtggtaaagatggtgaacagacggtggcatgtaccaatgtgaataggacagttgatggagaccaggctgaacagtcagagaggaaaacatgccaaagtgagcaatctagcgatttggtcagattggatggggaatgcagttcttcaagtaggcagccacatgttgctgatgcacagcatcaagttatgccaacagaggacactatgaccaaaggagacatttcagggatgagtcacggtgaaaaagactcatcctctttcagcatagtcaatcaaaaacctgaatgtcttgagtgtgcccaagaagatgtacctgactgccatctaggtgagaagccagtcaacctgtcgagtggccagtgccaaaatgccaacactgaagatcagggaaggaggaagcaagtaaatctacaccaagtggaagaaaaccaatatgatcagcaagataggaacgaaggtgcgattaagacatctcttattagcaagctgccacctgtgttagtcatccagctcaagagaaatacggggcctattaaagtgaggcgacacgtgagcttcaaggagatccttgatgtgggactgttcctgcaccccagttctgaggacaaagataattccagctatcgtctagttggtgttgttgagcacctgggccatagcatgtattcagggcattatgttgcttatgtgagaccaagtcctccgcagcagactaatggctcttcctcatggttttgggcaagtgacaccgacatcagagaagtctctttagaagaagtactaaagtgcgaggcttacattcttttctatgagcggatggaaggctaa

SEQ ID NO: 49473 - DNA, 1200 bp, Oryza sativa
  Clone ID: PAT_MRT4530_52051C.1
atggggaggcgatttctgaaccttgtggtggagaacgcccgcagtggactgtattctctgcgccgcatacctgcaaatcatctcttctacccatcaacaagagcagctgaagaggccacggcaaagtcccaagaatcattcaacgcgtacgttaaggagcaccatggcaggaaacacccaggcctccacaccttggagatgttggggaagcttccctctcccatgctcaacttcgaaccaaccccctgggatggccagcgtcgatataggaatctcgagttcgcatctctcctcggcaatgagaacaggatcctctttgccgaccacagtggacataccatcgtctttgacgccgactcctccaccgtctttgcctttcccaacctcatttctgacaagggttgtgcagccatttccctctccatcaaaaacaacaacaccaataagaacattagtggcggcatgtgggatgaagacagcctctacgtgatgtcccagagtgctgaccctgaaaccaaggattactgctttgaagtgctcaactacacttcttcctgtaaggatttccgtgggaggactccctgttggagttctctacagccgccgcccttcgccaactacatgcatgccgacattacttcctacacggtggttgacagctccactatctatgtttcttccatggagccagatgctacttatgcctttgacacagtggggcgtcagtggcgtcgcctgggctgctggacaatgccattcgatggcaaagctgagtatgtgccggagctcaagctgtggttcggactatccgtcgaccacccctacagcttatgcgcttgtgatctcctctccgatgcagcaaagccacccacggtgcagcagcagcacacttgggtggacctcgacatacctgaatcctggttgccctataacattgacctcatcaacctgggctgtggcaggttttgcgtcgtcaagattttccgtcctatggcagatgactgcactggtttctccgattacgatgacgatgacgcaatggactctgacctgattcaagggaaattcgctgtcttaactggcctacagatagttcgcccttgtggtaaagatggtgatgatcaaggtggtgtccggatgatcaagcacaagtccatgtactacaacttttgggactatgaaatcgaatgggttatctga

SEQ ID NO: 49474 - DNA, 226 bp, Oryza sativa
  Clone ID: PAT_MRT4530_52052C.1
gcgccctttttttttttttttaaaaaaaaacaagtaccccaaactgaaggaaccttttataaatttcccacaaccacatttcacacatacaatacacacaagtagatcaaaacaattaaaaatcttttacaaacatgaatatatactgataaaacaatattcatacacattcttatcgtttaataacaacaaccataaactataaaaaaacaaataagaactcctt

SEQ ID NO: 49475 - DNA, 1331 bp, Oryza sativa
  Clone ID: PAT_MRT4530_52054C.1
ccgctcattttagagttattttttagaaaagttgagcagaatggattaatcctatcaaagaaaaaaatggaaatatgcaaagaaaaaaaattaactttcttggtcatgaaataggagaaggcaaaattcatttgcaggaacatattgctaagaaaattttacaatttcctgatgttatgaatgataaaaataaattacaacaattcttaggaattgtaaattatgctagaaatcacattgataatttggcaacgctagcaggacccttgtatgctaaattaaggaaaaatggtcagaaatactttaactctaaagacattaaattagtacatataataaaagaaagggtaaaagagctaaaacctctagaactaccattagaagagaattactttattattgaaacagatgcatcacaataaggttggggtgcaatactaaagcaaagacctactaaatactctaccaaatgagaagaaaatatatgtaggtatgcttctggaagttataaagtaaaaattgtaaacaatacagatcgagaaatcttagcaataatcaatgcgataaatgcttttaggttatatctgggattcaaagaatttacggtcaggacagattgtgaatcaatatgtggatattataatcaacttaataggaaaaagagttctactaggaaatggattttatttgaagatatcattactggaaatggatacaaagatatattcgaacatattaagggaaaagacaatcatttacctgacctgctctcttgtttacccttacaacaaaagcctatatatgtagtctttgatggaaagctcctcggagtttatatatcctttgaagaaataatagcccaaaaaatatatgcaaaaataatgggcggcctattgtggaaaaaaaaatatagatgttgatgaagctttaagtcaagccaggaaaattttgggaataaactattatatggagccagctgcaaaggaatatatacaaaaatgcaaaagagccaaaaataagaaagctctagaaaccccatattatatgaatacaaaagttgaaggatcttctaaaaaacctacatataaagaatgcttaactaaagggatggatcccttagatggtgaatacattgactggaaaataattgaaaattttgaagatgcctcccctcaattgaaaaaagagttaaaagaagaaatacttaaagaattaaagaaagaaatgaatgacaaatttgaagaaataaaaaaggcttatgatgaggaatttgatgtattttttctgatgttgataccgtggatatgggcagccagaccaataagcaatat

SEQ ID NO: 49476 - DNA, 750 bp, Oryza sativa
  Clone ID: PAT_MRT4530_52056C.1
atgacgggatttggatcgccgtgcggcgcgtgcaagtttctgcggcgcaagtgcgtgcgcggcaagggggcggcgcacttcgccgccatccacaaggtgttcggcgccagcaacgtgtccaagctgctcgcccacctgccgctcgccgaccgccccgaggccgccgtcactatctcctacgaggcgcaggcccgcctccgcgaccccatctatggctgcgtcgcccacatcttcgccctccagcagcaggtgatgacgctgcaggcgcagctggcgtcgctcaaggcggcggcggcgcaagggatacaccaccaggacgtcggcgccaccaccaagggcggctacatgagcgccgccgccaccgccgccgacgaccaattagggtacggcggctacaaccagtggtgcggcagcaatgggggcggcgcgccggcggcgtcgcagccgggcgcgtatagcagcaatggcggcgccggccacggccacgactccatcaccgcgctgctggcggccgggtcggactacatgcagcactcgctgtaccacgcgttcgagcactcggagggcgccggcgccgtggacgacgggcacgcggccgccgcggccttcgaggcggcggcggagtcgtcgtcgtgcggcatggcggcgtcgttcgccgccgacgagagcgtgtggaggtcgtcgtcgtcgggataccaagattgcgaggatctccagagcgtcgcctacgcttaccttaaccgctcgtaa

SEQ ID NO: 49477 - DNA, 827 bp, Oryza sativa
  Clone ID: PAT_MRT4530_52058C.1
ctgagaaagaggaggaggaggagaaggcacattacactccgaacgccggccatgaggcggaggaggccatctccgacgagacgacggtgggcggtggtggcggcgtgcgttctttagctgttagtcaagagttagaaagaccatattgtcctgattcatatgagccatccagagttcctcgacagcgttgtttcgtccctcgattggcgcggctcagcttttgccaagaactcgaggataaagcagctgttgaggagcagcatctccgcaaagtcattgccgtcgccgtcgccgtcgaagatggtcgcgctctcactgtagcagcatcgagcgcactgctcaacagcccaaaccgcgtccacgaagtaagagagcgggacggttggtgctcgctggaggaaacggcggaggaagcgccacttgtgttgctttgtggcacggagctcgtctcggccgcggtggtagggcccgatggaaaccagctagggctcctacagctgctgcagtcatcgccacgggagccggcagggacagagaatggtgaagatgtgtggttcggcttggcagtgcggttggggatggggacggcggtggcgcgcctggggacggggatcgtcgctgcgtcactgattggcgacggtgccgacgccgtcgtcgtgggcactaacccgagaggacgagatgacacaggatgggagattacagcgaggaagacgaaggacaaatgggtccaacaaaatttttatatacttcaacctaactctgttagctccaaacctgacggaagtgctatggggcgaagaaaaaacggtggcctgtgcttttga

SEQ ID NO: 49478 - DNA, 299 bp, Oryza sativa
  Clone ID: PAT_MRT4530_52059C.1
gtgtcaggccctagcgccagcaagctaccactcccagccagtttggtgatctctgactttgatcggaatctggctcacagctcaagctctattggcttttaacgtgccctctagatatgggatctaccctaggtactatggtgccccccgtacccttaccccccttgcggtgtcttgtaatgagttttaccgtatagtggttcggaagttaaaataagctccgatatcatgcatatggtggacactgtgaaactttgggtgatataaatagaaataaagttgtctttccaaaaaaaaaa

SEQ ID NO: 49479 - DNA, 2708 bp, Oryza sativa
  Clone ID: PAT_MRT4530_5205C.1
tcgctcacgactccagagagcggaggcaatggggacgtcggggtcgaaggggatcgacggcgtcgggggagtcggcggcggggcggcggggttggggggaggggaagcgggcgacggcggcggcggggtgggcggcgcggcgtcccggtcgtggcacggcggggcgcagctgtacgtgtcgctcaagatggagaacgcgcggatcaccggcgacctcgtcccgcacgtctacggctccgagcccatcatcggatcctgggaccccgcccgcgccctcgcgatggagagggagctggcgtccatgtgggcgctcagcttcgtcgtgccgcctgaccacgaaacactcgacttcaaattcttgctcaagcccaaggatgcagacaccccgtgcatcattgaggaaggtccgacccggcatctcactggaggcatgctcgagggcgatgtgaggattgcatggttcaagatgaatggggatcatgagacgcttgagttcagggttttcaataaggcagacattgtgtccccacttgatcttgcagcgagttggagggtgttcaaggagaattttcagccttccaaagtccggggaatccctgatgtcagtataaatgtcgcacctgcgcatgggaccgaggatacatctactgaaagtttggagcttgacttggagcattacgttattccaacaccatctgcagcaacatctgaatatgcagcaaaccttgccgcaaacccagcatcattgattcaaactggagctttatggacaaatgacatgcttctcagtgatggcatccagagtccaagtagcgccactgcagattttgaagatcacaataactgtaacaaggataatgtggccttgccatcagattctttcaagaagttacaagtttctggaattgtagagtcaaaatcagttgacaccttaacaacactgcaaaagcaagatggacaaaagggactttttgtagacaggggtgttggctctactaagtttggaaaatcatcaagtgcatgttccctggcttctggtcttaattttggaacaggaaaggccatgccagaagcagcaggagctgttgcagctgcagctgtagctgaccgattgcatgggtcaaaggaggaccgaaaactagctattgttttggttggcctaccagctcgtggtaaaacttttaccgcagctaagcttacaaggtaccttcgttggttaggtcatgaaaccagacatttcaatgttggaaagtaccgccgcctgaagcatggagcaaatcagtctgcagattttttccgtgatgataaccctgaagggattgaggcacgcaatgaggtggctgctttagctatggaggacatgatagattggatgcatgggggaggacaggtcggtatatttgatgcgacaaacagcacaagaaaacgaaggtatatgctaatgaaaatggctgaagggaactgtaagattatatttctggaaactatctgtaacgatccgaatataattgaaaggaatgtacgtctgaagatacagcaaagtcctgactatgctgaccagccagattatgaaactggagtgcgggacttcaaggaacgcctggcaaactatgaaaaggtgtatgagccagtgcaggaaggttcttacattaaaatgattgatatggtaaaagggcagggaggccagttacaggtcaacaatatcagtggttatctccctggaaggattgtctttttcttggtgaactctcatcttacacctcgacctattttgcttacaaggcatggtgagagtttacacaatgtcagaggaagagttggtggtgacacggtcctgagtgaagatggagagctttactcgaagaaattagccaacttcatagaaaagaggctcaaatctgagaaaactgcatctatatggaccagcacgcttcagaggacaattttgacagcaagtccaatagttggattcccaaagatacaatggcgtgctcttgatgagataaactctggggtgtgtgatgggatgacgtatgaagagataaagaaagttatgcccgaggaatttgaatcacgcaagaaggacaaattaagatatcgatacccccgtggagaatcttaccttgatgtgattcagagactggaacctgttatcattgagctagaacgccagcgagcaccagtagtcgttatttcccaccaggctgtattgcgggcgctatatgcatatttcgctgacaggcctctgagggaagtcccagatattgagatgcctctccacaccataattgagatacaaatgggagtcacaggtgttgaggagaagaggtacaagctcatggactgaatatacatacatctaggctcagtaggacagcaagtctttgctgttttcagatagtcatacagtaacacagatatacgatcgagtcactacaggtctacagctaccacattgtcatttttctcccgacggtgcaaaaacaaaaactagcacctccggtgtaaaactgtaacccactatacccatgaatcactgtaaaaagaagcattcacccaatcagtagttaaaaaaaaaaaactgtaaaataaaaggcatactgctactaataaagagtgcagatatatacataaaaaaaaaaaaaaaaaaaaaaaaaaaaaaaaaaaaaaaaaactcgagactagttctctctctctctccctcgtgc

SEQ ID NO: 49480 - DNA, 1516 bp, Oryza sativa
  Clone ID: PAT_MRT4530_52060C.1
atggcgctcgccctgcaggccgactgcttcaccagcgacctgagccagctcatcatcgctgacgtgatgtccggctcgatggcggccctcaccctaactagcttgacacttgagaggctcgatgtcgcatacgccagatgcccggatcttgttgttgcaatcggcggagaggccagagcgccggatcttgttatcacagacggcgggaggcggcggagggagcagggagctcgttccccggcccagcccatcaggaaccaaaccagccagtcgggccacggcctctttttacgcgaccacgaagcgggcccgagcgagttctttgtcaaatatgttattttggatcagagggtttattccacgcctcccgtcgccgccgccgccgccgtcgttgtcctcgcccgcgcgcgaggagaacgctaaactccggtcaagatggcgaggggtttgaagaagcatctgaagaggctcaatgcccccagccattggatgcttgacaagcttggtggagcatttgcacccaagccttcttctggtccccacaaagctcgggagtgcttgcctttgatccttatcctcaggaacaggttgaagtatgctctgacctaccgtgaggttatttccatcttgatgcagcggcatgttatggttgatggaaaggtcaggactgacaagacttatccggctggattcatggacgttgtgtcaattgcaaagactggggagaatttccgccttctgtatgacaccaagggtcgcttccgtctccacagcatcaaggatgaggacgctaagttcaagctctgcaaggtccggtctgtacagtttggacagaagggtattcctttcctgaacaccaacgacgggcgcacgatccgctacccagacccactcatcaaggccaacgacaccatcaagattgacttggagaccaacaagatcgtggacttcatcaagtttgatgttggaaacatcgtgatggtgaccggtgggaggaacacggggcgcgtcggggtgatcaagagcagggagaagcacaagggcagctttgagaccatccatgtcgaggatgccctcggccaccagttcgcgactcgcatgggcaacgtcttcaccatcggcaaggagaggaagccgtgggtatctctccccaagggcaagggcatcaagctcagcatcattgaggaggcgaggaagcgcaatgccgaggctgccgctgaggcttgatttctgaaaatctccatgaatgaaactgttgatttgagcagtctatttatatagattatttagctcttaagatcatatgtccattggagaccgtcaattggcgcttcattgttcgatacttgtcgagctgttttgaaactatgaattcatcatctgttaccttcagcataatagatccagaatccttttttagcttgtgtaatctttcccaaatgagaagctaccttgcatactgaaatgaattccacatgatgtttggatttgcaaaaaaaaaaaaaaaaaaaaaaaa

SEQ ID NO: 49481 - DNA, 841 bp, Oryza sativa
  Clone ID: PAT_MRT4530_52061C.1
cattagcattcagaagctcgtagatgaaatactcatcaaagctagtacttctgaatccctaaatcacagcgttcgcttcgagaaatccccgcataattggctaaatggctggtgcgtaaaagatattgccccaaacctttataaactggcaataaggaaaaatagaatggtgtcgaccgaacttcaagacaacacatggattacctccttccgacaaatcacagagattgaaaccatcaatgaactagttcaactaggtggactcatatctcaaattcaattgcaattgggcactgaggatgacataatttggacaagaaatgaaactggaacctgcatatccaaaagtgcctaccttgcgcaattcattggatcatgctctaaacaagaattcagtcatctttggggctctcaagcacagccaaaacaataatttttaggatggttgattctacaccaaaaaaccctaacggctgaaaacctgctaattagacattggccttgccactggatttgctcgcattgcagcgaagattttgaagacaccgatcatctcttcagagactgccccttcacgaggcaagtatggaacagagtttcgacaatgagagggtctgatccaaagccgccgtcacaaaacctcaaaatttgggtggatgatatcacggccaatggaagtaaaaaaaaacacaagcgagaacagcttgatctcctcgtgatgacttggtggcacatctggctacaatgaaacacaagaatttttcagcagcaaccaagcacgacagcacaagtcgtaaacctaattatacaagacatagacctacgcgaattagctctcaaa

SEQ ID NO: 49482 - DNA, 1152 bp, Oryza sativa
  Clone ID: PAT_MRT4530_52062C.1
atggcgcatcagatgggttggtggaggacgacatcgctgcgggtggaaatctcgccgaagatgaagtcgcctggaaatcgctattgcgtcggagagatcgccggagagagagaggacaaagcggcgaagggaggtccggttaaaaagatctccaaaaagaaaggactcgtcgatgtcgctcgtgttttcagcgacgacaagtcttctgacgggactcagacttcgcccgccgaccgtagcttgcacctttcgaccgctcccattcttccgctcgatgctggcggagaaggtggtagcactgccatcggggctttagcctccgccgatcggatcgtcacggctgcggcgagggcgaaggggaaggaggctgccgtcgaaacatctacctcggagtactccctcgcggggccccacttcgcccctggcgatttcgagtcccgggcggagcttattcccttcgtcgagggagtaagcaatcttgtcttacctgctagcaccccgagtctattcaccgagttgaacgagttcgatgaagggtgttccgctatcaaaagcttggcggttcggaaaggaaaagaggctagggccgagatcgatcgcctcaaggccaaactggagaaggaaaaagcccattctgccgcgctgaccgattattacaaccttaccgagccgaagatggaagctcttcgtctggaggtcagcaaggccgaggcgagcgctgtggaggagtcacggtggttttcgcgggagatggcgaaagccaccgaatccgcaaggacggcgtgccaaacgctccgccttgcccttactgacatggcagcaaggacccagcaggatgatggtgcggtttcggactatgccactgcgtacggcgattgctatgagcgcgtatcggcggccttcactatgggccttctgcagcagttcggctatgagcacgtcgccgagttccctaactacacgaagggggactgggagattagtgcacataacgtttcgcccgcgctccgttcgtggcgaaagcagttctggcagaaggacggccgatccaccgccaaggcgcgccttctagagcaactggcgaaggcagaggcagcagaccggtgcgaagaagaggacgcggcagccgaagggggtggaggcgatacctag

SEQ ID NO: 49483 - DNA, 129 bp, Oryza sativa
  Clone ID: PAT_MRT4530_52063C.1
ttataccgcctcgtaggcatgaagtcccgtggtgtatactagtcccccggtgggaccatcatggcagctgatgtccgtgagctcgagtccttgacttatggacagggagacaatgcagaggaaggacat

SEQ ID NO: 49484 - DNA, 368 bp, Oryza sativa
  Clone ID: PAT_MRT4530_52064C.1
gcgaagcaactctcaggcctacattaagcgcttgacaatgagacacattgtatgagccatgaccagggccaaccaaccaccatgatacaaccaacattacggataggtttcgacggacataaaaccctacagaaattaagctttgttctaggaagaggctacatctactcttcgatggggcaaaacacagctcccctgcttctgcaagcctgcatgaggagggctcgtatagtcggtgccgggcatgtgacggataatgtcgagcacacaggagctgtatgcccatgggctggcgcacaacgacacaagcttcaggaacgtgtcgctcaaagggatgccagacttggcatcaaagatgctggacctgc

SEQ ID NO: 49485 - DNA, 1736 bp, Oryza sativa
  Clone ID: PAT_MRT4530_52065C.1
gggctgcaggaatcggcacgaggcaacggtacagaaccacatcacggcccccccgcgccgcggcttcccgcgggccgttgctcctctcctcccactcttcttctccatatcctctcctctcttctctcattctcttccctgcaacttgcaaacagtgctctgcagaatgaccaaagatgaggatttcaagctggtcaagatccagacccatgtactgagggtgaacatacactgtgatggctgtaagcacaaggtgaagaagctgcttcagaagattgaaggcgtgtactcggtggccttagatgtagacaaccataaggtcacagtgactggcaatgtggactccgatacattgattaggaagctcaccagaggaggtaagcatgcagagctgtggtcacagcagaagggtggcagcaaccagggccacaagggcagcaacaaccagcagaagcagcagcagcagcaagggcagcagcagcatggacagcagcatcagaagcaaggtgccaacccaagcaaggatggcaacaagaacaacaacatcctcaaggaccagggcaagcaaggaggtgttggaggcctcatccagggcctcaaggccttcaagaaccagcacagcaagaaccagctccctgagcttgattcagaggatgatgacttgtatgatgacgaagacgatgagtttgatgatgactatgaggacgatctccgctttcttggagacaagatgagccagcttggtttcctcaggcagcaagctgcagctgcagcggcggccaatgtcaagaacaagaatgccaacactgccaccgtcaacaaccaccacaacaacgtcaatggcaagaaaggtggtggcggcggtggcagtgctggaggtggaaatcaccatcagaacaaccaccaccagaaccagaagaatcccaatgtgatcaacatggcagcagccaatgccaagatggccaatggtgcccagaagaacactggcgccatcaatggaatgatgggcctcaaccatggcctcggaacagccggtgccactcctggttttcagggctacaccggcttcaaccacccgtcctatgcttctgccggctatggagggcttcaacaacagcacctccagcaacaacagcagagcaacaatctcatggcaagcatgcagggttaccatcatcacccagcagccacggcggcgatgatgaacaacctgaggggtctaaacaacaacatgatgatgatgcatcagccacaacagcagccacagatgatgtaccaccggtctcctcagattagcccttacaccgcctactacaacccttacagctactactaccaccctggcgccgccggttatcatcccgccagcaatggcgatgtggagaccatgttcagcgatgagaataccaagggttgtgttgtcatgtagtagggatgctgttacagtgttacaatgtagaggttggtgatgaagcatgggaatggttatgcaatcctactgtttttttcttcttctttttcttcattgtttttctgcttttattggtttctcctgtatcaagaatgaatcatgcatgttgacttagatgtcgtgtttgaaagtagtagcacttcagaggatgatcaaaagtgtaatgtaatagttttaccgcctagtgctttgccctgcctggcttcttatgtctaatgtaatagtttcaaacacgacatctaagtcaacatgcatgattcattcc

SEQ ID NO: 49486 - DNA, 618 bp, Oryza sativa
  Clone ID: PAT_MRT4530_52066C.1
tcagtcaccgccggtttcgctcctcctccggttcgctcccacgcccgccaccgccaccacccgcccttcctcctccgctctgctcacacctgccgccgctaccgcgcgcatctccttcctccagatccagccaccagcatcctctcctccctccccatacacaggcgatggcggctcgcgcaggtggtggcagcggctccggcagtggtggtggtggctcgcgcaggtggtgaccgtgatgggaggtgggcgcgcgaaggggcgcggcgagctcctcctccccctccacctccccctcccacggtcccgctggcggctgggcttcccagatccggtgctgtggggcttggtgcggcgggaggacctcggtggcagtgatgctcggcgatggggctccggtgctgctcggtcggcgacggcgacgacgacctccttcctctctcccctgttgagcagcctcctgcacctctccatccactcggtccaaccagtgaacagcctcatgaggctcaaaagcaagacaaagttgtagagccagataaatcctgcccagccccagccaatgccctttggtagaggagagttcacgtcaccataaacagcaatgacggttgccac

SEQ ID NO: 49487 - DNA, 183 bp, Oryza sativa
  Clone ID: PAT_MRT4530_52067C.1
atgaggaggggtcgggtagaaggaggaggaggaggaagaaaggaccaagtcctgggcccaccatcccaagccggtcagaccggctatatgcggccggtcagactgccggggtgcggccggtcagaccgggccctagaggccggtcagaccgccgctaccaggcaggtcggacagcgcatatag

SEQ ID NO: 49488 - DNA, 644 bp, Oryza sativa
  Clone ID: PAT_MRT4530_52068C.1
ccggccgggccactccttctctcccaaccttatctcctcgtctcctctctatcgccgcacgcgcttcctcctctccgctcccacatcagtcaccgccgggttcgctcctcctccggttcgctcccacgcccgccaccgccaccacccgcccttcctcctccgctctgctcacacctgccgccgctaccgcgcgcatcgccttgctccagatccagccaccagcatcctctgctccctccccatacacaggcgatggcggatcgcgcaggtggcggcagcggctccggcagtggcggtggcggctcgcgcaggcggagaccgagatgggaggcgggcgcgcgactacgacgggaggcggtcggcggggggttcggcgatggcgacgggatgagtcgtcgggggacgcggcggcaacgggacggcaacggagacaggggcgcggcgagctcctccttcccctccacctccccctcccacggacccgctggcggctgggcttaccagatccggggctgaggggcttggtgcggcggcaggacctcggaggcagtgatgctcggagatggggctccggtgctgctcggtcggcgacggcgacgacgacctgctttctctctcctgctgatgctgcctttctttaggtt

SEQ ID NO: 49489 - DNA, 1294 bp, Oryza sativa
  Clone ID: PAT_MRT4530_52069C.1
aacagaataatggcttccttaatttggaagaattcgcacgctatacgtgcaacaacacataggagttgatgatgagccatggcttgggcatttcacagcgcgcacttacactcatgaactgtatttacaaaggaatagaacttttagtgctccttgaactgacaaagtgtccctgattaatgtatcaaaataacccagtgaaaagcatatgattctgcatctatatatatatcctaaatttccaacgagctaaatccagtatccatttaagtggctccacggcacatggtgagttcgccgcggcgcggcgcgtcgtccgggacgagcgcgaagaagcggcggacgtcgatgccgccgccgcccaggatggacgagatgatgaagatgattcagattgttcgtttcccatatctctggtcttgtgcagaagaaaagttcctgcaacaattgtcacaaacccacaaagctcggttgctatctgcgttgcattctgagaggcccagtccttgtacatgatcatgttggcaataatagtaagaatggtgaacatcacataatagactggagagacaacagctgtgttgaatgaatcaagggccttgttcaagtaattcaactgcactaaacagcatataaccaccacaacaataaagaaccaggttgggacgtagataaattggttcactccattaaatgaaagcttcaaggcaatagccactgcttttacactgataaccgtaagagatcccatcagagaacagattgcaatatatgcgagcattttcctttgttccgtccgatgaacgacccagaaaatcaaaataagtgcaacaactactgccatgcaagaatagactatgaaacctggttgagttgcaagatgccatatttcgttaactgaatcgatctttttctcctttggagcatgtagaactataccaactgaaccaacaacgcataatatgcaaccaacaataccaaacatatgcaacctctccttcaaaataaagtgtgctagcactgcactgaatatgatgctcagcgctcctagaggagtgacaagtattgcaggagcaaatgcatatgctgcgaagttggccacctcaccaagaatcatagctgtcatccctatccaccataaaggttcatataaatatgagtatcctccagaacctgctcttaccccagcatccccagctttcttcaacccaatcttcttaatcacaaagcttgaaccaataaatgcacttgatgatgtggccagtgcaaagcccctcacattgtctatagacat

SEQ ID NO: 49490 - DNA, 339 bp, Oryza sativa
  Clone ID: PAT_MRT4530_5206C.1
atggaagccggcggcaggcgtgaccccgttcttctctccgccatccacgcggaccacgccacctccgtcgggcccatcttcatcgtcgactcctcctcgtcgagtcagaggtggctggagagaggaggggcggcggcggtggcagccggttttggggggtggaagggacgccagtggtgggagccggatttgggggagagagcggcggcgggagcagcggcggtggccggagctagggagggaggggcgctggggcggcagtggtcgtcgtcggcgttggtccaccgcccgtcgccggtgacgagggggcccgcggcgctgcctaccaaccgcggctag

SEQ ID NO: 49491 - DNA, 790 bp, Oryza sativa
  Clone ID: PAT_MRT4530_52070C.1
tcattaatggcttaagcttctttcgagttttgggtttctacagttagttgctgacgacctcccagcaagatcaatagaagaatagtgcaataaggagctatcctcgtcaatgcttgttactgcgaacggcagcttctgagttggaggagagaagtttccaccagtaatatttagaacagctaagaatccatcaattatctgattgttcttttccataagaaagccggccagatagaagggactcctcaaaggagccaactagtgaccgtcgtactgggagactcaaactccgaccataaccaacccggggagaagtaggggtggattcaggaccccagatttgatatcttctgcatgaacttcttttaggggtcatgacattgtattcatcatgtaatatgttagtttcttggagcacactcagcattctaattccatcgggtccccctttttcccttgaatctagaaaatgatgttcaatatctctcattgtacggcattgagctcctgtagccttagttctgttcataaatttagggctaagcggggacaaggagagtggagaatgtgctaattttgcactagcagctagatgatcaagataagctaaggactccttgctcccaagtaaaggaccatcagtgaataaattagaattaatcttattggcatcccattctggactaccattggagcatctagaatttgtccaggcttgtggctcaaaagaatcgagcataccagtgtttgcttttttactatcttggaagcacgaaatgttaagtttcct

SEQ ID NO: 49492 - DNA, 1155 bp, Oryza sativa
  Clone ID: PAT_MRT4530_52071C.1
atggccacggtggcgatggacatctccaagccccctcccgcggcgggcggcgacgaggctgcggcggcgaaggggaggggcggcgccggaggaggagttagaatgctcagggaagagctgcagttgcttcaagaacctggctcgtatgttggtgaggtggtgaaggtcatgggtaaatcaaaggttctagtgaaggtacatccagaaggcaaatatgtggtggatattgataaaagcattgatattacaaagatcacaccttcaacaagagttgctcttcgaaatgatagctatatgcttcatttgatcctgccaagcaaagttgatccgttggtcaatcttatgaaagttgagaaggttcctgattctacttatgatatgattggaggtcttgatcagcaaatcaaagagatcaaagaggtcattgaacttcctatcaaacatccagagctatttgagagtcttggaattgcccaaccaaagggtgtccttctctatggccctccaggcacaggaaaaacattgttggcacgtgcagttgctcatcacactgactgcaccttcatcagggtgtctggttccgagttagttcagaagtacattggtgagggttctcggatggtccgtgaactctttgttatggccagggaacatgcaccatccattattttcatggatgaaatagactccattggatctgctaggatggagtctggaactggcaacggtgacagtgaagtccagcgaaccatgcttgagcttctgaaccaacttgatggttttgaagcatcaaacaaaataaaggttctgatggcaacaaataggatagacatcttggatcaggcccttctgaggcctggtcgcatagacaggaaaattgaatttcctaatcctaatgaggattcacgctttgatatcttgaagattcattcaagaaaaatgaacttgatgcgtggtattgatctgaaaaagatcgctgaaaagatgaatggggcttcaggagccgagctcaaggcggtctgcacagaagctggaatgtttgctcttcgtgagagaagggtgcatgtaacacaagaggactttgagatggcagtggcgaaggtgatgaagaaagacacggaaaagaacatgtccctacggaagctctggaagtga

SEQ ID NO: 49493 - DNA, 101 bp, Oryza sativa
  Clone ID: PAT_MRT4530_52072C.1
atggtggccggtcagaccgacggcatcaggccggtcagaccacccatggtggccggacagaccgacggcatcagccaagttagaccgcccactggtggccg

SEQ ID NO: 49494 - DNA, 501 bp, Oryza sativa
  Clone ID: PAT_MRT4530_52073C.1
gcttcggtccagcaaaaagtacctcgaggtaccggtacttcacggtaccaaatcatttccaatccaatttatcgagctgtcctctcgccacaacaactacacgtcccccagctagcaggtgcaggtcttatgccacacttttcttcaccctttctgcagaaagatgaacaacacagcttacctccatcatatcgtgcaccgtaaagggtctttcccatcctaaaagctagccaataaggtgacggattcccccacttatatattagatctcttacccttccacaaccaatgtgggactattcagcaatctcacccttcatacattggtgtcccatcaccgttttcccacggtccctcaggtataccggccccgcaagcacccacggtccattaggatggtaaaaggtctttcccgcctcaaaattagctaatgaggtgaggggctccccaacttatatattaggtccggcaaccaatgtgggactattcaaccaaacatac

SEQ ID NO: 49495 - DNA, 2179 bp, Oryza sativa
  Clone ID: PAT_MRT4530_52074C.1
gagacccaacccagcaagcaagcaaacccaaacccacccacctccgctccgcggccgtcttcttcttccctttcttccaccgcaagaagaagaagaaaccccacccgagccaagccccacacacaaagcgagcgactcggcggcggcggcgatggccacggtggcgatggacatctccaagccccctcccgcggcgggcggcgacgaggctgcggcggcgaaggggaggggcggcgccggaggaggaggtggggaggggctgcggcagtactacctgcagcacatccacgacctgcagctccagatccggcagaagacgcacaacctcaaccgcctcgaggcccagcgcaacgacctcaactcccgagttagaatgctcagggaagagctgcagttgcttcaagaacctggctcgtatgttggtgaggtggtgaaggtcatgggtaaatcaaaggttctagtgaaggtacatccagaaggcaaatatgtggtggatattgataaaagcattgatattacaaagatcacaccttcaacaagagttgctcttcgaaatgatagctatatgcttcatttgatcctgccaagcaaagttgatccgttggtcaatcttatgaaagttgagaaggttcctgattctacttatgatatgattggaggtcttgatcagcaaatcaaagagatcaaagaggtcattgaacttcctatcaaacatccagagctatttgagagtcttggaattgcccaaccaaagggtgtccttctctatggccctccaggcacaggaaaaacattgttggcacgtgcagttgctcatcacactgactgcaccttcatcagggtgtctggttccgagttagttcagaagtacattggtgagggttctcggatggtccgtgaactctttgttatggccagggaacatgcaccatccattattttcatggatgaaatagactccattggatctgctaggatggagtctggaactggcaacggtgacagtgaagtccagcgaaccatgcttgagcttctgaaccaacttgatggttttgaagcatcaaacaaaataaaggttctgatggcaacaaataggatagacatcttggatcaggcccttctgaggcctggtcgcatagacaggaaaattgaatttcctaatcctaatgaggattcacgctttgatatcttgaagattcattcaagaaaaatgaacttgatgcgtggtattgatctgaaaaagatcgctgaaaagatgaatggggcttcaggagccgagctcaaggcggtctgcacagaagctggaatgtttgctcttcgtgagagaagggtgcatgtaacacaagaggactttgagatggcagtggcgaaggtgatgaagaaagacacggaaaagaacatgtccctacggaagctctggaagtgaagctcacgtcttaatagcctaagctttcactgcatcgctgaagcagcggaagcatgtaactgcatgttgtggacttcttccatgtgctttagaatatgttgttccatggttaactttcagattttaagatgcacctatgataatatgatgttgaaaagtttaatttattgaattggctagatacacgatatgacattgctttcttgcaatgtacccctacgctgcctacttgggttgtttgcttgcctgttttgtgatctctcaagtcagaacatttgatttttcaccaagagcaaaaaaaaaaaaaaaaagccattcctctaccttgccaggaagctcacaggggacatgaaccttcggttcgtcgaggagttggccctcctccccgccgacgtcaccatcgacctcatcgcgcagcaaaagattgagacagagatagctgctgctgcggcgatgcctctcccggacgaggacgaggatggactgatggactgagctcatcggaggccatgcttagattaggactcgaactttaggtgatcatgatagacttgttaatggccgtgttaagaaattcagtagagtaggatgaagctggtttagtatttgtttctgaggttgctcctggcgttactggatgaatgaatcaacgcgaatgctcttctagtctgctgtgtaaatttctttactggagtaatgaaataaggttggatttattcagttttattaaaaaaaaaaaaaaaaaaaaaaaaa

SEQ ID NO: 49496 - DNA, 510 bp, Oryza sativa
  Clone ID: PAT_MRT4530_52075C.1
tcgcgcctcgtcaccgcgtcgaaagcggaaaaaaggcggcgcggaaaagaagacaaggcgcgggcgggggagaagtgctggtggcgaaatgagaaaacccaaaaggttgtgacaacaccaaggaacgggtttggaggaaaaaagcggggggtgggagatggcgggggaccaccgtcaacgggaccagttcgaagtaacgtgggccaaacggaatatagcgcggaacagcagcgggactcgccagcaacgcttcgagataagagagagagcgtgccgcccccgccattggggggtcaagtgcagcagggcctccataaccgccctgtaggatctgaaggatgggccgccgccaccacccccgccggctcggtgtcgccgcgccttccctcccacccctgccggatctggcggccgggccgccgccgccccagccggcccggcgccgccgcgcctcccctcgccacggcacagagaaagagaggagagatagagaagaagtggaggagatag

SEQ ID NO: 49497 - DNA, 563 bp, Oryza sativa
  Clone ID: PAT_MRT4530_52076C.1
actagtggatccccgggctgcagggcgcaagtggcttgcattctggatgaacttgagaattctaacaaaagaaagttggatgatgaggggggagtgggagataacatgaaaaagcctgaagatacttgtgaaaaggaacgtccaataggaacgaaagaagctaagaaacaacgcatgggcaaaggaaaaaacaagaccaatgacactggattggatgaggagatgaagacgtacaagaatattcaagctgcagcgactaagcgtcatgaagagtttatagagacccaacatcgtgtttctgatgcaaaggttgaggcagcaaggcttaaaaaggaggcttccttactggattcatacaaggctttgatgagcatggacactagtggtatggatgaggagatgaaggctgagcacaagctaggcttgaaaattctgagggagaagttggttggccacactaactaagggagaacagaagtgctaataaaccgcaggaggcgctggtggcaaattttgagaggctatgggagttgtcagatggctttgggcttttgttcgatctt

SEQ ID NO: 49498 - DNA, 1349 bp, Oryza sativa
  Clone ID: PAT_MRT4530_52077C.1
aggactatacatgcacacacacttcatttatgtatgaatataatatttcaagttgatatgtatacttccaaggctgaagaatgtcattgtttcttcaaaccttcaattgtgtggagttgatgctgatgcctaccttgaattttcatcgatttgtcacgcgtgtaccttgatcttacataccttgattacatggaccataacacaggtattcgtgatgttaccacttgggtctcctgataacacaggtattcgtgatgttaccaaaatatacatataatcttatttgttgaggcgacacacccgtgacatgctaacgagcatccatatattcacaaattcatccttctgatgatcctagaacaatgctgtcatcttcagatggcaaatcagcttagacatcagcaacttccgcttggtattatactgtttcgcggaagcgactgttgccttcaatcaatttttagaatgtaactcttcacaagatgtcatcaaacatcagggacaataccagcccctgcacgaattggctcctccgagttctctcttccttgacctcagggagcagaggctcatcagcactttccaccggtttctgttccttctgtactaaggaatcacttttctcatccgtttcatctcggaactcttgttgtacatcttttggtaaatctgtgtcggtgaagttaccaacaaaagaggatagtagaggatcaggatctgtgttgtgtgaagcagcacgtgtggatcctccataacggtactgcagatatgccgcgtccttttttaatgtggcacgcgttgaagaatgtgatccatgtgaaactcgccgatttctccatttgcccttgaagaaactgggatgttccgaagtgatgtgactaaccaagtccatcccaaccgcatcgtagcaaattggacacaccttcagaactttatagtgaaagcagctcagaaacacttcatgacaaattttatacaccccggccctgttctccgcctggtgttcgtcctcgatgtggcagcaaagcccgaatccgtcgaactcctcgtcgcagaacgggcacgccacctccgccgcctcctcctcgccttcgctcccctccgcctcctccatcccaatcaacgcatcgaagcacgaaccctgcagcctggcgtccgcggcgaggcgctcccacgagtccatgtccatcgcggcggcggcggcgggggcacacggttcttgggccgggcgccccccccccgcccggcacacaggccgcgaaagcgggaggacggcggcggcggcggcgatcggacggcggggtttagggggggctagggttttggcggcggatgggaagagagagaaa

SEQ ID NO: 49499 - DNA, 360 bp, Oryza sativa
  Clone ID: PAT_MRT4530_52078C.1
tacagcgaaasataacaactagaatcccaccacaatgaagatcattttcytctttgctctccttgctattgctgcatgcagcgcctctgcgcagtttgatgctcttactcaagtttaccggcaatatcagctgcagccgcagctcatgctgcagcaacagatycttagcccatkcggtgagttcgtaaggcagcagttcagcacagttgcaamccccttctttccaatcacccgtgtttcaactgagaaactgccaagtyatgcagcagcagtkttbywacavctcaggatgatcbcgcmacagtctcwctgtscagggcattagsagtgtttcacggcgagttktgyagcagctacagc

SEQ ID NO: 49500 - DNA, 324 bp, Oryza sativa
  Clone ID: PAT_MRT4530_52079C.1
tttgttttgtggcggttggaagtaggcaataaaacatggtacacacatacatgtagaagcatggcacacccttagcagcatgcccaccaacaaaatgtttatgatcaacaggaatagcaaactacaccaaatacatttccaaaaatagataatactaattcccaattccaattcaatcacacatttattgggtcacaaataatctcaatggtaagcccaaaggttctttggcgggccccttttcgctaaccccctccttggcgcgggctgttacttttcctgccgccaaataccgggcgccttctgtttgccggggggagggct

SEQ ID NO: 49501 - DNA, 369 bp, Oryza sativa
  Clone ID: PAT_MRT4530_5207C.1
ggcacgaggttataaagtgtgttatttaagtttttcatctgatggtcactgaggactttaccttagtattatgagtttcgtatgtgaacagttgccctgatgtgactccttgacttcctttgatgcttattaaacaatttgcatgtttgattctcctattgtggcaatgagaagagtgattgtactattgagacgttgtcaagcttcagatactgttagtgttccatatatatttgggatttgccgatttgggtaggtgaaccatcactggagctgaacaatatgagtgatgtttgtgaagtgttccactgaacttttaaccttttttattggtttcctggcatcttgtagatctttgtgtactttcag

SEQ ID NO: 49502 - DNA, 2821 bp, Oryza sativa
  Clone ID: PAT_MRT4530_52080C.1
atcacgcaggccgatcagggagtgatcagactccgcccgggccgcggcggcgccatcgctggcccgcgcgccggccgcctctgcgccttcggcgccgccactcgcgccctcgacttcctccgcccgcgcggcggcccatcctccggcttcgctgccaacctccgtcacgtgaggcttgatcttcgcgctcgcatgtgtgccacgatcgatcccgtccatgcaatctttctgatcctcggaataaatatttgtcgcaagtttgactaggccaaacttgctaccttattactgatgtcctaactgggaatgttacaattggttatttgttactcggtagttggcatggttttgccctgttcagttcgagaaactacaacacctgaagttgaggaacagctttttgtgagctgtatttttttgcgaaggtcagatgactgctaatcatattattggataatgaagtaaagaaaagctatagatttagctctgataaccccgtaacaatacctcgatggtggtttacgcggctactcctcttgtaacaggtactgctgcgtgttggcaagcatacttgttagcgttgggtacaactgagttcataatttagtcgaaagttgagatctgatgtaattcttccagccaatctcatgacaatttattcgagatttgtttggttcaattaaacatgtcaatcaagtcttattacagcaaaaaaattgaaagatgttattagtctcatatttgagaaggctgttcttgagcctaccttctgtccaatgtatgctcagctttgctttgatctcaatgagaagttaccctcattcccttctgaagaacctggtggtaaagagatcacgttcaaacgtgtgctgttgaacaattgccaagaagcatttgaaggtgctgacaatctgcggtctgaggtcaataaattgactggtctagaccaagagatggagagacgtgataaagaaaggctagtgaagcttcggacacttggaaacattcgtcttgttggtgagctacttaagcaaaaaatggtccctgagaagatagtacatcacattgttcaggagctattaggttctgaaagcaacagatgccctgctgaggaaaatgtggaggccatctgtcagttcttcaacacaattggtaaacagttggatgagaatccaaagtctcgacgatttaatgacgtatacttcaaccggctgaaggatctaacaactaattctcagttggcatcacgattgaggttcatggcacgcgatgtccttgatcttcgttcaaaccaatgggtgcctcgacgtgaagagatgaaagctaagaaaatcagtgaaattcatagagaggcagaaaacaatcttggattgcgtccagggtcgactgcaagcataagaactggccgtactggtactggaggtggaggacccctttcaccaggagctttttctatgaaccaacctggtatagttggcatgttgcctggtatgcctggagcgagaaagatgcctggaatgccagggctaggtagtgatgactgggaagttccgcattctagatcaaagcccagagctgatccagttcggaacctcaccccatcattggccaataagccatcacctaataattccagactgcttcctcaaggcagtgcagcattaattagtggcaagacgagtgcacttgtgggcagtggtggcccactatcccatggtctggttgtcacaccatctcaaactacaggaccaccaaaatcactcatcccagctccatctgtagatcctatagttgagcaaccagctgctgcccccaagccaagctctacagagcttcagaagaagaccatatctcttcttaaggagtatttccacatacttcttctacatgaagcacaacagtgcattgaggagctgaagagtcctgattactacccagaagttgttaaagaagccatcaatcttgctcttgataaaggcaccaattccatcgatcctcttttgaggctgttggagcatctctacaacaagaatgttttcaaagcgactgacttggaaactggatgcttgctttacagttctcttcttgatgagcttgctattgaccttccaaaagctccagtacattttggtgaagttattgggcggctggtcttgtcacattgcctgagcatagaagtcgttgaggatactctaaagaaaattgaggacagtttctttcgtgctgcagtgtttgaagctatgatgaaaatcatgaaagcaaatccatcaggtcaggctatcttgggctcacatgttgctaagatcgacgcgtgcagcaaacttctatcctcggaataaatatttgtcgcaagtttgactaggccaacttctaccttattactgatgtcctaactgggaatgttacattggttatttgttactcggtagttggcaggttttgccctttcagttcgagaaactacaacactgaagttgaggaacagctttttgtgagctgtatttttttgcaaggtcagatgactgataatgaagtaaagaaaagctatagatttagctctgataacaccgtaacaatacctcgatggtggtttacgcggctactcctcttgtaacaggtactgctgcgtgttggcaagcatacttgttagcgttgggtacaactgagttcataatttagtcgaaagttgagatctgatgtaattcttccagccaatctcatgacaatttattcgagatttgtttggttcaatttaacctgtcaatgcagtcttatcttctcatcggctgtgaggtaggatatgggaatttgtactgtttgc

SEQ ID NO: 49503 - DNA, 1619 bp, Oryza sativa
  Clone ID: PAT_MRT4530_52081C.1
gcccccgcagagggccgaccctcccgatttgtccccaaacccgagcacgccaccgagccctaaccctagcctccgcgatgtcgaccgccgccaccgccccgccgcccgccgcggtcctcccggcggctcccccgccgtcctaccccgccacctccgcgccctccgcctccgcggccgccgccgaggacgacgacgacctctacggccgcctcaagtcgctccagcgccacatggagttcgtcgagatacaggaggagtacgtcaaggacgagcagaagaacctgaagcgcgagctgctgcgcgcgcaggaggaggtgaagcggatccagtccgttcccctcgtgatcggccagttcatggagatggtcgacggcaacaacggaatcgtcggatccaccaccgggagcaactattatgtgcggatcctgagcaccatcaaccgcgagctgctcaagccctcggcgtccgtggcgctgcaccgccactcgaatgcgctcgtcgacgtgctgccgcccgaggcggactccagcatctctctgctcggatcatcggagaagcccaacgtcacttatacggatattggaggatgtgacatccaaaaacaagaaattcgggaggctgttgaattaccgctgacacatcatgagctgtacaagcagattggtattgatcctccaagaggtgtgcttctgtatggtccacctggaactggcaaaactatgctcgccaaagctgtggcacaccacactactgctgcatttatcagagttgttggttcagagtttgtgcagaagtacctgggtgagggacctaggatggttcgagatgtattccgtttggctaaagagaatgccccagctatcatattcatcgatgaggttgatgctatagcaactgctcgttttgatgctcagactggtgctgaccgagaagttcagcgtattcttatggaactactcaatcagatggatggatttgatcaaacagtgaatgtgaaggttataatggcgaccaacagggcggataccctagaccctgctctgttacgtccaggtagattggacaggaaaatcgagttccctcttccagatcgtcggcagaagaggcttgttttccaagtctgtactgctaaaatgaacttgagtgatgaggttgatttggaagattatgtttccagaccagataaaattagtgctgctgatattgctgctatctgtcaagaagctggtatgcatgctgtgcgcaaaaatcggtatgttatcctccccaaggacttcgagaagggttaccgaaccaatgtcaagaagcctgagactgactttgacttctacaaatgaggcaacatattgttgaactgcatgcttgttcccctccggagctatcattaacattaaagatgatttcctggatagtcgcctcagcgatatttagtttatgtacctagaggctcgtcagtgccccaatctgttttatcaggtctgtaatttcaatttgtgcttgtacttgctggaaaatagaaaggtttgcacggtcaatccttttgatgtgaaactggacgtattttcgctactattcctttgtgttggcggcaaaaaaaaaaaaaaagtcgtttgttggtt

SEQ ID NO: 49504 - DNA, 372 bp, Oryza sativa
  Clone ID: PAT_MRT4530_52082C.1
atggcggctccatctgaaggtagtgaccaagctggagttggggtagaggtctttggccgcgacggcgtcgacaagctcctcaagatctcccgctacaccgcccactttgcccttgccggggcagtggtgggggaaggagagaggagaaaggggcggcgccaatggggaagaggaggccccggtgcggcggcgctcggcatggcgtcattcggtgcttggcgtggtggcgcttggctcggcggcacggaggccggcggtggaggatgggagagggaaagagggccggctgcgatggaggttgtcggggcgaaggaggctacggccggcgtcggcgacatctactgccggcgtcggcgacatctactgctttag

SEQ ID NO: 49505 - DNA, 633 bp, Oryza sativa
  Clone ID: PAT_MRT4530_52083C.1
ataataaagcaagtcagaaacaaaataaataataattccaaaatttttttgaataagatgaatgatcaaaagttacaaccaaaaactcaaagcgacaagtattttgggacggagtctcacgaattaacatgcatcccccagccatacactctgatgaatggcgatggcgatgatggatggcggaaaatgatggcgacggtagatccgtgcgtgtatgaagtgggctcgtgcgcgcgaggcgacgacggatccgtgtacctaactgaggtcgctattgctcgtggtgatggagatatatttgtgagaacgccattggtcaggagcttggccgcctcatctcccatcttgctggcagaggcgctcgacccaacggtgatgaagccgaggcattcactccttctcggtagtggcagcgggcacgagcggaggatgcgagagagcaacggtggacaacggcgaggctatagcagcgacaaagccgaggcatgctttcttccccgtggcagcatcgggcacggcagagggaggaagggtgcaggagggatgtcacttttggctataaatctagatgcacagttgtccagatttataactaaaaacgcttatattttgagacagagggagtatatcaat

SEQ ID NO: 49506 - DNA, 1551 bp, Oryza sativa
  Clone ID: PAT_MRT4530_52084C.1
atggccatcccgctgcaggggaaggcgcagcagcagcaaggggagggcggcaagggcgacggcgcggtggatgacgacggggacgaccagccgtcggtggcgtcggagctgcgtgagctgtgggggatggcggcgccgatcacggcgctcaactgcgtcgtctacctgcgcgcgatggtgtccgtgctctgcctcggccgcctcggcccgctcgacctcgccggcggcgcgctcgccatcggcctcaccaacatcaccggccacagcgtcctcttcggcctcgcctccggcctcgagccgctctgcgcccaggcgttcggctccaagaactacgacctcctcacgctctcgctccagcgcgccgtcctgctgctcaccctcgccgcgctgcccatcgcgctgctctggcttcacgtcggccccatcctcgtcgcgctcggccaggaccccaccatctccgcctccgccgccgcgtacgccgcctacgcgctcccggacctcgccgccagcgccgtgctccagccgctgcgcgtctacctccgctcgcaggggatcaccaagcccatggccgcctgctccgccatcgccgtcgcgctccacgtcccgctcaacgtgctcctcgtgttcggcctcggcttcggcgtgcgcggcgtcgcggccgcgcaggcgctcaccaacaccaacatggtcctcttcctcctcgcctacatccgctggtcgcgcgcctgcgacgccacgtggaagggctgggcgcgccccgccgccgtggcgagcggcctcgccggcctcgtccgcctcgccgtgcccagctgcgtcggcgtctgcctcgagtggtggtggtacgaggtggtcaccgtgctcgccgggtacctgccggaccccgccgccgcggtcggcgccgccggcgtgctcatccagaccacgagcctcatgtacaccctgcccctggccctcgccgcctgggtctcgacgcgggtggggaatgaactggggggagggaagccgaggagggcgaggatggcggcgatggtggcgctggggtgcgcggtggtgatcggggtggtgcacgtggcgtggacggcggcgttcagccgggagtgggtggagctgttcacgcgggaggcggcggtggtgaggctggcggcggcggcgatgcccatcctggggctgtgcgagctgggcaactgcccgcagaccacgggctgcggcgtgctgcgcggcacggcgaggccggccgtcggcgcgcgcatcaacctgctctccttctacctcgtcggcacccccgtcgccgtcaccctggcgttcggcgcccgcgtcggcttcggcggcctctggtacggcctcctctccgcgcaggccgcctgcgtcgcgctggtcctcctcgccgtcgtgtggcgcaccgactggcacctcgaggccctccgcgccaagaagctcaccggcctcgagatgatcgccgccgccgccgaaggcgacgacgacgagggcctgcgcctcgtcccgccgctgccgccgcccgccggtcacgatgtcgccgtcgacgtcgtgtag

SEQ ID NO: 49507 - DNA, 1271 bp, Oryza sativa
  Clone ID: PAT_MRT4530_52085C.1
atggccagaaaaaatgagttcccggctgcgtcagggaaatcaacgagtggatactgcagatcaaccggccacacgtcaacgatctcgtcaagtggggactatgatcagcaggcctctgatgttgccatggatgatgcagaacaaattgcctctacactgctaaactcaagatgtcgtgctccaaggaggggggggggggggcgaaaagtcaccatcaataccaaacttgttaagaaaagggcaagaagagaaaggctagatatttcttttcctcaaccatttggaaaagatgcatttcctgagctacgcaacgaagatgatgattgtgctatggggcagaaaagaagcaaccagaatgcagctaacagggcaaagcaggagatgggctctaaagtgggaactaaatcaattgctcaaattgcacatgaactgagaaacaaagagacaggtgaatggcctacaacaatgcaagtttggaaagcaacctatcaaaaggctgatggaacatggtctgttcctaatggtgaacgagttctgtctaaactaaatgaagttgctcaatcacaacaagaaaatatatgttctgcagcagtaccactagtagagcattttgccttggtccttgggaaaaaagcgaaccattcacgtggtataggcttacgtgcaattaatagagtggctgaagaaaggctaaggttacttgcacaagttgaggctgctgaaaagcatgcagctactgcccaggagcgtgttgatgctgcggaacagcgagcagtagctatggaagaccaagtccgcaaattggatgaaacaaatgcccagttgcaagtagagcaacaatctcaacgtgatgagttgaactcccagagaaggacagtagagggacaagctacagatgttgaaagaatggtacaacaaaaacttgatgagcaaatggccatatatttctcacgcttcgcttcttccaatggtgtttcatcctcacgatctccatcagatgaccattagaatgcatgaagttgatcttcagaagtctatttaatcaagctgaagacatcctaagtctatttccccgaataatttagtattagtcccatttaagtttctactggttgctttagttctcatcatgatgtttatgtcagcatttcgtgagaaattttgagcttcttgttgagtgcaacatttgtttggttgtaagacttctgaataaatatttcaatatcattgttcctgaatttggtttgaactgagagacaattttttaggtg

SEQ ID NO: 49508 - DNA, 314 bp, Oryza sativa
  Clone ID: PAT_MRT4530_52086C.1
aaccgccggttcgacccacacccacgcgtgcggctctgtcctgtccttgtatgacactccgcctgcggctcgcttgtagctctgggtggccgagaattaggggcgagggcgctgctgggcaagaaggcgactgccgcgggcttgccgggcgagggactcttcttactcctgtgaagggagtcacgagcggcacggtgcgaggcggacggagcccggatccaccctccgccgaccagagtgcgaggaggagtccctcttccacccttacccacacgagggcgacaacgactaccacgacaaggcgggagcaaggg

SEQ ID NO: 49509 - DNA, 304 bp, Oryza sativa
  unsure (1)..(304): unsure at all n locations
  Clone ID: PAT_MRT4530_52087C.1
acgcgtgcaggtactggtatggtatagagcggccgacctacgcgtncggggctacaacagtttggtagcgtctacttcgatcagagtcaagctcaaacccagctatgttggcctaaacatgccgtcaatatgcggtatctaccaagctaaacactgaacatgtgcattccaccgtggggggatctggtattgaattgtagcagtatagtagtacacgagagaaaaataaagtcatgcatcatcgcgtgtgacaagttgaagcatcgggtgatacacatctgaataaaaatgtgatgcatgttta

SEQ ID NO: 49510 - DNA, 1626 bp, Oryza sativa
  Clone ID: PAT_MRT4530_52088C.1
tcaaaacttccacgtagtgataccactgcatattctcaattcttgatcttccatatcttccctatgtctctcagactcttctctttgtccgtccccaatggtccccattgacgcatgtacaacacaacttggatagcttacgtaggtatcgcaggtgtgtgaatagtcgggctgaggtgagcccaatgggaggcctgcggtagcggcaaagccaattggacattttacaatgcagtcctctagggtgggactacaagaaactatgcgcgggagctcaacgctatgcaatctatgagcccttgattgcaagatgaatggtaacaacaggcaaatttgtgcagactcgaaatttattactctgttcccgttacaatgacaaccgaattttacagtgtcgctccggtggcaatcaaccgggcacaacggcatatcaccgcgaactctcacactcagttgtctgtcgtactcaatgaaaccacgcgcgcgtacagttcgcgtaacatagccatcgccgtccacgtcaacgaaatggagatcaatctccgcgtccaatgcttcctcccaccaaagaccgaaatctgcagtagtcaccaccatgggcgccggtgtttccgaaacttcagatgggtcgctttgcaagtcgatccagccatcctcggagtcccagtccggcaacgccgagcaggtgatcgccaatgcgctgatcctcttggttgcgctctgtgacatgccttcttctacttcgtcgtcttcatcagattcccagcattcggcgttcagcgtgctcttgggggacacccagccgtgcttcggcgccgtttcgtcgatgtcgctggaggcggatgcgagaaatgggtgctccagtagctgcgcggcagtggggcggtcgcttgggttccttgtgaagcatctggataggaaattcttcgcctccggggagagccattcgggaatctctggcacagcgtccgtgtacccgatccggtggacggcggagaagacgtcgtccatgtcgctccacgggacgcggcctgtggccatctcgatgatcgtgcaaccgagagcccacacgtcggcggccggtccctgctcctcgcctcgcgccacctccggcgccatgaacgccggcgtgccaccaatcggccgctcggagtcagtcctcctcgcgcacccgaagtccgcgagcttggcccgcccgtcggcgccgaccatgatgttcctggccttgacgtccccgtgcaccagcgagttcccgtggaggtaggccagcgccctcgccacgtccgccgcgtacgcgctgatggcgcgctccgcgaggcggcccccgctcctcgcggcctcgtcggcgagcgacccgccaggcgcgaactcgaggaacagctggtactccccgcccgccgcggcgcgtgacccgaggcaggggacgatgtgcggggagcagagccccgacatgacgcgcccctcgcgccgcagctgctccgccccgccctcgccggccgccgacttgaccgccagcagctcccccgacgcgtcgtccgacgcgagccacaccacggcgcccgacgcgccgcggccgagcgtgcggagccgcctgagctgcttctgcatcaccgcagccgcatccat

SEQ ID NO: 49511 - DNA, 483 bp, Oryza sativa
  Clone ID: PAT_MRT4530_52089C.1
atgaaaaaccatcgccttgagggaggccttcttctcctcgccaccgtgtgctgcacaaccggtgacggcatgtgcgccgcgcggcaaagggagccagcggccatcactcttcagtcttccgtcagaatccctgtaaggttcagtagcagcagagggcaagagaacttggctgagccagcatacagggtggatgtgcgggaggagattcacgcgcgcgtgcggtgccaaactgccaatggtggtgctcggtggaatggcagtgattcctcctccatctcaactgaaaatgtctctccgtgcggcctcttcacgatgagggatgagacggaccgttctgcttttgccgcgtgctttagtattatggcatggcaagcctctaggaatgtcgatgttgatctcattgaaggggatccaggaggggcctcttggattggatatgttattgttgactacatagccgaaacaggttataagacgttttga

SEQ ID NO: 49512 - DNA, 333 bp, Oryza sativa
  unsure (1)..(333): unsure at all n locations
  Clone ID: PAT_MRT4530_5208C.1
acccacgcgtncgaacaaacaaaagaggaaaaaaaacatatacacttctatttgattgcctcgattgacccatccaacgggctagcagagggtcgtctatcttctgcggcgagcgcctcaatggcggcccatacgcgggtcatcttgcggcagcgcagtctgatcagagtcggagatgagcgttcatcggacacggcacgtgccagacatggaggggcaaggacaagccccgcttggacgccgtgcgcgagcaggttgcttcgacccggcatgctcacccggcccgagaggaggctgtcagccggatattattcagcgactttggccgcagct

SEQ ID NO: 49513 - DNA, 338 bp, Oryza sativa
  Clone ID: PAT_MRT4530_52090C.1
tcgtttttcaccttcccttcgccatgtccgtctccgccgccgtcggcgacgtcttcacttaccgtaccctcgtactcgcccgtcaccgatcgccgtcggcatttagggtcgtggctgacaagccgagggcgtccgtaatcctttggcccccatccccttgccgtttatcccgccacccgtgcccccgccatggccaccgacggcgccgccgtcgccgacgcggcagggtcgaagaagaagaaggaggtgctcatcttcgacgccgaggaggaccttgcggtgtccctggcgaagtacacggcggagctgttcgtgaagctcgctgccgagaggggcgc

SEQ ID NO: 49514 - DNA, 304 bp, Oryza sativa
  Clone ID: PAT_MRT4530_52091C.1
aggggtgagtgggatgggttggtccctggagaggaatattcctctcagatctaggaccaaccgatccgggaaattctggcggacgaactcgtcccagttgggacgagcgaacggcgtgacgacgccttgcttgtgcactcgccctgctcgagctcgggggcgaccgcgggggggctagatgacggcgaccacggggggctcgatgacggtggccacgggggctcggtgacggcgaccgctgggggggggctcagcgacggcgacggcggatccagtggtggggagggcggtggaggtggatccg

SEQ ID NO: 49515 - DNA, 424 bp, Oryza sativa
  Clone ID: PAT_MRT4530_52092C.1
ctcctcccttcccccccccccccccccccccctccccttccctttctcctccccccccccccccccccccttccccccttcctctctctcttccctccccctccctcccccctctccccctctcccccccctccccccccctcccccccccccccccccctcctctccccccccccccttcccctccccctcccccccccccccccccccccccccccccccccctcccccccccaccctccccccccccccccccccccccccccccccccccccccccccccccccccacccccccccccctcccccccctggagatatgctgagctattggagagttaattttacttgaaatttggatgcatcaacacgtgttaggcccatacagagttatatataccccaatgcatatgtaattaagctt

SEQ ID NO: 49516 - DNA, 663 bp, Oryza sativa
  Clone ID: PAT_MRT4530_52093C.1
gaagaccgagaccgaatttttcggtcagaccgaacgcccaccctagtaatagggatcctgactctatttggagaggcctctaaccttcgtaccaactatgtcaagtgttccgcaattccgatcaactgctcggagaaagaggtcgcagtcctcggtgactctctcctctgcccggttgaggcgttatcgtgcaagtatttaggtttgtctctctccatcagaaaaccgcaccacgaggaccttcagcctttggccgacaagattgcacaacgatagccgctgtggagatctgattggatccatccagccgggcgcctagcgcttgtcaaagttatgctgagcgcgatcctggttttatctgctcattgtaatccccccaccccttgaaatgggtgctgaaagccatcaacgagatccggcacggcttcctttggtgtggttgtgcaagcgcacaaggtggccattgccggctaacttggtcctatatctgcgcgcgcactggaatatgaggggttgggcatccacaacctagagctcatggggatagcgctccatactaggtggcttctcgtcctccggtgttcgggcctcgcggcggcggaggtccggcccctgtcgacgctgacccgggagctggtgctgctcctcatcttctccctgaag

SEQ ID NO: 49517 - DNA, 906 bp, Oryza sativa
  Clone ID: PAT_MRT4530_52094C.1
atggccagccgctcgccgccgcctccgccgccgccgccgccattcccggacttagagacatgggattacttctttggccagtacgaccacccctcgtcgccgtcttcctcggccacggcgatgccgcatctgccactctcccgcgtatcgtcgtcgtcatcgttcgtctccacagagctggaactgccgccgcctccacccccgccgctgccgacgcttccggcaaagccactactccggcggcgcgtagcctcgccgtcgtcatcgtccttttccacagagctactgccgccgccgccgccgctgctacggcgggaaccctcgtcgtcgtcgtcgtccttctccactgagctgctgctgctgccgcctcctcctccgccgccgccgtttctctcctcggattacttcatctcctccgatcctgacacgccgccgcacgccggtggtccaccgacgtcttccatccacgactcctccttcgtgtcaggcccatcgtcgtctcgaccggcgctggccacggtgatcactgtcaccgtctccgacgacgcggcggcggcggcggcctgcgccgtctgcaccgacgccctccagctcgcgtcgccggcgtccaggctcccgtgcggccacctgtaccacgcccactgcatcgcgcagtggctgtcgctgcgaaacacctgcccggtctgccgccgcagcgtcccgatgcgtactgaggagaccgcgccgccatggtcgccgccgacggagaccgaccaagaggccgtgccatcgccgccgccgacgacgacgactgcgaccgatcaccggcggcggtctctgccgggagaacgccggatcaggaggatttgccgcaggttgcttaattacatggaaatcagccgtcagcggcagcaacacactgattga

SEQ ID NO: 49518 - DNA, 1089 bp, Oryza sativa
  Clone ID: PAT_MRT4530_52095C.1
atgtgggaagctgtaggcggcggcgacggcacggctctcctgccgtggcccggctcggccgcggccgcgccgctctacatgcccccggcagcagcggcagcggcgcccttcgccgccggcgagcagctgccggtggagcagcccttctacttcgacggaggcggaggcgtggcggggcataatcaccatcctcatcatcatcagtacgggatggaggcgccgccgccgatgacgatgatgcagatgggcggcgggggttcgtcgtcgtcgaggatggtggtgtccgggctgctcgggacgctgcaggcggagctcgggaggatgacggcgaaggagatcatggacgccaaggcgctggcggcgtcgcgcagccacagcgaggccgagcgccgccgccgccagcgcatcaacggccacctcgccaggctccgcagcctcctccccaacaccaccaagttccgtaaaattcatgcgttccaatcaaacaatgtccatattttcataatgacggacaaggcgtcgctgctggcggaggtgatcgagcacgtcaaggagctgaagcggcagacgtcggcgatgatggaggacggcgccgcgggaggggaggcggcggcggcgccggtggtgctgctgccgacggaggacgacgagctggaggtggacgcggcggcggacgagggagggaggctcgtggcgagggcctcgctgtgctgcgaggaccgcgccgacctcatcccgggcatcgcccgcgcgctcgccgcgctccggctgcgcgcccgccgcgccgagatcgccacgctcggcggccgcgtccgcagcgtcctcctcatcgccgccgtcgaggaggaagatccagacgaggccgggaacgacgacgacggcgaacacggctacggcgttgccgcctcgcaccggaggcacgagctcgtcgcgtcgatccacgaggcgctgcgcggcgtcatgaaccgcaaagcggcgagcagcgacacctcctcttccggcgccggcggcggcggtgggagcatcaagaggcagcggatgatcagtgcacatgatcagcaaggttccttcaattctagtggctggtaa

SEQ ID NO: 49519 - DNA, 228 bp, Oryza sativa
  Clone ID: PAT_MRT4530_52096C.1
atggtcgccatgtggggcggcctccacgagttcggcgacgtggcgtcgctgccgcggcggcgcatggatgggctcctcgacgtcgacggcaaccgccggccagccggccaccgcgacctcctcagcgtcaacaccgtacaccagcaacgggaggactgctgcgagcctgcagatcagcaggcgtcaggcggcgtcgcgacaagcatcagccaccagcagataagctag

SEQ ID NO: 49520 - DNA, 2541 bp, Oryza sativa
  Clone ID: PAT_MRT4530_52097C.1
atgacgccgtcgcacggcgccgcggctgcggcggcgtcgtcctccgccggcgccgggcggagggccgcgacattcgcgggggcgagcgtgttcctgtcgcggagcctggtggcacccgaggtgtacgacgccgtgcacgacgcgctccgcctcaacggcgccgaggtcttcctctgcgccgaccccgcccggacggggccgctcgacttccacgtcatctcctcctcctcccacgagaggttcgcggatctgagagccaaaggctgcaatttactcgattggctaaggttttcgtggctaactgtgctaattgcactgaaactagttggtttggaattgtcttacaatagaggaccacagtgcattctttcctgtgcgaaggaacaccgcttcctacctaagcaaggttatacttgttgtcttgcaatggatggggttaagatactttgctcaggttttgaaaaagatgagaaggcaaagattgaacaattagtgacagctatgggaggtactttacaaaacaaagcatacacggatgctaactttgtaattgcaaaggatgtattggctgccaaatacaaatgggctgtgaatactctgaagaagcctattgtcagcaggaactggttagagcaatgttggattgaacatcgtgttgtacctcatgaaccttacagaatccctcctttttctgggttgaatatttgcatcaccaaactgaatgtaggtgacaagtatgttgtggcccaaaaatggggtaatatccacatagtagttcccaaatggatcgaccaatctgttgctcgaaaagtttgccttgatgaaagtgcataccttgtttgtcagaattccactaatattaatggtgtaaaacattcccttaaggaacaacacaaccctgagatcagtagtgcaagttttcaacctgttccaacaacatctgtagatgactcagtatcaacgtcacagtatgtgcctgcttcatttgatgacgcttcaaagatctgcagtactgatattggcgcacctagtttccaagagacaaaagaactacaggttgatagccatgttgctgaggactcagaggcagaagatgatgacctttatttatcaaattgtagaatttctctggtgggttttgaggagaaagagtcgtcaagagaaaaaaaggaggtgagacgtctggctgcttggggtgtaatcaatgtggtaaaagcaacatggttagaagactgcaacaaagcaaaaaaggaggtgaaagtatccccaagttatgtggctaatgagttgctcgcgaaagagttttcatgtgcggttatggaaaaaactgttatgcgggaaacaaaagcagccaaaaactcaggtggaatttttcatattccaaccgtcaatgacttgcatgataaacaacttggaaacgatctgtcatctgaaagaaaatcagcacggggcaaacatgaaaccatgaatagtaaccggacagcaacgaagtctgcaatatcaagtcaacagaatggagtggctagtactagcgagtaccaccccaaatttcaaagagctcaggttgttgactgggtcagagaaggtggaggcattatggtggatgatgcacaatcaacagttgtggatttcattatcgagagccacggacagaatagcatgctccgcgactcttctcattcaactgctgtttccactcattggatacgctcatgtttggaggagggctgcttccaagatgtgggaagccatcctattttctcacctttgtgctgtcgcatcccgtttcctgggtttgaagattttcgtttctgtgtgtcacaatatgaagagaaagatagacttctgctgaagaacttgtgctttatcctcggaagtaaatttacagagaaagcaacaaagaaagtgacccatcttatctgcaaatttgcaagtggtccaaagtatgaggcttactatagtaggggaattccaaccataacagcagagtggctctttgagtgtgtaagacagaacaaacttatcagtgttagattagcaggtaatgcctctgttaatgaggaaccaaatgatcctggtgttagtaaaaggaggcgattatccgagtttggcaaagctaatgatacatctggaaacataggaagaactgaggaactccaggatagtacccctgttcctgatgttgcagatgcaatagaggacctactggttcaatcatccaagatttttgcacccgatgattctgttcttaatcaagatcaggaaaatacacactcttttggcatttcaaggcactggttgaacatgccacagaagctacacagcacccctgacacgaaagttcaaagtgggaactcagccaccacctctgctgcccctcctgccgcagccactgcctattatcctttcagtgaaactcagactgagtctcaggtcgttggctatgaagaagatttgactggcaggcaaaagattatcgacagagttcgttctcagagcattaatgtcaccccggcagctgaaatgtcttccgatacttag

SEQ ID NO: 49521 - DNA, 366 bp, Oryza sativa
  Clone ID: PAT_MRT4530_52098C.1
atgtcgctcgccttgcgccgttacaggcgcgcccgatccctggacgtgctcgccgtgcgccaggtgcggcgacgtgatccagagcccctctccacgctctcccgcggccgcgtcgtcctctcgcctcgagcacccacacgtccatcctcgccggtgccccggcctcaccgcgacgaccagccgagcgtgcacgttctgacgttcgtcaccccggcacacacggtgttcgccgggaaactgggacaccgcgcgcgcggccggcggcgcaaggaactagtacgtcgagccgtcgacgctgacgatgccgctggaagatttgtggcaaacgcccgccacctccccgccacgacgcgtcgcgcagcgtga

SEQ ID NO: 49522 - DNA, 2499 bp, Oryza sativa
  Clone ID: PAT_MRT4530_52099C.1
atgccaggagatgcttttgttactctaggtgctacatccaacttgggaaattcaaattttggattgtttactgatcatttggataacatgggcaagtcagagagcaaaaatatggacccctgttctactgccaatgggatgttagatagttctaatatttttgttggggttccaaaaccaatgtcctcgtcttcatttgcatctgagaaagagagtgtttttggtgatagtaaatccttggatggcatttacagcatgaaccattccattaaaatgcctaaggagaaaccagtccagcaagcttcagctgaaacaattagcagtatattgcctgagatgcatatccatgaagctcctggaaccactggtttcaataattcagatccactttctacaagtatgcaggaccagttgccagaggagaatcaatgttccaaaatgtccgacgacgtgtggttgactgtttcagatgttgttttagtgacacagcctacgagtgctccacctccttcacggcctccccctacgcttgccgccaagaaaggaccaacggaatccaacactagtaatgcatatccacatgatcataatcaaggttacaatccttttataagttcaacaaatacttctaaaacacccaaaattgatgaattagaagattttgtcatggcaaagccttctagcttggctaatggttgtctgcaagatctaaatcataatggaattgggattggacaagattcatctacatctgctgcaggtttcatggattgggctgagctaaaacactctaaaggggtgaaccaagggaactttgattctttgttcgctagcagtcagtaccaagaaaaagagaaagcagtgctctatgcttctggaatggaaagcagagatgaggaagaactattagagcatgagaaaaaacaaagagaaaaggaagaggaacagagaaaactagaaagggacagggaggaagagcttgagagggaaagagaaatgatgagaagaagggaacatgaggagcggaagaggcgtgaaaaagagagagaggcgaggcacattgtggagaaggccatgcgagaggcacgtgaaagggcagctgctgaggcacgcatgcaagctgagagggaggctcgtcaaagagcagagcgagctgctgtacagaaagcagcacgagaagcacgagagagagcagcagcagaagcacgggagagagctgcaaaggcggctgcagaagcgaaggaaagggtggctgaggaggctagggaaagggctgctaaagctgctgcagaagccagggaacgggcagctacagaagctagggaaaaggcagcagcagaagctcgggctaaagctgagcgagctgctgttgataaagttgcagcagaagcacgaagaagggctgaaagagcagcagttgagagggctgctgcagaagctcgacaaagggctgctaatgaagctagaaaaagggctgaagctgaagctcgagcaagagaaagtcagcagaaaacagctcaacctgatctcgactcattctttggtatgccttctagatcaagcagtgtaccgagatcacagactgcaacaacgaatccttttgatgtccaacctcaaggtggttcagattttggttctataaggaggacttcttctggttcagcttctccctttgcacaacctccatctactaatcttatggatgacctctcttctatatttggagcaccttcatcatctgctgtgtttcaagaagtggatggagagagtgaagagagaaggaaggcaagattggagcgtcaccagaggacaatggagcgtgcggcaaaagctcttgctgagaaaaatgagcgtgatttgcaagttcagtgggagcaggaagagagacatagaattggtgaaacacttgattttgagataaagaggtgggccgctgggaaagaaggcaatttgcgagccttgttgtcaacgttgcaatatgttctttggcctgaatgtgggtggcgacctgtatcattgactgatttgattacagccgcatctgtcaagaaagaatacaggaaagcaacattatgcatccatcctgataaggtgcagcaaaagggtgcaaatcttcaacagaaatacattgcagaaaaggtgttcgaccttctgaaggatcagcatatcgttcccaaatcgcgttctgaacggttggttcaagtaatatttgtttgccccctcttacctgtagtgctctgttcaaagcaagatgtacacaatttgcttttattgttttctatcattataatagctctttttctttttttgcttattctttggtctgattctttggattcattctcatgtaaccatagtttgcttcctggaacttgtgtgttgtatgtatctgccaattttggtacccatggctgtgtaagtagatttatagagaaacaaccctgtaaatccggtgatgttaaacattccattttgggagagtagtatatatttttagag

SEQ ID NO: 49523 - DNA, 599 bp, Oryza sativa
  Clone ID: PAT_MRT4530_5209C.1
tttttttttttatttttttttttttttttttttcttttttattggtttttttttttctttttttttttttttttttttttttttttttttttttttttttttttttttttttttttttttttttaattttccaattaaaaacccccaaaggttaaaaggcaaaaaaaggggaaatcggggctaattttaaactcccaaaccactaaccgggaaaaaccaattaaaaaacccccccaaggggggaaagggcccgggggcccccaaaaccccaggggggaaacccaaattaaaggggcccgtaaaaagccaaaaaagctggggctgggcccaaatccccaaaaaagggaaaaccaccaaacgggggggggggaaactggggccctagggccaaaaaaaggtaaaagccccaaaagggaaaatggggcccaacaaggcggaggggttgcaaaattggggtgtttccaacgagcccggggggccccccggaaaatccgaaccggaacccggaggggaaaaaattttcctaaaaggggggctaaaaaaaagtgggggaaaaaaaggaaaaagggtttctctggggaaaaaatggaattcctcac

SEQ ID NO: 49524 - DNA, 7399 bp, Oryza sativa
  Clone ID: PAT_MRT4530_520C.1
atggctcaccgcaagcctaccaaggccgggtcaactggcgaagatcctggaagccttggcgaaggatggtcatgcttccttggcaaatcacttgtcaaagaggccgacttgggcgtactggtatcatccggttctctcacagagggccaaggatcgtgcgggggtgaggccgttgttccctcgcctggggatgggcgaacggttgtcttcgccgcatacttcgctgctggtcttcgcctcccgtgcgataacttcttgccttcggtgctttcgatgtatgaggacaggaactggatgcagaaatggttctacattagcaacccttactccgccgaagatgctcaggcgagctggctgctttttgagcgttctgccgtctccatcaacgcgaagccgaacgtggagatcgacgggactctcgagtcccggcttattctccttcgcaaggttgcctggcggctgagcacctgggatctttgcgaggagttttgtctccttcggatttcccctctcgcccgtgtgtgggatgtttccgtgaacgagggcgaagaagttcttgggcttccccgcctagttgtccccgccggggccgatagtaagcgccaagccgacggccgggtgaatcgtgtctatactggcgaattgccgagccaatcgaacccctctcgtgctggtgatgacgaggctgggacttcaaaaaagcgcaagcgtgcggtcgcgaaaggtggccaagtccgaactcgccatagcgcgaaggccgccgtcgaaagtgatggggaggaggaagatgaggaggatgctgatgctggttcggaggaggatggctctcgtggttatacccccagccctacccctgcgaaatccggggcaggctcccatgtttcgcctacgcgaccacaagaaaccgtcgtggcgaacacccttctggtgatctccagcacagccgcgaaaccggtgatggatgtcagaaggaagaagaagaaggggaaggttgtgcaggtcggccatggcttttcggacagcgaagggtccgacgggacccctacttcgccggtgttgcggcgcgcaacttcccgtggcaggcgcatgtctccgccacccactagcgatgccgaagcggcgacgggcggtagtgcctcggccccggccgctagggcgaacgtcgctgaagacgaacgggtcgaagtggtccggcgaatgctgagaacagatagcatttcctctggccatttgcccttcgctgcctcctcaagccttttttttagtgcttctaggattttgccatttgtacgttcggcgccccatttgactcgggtgcgcgaccgacgcgaacctaatttccaggttaagcctttcgcacatttctctgaacttgtcagagtcgaactgcttgccgttgtcagtgatgaactcttttggtgctccgaaacggcaaacagtgtttttccgtacaaatttttgcactactgccgaaatgatcgctccgaggggttcggcctcaatccatcgagagaaatattcaacagccacaattgcgaacttgtacccgtttcgtgccatcgggaacggcccaatgatgtctagtccccatctggcgaagggccagattggcgcaatgggctgcagctcatactggggcacggtttggcttcggccataacgctggcaactttcgcacttcttaatttgctcgacacaggctttcaacatagtgggccagtaaactccttgtctaaacactttggaggcaactgttcttgcggcttggtgcgcgccacatagcccctggtgtatctccttcgccatttcctcgccttcggcgaatgagatgcagcaaagcaagggttgaagtaccccaaagcgatagagctggcctgagaccatcttgtactttgtggctctgagttgcaagcgttttgcttctgcttcgtcttccggaagccatccagtttcaaggtgtttcacaaacggggttcgccaatcgtatgggtcttcacccagttccacttggtcaattgtcatgacttccaagctgtccatgggcacacatggtgtgtataagacttcaaaaaagatgccaggcgaatgtgagccaccacaagcagcagacttcgccaaggcgttagcttcctcgttctggcctctaggtaaatgttcgactgttatgccggtgaagcatttttccatggaccgaacagcctccaaatacttcttcattccatcttcctttgcctcgaaggatttgtcaacatggcctgctaccaacttggagtcggttcggattagcaagcgtcgaacccccaatgctttcacctttcttaggcctagaagaatggcttcgtattctgttgcgttgttggttgtgtcaaactgcagccttgcagcatatcgaattggcacgccattcggcgaagtgagtactgccgcaatgcctgtgccccaatgcgaccaagaaccgtcagagtacatcacccagggctgttcgataggctcgggctcgggggcgaatgctggtgtccatttggctacgaagtcagctagcacttgagacttgacggcagtgcgggcaacaaaatgcaagtcgaaaggggatagctctgccgctcacttgctaagccggccagtaacttctttaccccggagtatttcgcccaaagggtactgtgatggcactatgactttgtgggcctgaaagtaatgcttaatcttgcgtgaagccatcaccagggcgtaagcgagcttttccatttcaatgtatcttgtcttcgctccttgcaatgcttcggagatgaaatagaccggtttttggcctgaatccgtttcttggacaagagcagcactgactgccactagcgaagctgccaggtatagtagcagttcgcttcttgatgctgggctgatcagagctggcgggctttgcaggtattgttttagctcgtcgaacgctgcttggcattcgggagtccagttgaactttcccgcgccccggagggttttaaagaagggaaaacctctttcggctacaaggaaacccaacagcttgcctgcgcgaacgccgaaaacacacttctcaggattcagtttcatacccgctgcacgcaagttgtcgaaggtctcctgtaggtcggatgcgtgatcgaaagccttgcggctttttatgacaatgtcgtcgacataagcttccacgtttcgccccaactgcttgtaaaggatcttgtacaccaacctggtgaaagttgctctggcattccttagaccgaaaggcatcctgagttgacaaaaggtgctgaacggtgtgatggaggctgtcttggggatgtcggctgggttcatgcgaatctgatgatagccggaatatgcatctaggaagctcatgggttcgcagccggctgtcgaatccatgagctggtcgatccgtggcaagggaaaatcatccttcggacatgctttgtttaagtctgtgaaatcgacacacatgcgccatttgccatttgacttccgcaccagcactggatttgccagccactcaggatgatcgatctcttgaatgacccttgccttgagcaatttttggacttcggcttttgcggcctcctggcgatcaatagacatcttgcgtagcttctgtttccttggcttggcatccggcttgactgccaagcgatgcattattagatctgccgaaactcctccgacttcatcagggccccaggcgaagatatgaatgttctttttgagtacctctaggatgttcttagcttcttcttcgcccatgtcgctccccagtgatacgagcttcgtggggtcggcatcatcaatctgcatcttgactatcttgccgtgaggggcgagctttggcgcgtgcttcgcccggtcatgcggttcggcctcaacattgtgcactgctctattgattatggccaaatcaccttttgaagcaaccgaaggctgaagccccttgaccacgatcactcctgccgggccgggcatcttgagcttgagataattgtgatgggaaatgacttcgaacttgttcaaggttgcacggtcgaagatggcgttgtagttgtatgggatgtcgacaacgtaaaacaatacttgctcttcgcgtctgttttcccctgtgccgaaggctactatcaactgtgcttggccaagaacttgaactgcttctccgccgaatcctcggagcgatgtcggtgctggggtaagggcttgggtagtcaaccccatcttggcatatgcttcggcaaagatgacatcggccgaacttcccccgtcgaccaggattcgccggacctcgaaaccagctagctcggctaagatcaccagaggatcttgatgcgggaacattactccttcggcatcttctggcccaaaaaagatttgctggttcagatacttcttgcgaacaggctgctgatggttgcttgcttgctaagtgtcgaactccttgcggagggcttgcacctcttcgacaggcatcacagccttgcccgcacggttggttctgaacttcctccaggtcatgggggtttgaccttgccttggcggttgtgcttggatcaccgactggggctggcgaacaacgagaggaggtggttcagcaacttgaacttgttgggcttgagcagtggcgacggaaaacttgtcgtactcagcttgtattgcttgccgtcacttggaatcctcttcgccccttgcgaacccgtcaatgatgcgaagtaggtgttcaagcgtctgcggctccttgttggtgatttttcttgtgagttcgccctcgagtaaaccggccgaagcggcgtttatgactgatgcctcagttatgtcttgaacttggcatcgggcttgcgagaagcgacgcatgtactcccttatcgactcccccggcctctatcgaataccaagtagatgctgctgcgtcttcggctcctcataggtgcctcgaaagttaaggacaaagacatcgcgcaattgctcccatgagtaaatgctgttggctggcaaattgaaataccaagagcgggcgatgccgtctaggccgagatgtattacctttgccttggtatttcgtcgccatgagccgcttcgatcgtggattcataaatggagaggaattcttttgggtcagtttcgccttagtagcgtgggacgggtgggaacttgaactggggtggtattggacgggtcttggttcccccactcaacggtagcccttttccgccccctgccctgttcacggcaccttgctgcgggtacggcgtggcgaagggcaaaatgacggcttgtgcgtgaggttgggccatttcatttggctacctggccccgattggtgatgcttgctgagccgccatgaatgggccgaaagttggttgtgaccatgtcatggcgacctggtttggtgctcggtttgctccgaagcctggcgttggtgcttgcggccgaacggttggcgcctaagcagcattgatagagtcgaactgcggtccttgactccacggcgaagcccctagacctggctgattcgaaggcaaccaactaggtgcaccttgacttgtctacccctccgggcgggccgaaggggttgtacttgaaatgttgtggggttggctgagctgctgaaggaaagcttggagctgcgcctgtagagccgaagccccttctaccattgtttgtggcacatggccaggcggttgaggatgtacttgggctgcgaccggatgagcttgcagttgcacatgaggggctggatgcgctgctacggtcgatggctgcccagcgaagtacattggcgcttgcgcgacttgtggcgaaaggggctgggtcggcacttgtggatagacttgtggattggtgccgaagcgaccttggaccgccttgccgcctcgtacgcttgttgttgttcttgcatttggtgaagcatgtcttggagtcgtgtcatgttctatcgcatggcttccatgtcggctttggtttgtgtctcggggtcagagttgacttgggcttgcatagcggcaagcgcagtttgggccgctgccggctgcgacggagcggcttggggcaccagcagttggcttgtcgaaaggatctccgccctggtctggagtgccctcgccgccgcagccgccttcgccatgtcagccgcgttcggcacctacacagaggtagaaggggccgaaggcggtagtgatggcgcaggtgcagaagcagacggcgctcctccatcttcggcgacaggcgtcgaaggctctgctccctcttcgacagccatatccaccccagcgccgctttcctttcgccttgtaaccttctccttcacgaccttcttcggtggcattcgctctcagtggtttcgctcggaggtccccacggtcggcgccagctgttgtcgaaacgacaaccgcatacgtcgaaagacgtggttactcaacagtggttggaaaagaagtaaagtgtattaaattttgaatttttcttgggatcccccattacatggccctaggggactatttatagccccattacaggttcttactactaggatttaggttatacgggggaatttacatggttgcccttatgaaagggacgtttatagggttacataatgtcaagaggacttatgggcccttgatgggccgtcaggcgaccgtcggccctatagcccctaagcttgatgggccgaaaaggcttcttcggcctttgcgggggcgaactggacatggtgaagccgtccttcttcgagctggatgccagggcgaactggacatggcgaagccgtccttcttcgctggatgccagggcaaactggctatggcgaagtcgtccttcttcggcaggtactcacgcgacccttcgcctcgcatcatccttggttcatagccttcgccacgggtttcggcaaatttggtcgaagggcctcatgccatccgccaacacagttcatcagatttttatatgccaatcaaaaactaaaacctggatgttcatggccttcttgttggtctcaagctggctccccttggcgcccttggccttctccatgttgcgctcgcgggccatcctggacttctgcccgttgccgccgcccatcgtggatggatccggcgctggcgatgatggtgtgaaagaggcgtgtgctccgcccggcgccggccgccctcgcgcccgctgtgctcgtcggtttgtggttcacggccttgggaggattgggggatggcagacctctaaaggtgggggacgcggagtgaaagaaatagcgtttttaatgcgggaacaattccaccggtctgaccggcccaaggcccgatctaaccggtcatcagaggtgtggtctgaccggcgagagagccactggtcagaccgtgcaactaggcggtcggacatgcatgatgtccgg

SEQ ID NO: 49525 - DNA, 329 bp, Oryza sativa
  Clone ID: PAT_MRT4530_52100C.1
cgggctgcaggaattcggcacgagggagcatatgcagctcacttatatgatcactcaaagtcgaaggtcccttctgttagtactccctccggtctatggtcagttgaaacctcactgcacactaaagttttgtgaacaagtgcagtttgacctaaacgttaatttgcagctgaagtgctccctaaattatggatatctttattagttattcttcaaatgattgaaggatatccatttgaatgatggtatgctttacacacaatcacacatgcccactttatctgtggatgtgtatatgtaggtgttggttgatcgattgtgaattatat

SEQ ID NO: 49526 - DNA, 288 bp, Oryza sativa
  Clone ID: PAT_MRT4530_52101C.1
aaaaaggatggttggagtatatttaaatttatgcagcaacaggcttctcgttcttgagtctcttttcgcgctcttggagaatggagagcttgatacccttgcccttggggagagacacaagagatgatcctcttcccaaaacgaagacgtttgtcaaacgagtggcgaacttgtttccggcagcatccttgacgtggacgatgtcgaaacctccgagatggcgttctctgtcttccaaaacaccaacacgacccaaattgtgtccaccaggaatcatgacggtggttc

SEQ ID NO: 49527 - DNA, 1804 bp, Oryza sativa
  Clone ID: PAT_MRT4530_52102C.1
cccgggtgggaccgcacgcaggccgacgtgggaggtcaccggaggccggccaccgcgcgggggagatccctccctccccccgcctcctctcccgcgctcgccgcgtgcccctgcccggccgctccgagcctctggtcccctccctctctacccgcgtgaatttttagcatgtgacgcggcggggggcgcgcgcgcgggcggcgcgtggaggcgccgccgggggaaatcgggcgcgagggcggcggcggcggcggttgcgggattgatccagagattttttttttttggttatttgtttggattggttcggaaaatttttttgagggcgacgcgtcctcttcgaaattcgttttttccagattgttactacaaaatggtttgcatgtctggacattttcaaatggcttctgtgctgaaacttgttatgatggaaagtcatgcaacaccagatgacctgaccggtgataagggtgctgcacagatcctacacaggcaactttttgatgcacatgaaccaaatttacttgatgaagatgatatgcatatatttggatccaaacctatggctgatccattggacctggtcttctgtaatacttgcaagaaaccaataaaggccagccaatatgcagttcatgcagagcgatgtagttcagggaaggtaaacccaaatgattcaatgggaacaggtatagatgatgattgtggtaccaagaagcctccaaagaaggggagaaaaataaagctgacaagtaatggaaatcaaaaggtacatataaaattgaaagcaaagtctcaatctgaaaacaagaacattgccaatggttttgagttggacaatgtacttgccaacaaagtacaacctataggttccaccattgatcaaaggttgaaatcatctgccaacaatccagctctcaccagtgtacctcaaggtcaccatagagatgccccagttcctcttgcaacaaaaatgtaccactcacagggaaactaccggcttcgattggaactcggtcagctttaccgccaatcatgttcagagcattcaggcagctattcaattccgaactcatcacaggagaatggcttgatggtctcgcatttatcaccaagagataattcatcattaaatgttgctcagaagagctttgttcctcaaacaaagtctatggaccagcttcttgcgagcacaccagaatcatgccctgtaatcccgcagcaagtagcagcaagtgtgccaaaccgacaagcaacaaaatctcagaaagcagaggttcaagtatctgcagtaaaaaacgaaatggcaagaagcagatgcagcaaagatgctgttcggcattcaaaaaacacagtatatgagaaatttattcttgaagattatgccaagtttgaccacgccttagtgaatgggacggaaggagtatatcagtacctttgtaataagaaggcccatcagcaaagaaacggaacggtagattgttggtgtagcggctccatctgtgaagagttgttcttttcaaatgaaaaaactggttctcggaatgatcttggattggacaatctgattacagggtcattttggtccgttaactcttgagacattgctactaacaacttttttactccatctctgatgatggaaattacctgtacatatcccggctgcaaagtcctttctgccccccttgttataaatgacatgatgaacattttcaatatagcttttgatcatttcgaacacaaaaaatatcaaaaaaaaaagggcgcgcgcgttcattcattctagcgcccgtgcgcgctg

SEQ ID NO: 49528 - DNA, 1827 bp, Oryza sativa
  Clone ID: PAT_MRT4530_52103C.1
ccggccgggctccccggcctctccacccacccctcgatctctcgctcgctcgccgccgatcggatcgcgtggttggatcatcacaactcggcaaagatgagagagatcctgcacatccaaggcgggcaatgtggcaaccagatcggtgccaaattctgggaggtggtgtgtgatgagcatggcattgaccctactgggcggtacacaggcaactcagatctgcagttggagcgtgtcaatgtgtactacaatgaggcctcctgcggtcgctttgtgcctcgtgctgttctcatggaccttgagcctggtactatggacagtgtccgcactggaccctatggccagatcttccgccctgacaactttgtcttcgggcaatctggtgctggtaacaactgggccaagggacactacactgagggtgccgagctaattgattctgttttagatgttgtgaggaaggaggctgagaactgtgactgcctgcaaggattccaagtatgccactctcttggtggtggtactggatctggtatgggtacactgttgatatcaaagatcagggaggagtaccctgaccgcatgatgctgacattctcagttttcccctcaccaaaagtatctgatactgtggttgagccatacaatgctacactctcagtccatcagttggttgagaatgctgatgagtgtatggttcttgataatgaggctctctacgacatttgcttcaggactctcaagctgaccacacctagctttggggatttgaaccatttgatttctgccaccatgagtggagtcacatgctgcctaaggttccctggtcagttgaactctgacctccgtaagctggcagtgaaccttatcccctttccccgtctccacttcttcatggtcggattcgccccgctgacatcacgtggctcccagcagtaccgtgcccttactgttcctgagctcacacagcagatgtgggatgccaagaacatgatgtgcgctgctgatcctcgccatggccgttacctcaccgcctctgccatgttccgtggaaagatgagcaccaaggaggttgatgagcagatgatcaatgtccagaacaagaactcatcctacttcgtcgagtggatccccaacaatgtgaagtccagtgtctgtgacattccaccgagaggcctctccatggcatcgaccttcattggcaactcaacatccatccaggagatgttccggagggtgagcgagcagttcactgctatgttcaggaggaaggctttcttgcactggtacactggcgaaggcatggacgagatggagttcaccgaggcagagagcaacatgaacgaccttgtctctgagtaccagcagtaccaggatgccaccgccgatgaggagggcgagtacgaggacgaggagcagcaggaggctgacgacatgtaaggtggcttttgcttggtggttctagggcagggttttgtgtgcttggtgtttccgtcttacattatcaccgtattaccgcctcgtacgccaccgcccggttcctatgtcttcgctttgttttttcgtctgtgctatgggaacctttttgggtactgtattacttgatgctggtctgcgattgttgatatttcggatgaattttacctttccgcgttggtcctcgtgtgtaatatttgcaaattacaaggaactaggaaggtagcccgcgcattcgcgtgggcatgtatcgtaggctgtatttgagataatcgtaagtaataggctgattgtgttaaaatgttgcatttgttatatagtaaactataggcatatggatcttaaaaaaaa

SEQ ID NO: 49529 - DNA, 355 bp, Oryza sativa
  Clone ID: PAT_MRT4530_52104C.1
cgaaaggagacccttcaacacttcaagaaaccctgggcccatgagcctgaacctggtggaaattttttaaatgccagcaaaactatcaaaccaaccatattgattggcacatctggaaagggggaaacttttacttaagaaggtggtggagccctttccttaattaatgaaaagcctggcatttttgccctggccaaaccaacattttaatttgaagggaccggttaacaaacctacccatggaacaagggccccaccggggttggcaggggaaattcatttgattccggtgcgtattatggccaaattttccttcctgggcaagcaaaccaccgctaactttttccaagggttg

SEQ ID NO: 49530 - DNA, 668 bp, Oryza sativa
  Clone ID: PAT_MRT4530_52105C.1
atggctaaggcgctcgagctcattggcgaggtggtgcaggatccagtgcgcctattctgggacgcggtcgaaactggtaatccacttcatggtggcggtggggaggttggtgggctggcggcggcgcaacaatattcaggatccgttctcattgactataccaaccctcttaagcccagcagcaacaataaggccggcaccggcagttttaccatggcaggcgacggcagtgttgaggcagctgtggtttatgtgttctgcggccctttaattaattctgtgattaatttcatcaaccccaactgggcagaaattaaaacaaagatagaacgcggtgggcaagtcggtttttacaaggacgaccagactgttacaaatgtctatgccggcgttgctgctaccgaccccagtatgccaggcaggtattctgtttctatagccttcgatctgtgaaatacgcactttcatcgataataatgtactagctagatccagcggatcattagctaatgtgtgtgctctatatatgtgtgctactatgtatgaccaagggcattcgcttgttcccctgtaattaagaacatgcaaggtactgtcttgtgtgtttctgtgtgtaatgtttacatgtactacacccctatgataaataaaactgcccttctatacgt

SEQ ID NO: 49531 - DNA, 2211 bp, Oryza sativa
  Clone ID: PAT_MRT4530_52106C.1
ttttttttttttttttttctgtcgaaaaggatggttcacgatgttctgacagtcaatcggcatgtactgtgttattatagacatggtctccgcgtccttgtaggactttagtttttacttattgaatacatagcctgcaaacccctcgccgacaacacaagactccaccaatacaggaaagcattacaaaactatttcaattagacagaaacaccttattttatggtttttgatacaccgccatccatatttttcttaatatggttatctatgactatgatacactgccaccgtgtatttttcttttctaaaaattctgtgtgtattgtattgtatgtcgttccacatgagagcagaaatgcctacctagctacttctctattgctcaatcactgtggctcggtacaaaccatttcttttactatacaaaaatgaagctaaaatcattggaagcacacttaagtatctgctgagtatggtctgggatcaccataactagttcccttgaactcatagcccatctttgtatcaatctcttcacaaggtatatagctaaccaaattctccatcaaatggccaggtcccttaagcctctgaatcatgctgtcgaaggggttggttctcgttgttctggctgtcaagcggcatgtactgggacatgatggccatgatctccgagtccatgtacgacctgagtctgtacttcctagaacacagagcaggcaatccccacgccggctacgcacggcgcgcccaatcttgtgagcaacttggcaaacgacaacatgatggccgcgacgcatttgtcggctcctctcatgctgaacttcttccccttgctcgtgcactcgtagttgccccaggtgacgttgcactaccacgccggtgaccggcccgcctgcttcgccacccattcatccaactcttgccacttgttgtccacccccacgtccctccggtggtacccccctccggaatcttgcttcgggtacgaagcacaatactgcggcttgcactgcggcgtgaacctgcagcccccggggcagtcccaagtgatgtcgggcccaatgacgagggcgcagccacccctctccaccatctgggcgacgccatggacgccgcggccctcccccacctgctcgtcgcacctggcgccgcactcgtcattgctggtggtccacacctcgtactccacccgctcgtcggggtggggcatcgactcgcgccagtccagcttcaccaccacctccaccgccgcctctgacgacggcgacggcgacgacatcctcttgagggactcgccgaacgcgcggttgaccagcgcggacgggatgctgatccggtcgatgtactccgtctccggcgactcctccggcgtgtccatcgtcagcagctgctcgtccacgttgtccgcgatcagcaccgccgccgcgcccgcctgctgcgcgttccacgccttcagcgcgaagtagcactctccacggtcgagcaggaggatgaccgggcggcgagacttggacttgaacttggcgtcgaactcggcgcagccggtggccttcttgtcggggtagacgacgacgccggtgagcgtgccgccgtagtccggcacgccgaagttgccgatggcggcgtcgtggtgcccccggatgtgctccggcgagagcaccctcacgctgctcttctccaccacgaacctccccatcgccggcacggcggcgcccaccaccgccaccacgacgacgatcaagaacggcacggccccaatcccggcgagccatggcgccctcctcgccattgctgcaactcgatcacctctctctctctctctctctctctctctctctttccaagaggcgacgagaggaggagggaagaagacgacttcaaagaagaagaagatgatgaagcttatgcttggtgggcaccaagattaggtggctctcgctcgcaagtagtataaattaaatagaaatttaaggaaaaaaatgttcttgctgttaattaacaactgtgagacgagctcaaccgtgcaaaggggaatggatggatggatgaaaaaaaacaaaggatatcacgagaagaagatgaaaaaattgtgatcttttgagaggaaaaaataaatgggattggattgcttgggttgtactgaaatccgtttggttcgagaggggcaaaggtgtcaacttttgtgacgtagaagagaaggataag

SEQ ID NO: 49532 - DNA, 879 bp, Oryza sativa
  Clone ID: PAT_MRT4530_52107C.1
atgtgcctggagcaggttgctacaaatagaataattggcgttgctcaaaaagtaattagtcctactcaaactgcttttattcctgagagaaatattatggaaggggttgttattctcgatgaaactattcatgaaatgcatcgtaaaaataaaagtggggtaatatttaagattgattttgagaaagcctatgataagggtggtcatgttgatattaaagtaaatgatcaaattgggaataattttcaaacttacaaaggcctcaagcaaggggatcctttgtctcctattctctttaacatagtggctgatatgctagctctactaattaagagggctaaagatgttggtaccattaatggggcaaaggacttttatgaacaatattctactatctttggttgtcttatgaaagttaagaatactttcttaaacatgggttcctggattctgaataatagggaacaagttagattctgggaagataaatggctagataacttgacgtttaaagggcaacgcactgacttaggtcttggtcactgctacaaaagtgtggatgttggtaccattaatgggattctaaaaggggttcttcaaaaaattgattattatagatcaacattcttttggcaaggggatgatcataagaaaaagtacagacttacaagatgggatattatttgccaacccaaagatcagggtcttatgaaagttaagaatactttcttaaacatgggttcctggattctgaataatagggaacaagttagattctgggaagataaatggctagataacttagtgtttaaagggcaacgcactggctcaggtcttgggtactgctacaaaagtgtgatgaagagggcgagcgtttaa

SEQ ID NO: 49533 - DNA, 288 bp, Oryza sativa
  unsure (1)..(288): unsure at all n locations
  Clone ID: PAT_MRT4530_52108C.1
atggcgcctgatgcggtattttctccttacgcatctgagcgggatttcacaccgcatatgggtgcactcttagaaaaatttggtttgatgccggatagtnaaaccagccccgaaaacccgtcaaaacccggccaaaacatgagaaagagaacnaccgaggtccaaaaacttggtttaagacctggaataatccctcaggttctcgccccgaaactggcgatacaccgggaggcctcgtcagggaaaggattacattcccttaacaacggcctggaggcacnaaaaccg

SEQ ID NO: 49534 - DNA, 128 bp, Oryza sativa
  Clone ID: PAT_MRT4530_52109C.1
gaggctagtataagatttttattccctgatcaggaaaaaaagagtttagtgcaaccaaagggttattagcctttcacgggcgttttacagaaatgattttacctgtatatgatccccgcgaaaatttt

SEQ ID NO: 49535 - DNA, 587 bp, Oryza sativa
  Clone ID: PAT_MRT4530_5210C.1
gtccggattcccgcctcgacccacgcgtccggcgcgtcttggttgcagccggcgccgcgtcggtcattcttatcatcatcgtcatgggcggcgcggccgtcgcctacaacgcgagcttcggtgatggtggctcctcttcctcctccggttcagcgtcaggtggcggcgcgcagcccagcctgcacggcgtgtccaagatcatcaaggcgatgtgcgcgcagacggactacaaggacacctgcgagaagagcctcgccaaggccgccgcgaacgccagcgcgtcgtcgtcgtcgtcgtcgcccaaggacgtcgtgcgcgcctccgtggccgtgatcggcgacgccatcgagaaggcgttcgacaagtcgagcgtgatcgtcagcgacgaccgcactctcgcaggcatcgacgccggcggcgtggacgggctcaccaagggcgggtaccagctccgcgtgtggctgagcgcggtgatcgcgcaccaggagacgtgcatcgacggcttccccgacggcgacctcaaggacaagatgagggacgccatggagtccggcaaggagctgacgagcaacgcgctggccctcatc

SEQ ID NO: 49536 - DNA, 374 bp, Oryza sativa
  unsure (1)..(374): unsure at all n locations
  Clone ID: PAT_MRT4530_52110C.1
gactagttctcgatctctccacccgtttcccccaaaaccagcggcgccaccacccaccttcccccatggcatcggcggcggcgagatccggcctccgctcgctggcggcgcgcgccaaggcgaccgncgcccccgngngatgngcgcgnatgtcctcctccgcccacgacgacgnccatgaganggccaagtgggagaagatcacctangncgggatcgtcacctgcaccntgntggcggcgtacaanctctccaagggccatctncanttcgacgagccgccggcgtaanccctatgtgaanatncgtaacaaggagttccattgggacccgatggcctatttgagacaagaacattaagtattgacagggaa

SEQ ID NO: 49537 - DNA, 391 bp, Oryza sativa
  Clone ID: PAT_MRT4530_52111C.1
aagccaagccaagctcactcgtggagctctgatgacagaggagactcgattgatgctgatgtgcggttttgcgcagctcttggaacgttcgaatcgggccacccttgcattgggtgttgcccctttcccagtgttggttgcttgcagttgtttgtgttgttgcatctgtgtttgtgcgtcaacctcagctggtgtatggtgatggtacatgatgtgatggtatgcaacatgagggttggaagagcatgcatgatggtggaatggctgagcaccaggctgaatcatatgcacatacacatcgtaataaatatacttgtacaaatcgtcaaaacgatacttatatgtaatactatactcagaccaaacttgataaaaaaaaaaaaaaaaaaaa

SEQ ID NO: 49538 - DNA, 348 bp, Oryza sativa
  Clone ID: PAT_MRT4530_52112C.1
aaaacggaccacagccggccgggagttaattcctgtttgaccaacaagggtccagagatcttcctccccccccagaacactgaagcctttgccatgcaggcagttttttttttttttgaaaggatgatccagatcggttgcaactttgtccccccccccccttgtacaacgcccggcccccaaaacattttcctagggcaaagttggggggattgcaggggccctttaaacctggaggggggcaccaaaaatttttttttaatttggaggaacagaagcccccttgtttttggggttctaatagcacttaaagcctcaaagagctttggaataaaagcacccttgggg

SEQ ID NO: 49539 - DNA, 588 bp, Oryza sativa
  Clone ID: PAT_MRT4530_52113C.1
atgtcgaagaagaaggcgcccacgtccatcccgtgcgagctccccctcgccttagaccctagcgtctccgcgcgcccatcggatcgtcctgtggcctcccagtcttccgcacgtcccccttttccggcagcctccgccgctgccgctgcgcctgcggctgcgcccgcggttcgttcgctcgtcgccaactcttctggcatggacacccgattcgacgaggacgaacggacaaccgccgccacgcggcgccgccagtcgccctctccttcttttgcaccatcgacgtcgaaggcgacggcggtgggactcactagatacggtgctgtcaagtcctgggggccgaggagggagctggaaactggggagaccagtaggtgcatggaggtgctactgctagagaacccaatcgatgctacaaaaccatctcctctccatgttgatgaagacaagcagggtgaggttattggtggtacccaacagaatgctccagagagctgtgtaacggagcgagcacgactgaatctgaaatctcgctccagtgcagtgggacaatctgctggcagtcctctcaaggaaaggtgtatttag

SEQ ID NO: 49540 - DNA, 372 bp, Oryza sativa
  Clone ID: PAT_MRT4530_52114C.1
atggacatgggattgacagagtattcgttcccgcttggaggcgagccggttaagctgagcggagtgagccgggagttgcaaaagatcaagcgagccgacgtggagcgcggcattggaatattggattgcgacaacgagaaggtcccgatagctgtggtcgagaatgtgctgaaagaggtgaaggtttctgccgatatatctgtcacgtcccgaactagtgagtgcttctcaaatgacacggatgagacagtgcgtctcgtccggtcggaccacgtcgggagacctccaagctttcatgacaaggcatttcgagagccgacacaggaatcggtccttaagtgcgagagcgggaaaccatacacccgattttaa

SEQ ID NO: 49541 - DNA, 609 bp, Oryza sativa
  Clone ID: PAT_MRT4530_52115C.1
atggttgcattagggagggatgcaaataaccagatgtacccaattgcttgggcagtagtggagaaagagaccaatgactcatgggactggttttgtgctttgctattcaaagatcttgttgctggtgatgtgaaagcattcatgtcaacatatgaacattgccttgagcctgtggaaggcattcatagctggccagtatctaagagacccaagcctgctgcaccttcctatgttaaaatgccaggtagaccaaagaaggagaggagaagggagccacatgaaaaacccaaagcaaccagggtgtcaaaagtgggcactatcattatgtgtagaagatgcaagggaattggacacaacaagacaacttgtgcaaagagaaatacaggcactactcaggcttcgtcaagtgcacaatctaggcctattgacaagaagagctcctcaaaagtgaagaaaagggcatttaccacagaccacttagttcaagttcaagctgctgttgcacataagattcattctcctaagtttggccatgctattccagtaacaacagcaactcaaggccccccaaggaaaaaacttcaagttaggaggctgactgtggcctga

SEQ ID NO: 49542 - DNA, 301 bp, Oryza sativa
  unsure (1)..(301): unsure at all n locations
  Clone ID: PAT_MRT4530_52116C.1
gggggcaggattgcagcgttcatctnactctaccggttaaatccatgtnacaaaagcccaagcatcgtctctaacccatcantatgcaaatnaaccatatggcaactncttcgttnagcctcctcctctgcntcgcngcggcggccggcgccgcccngcgcttnattccgccgcgcttgcagtgctttaagcacccgcnggacatgaaggccggcggcggcgaggccggcttggtcgtccacgacctggcgggctacgaggcctacntaaccgncgtcgcccactccggccgggccatcgt

SEQ ID NO: 49543 - DNA, 1569 bp, Oryza sativa
  Clone ID: PAT_MRT4530_52117C.1
atggcggtgctcccctacttcgatgagatcgatccctccaccattgatcttttacttggaccatgctgcctctctgccctacttggaaaagacgacatcaaggggcgcgtgttcatgacccatgccacaaaggccatctacaggctactcctttccgattatgtcaaagcgaggctctacagcgcggcacgacgctcgcacggcagcgcggcgctgcgcactcacgactctcgcacggctgcgcggcacacacgcgactgtgcagcaaacagcgctcatgcggcggcgtggcacggccttcagttagtctttgcgatggatgttcagaactttttggttgtacagttccactataatggagagttcatatacgatggtaggcaaaagcattactgtggtggatctgaagcaataccacgcattgaccgtgacaaagtttcgttgccagaggttaagggtcatctaaaggaccattgtgcagttgaggaaccaatgcttttgcattggttgttcccaatgaaagaactgaaggatggtcttcgtgttttgttggatgacaaggtttgccaactgatgtcagactgtactagtgaagcagaggttgcagatatatatgttgagacacaagttgcacaagaagacagttcagatgcagaagatgtaggaagtgataatgacagtgattttgaagatgaaattgaagaaatttcttcagatgaggaggctgctaaaatttttgaagtggatactaaagggaagaagcctgttatgatagtaacatcaataccagataagactcagggacaaattgagtcactgagacaatgccataatcttgctaagaaggacaaggaagaggcacaagtggtagcacataatgatcagttggttccttatagtgctgaaaatgattcatttgaagaggacagtgatggccagctatttgattgtaagaaagagttcaaggatgcagttataaaacatgcattagccaacagaaggtatgtgaagtttgtaaaggatgaggagaagtatgagaagatgattagagataacccaacatggagtatcaagaatatgatttctactgtttctgaagaaatgtttgcaaatgccagcgttcctcagtgtaagagagcaaaggcacatgttctgaagaaactttatgatgcaacaagaagagttgttggactagatggttgctttttcaagggatcaaccaatggtgagttactatgtgcattagggagggatgcaaataaccagatgtacccaattgcttgggcaatagtggagaaagagaccaatgactcatgggactggttttgtgctttgctatttaaagatcttgttgctggtgatggcactgctcaggcttcgtctagtgcacaatctaggcctattaacaagaagagctcctcaaaagtgaagaaaagggcatctaccacaaaccacttagttcaagttcaacctgctgttgcacacaagattcagcaactcaaggaccaccaaggaaaaaacttcaagttaggaggcctacttcaagttaggaggctgactgtggcctga

SEQ ID NO: 49544 - DNA, 693 bp, Oryza sativa
  Clone ID: PAT_MRT4530_52118C.1
atgaagcttcggaggatccctatgcctattaccaggagggtgatgaagacgatggcgctcagtaggtctttgtacggtcgttgcctgtggcaatggcgtgccgctgccttgattccgctgccttatctatttctgcttttgggatgtattccggaccgcccgatggcagatcaggattcacccgctacttgggagttgggcttaccccgatcagagggatatgttattgagctgcataggatgatgaggcgtctgcggtactctggatttccgacctatcgagtgagacagtgtgggtcagtttgggaggctcgggtcgaggttcacccacaagtcccttccgagttagagtacagctttccgacgcgtcaccgccgagacctgccagagaccgcgatgcaggatgcagcccgggaggcctttctccgactcagctctatccaccgagctgagttggcgagtaccgagtttgctcatcacccgttccgggaggagagcaactcagctgaggcagtagacgacttctacgaggaggctttgttggagatcgacgaccaccagaggcgtgtgggagagttggagaccgagttgactgacctctcggtgcagcagcttcagctaaaggaggagcatcagacttggggcagtgagagactcactgaaggcacagctccagttccagcagctatctga

SEQ ID NO: 49545 - DNA, 2307 bp, Oryza sativa
  Clone ID: PAT_MRT4530_52119C.1
atgtgccgatcgagccagcagccgtgccgtgtggggtggcgtggaagtcgtggagttgacgagaagatgcggttggcgtcgccgaggtcgcagccgatcgatggcgtcatggcggcgacgatacgcggttcgggctaccgggttgcccccaatcccacatgcggcaaaggcattggaggtttgcaaggcggcggatgtgatgcacaaggaggtggcggcgcctgcggatctgatgcaggaggggacaacggcggaggaggtggcggagcccgcggatctgatgcaggaggggacagcagcggaggagttgtggaaagtatatcaagcatatctcatggtgaggtgaacaatccatcgtaccaccaaaggacaatattggaagatgatagcgaccacaaggccctgttcgagaagtcactcgtcgggcaaatcaacatcgaggatatgagtggaaaagctaaggatgtgatcaacgaggaggggagcagcgaggatgggaacagtgaggagatgaaggatagcgacgatgatgttggcatggtcttcctcatcgtcatcaaagttgagatcaaaaggaaaggcattatggttgtgacctccatttacttgcagaacttgatccatgacatcaacatcgtctacaataacaaataccatgtgagtaccatatgcatacaagttgagatcaaaaggaagcacatggttgacacctccctggaaatcacctccaggaagctcatggttggcacctccctggagatcacctccaacctggtcatcctcctgatcagccactgctgcttcttcagccactgcttcattgagcccatccggatctcctccatcttcctccacacacgccgcgcgcgtgtggaggaagatgaaggagatgcccccccgaaatcaaagacctctgccgagaaggagtttgggtatttcacggtggacgactttgaggccgccgaggaagaatggagcagatttgagaatttcaccaccaactttctcttgttccatagcaatgccgtctccttgaatgagttccggctacgttgtacatatgaatgggcggatgatcgaagttatcgaaatgatcaacatgtggagacatggattcgttgtggcatcaagtactaccccgaggttctcgatattgagtcgctgggcagcacaatatcacacattgaccgtgacaaagtttcgttgccagaggttaagggccatctaaaggaccattgtgcagttgaggaaccaatgcttttgcattggttgttcccaatgaaagaactgaaggatggtctttgtgttttgttggacgataatgtttgccaactgatgtcagactgtactagtgaagcagaggttgcagatatatatgttgagacacaagttgcacaagaagacagttcagatgtagaagatgtaggaagtgataatgacagtgattttgaagatgaaattgaagaaatttcttcagatgaggaggctgctgaaatttttgaagtggatactaaagggaagaagcctgttatgatagtaacatcaataccagataagactcagggacaaattgagtcactgagacagtgccataatcttgctaagaaggacaaggaagaggcacaaatggtagcacatagtgatcagttggttccttatagtgctgaaagtgattctgattctgatagtgattatttaggtagggacagctgctcttcagaggaggatgaggaagcaaatgagatcatgaaatcatttaaggagtttcagaagaagctgaaggatggtcaagttgctgatctcgatgatgtgttttgtggagaaagagctagtcagaggagtgagaaagcactagtacagattgaggatgatggaaatgcaacaccttatgatgacagtagtgcaaatgattcatttgaagaggacagtgatggccagctatttgattgtaagaaagagttcaaggatgcagttataaaacatgcactagccaacagaaggtatgtgaagtttgtaaaggatgaggagaagtatgagcagatgattagagataacccaacatggagtatcaagaatatgatttctactgtttctgaagaaatgtttgcaaatgtcagcgttcctcagtggagggatgcaaataaccagatgtacccaattgcttgggcagtagtggagaaagagaccaatgactcatgggactggttttgtgctttgctattcaaagatcttgttgctggtgatggtgatggttgggtggtcatatcagatcaacaaaagggaattattaatgttgttgagacctag

SEQ ID NO: 49546 - DNA, 2270 bp, Oryza sativa
  Clone ID: PAT_MRT4530_5211C.1
ttggttgaaatgtgcatgcacggcgcacaagtaaaattcacacagaatgtacatgaaacaggcaggtatcagatattcacattggaccgtctcctctcgaaagcatatgtacatggcgcacgcatgcaggtgcccgggtgtctgcacaaatatttttcacgcccacatgccgtacttcaccggcgtgccggtcggcttgatccatggctcggcgtgcaagaagttctgcacggtgaacttggtggcctccttcttgctgatcaccttcttgtaccccggccagctgacgcggccggcggtggcggcgccggcgcccttgttcccgtactccgcgtaccagagcgtcttgagcccgaagtcgccgctccacgggaggtagccggccttgtctacgaaggcggggatgtcggagttcatgatgagcgtgcgcgagtactcgcgccacgggcgtgcgaggtagctgcggacggcggggcgggaggcgtcgccgagcgccgactcggcggcgaagcggtagtgctggagcacgaagccggtggcctcgcggcggtcggcgcggccctgcgccgtggcgatgttctgctggttgtcgagcgggcggcggagcacgatgacgcagttctggaacaccgccgcggcgtcgccgaagatgaagtcgacggtgccggagatgacgcagttgcggtagaactgcgccttggagtgcgcgtagagcgtgtcctggtgcccctccatgcggcagttgaggaagatggacttgtccgactgcaccagcagcgccaccgcctggtgcttcgccgcgcgggccgtgttccggaaacccagcgcgacgcccatgaacccgtcgccctgcgcgttgaaggtcgccgtcttgtaggtggtgaggccgtcgacgaagttccggttgccggtgatgatggtcttcttggcgccgtcgccgtacatggtcacgttcgccatcttcttggtgatcgtcacgtactcctcgtacaccccttccttcacgtagatcacgtaccttccggtgtacttcttgggcatggcggcgagcgcgtcgttgatggtcttgaacttgccgctgccgtccttggccacgacgacgttgggcttgagcttgttctggaacttggccttgagcagcctcctctcctgccggttcacccagaccaggacgtcgtcgtcgttccctttgggctgctttggggcgttctcgtcgaaggcgaagctgagaagtcgccggaggctgttcccggacgaacggttcacttcgggctgcttcgtggcgtcctcatcgaaggcgaagctgagaagccgccggaggctgttcccggacgaacggttcacttcgggctgctttgtgacgtcctcatcgaaggcgaagctgagaagccgccggtggctggccgccgaagacgctgggaggtggagcgcggcgaggaacgaggacgccttcccgatgagggccagcgcgttgctcgtcagctccttgccggactccatggcgtccctcatcttgtccttgaggtcgccgtcggggaagccgtcgatgcacgtctcctggtgcgcgatcaccgcgctcagccacacgcggagctggtacccgcccttggtgagcccgtccacgccgccggcgtcgatgcctgcgagagtgcggtcgaggtcgtccttcgcgttctcgtagatctccttgcaatccgcgacggcggccttgacccgcgggtcgtcgctgacgatcacgctcgacttgtcgaacgccttctcgatggcgtcgccgatcacggccacggaggcgcgcacgacgtccttgggcgacgacgacgacgacgacgcgctggcgttcgcggcggccttggcgaggctcttctcgcaggtgtccttgtagtccgtctgcgcgcacatcgccttgatgatcttggacacgccgtgcaggctgggctgcgcgccgccacctgacgctgaaccggaggaggaagaggagccaccatcaccgaagctcgcgttgtaggcgacggccgcgccgcccatgacgatgatgataagaatgaccgacgcggcgccggctgcaaccatgacgcgcctgcgctcttgcctctgcctctcgacatggcggcgctcagtgatcggatcgaagtccgagaaggtcgttgacatggccgacgaccttctcgccctgcctgaagaatgttttcggcgtcgccgccgccgctctctccctccctctgcccttaccacgatcggcaaaggcacggacagaggggcggacgcgtggg

SEQ ID NO: 49547 - DNA, 247 bp, Oryza sativa
  Clone ID: PAT_MRT4530_52120C.1
cccacgcgtacgctcgtttttttcctctctccagagtccaactccagacctagctctcttcatcggtcagatccacaatcgcaggccagcaaggcgaaggttaggttggttcttccagatccgggctcctccccctcgctcctgtcaccagatccggagctggtcgtcgcaggggtgggggtgggtggagtactctcgttatcctctcgtctgtctctggagctcctctatcgatgtgcttcatgcg

SEQ ID NO: 49548 - DNA, 492 bp, Oryza sativa
  Clone ID: PAT_MRT4530_52121C.1
atgaggcgtctgcggtactccggatttccgaccttccgagtgagacagtgtggatcagtttgggaggcttgggtcgaggttcactcacgagtttcttcggagttagactacagctttccgacacgtcaccgccgagacttgccagagaccgcgatgcaggatgcagcccgggaggccttcctccgactcagctctatccaccgagctgagttagcgagtaccgagtttaatcatcacccgttccgggaggagagcaactcagtctgcacagttcaggacacaccctgctgctacaacccgatggtgactcggctgtcacgatgggctgaggcagtagatgacttctacgaggaggctctgttggagattgacgacaaccagaggcgtatgggagagttggagactgagttgactgacctctcggtgcagcagcttcagctagaggaggagcatcagacttggggcagtgagatagactcactgaaggcatag

SEQ ID NO: 49549 - DNA, 1142 bp, Oryza sativa
  Clone ID: PAT_MRT4530_52122C.1
gcacgagggcgcgaacacctccaaactcccgagtcccctctcctctctcgtcttcctctccacgacgacctctccgcttcaattctgcgccgccgcctcagagcgccatggacttcagcggcgacatcgatgacctgatctccctccagctcctccacgatcagctgctcggggtcgaggccgacgcgtgcctcccggtggcagttcatcacgatggcgtcgccgcgttcgccgagcatcagcagggtttccatcccgcggcgttcttgccgcagcagccgatgacgatgacaccggctgggtacgtggacatggcgaatgatcagtatttgggtgcgcatgccgccgctggcgaggcggaggcggtctaccgggcggcggcggcggagccggtgatgatacggttcggcggcgaggtgtccccggtgtcggacccccggaggccgcccctgacgatctcgctgcctccgacgtcgcacgcgtgggcggcggcggaggcggtgcacccggccgctctgctgcaggcgcagaccgcggccgcggccgccgacccgaacgacttccggaagtaccgcggcgtgcggcagcggccgtggggcaagttcgcggcggagatccgcgaccccaagaagcggggctcgcgcgtgtggctcggcacgtacgacacggccatcgaggcggcgcgcgcgtacgaccgcgccgccttccgcatgcgcggcgccaaggccatcctcaacttccccaacgaggtcggctcccgcggcgccgacttcctggcaccgccgccgccgcccccgccgccgacgacgtcgacccacggcaaacggaagcggcacgagacggcggcggccgacccggacgtcgaggtgatcggagaatcatccaaatccgtcaagaccgagacgtacacatcgccggcgtcgtcgtcgctggcctcaacgacaacctcaacggtgacatcatcatccacgtcgccttccccctcgtcggaggcagctgcctgcggcggcggcggcggcgagctgttcgtcccaccgatgccgtcgagctggtcgtgggatcagttggaggggttcttcggcatcctctcgccgctctcgccgcacccgcaaatgggattcccggaggtcgccgtaaactaa

SEQ ID NO: 49550 - DNA, 1220 bp, Oryza sativa
  Clone ID: PAT_MRT4530_52123C.1
tcagaagttaacctcccactttatcacttcataactctcaatgaagcagtggctgaagaagcagcagtggctgatcaggaggatgaccaggttggaggtgatctccagggaggtgccaaccatgagcttcctggaggtgatttccagggaggtgtcaaccatgtgcttccttttgatctcaacttgtatgcatatggtactcacatggtatttgttattgtagacgatgttgatgtcatggatcaagttctgcaagtaaatggaggtcacaaccataatgcctttccttttgatctcaactttgatgacgatgaggaagaccatgccaacatcatcgtcgctatccttcatctcctcactgttcccatcctcgctgctcccctcctcgttgatcacatccttagcttttccactcatatcctcgatgttgatttgcccgacgagtgacttctcgaacagggccttgtggtcgctatcatcttccaatattgtccttttgtggtacgatggattgttcacctcaccatgagatatgcttgatatactttccacaactggaattaaaccacgcatatcactgccaatgtccccaattgttggcgccggaatcagaaaaggagggcaaaaagccacctcctccggtgctgtcccctcctgcatcagatccgcgggctccggcacctcctccgccgttgtcccctcctgcatcagatccgcaggcgccgccacctccttgtgcatcacatccgccgccttgcaaacctccaatgcttttgccgcatctgaactggctccacccgccgccgttgcctccgccgccttcttgcaaacctccaaggccgctgccacatctgagccccctcccgccgccgccttttggatcaaaaccgcaagctgatacgcctcctccgccttggctttcgtctcttgaatgaaaaccctaaactgttccgccgctgcctcgaactctgccatcgaggcaaatccttcgaaaggagccgcctccggcatcggatctaaccgctcgcaaccctcccccgctgtatcgaagcgcccgcatccttgttttgttttgcgcatattttcagccttctctaatactcttcttatgccagaatggcccgtttgatatagctttttgctggattaaccgatttgcttataggagccgataatctggggttttgtgtacattgtactatgtggcaatgagggcaaga

SEQ ID NO: 49551 - DNA, 1227 bp, Oryza sativa
  Clone ID: PAT_MRT4530_52124C.1
atggcagatccggattcacccgctacttgggtgttgagcctacctcaatcagaggggtatgtcattgagctgcatcggatgttgaggcgtctgcgatactctgggttcccgtcataccgagtgagacagtgtggctcagtttgggaggctcgggtcgaggttcacccccgagtcccttccgagttggactacagctttcagacacgtcaccaccgagacctgccagagaccgcgatgcaggatgcagcccaggaggccttactccgactcagctctatccaccgagctgagttagcgagtaccgagtttgctcatcacccgttccgggaggagagcaactcagtttgcacagttcaggacacgccctgctgctacaacccgatggtgactcggttgtcacgatgggctgaggcagtagatgactactacgaggaggctctgttggagattgacgaccaccagagacgtgtgggggagttagagactgaggtgaccgacctcacagcgcagcagctgcagttggaggaggagcaccaggcttggggcagtgagatagactcactgaaggcacagctccaggtccacggcgaccagttccagcagttatctgaccagtacaacgatcgccgcgggatgatggatactcttgaggggcagctgagagagagtcaggagcacgtcagccagctggaggagcagcttcgagcagccaagatcagcaccacaggggcttctacttccacagcagtaggccgtgaccgctacttcttcctcaccccgccgtacccaccagcattccacgctcttctgggagaggctagtatgctagctaccgagtcagcaccctacctagtggactcgacagcggcacaaccacctgtcctggagttggtgcacactccactgatccctacaccttctccgcagctgggttccagtttggagactccgatccaggtcgactccgagacagaggggaccgacaccgagccagagatcgagccagacatcactgatccttcagaagatgagacccctgttccccgcatcaccttccttggaggtcctcgcaccctcagcactgctcgcaagagcacacgacctccgggcaagaggcccaagccagatccagaggccactacctctgagccgtggggactcaggtttgcgcgtgccagcgaccaccctctacctgccccaggatcctgcggatggctggaggactag

SEQ ID NO: 49552 - DNA, 2364 bp, Oryza sativa
  Clone ID: PAT_MRT4530_52125C.1
atggatgttcagaactttttggttgtatggttcccctataatggagagttcatatacgatggtaggcaaaagcattactgtggtggatctgaagcaatatcacacattgaccgtgacaaagtttcgttgccagaggttaagggccatctaaaggaccattgtgcagttgaggaaccaatgcttttgcattggttgttcccaatgaaagaactgaaggatggtctttgtgttttgttggacgataatgtttgccaactgatgtcagactgtactagtgaagcagaggttgcagatatatatgttgagacacaagttgcacaagaagacagttcagatgtagaagatgtaggaagtgataatgacagtgattttgaagatgaaattgaagaaatttcttcagatgaggaggctgctgaaatttttgaagtggatactaaagggaagaagcctgttatgatagtaacatcaataccagataagactcagggacaaattgagtcactgagacagtgccataatcttgctaagaaggacaaggaagaggcacaaatggtagcacatagtgatcagttggttccttatagtgctgaaagtgattctgattctgatagtgattatttaggtagggacagctgctcttcagaggaggatgaggaagcaaatgagatcatgaaatcatttaaggagtttcagaagaagctgaaggatggtcaagttgctgatctcgatgatgtgttttgtggagaaagagctagtcagaggagtgagaaagcactagtacagattgaggatgatggaaatgcaacaccttatgatgacagtagtgcaaatgattcatttgaagaggatagtgatggtcagttgatcactaaaaggagtaagtatctaaggttcagaggtagtagtagcagcactccgacttttactctaggccagttatttgattgtaagaaagagttcaaggatgcagttataaaacatgcactagccaacagaaggtatgtggagtttgtaaaggatgagggtgatagagtcagagcaaaatgtgagtggaaattgtatccttgggtctgtcttctcaaaaagacaagtaggaccaatagttggcaaatcacaagctttactgatggacacatatgccctcagaggaaagataatccaatggtaacatcaataagaattgcagagaagtatgagaagatgattagagataacccaacatggagtatcaagaatatgatttctactgtttctgaagaaatgtttgcaaatgtcagtgttcctcagtgtaaaagagcaaaggcacatgttctaaagaaactttatgatgcaacaaggtgtgagtattcaaggatatttgactaccaacttgagctactaagaagtaacccaggcagtacagtagtagtcactcttgatagtgatagtccaactcatgtgttccaaagaatctacgtatgccttaatacttgtaagaaaggattccttgctggttgtagaagagttgttggactagatggttgttttttcaagagatcaaccaatgtagtggagaaagagaccaatgactcatgggactggttttgtgctttgctattcaaagatcttgttgctggtgatggtgatggttgggtggtcatatcagatcaacaaaagggaattattaatgctattgaaacctggatacctaaagctgagcatagaaattgtgctaggcacatttacgccaattggaggaagaagttcaagaataggtttctgcctataatcagtatgcttgaagctattagaagaaaagttatggttaggatacatgagcataggaccaaaatggagaagtggataggaccaatctgtccaaacatacttaagaaactcaatgcttatgttacagaatctggattttgccatgcaatttcaaatggaaatgacaaatttgaagtgaaacatcatgaacaaaggttcacagtcaaccttcaaagcagaacttgctcttgtagatattggcagttagcagggctctcttgctgtcatgctattgcttgcatccactacaaaaccaatagccttgatgattatattgcctcctgctactcagtgaaagcattcatgtcaacatatgaacattgccttgagcctatggaaggcattcatatctggccaatatctaagagatccaagcctgttgcacctccctatgttaaaatgccaggtagaccaaagaaggagaggagaagggagccacatgaaaaacccaaagcaaccagggtgtcaaaagtgggcactatcattaggtgtagaagatgcaagggaattggacacaacaagacaacttgtgcaaagagaaatgcaagcactgcttag

SEQ ID NO: 49553 - DNA, 1227 bp, Oryza sativa
  Clone ID: PAT_MRT4530_52126C.1
atggcagatccggattcacccgctacctgggagttgagcttacctcaatcagaggggtatgtcattgagctgcatcggatgttgaggcgtctgcgatactctgggttcccgtcataccgagtgagacagtgtggctcagtttgggaggcttgggtcgaggttcacccccgagtcccttccgagttggactacagctttctgacacgtcaccaccgagacctgccagaaaccgcaatgcaggatgcagcccgagaggccttcctccgactcagctctatccaccgagctgagttagcgagtaccgagtttgctcatcacccgttccgggaggagagcaactcagtttgcacagttcaggacacgccctgctgctacaacccgatggtgactcggttgtcacgatgggctgaggcagtagatgactactacgaggaggctctgttggagattgacgaccaccagagacgtatgggagagctggagactgagttgactgacctctcagtgcagcagcttcaattggaggaggagcaccaggcttggggcagtgagatagactcactgaaggcacagctccaggtccacggcgaccagttccagcagttatctgaccagtacaacgatcgccgcgggatgatggatactcttgaggagcagctgagagagagtcaggagcacgtcagccagctggaggagcagcttcgagcagccaagatcagcaccacaggggcttctacttccacagcagtaggtcgtgaccgctacttattcctcaccctgccatacccaccggcgttccacgttcttctgggagaggctagtatgctagctaccgagtcagcaccttacctagtggacccgacagcgacacagccacctgtcccggagatggtgcacactccactgatccctacaccttctccgcagctgggttccagtttggagactccgatccaggtcgactccgagacagaggggaccgacaccgagccaaagatcgagccagacatcactgatcctttagaggatgagacccctgttccccgcatcaccttcctcggaggccctcgcaccctcagcactgctcgcaagagcacacgacctccgggcaagaggcccaagccagatccagaggccactacttctgagccgtggggacttaggtttgcgcgtgccagcgaccaccctctacctgccccaggatcctacggatggctggaggactag

SEQ ID NO: 49554 - DNA, 259 bp, Oryza sativa
  Clone ID: PAT_MRT4530_52127C.1
acccatcaatgaactttgtttcaaggaactaatcagatacaactgttttaaagacaattattacaactgtagaaatttctccccgcaattcagggatttatagttatagaggtgtctacaatccgttctaactgctagccaccagaaaacaagtatttttttctttttttttttgttctgtaacattcaaggtcacccttgatcactaatgcgtgtatataagcggacgcgtgggcggacgcgtgggcggacgcgtggg

SEQ ID NO: 49555 - DNA, 321 bp, Oryza sativa
  Clone ID: PAT_MRT4530_52128C.1
atgcggaacactttgcaacaatatgacgcaacaccgtccgacattttacgtctgacggagatggagtgcgactcgattgcggaatctgtgcgggaggaggaaaacggggacggcggcagagaggagaggggaggcgacgagaggtggattctcgaaggattggggggctttggcctttggggcggtggttgcgtctttgttggctatggtagtttgggtacacctgtagtttgggtacacctggcccggtggggtggaaacgtgagctcttcctctggttttgctttggaaaattggattctattctatgaccatctgtga

SEQ ID NO: 49556 - DNA, 188 bp, Oryza sativa
  Clone ID: PAT_MRT4530_52129C.1
agaggcatgcagctaaattacctcactaaagggaatagcttgggcgcgactcgtccatgggcttggtggacagcgacgccacgtagtcctccaccgccttgtcctgggtcggcctgccaccgctgtcatgtccagctccgtggtagatgatgtgtgtcgtccacggttcacctgtctgtcctgcaccc

SEQ ID NO: 49557 - DNA, 222 bp, Oryza sativa
  Clone ID: PAT_MRT4530_5212C.1
atggtgcaccgggtgggctggcagaagacgacattggtgcgggcggagatctcgccggggaagaagtcgcctaggaatcgcctttacgccggaagaatcgccggagaagagagagaaaaggaaagaggatttgatcaaagcggagttggaggcggagatcgtgttcggaaacagagcaagaatcggctggagtccggatccgctatggttaggatcggctga

SEQ ID NO: 49558 - DNA, 339 bp, Oryza sativa
  Clone ID: PAT_MRT4530_52130C.1
agagatgatggtgcccccgccggcggctgtgcgacgggaagaggatggctcgatgcttggatgcatgcgtcagctgtctacgcggtgtcgcacatgaggcatggtgcgacactgctgcaagaatttttttcctcgtccaagtctgctttgtcgacgaggacaagatctgctgccgcctgccagtgcaaagcctcctaccgccccccccccccccccgcatcgccgacatcgaaaaccagtcagggaagagtggatgacttctggttcaacatcaacacagtggcctacttcgaggcggtgaggattgtttgcatgaagaaatccttttataagcccaag

SEQ ID NO: 49559 - DNA, 144 bp, Oryza sativa
  Clone ID: PAT_MRT4530_52131C.1
atggcggcggctgcgcaagcaggtagtggcggcgcgggtgggcgcgagcaggcgacggcaacagcggtagagcaggcaggcggcgacatggcagtagaacttggtgttatagctgttgcagatgcttcacttggaggaaagtag

SEQ ID NO: 49560 - DNA, 435 bp, Oryza sativa
  Clone ID: PAT_MRT4530_52132C.1
atggattctcagacaacaaactactcgacgatttcggctgagggggagatccaacctaacaagatcggaaccatcatcgtcatcgacaatttggtctatcgagatcatccaagcctcaagctccgcggcgtaccaaaagatgtcagatcgcatgatatcgaaagagtacgcaacaagcgtttctcccactacttccactttaagtggtcgggttacgactaccacctggtcctcgaccagaggcctccgaggaacccgagggaacttcggctggggacgcccagagccgataaggccttgtcggatccttcagagacgaaagaccatgggctaggatcagtgcttgttcaaccgaggcaggtcaaaggtccaagagccttatcatctgagaacgattctccgacgacaaggctgggggctagggagagtgtatga

SEQ ID NO: 49561 - DNA, 229 bp, Oryza sativa
  Clone ID: PAT_MRT4530_52133C.1
tccgatccgtcgcacgcgtcagaccgatgactataacgtgggcggcggatccgctgtgcgacactactcgcgtgtggtgcgttcaggagtacctagtgcgcgagtgctgcgcgtgctaacatctctctctcggtgacatccatgcaggacggctcacggtttccaacaccctactatgaccgattacaccctctgatctcgacatctccccaggtccccaggtccccat

SEQ ID NO: 49562 - DNA, 557 bp, Oryza sativa
  Clone ID: PAT_MRT4530_52134C.1
gagtgcataaggtgaggaacctgatgcttgatcgtggtgtcagaaggtacctggaacagctcaatagaaattgatggtgtaattcatgagttcatatctggggataaaacgccattcaagcaaggaggacatatacgagatgctaagtgaaatgtgtcagcattgaaagttgcaggatatgttccagatacttcacatgtgctactagatattgatgatgaggatgtgaaggagagctcactagctcttcacagcgagaagcttgcaattgcctttggattgataagcactgcaccaggcacgcctattaggatagcaaagaacctccgggtttgtggagattgtcataatcccgttaaacttctaagcaagatttatgggaggtgcataattgttagggatgcaaatcgatttcatcatttcagagaaggatcatgctcttgcggggatttctggtaacttcagttgagctacaattctatttctttgtagttgtaaatgttaacacaaaatatatggcatgtgggaaaagttttggaaaaaaaaaaaaaaaaaaa

SEQ ID NO: 49563 - DNA, 222 bp, Oryza sativa
  Clone ID: PAT_MRT4530_52135C.1
atggcgaagcagacgacggccaccacccagcgtgcagctccgcgggttaaaggggggcggaggcggaggcggcgacacggaaggaatcgtggtggcgcggcgcggccatccccgcggcgtgagcgtgactgccccgggttgcttgccggcggcggcggctggattccatggctccagcctagcgcgatgcggcgagtacggtggcggtggaaggaaagctag

SEQ ID NO: 49564 - DNA, 1552 bp, Oryza sativa
  Clone ID: PAT_MRT4530_52136C.1
gccgtacgactccgcgggcccacctaccagtaccagtccaatacctccaacccaagtcttcttcctcgtctcgtccgttcgtctcctcgcccagatccgccaatcgcccatggagtccccaccccaccccctcctcctccttctcacgctcctcgtcgccgccggcgccgcctccgccggcgccgatgacctggtcgccgagctgcaatccctgcggtcccgctccccgtcgggcgtgatccacctcaccgacacctccatcacccgcttcctatccgccccggcgccgcgcccctactccgtgctcgtcttcttcgacgccgcctcgctccactccaagaccgacctccacctcccccagctccgccgcgagttcgccctcctctccgcctccttcctcgcccacaaccccgcctccgccgacctcttcttcgccgacatcgagttctcggagtcgcagcactcgttcgcgcagttcggcgtcaactccctcccccacgtccgcctcgtccgccccgagcacacccgcctcgctggctccgagcagatggaccagtcccacttctcccgcctcgccgactccatggcggagttcgtggagtcccgcaccggcctcgaggtcggccccatcgtccgcccgcccctcgtctcccgcaaccagatgatcctactcgtcatcctcttcttggtctccattccgttcctcatcaagaggatcatggacggggagaccttgttccatgaccgacgggtttggatggctggggcgctgttcatttacttcttcagcgtgtccggggggatgtacgggatcatcaggcacacgccgatgttcatcaccgaccggtccgatccaaacaagctcgtgttcttctaccaggggtctgggatgcagctcggcgccgagggttttgcggttgggttcttgtacactctcgtggggctcatgatcgccatggtgacacacttgctggtgagggtggagagcctgcagatccagcgttttacgatgctggcggtcatgataattgggtggtgggcagtgaagaaggtgattcttttggataactggaagactggatatagcattcataccttctggcccagcagctggaggtaaatgcttgtacaatggcagacgatatggatggtttcttccttcggtttctgaggttatggaattatccaactttgaccgtgctgagatagagcatattttggagtgttgggacttgccaagtttatttttgcaaatttctgatgctgtagtatgaaatatgtagacctcaagtcatgttagttatgcagaggaattatgacattgcacatctatcacttgaacaagaaagtttggcttttgaattattggtttggtttcttcgaatgatgtatcgtggttgatgtagcttgtcaggtgcattgtcattttggaaaattgcttaatggaaatcattagcattgaaggggccaataggtcagtgacctctgtaaaaaaaggataaaatatgcaagcttccagaagcaaacctcgtgccgaattcctgcagcccgg

SEQ ID NO: 49565 - DNA, 639 bp, Oryza sativa
  Clone ID: PAT_MRT4530_52137C.1
atgtcgttccctccccctcctcctgtccttcgcttgtcgcaacctttgctggcggcagttgctagtggggcgaagcggtggtggaagaagggtgacaaagatctaggcgcggggcttggagcagcggtggtggcgcagttcttggcagagggccacgagctccaccgacggcggtgggcggcgccgcaggacacggaggcggcgacggtaggggacgcggaggcggcgacgatgcgggacacagaggagggagtggcgaactctgagagggagtgggagggaactccgtcgaactccctccgcgtctcgcgctgccgcccacggttggtttacggactgcaatcagctcggaccaccagcctgcgcgcgccgaccgcccgcctctccaccacagtctctgccgtgccccgacagacagatgaccacgccgccgtcggcgcatgcaaagagaaaccaccggacggaccgacggtggccggccagacaacacgacgaagcactggaaaggtaaagctacaaggaaagaaccgcagcccgcaggtcatggtggtctgtcgtcgcgccgatgcagaaggagtgaggaagatagaagagctaggcatgatgtactcatccgtgtccctcttcgacgaggcctga

SEQ ID NO: 49566 - DNA, 208 bp, Oryza sativa
  Clone ID: PAT_MRT4530_52138C.1
gggcaaaaaaatgcccggttagacaaaaccccccacaatcccatagaccctttaattagggcccggggaaccaatccccgcccattaacaaaaggccctgacccacctttatcccaaattattgacctttgccccttcccaatttttttttggggggtactaccctcttgttcaaccccgggcgaatatccaccgggcggccaaactt

SEQ ID NO: 49567 - DNA, 1144 bp, Oryza sativa
  Clone ID: PAT_MRT4530_52139C.1
gtaaaataaaattaagcagttgagctcagatcttatgtacatcatgccatcaccatcccttcaagattacaaactgattccataatctcaagcataaagccctcccaaaaacagttatcatgaagaaaacaacacaaaatctcaatatgacatctgaatctttatatcgttgcataaccacacatacactacgggcatttgctccagaactactgacaggccagaattagagaaatcttgcttccaaagatatccaatgttacagctcaaggatacctgagatacagcactttcatagtagatgcatagtttaattttactggtcttgatctcagcacaaacccattttacagcctggaacctattgtccatacagtacaagtacaacaacacaggttactgtaacaagaggtatcacaccaccataattttaagtctacacagtactggcgcataatagcacatcctatagatggccaccttgagcctcaataatcagtgtgatacaggtgcaccagaagcaccttttggtctagcatggatggtggaaacagtaaggtgaactctagtcatatggagcaaaactaaaaaacaaatcaaacaaaaagatgtttctaaaagttatcttgtgtcccccctatgtttctctcttcaaggcgaaactagaagccaaccaaccagccctacctcctacagaagctgtatattcataatacctgggatgaccactcgcattctccttatgcgaattcccatctgtaaaatgtccaatgctgcagcaattcgtgcccgttgttcacaatgtctaattcattccgcatttgactccatgtccctgaggccagccttctctcagacatggtaatggtatcacaattgattccctgcagtcccataaaaaaggaaatgcagggtttgttctcaaaatcctctttatcttgaacaaatctctgaaacaaacgactcttcatctttggctagatctgtgattttgattaacgtgcggatgaattgcattgcttgctgctccacctctaactcttctgtaaaagagcacataggctgcacctgattttacatcttcttcattgatgcagaaacatggctatcatcaaaattataccatcgtttcctcctcgtgccg

SEQ ID NO: 49568 - DNA, 534 bp, Oryza sativa
  Clone ID: PAT_MRT4530_5213C.1
atggcggcgaacccgcgccacggccgcgaacacgcgccccgcgctggcatgcacccggtgccacggccgcgcctgtacgacgcaacgtgcgacgaggccatgcactggccacaaccaagaacgaagaaaaagaaaagaaaacgaaagggcgccgatggagacgtcgggtcgtcggctgcacaccctcgccgccgcacggccgcgcaggccgcgccaccacacgtccgcaccaccgttggctgccgcacggccgcgccgtccggccacgccgccatccgcaccatgccggcctccgcaaggtcgcgccgccgctgccgccgcacggcagcgctccgccgacccggccataccccgtcacacgggagtgccgccgccgcgccgctcgtccgccttgcagcagcgccgccgcgccgctcggccgccgcgccgcctggcttccggcaccgccccggaatcccgccgtgccgtacatggcatagcaagtactatgagcaagagttggtatttttcgactataatctgctgagtcaatga

SEQ ID NO: 49569 - DNA, 376 bp, Oryza sativa
  Clone ID: PAT_MRT4530_52140C.1
gctcgcactcctgctttgtctgactgtgtgaacaactgctgccgacgactgccggtggtgtgctccggccgctcacgcacatgatgggtgcacagcgagcgaactggccgctggcgctggcactcgcgcttgcgctgtagggggaccggaaagcttgagacagggacgggcacaagcccaactgtacggacagcctgagaacagcctcagttacccaggccgtttaggcataggacagaacattcacacttaccaaagatgcagggctatgtgtcagttcggcggccgtatgccgttcatttgggacgactttttgtacacctccatatatgttgaacgaaatgacaatggagatgcattcacttaccaagagcat

SEQ ID NO: 49570 - DNA, 2268 bp, Oryza sativa
  Clone ID: PAT_MRT4530_52141C.1
atggatgactccacctggctacagattgttgggaggctcgaggaggagcctgggagtcaattagtagttgtacaatcacctgctgatgaacctgatagtggtggtagttctcctcctactcaaggagaacagccacagccagaaccacatccaccacctattgttgattgggaaaacctacagattatcgaatcgttagatgaggaaggaagggtaaacatcgtggatgatgacgagttgtatgtgcttttgggtttgagggctgaggatgaagccgccgagaatgctcaagcggcggctacaactgaacagggtaatggtaacaatggcaatggtgctgaaaatcggaatcacgatgaaaatgaggttgaggttgagcctccggtcgaggacgaggttgcgggagaaaggatgatggtgaatgacgcgaataagccatccttggtcaaaggaactgtgtatcccaacatgaaggtctttagattggcggttagacagtttgctatcaatgaggagtttgaactttgggtaaaggcgacagatcgtaaaaaatatgtaggagcatgcaaaggggcaagtgattgcccttggcatgtgaatgggcgtagacaggctgacgagcgaaccgtaatggtgacaaagtttactaattatcacacgtgtacatctagcggtagaagaaagactaccacaccaaccagcgcctgggttgcttccaaggccatccatatccttaggacagactcaggtatgggccctaaagaactgcaaaaaaggttgcaagaggatcagaaatgcaaaatcaattatgatactgtggctaagggtaggagtttggctatgatccaattgcaaggtagttgggaagaaaatttccatatgttgtataggtggagggctgcagtcatggagaggtcccctggtagtgttattgagattgacactattgaggttgatgggaaggtttattttaacagattcttttgtgcacttagtccatggattactggatttctaactggatgtaggccataccttagtgtagactcaactgccctaaatggtttgtggaaaggacatttagcatctgccatagctatagatggaaacaactggatgtaccccattgcttttggtttctttgatgctgagactactgataattggacctggtttatgattcaattgctcaaggccataggaaaagtatctcctcttgcaatttgtactgatgcatgcaaaggattagagattgcagtgcaccgagttttcccttgggctggacatagagaatgttttaaccaccttacgcaaaatctaatcaagaaatatggtggatctgtcttccaagagatgtatcctgtagctagatcatatagggcacaagtgcacgaggagtgtatggatacaattaagaaagcatgcaccgatgtggctctctggcttgacacttaccataaattgatatggtacaggagtggcttcaatgctgaaattaaatgtgattatgtcactaacaatcttgcagagtgctttaacaattggatcagagatataaaggccttacctatttgtgagcttgctgacacatgtagggagatgataatgaccctgtggaataggaggagaaggattggaaataaattcacaggtacaattctacctgccattttgcaccagttgagagctaggactcgagggttaggccacttgtcagttgtgcatgctgacataaccactgctgagcaaattagggatgtaaagttggagaactacattaatccctactactctgtggccctattctggaatgcatacaactcaattattgagccactccctgacaaatcacaatggcctaaggtggatttaccttttgttcttggtgcaccccttgcaaaaaggaacctaggaaggaaacgaaaggcaagatggaacacaatgaggtatgggccggctcctgctcctaatgctcctgatgtggtttatgcccctgctcctgatgctcctgatgctcctgctgctcatgttgctcctgctcctataccacataccccaactaggcctactgtacaaaccattattcaagaaagcccaacagttgtgacaagacgccggcttgcaatgttaatggaacaaggagggacaagcacacaaccggcacttgcttcacaagtgacatgtaaaaggaggttgaatattgctgaatcaagctcaaagaggacatgtacaaagaagctcacacccaagaaaatgaagcctacttga

SEQ ID NO: 49571 - DNA, 3057 bp, Oryza sativa
  Clone ID: PAT_MRT4530_52142C.1
atggatgactccacctggctacagattgttgggaggctcgaggaggagcctgggagtcaattagtagttgtacaatcgcctactgatgaacctgatagtggtggtagttctcctcctactcaaggagaacagccacagccagaaccacatccaccacctattgttgattgggaaaacctacagattatcgaaccgttagatgaggaaggaaggggtaatggtaacgatggcaatggtgctgaaaatgggaatcacgatgaaaatgaggttgaggttgagcctccggtcgaggacgaggttgccggagaaagaatgatggtgaatgacgcgaataagccatccttggtcaaaggaactgtgtatcccgacatgaaggtctttagattggcggttagacagtttgccatcaatgaggagtttgaactttgggtaaaggcgacagatcgtaaaaaatatgtaggagcatgcaaaggggcaagtgattccccttggcatgtgaatgggcgtagacaggctgacgagcgaaccgtaatggtgacaaagtttactaatcatcacacgtgtacatctagcggtagaaggaagactaccacaccaaccagcgcctgggttgcttccaaggccatccatatccttgggacagattcaggtatgggccctaaagaactgcaaaaaaggttgcaagaggatcagaaatgcaaaatcaattatgatactgtggctaagggtaggagtttggctatgatccaattgcatggtagttgggaagagaatttccatatgttgtataggtggagggctgcagtcatggagaggtccccaggtagtgttattgagattgacactgttgaggttgatgggaaggtttattttaacagattcttttgtgcatttagtccatgcattactggatttctaactggatgtaggccataccttagtgtagactcaactgccctaaatggtttgtggaaaggacatttagcatctgccatagctatagatggaaacaactggatgtaccctcttgcttttggtttctttgatgctgagactactgataattggacctggtttatgattcaattgcttaaggccataggaaaagtatctcctcttgcaatttgtactgatgcatgcaaaggactagagattgcagtgcaccgagttttcccttgggctgaacatagagaatgttttaaccaccttatgcaaaatctaatcaagaaatatggtggatctgtcttccaagagatgtatcctgcagctagatcatatagggcacaagtgcacgaggagtgtatggatacaattaagaaagcatgcactgatgtggctctctggcttgacacttgccataaattgatatggtacaggagtggcttcaatgctgaaattaaatgtgattatgtcactaacaatcttgcagagtgctttaacaattggatcagagatataaaggccttacctatttgtgagcttgctgacacatgtagggagatgataatgaccctgtggaataggaggagaaggattggaaataaattcacaggtacaattctacctgctaatttgcaccagttgagagctaggactcgagggttaggccacttgtcagttgtgcatgctgacataaccactgctgagcaaattagggatgtaaagttggagaagtacattaatccctactactctgtggccctattctggaatgcatacaactcaattattgagccactccctgacaaatcacaatggcctaaggtggatttaccttttgttcttggtgcaccccttgcaaaaaggaacctaggaaggtacaggaaactaaggatcaagggttgcttgaaaggtggtggtagcaagcctaaagacaatgccaaagagaaggcaacgattagaggaaaaaggtgtaaaaaatgtggtgagttgggtcatggacaaactagctacaagtgtaagctcaatggtacaaagaagaagccgaaacgaaaggcaagatggaacacaacgaggtatgggccggctcctgctcctaatgctcctgatgtggtttatgcccctgctcctgatgcttatgctgctcctgctgctcatgctgctcctataccatataccccaactaggcctactgtagaaaccattattcaagaaagcccaacaattgtgacaagacggtggtgtttgccgacgcaattgccgtggaatatggagccggtgccggtgccggaaccgccggcggagatgagggactggtcggagctgcttctggacgcgctctcggttgtcttcaccaagctcggcgccgtcgaggtcctcattggcgcaggtctcgtgtgccactcatggctcgacgctgccaaggtgcctgagctgtggcgaaccgtggacatggccgtgctctacagggacatgggctcgaagaacttgggcattctgactgcaatggggaagcgggctgtgaagagatctaactggcagctcgaggtgttcaagggtagggattttattaccaatcagctcctcaagtatgtaaggcgcaggtcgccgtgctgtctgaagagccttcacctcgagtcattcaccaagctgatcaccaagtctccattgctggaggacctcgtgctcaactactgccaaagcatccgcggcgacgtctacgccaccgtcgtcgaggcgtgcccgcggctcaagcgcctcgaggtacgcaggcgcttgggttggtgggatgacgacgacatgctgcttacgatcgcggcgatgcacgggctgcgacgcctgacgctcgagggcgtccgcgtccgcagcagagagctgacggccatcgtcgatggctgccctcgcctggagcttcttgacgtgagcgagtgcttcctgcggcgtgacatcgtcgtcgacggcgccctgcctgcgaaatgcgcctcgatcaagacgctcaagctgcccttattctctgatgttgatgctgctgccgctgccactgctgctgatgatgatggaaaggtgactcgatgtctcgggagagtatttgcggtgatggaccgggagtcggcttga

SEQ ID NO: 49572 - DNA, 377 bp, Oryza sativa
  Clone ID: PAT_MRT4530_52143C.1
gccactcatgaagtccaaccccattgcatgcctgattcatctttataagttatggcagaggaccgcggtcagcgccgatgccacccacttggacgcctctcctgctgctccggcggcggtgacggccaccgagaatgagaggagcttgagcagaacgcgtctagggctcatgccgacgtcgtctcggtgggtgccggacactgccatggagctgccggatatagtgacactggccgatgggcggctgatgaagccaaatctgcagcatcatcagcacaaacacctggccgaacgagttcgctaccaccccgtaagctacccgctcaacttcaaggaagacggcgacgagaacgcccactcattaaagtacatggcct

SEQ ID NO: 49573 - DNA, 459 bp, Oryza sativa
  Clone ID: PAT_MRT4530_52144C.1
atggctgcaatgcggcggagaggtgaatctttggccacgacaaattttgagttgcatttctttgatttctttcccaatcccctttccttccctttcaagcagcagggtgcacgatgctatttatggatctgggaggatctcctcagggagtatgtcgaggagatagtggcatactgccacgccggcgagtttgatagcctatgggagacatgtgacgagttgcggtggcagttgttagatgtgcagggtcgcaacatcgagttgtgtagtatcttggaagcaaaagaggcgcaattgcagctctatagagatgagttgaatcagtcaaagagggaggttgcagagatgaagcacaagatggaatcagagaaggccatgctccaatgggttctgtatatgctaatgtttatctgtgttctttgtgtgtcagtagttgtagggaagaactatcttggatag

SEQ ID NO: 49574 - DNA, 237 bp, Oryza sativa
  Clone ID: PAT_MRT4530_52145C.1
aacaagtaccaaatccaacagcagcaacagcacaagtacactaccaaatccaagcagcagcaacagcacaagcacacttactcactccttccttcacaagcacaagcacacctagcactgcagccctgctccctccttcacaccggccgcgctgcagcagccgtcgccgtctccggcgtcgacgtggcctctccgcctcaaccgtcgacgctgccgctccacctcagcagtcgacgg

SEQ ID NO: 49575 - DNA, 229 bp, Oryza sativa
  Clone ID: PAT_MRT4530_52146C.1
aagggaagaagagtgcagcaaatggccgcttggccgataataaaatggaatgtaacttgtgtgttcagcaagagacgaacttgggagttgggactctgtaaaactagatttggcaaacatcttgtctatgtacatttaaattaaaaaaaaaaatttaccataaaaaaaaaaaaaaaaaactggcgcctgggcgggcgcctgggtctgccccggaattcgggccgggccc

SEQ ID NO: 49576 - DNA, 1243 bp, Oryza sativa
  Clone ID: PAT_MRT4530_52147C.1
ccggccgggatcgccttctagaaacatcccacgacgagcctctcctctgatcctctcctcccccactccaccgccaccgccgccgtcgccgctgccgccgccgccgcgcgaggaggacgggcggatctcccaatgaggtgtgaggcttgttgattggggagctgctggttgtagtttgcaattgcaaatggtggattcctcggaagggctccgacggctcgccgcgttgctgttcaagtgctgcagccttgacagctccaatcgtcccaacggcctgcaggatcctgaacggttggcgagggaaacagtttttaacgtaaatgaaatagaggcgctgtatgagctgttcaagaagattagcagtgctgtggttgatgatggcttgatcaataaggaagaattccaactggcactgtttaagaccaacagaaaagacagcatgtttgctgatcgggtatttgatttgtttgacacgaagcacaatgggattcttggattcgaagaatttgcacgggctctttctgtgtttcatcccaatgctccaattgatgacaaaattgattttgctttcaaactttatgatctcaaacaacaaggtttcattgagaagcaagaggtgaagcaaatggtggtcgccacacttgctgaatcaggaatgaacctttcagatgagattatagaaggcattattgacaagacatttgaggaagcagatacaaagcatgatgggaaaattgacaaggaggagtggcgcaaccttgtgttgaggcatccatctttattaaagaatatgacactcccatatctcagggatataactacaacatttccaagttttgtattcaactcccaggttgaggacgcatgaggtcaagcttcagaccatattctagggtccagttcgttttatttcattttgttgatatctttctcgtgcttggaacaaacttttatgattgctccgcttcaagatgtgaatccgtagcaaggatgaagtttttaccattttttatgtatatacttgaagatggccttcaactcttcatgtgtagacttgtaggatgaaccgtttctcgtgatgtagaaatgttcttcaatcctaagataaacggttgcctctaccgtcagcaaaaaaaaataccgagtatgcaaacctaggtcctcttctacccaagaatccgggatgccactatttgatcgagcccagcaaggcgaacactcgagcagtgaagctgttatttga

SEQ ID NO: 49577 - DNA, 251 bp, Oryza sativa
  Clone ID: PAT_MRT4530_52148C.1
aaaaaaaaaaaaatattagaacataaatgcccataatgtaaaagtttatatttcaaagaagagagcgattacagggtgccagttatcattgaacatctagtgcataaatgataaacttaaataaggggccgccctttttaatggtccaaacctcctgcccccatcattaaagcctaacacatttttttcggggcccccaaaattaaaacaacggcccgcccttcaaaaagttgggtaggggaaaacccctg

SEQ ID NO: 49578 - DNA, 378 bp, Oryza sativa
  Clone ID: PAT_MRT4530_52149C.1
atggccgcgcgccgggtcggtctcggcgacggagccccacgcggcgccgttgtcctcagccggcagtgtaggttccgggagggcggggtggagcacgaggcggcggtgcacgccacccgcggcagtgacaacggtggcgagggggaggtgcgggtcagcatcgatgggaagagagtggctgaggtgagctgtgtagggtggggtttccgcagcaaccgcgccaccgtgctcactgacgttgagatgatggacgtgttgtgggacgtgcacttcagagacatcccagttttgattgagccaatggggtgggcagtttttggtgcacccatgggttgccactactgttatttctatgatgcactgcatattacaatttga

SEQ ID NO: 49579 - DNA, 1522 bp, Oryza sativa
  Clone ID: PAT_MRT4530_5214C.1
aatttggagatgggacaattgtctgaagatcaaaagaaagaattgttgaaaccctttactctggaagatggaaagtaacaaggcacctaggcctaatagttttcctactgatttttataaacacttttaggaggtgataaaaaatgatttgaaagctatgattgatgattttcataagggaattttggatatcaaaagattgaattatggggttatctccttaattcctaaatgaaaagacgcagcacaaattcaaaagtttaggccaatatgtctccttaatgttagtttcaaaatcataacaagaaccctgatgaagaggctaacctatgtcataggtgacgtaattgagaaaacacaaactgcttttcttaaagaaagaaacatcatggagggagtagtgataatgcatgaagttttaaatagtgttcatatgaaaaagcaatcaggagttctgtttaattaaggtggacttcgagaaggcctatgataaaataaattggccatttctatgtcagatgcgggaagtaaaaggcttccctagtgtttggtgtgatttgatcatgagatgtgttggagggggtaaagtggcagttaagataaatgatgagagaggggatttttttttccaaacctataaagacttgagacaaggacaccctttgtctccgctgctttttgatattgcagcggatgctctacctcttttaatgaatagagcaatggaacagggaatgattaaatggctagggcaggaatatacagaggatgaaatagtgattttgtagtatgctgatgacactatcttcatgctggaggataacctagagtatgcaaaaaaaaacttgaagtatatcttgtgtctctttgaacaaatgtcaggtttgaaggtaaatttcaataaaagtgaggtcttttgcttaggagggggccaagaaaaagaagagatgtattgtcatattttaacttgtagaagggaacaagggggtttggggttattagatttgggttgtatgaatgttgccttgctgggaaaatggctttggcgcctggaaaatgagagaggcatttggcaagatttgttatcagctaagtatctaggtcaaaaaaaaaactttatctcaaaaaaaaaaccaagacctggggattcacatttttggaggggtctaatgaaggtcaaaaagagtttctaactttttttgtgagaaggtggggaatggtaaaaaatagccttgttttgggaggacagctggtttggaagaagacctttggctgaacaattccctaatttgtataatgtttctcttcgcaaaaatgtgctggtggccaaagtaataggagaagggttaggtagtctaagattcaggaggtctcttgtggataggaaacattgaattgactggggaggaggataaagtggttttgaaactgactaaaaatggaattttcactgttaaatctttctataaagcaatgatgattcaaaacactggctttcaattcaagaatatttggaaattta

SEQ ID NO: 49580 - DNA, 2123 bp, Oryza sativa
  Clone ID: PAT_MRT4530_52150C.1
atggccgccgccgccgccgccgccgccgccggcgactcgccccgccgcggaacaccggacagcgatgaggaggactacgaggagtacgtccccgtcgccaagcgccgggccatggaggccgaacgcctccgccgcgccactaaaccgccgaccacgaacgcagttgcagttgcagccccgccgccgccgccgcgctccacctcgtcgccggcggtgggtgaggttgcggtcaagacgagcctgctcgtgaaggccacgaagctgaagcgcgaggcccctgaggtgaccccggccgagcggctgctccagcaggagagggagatgatcgagcacctctccgaccgcaaggccctcatgcccgtcggcgagatcgcgaaggggatcagctactccgagccgatcaccacggggtggaggccgccgcttcgcctccgccgcatgccgcggtcccgcgcggacgcgctgcgacggagctggcacatccttgtcgacggcgacgacgtgcccccgccgtcccgaagcttcggcgacctccgtctcccggagcccatcctccgcgcgctccgcggcaagggaatcgagaagccgaccccaatccaggtgcagggtctccccgtcgcgctctccgggcgggacatgatcgggatcgcgttcacggggtccgggaagacgctggtgttcgtgctgccgctcatcatggcggcgctgcaggaggagatcctgatgccgatcgtgcccggcgagggcccgttcgggctcatcgtctgcccgtcgcgggagctcgcgaggcagacgcacgaggtgatcgagatgttcctcgcgccgctcatggaggccgggtacccggagatacggccgctgctctgcattggaggcgtggacatgaggacgcagatggaggtggtgaagaagggcgtgcatattgtagtggcgactcctgggaggctcaaggatttgctctccaagaagaagatgaatcttgataactgcaggtatttaacactagatgaggcggacagactagtcgatcttggatttgaggacgacatcagggaggtgttcgaccatttcaaggcacagagacagacactcctcttctctgccaccatgccagagaagatccagaattttgcaaagagtgcgctagtgaaaccaatcattgtcaatgtgggaagagctggagcagcaaaccttgatgtcatccaagaggttgagtatgtcaaggaggaagcaagaatcatatacctccttgagtgtctccagaaaaccccaccccctgtgctggttttctgcgagcacaaagccgatgtcgattacatccaagaatttcttcttctgaaaggtgtcgaagctgttgcaatccatggtggaaaagatgatgaggaaagaaaagacgcgttcaaatcattcaaagcctcagaaaaggatgtattggtagctacagatgttgcatccaaaggccttgatatccctgatatccagcatgtgatcaactacgacatgcctgctgagatagagaactatgtgcatcggattggaagaaccggcaggcgtgggaaaaccggcgtcgcaacgacattcatcaacaagaaccagacagagactacgcttcttgacctgaagcaattgctcatcgaatcaaagcaaaggttaccaccaattctggctgatcttgatgatccacaggaggacgataaggtggccattgctcagcagagtggtgtgaagggctgtgcgttttgtggtggccttggccatcgtatcgaggcctgccccaagcagcagctccagaacagtgtcacgcttgctcgagcaagaagtgattacttcggtggtggtggctaccggggggagatttgatcatcaagtatcactagatttgctctgccatgtatgtagtacagccatctacaatggaccaatggttcagtttactgtacatatgtgaagttgtacctgctctaataaattgtctgtacaaaattactagcttctgactgtatttctaaccggcagctttacatcgcccatcttctgacctgtgtttgaatgatgtacatacactgtatttcaggtgttggatttatgtcaataattattttctgttcaaaaaaaaaaaaaaa

SEQ ID NO: 49581 - DNA, 403 bp, Oryza sativa
  Clone ID: PAT_MRT4530_52151C.1
agggtattgcccctttcaaatagtaaaattttatgggttaatatttagtattacgtaaaagatgggatgtaaaggtttttcaatggagtacaacgcaaggattttttttaaataatagaaaaagtatcagaggggaagcagttgaaggaaaaacaaactggttcagaagaacaccgtcaatcaatgatagtgtttgaggaggagaaaaaaaataaggtgaggagaaaaaaacatggagagcagcataaaagtatggaggatgtaggaactacgcggggtgcaagaatatttggttcggggggctacttatgggcggaaggaacaactggtgatgtgttggagataccctcaaaaggtggaggatgagatttggtggggaattttgaaggagaagctttctaaa

SEQ ID NO: 49582 - DNA, 1540 bp, Oryza sativa
  Clone ID: PAT_MRT4530_52152C.1
atctcatctgcgagcaattcccgggctcaacgtggacactaccggagggggacttcccgttttccggcatccggggcttcaacgcgtgcacccgcgagagcctcggcaacgcgctgcggcgcggcaacgcgctgcccgagacccactaccgccatggatgtacatgcacctgcagcacgacgtacttcaaccgcaacggcaatgagccgcgcttcttctgcgacgacgggctggacgcattgtggcgcgtcgactggatggtgctcctctccgacaactacttcgtgctcggactgttcctggtctcgcgcatcgagcgcgtgctgccgcggatgttcccgtgccacgatgctgcgttccacctcctcggccgctacctgctccacccgaggaacgtggtaccatgcctcgtacatggcctacactgagtagcgtgtcggcatccaggtgtgctccttctacttggcgcgcatctccaccgacgagctctacggccagatcatgttgtgcgcgcatggagagaacatcctgccccgtgtgcagcaggagctcaactttaccactgccggagagcagccgggcggcgcggccggggaggcgcaagccggtgctcgtcgtgtcgctacatggcgcctactccgagaggatcaaggacctatactacgagcaggacatagcaggcagggaatccatgagcgtgttccagccgacgcacttggaccggcaacagtccggggagaagctgcacaaccaggaggaagaggaagaatcactggcactttccaagtaagcagcagtcatctaaattgctgcacatacatttggttatataggacctggtgcggcagtgccgagacctggaggcgcagcggccctgcgcggacgcggtgaaaagatctcattgtttcgtgatgaagatttctatatgaaaaattttcaggtatgcgccttgccttctaatgattaccgactcaacattgatctttttctgtaatctacctcacactggaaaggcttttacactactgtacattggttgtacaaattgttctctgaacgaaccgatcagaacaattcacatttgatcttgaaaatattaataaagtgtaaatgcaagtatgctcttggcgcaaacttgacaactgtaaccattttgggctgctttgagtatgatgttaccttcaaatccacacgcagcgtagcgcgtgattattgctagttgaacttaaactcactgtcttgtctgggacatcgtatagtggcggcaccaaagatgacagttgtggcgacgacggcggtggcaacggcagctgagtcggtggcgacggaagtggcagcagtgaagtcgatggcgatttattggagggaacgtgtaaacaatggctagctagtgatggagcaattaaaattggataaagttgattatatcgatctaatcttgcatgtgtgacagcatgtgtgcatctgtaattacatgtatgtttgagagtgtttaagttaggctaggagattcacgggtgaaaagtttagcgtgccatat

SEQ ID NO: 49583 - DNA, 209 bp, Oryza sativa
  unsure (1)..(209): unsure at all n locations
  Clone ID: PAT_MRT4530_52153C.1
attcttaccgcgttttcgttcattccaagttttcaaccggggccggaggaaaaattacatcagaaaggttgctacatatcacccgaacatggaatacgccatcaccagcttgataattggacttgaactacgacggcttatattagcacgagcagtacatggccttagatnggactcatctcttattatatgcacacatagcaatgctg

SEQ ID NO: 49584 - DNA, 342 bp, Oryza sativa
  Clone ID: PAT_MRT4530_52154C.1
atgaaacgttgcggcatcatcgtcgtcctcctcatctctgtatctgcggatccagatggcccgacgacggcgcgcggctacagcggtcaggggaagaggaaggggccaccacgagcctctctcgccggccgccacccttctccctactggctaccgccacacacctctctcgccgtctctcccaccggcctctccgcattcaccatgtcttccgccaccgagcttctccccgtcggccgctgtgcacctctcacgccagaacgcgccattagttgtcggctgccaaccctggaggtggaggcctggagagagatagagatgggaagagaggggagagagtga

SEQ ID NO: 49585 - DNA, 547 bp, Oryza sativa
  unsure (1)..(547): unsure at all n locations
  Clone ID: PAT_MRT4530_52155C.1
cccgggttcgnnacccacgcgtccggtactgcttgcatcttcatgctaacgcagcttcgtggatgacaatccaatatatgtaataatagaaatcgtgttccgaaaacaacacattgcctgcgtgatagaaggactctatttggcatccttgcgcgttcctggaacggccaaaaatccaaggaacaagggagggacattcccccggaaccagcagcgtctcatactttgccggcggggggggggaggacggcaggacccttgctgactacaacatccagaaggagtcaacgcttcaccttgtcctccgtctcaagggaaggcatacaaatgttcgtgaagtctttgaccggcaagaccatcaccctcgaggtggagtcttctgattcctttgtcggtgtcccggccaagatccagggcccggagggtttacccccggaccaggggaacctcatctttgctgccaagcagctggcggatggcaggacccttgttgtctacnncgtttcttaggagtncaccctccaccttgtgctccttcttcgtggtg

SEQ ID NO: 49586 - DNA, 187 bp, Oryza sativa
  unsure (1)..(187): unsure at all n locations
  Clone ID: PAT_MRT4530_52156C.1
gtggcctgtggatgactggggtggaggtgctgtatatgttgagatattacggccggtgttgaaccccanaccctggtaaaatggatgaccagtgaccccctagtattgtagtacttcgtccgtttcacaatgtaaaactttctagcaatacacacatncatananatggtaaaaaaaaaaaaaaaaa

SEQ ID NO: 49587 - DNA, 546 bp, Oryza sativa
  Clone ID: PAT_MRT4530_52157C.1
atggcagttcttttggtcgttctgctgacggatgtatcgtgtgacaaggtgtctctaaaagttaaatttcctgatttatatgagataagttaccatcaggaggcttctgtgagtgatatttttgtgaagggcctccacctccagggttggcagccgacaactaatggcgcgttctggcgtgagaggtgcacagcggccgacggggagaagctcggtggcggaagacatggtgaatgcggagaggccgccgcgcgccgtcgtcgggccatctggatccgcagatacagagatgaggaggacgacgatgatgccgcaacgtttcatcccgatttcacgcagatctcggataaaatcgcagccgccccacctcccgtgatctcgtcatcccgtctagacctcgggcagtggtggcacttgggacaggagttggagcgtgtgggtagagcgtcattaccacccacctctagaggcggcgtcctgctggccggccatcgtcctcaccacccgccatccctgttgtcctcctcaccgcttgctgcatggtga

SEQ ID NO: 49588 - DNA, 679 bp, Oryza sativa
  Clone ID: PAT_MRT4530_52158C.1
atggggttattcaagggcagcttcacattcatggtgggaatgggatgtggtgtctatgtagctcagaactacaatgttccaaacatcaagaagcttttcaacacatatgttttcatggcaaagcacatcgaggaaacaaatatgatgttcatgaatggggaagtcggtaaagtcggttctgatcgtcggcaattgaactatggtggcttaaatgctttaccgggggttgtcagagaagcagaagttactgtctactcgatgacaatgacttccttttgtggtggagggcttgatggagttacacttgggggactagatgaaggtggtgatatggtaggtggaggggttgatggaggtggtgaggtgctaggtggaggactcgatgaaggtggcggcggtggctggctgtatgatggagctaccgtcgggggactagacggaggtggtgatgtggtgggtggagggctcgatggaggtggtgaggtactcggtggaggacttgatgaagctggcggtggtggctggctatacgatggagctactgttgggggacttgttggaggtggtgatgtggtgggtggagggctcgacggaggtggtggctggttgtatgatggagctaccgttggggcactagacgaaggtggtggtgtggtgggtggagggctcgatggaggtg

SEQ ID NO: 49589 - DNA, 1953 bp, Oryza sativa
  unsure (1)..(1953): unsure at all n locations
  Clone ID: PAT_MRT4530_52159C.1
ccggccctcctctcctcccccgtctccgccgctcgcgatccccaccgccgccggcgacgcgcgcgcggcggtcgccgggcgttgtgtccgcgccgccccgacgagccggctcgtcgacggagacggtgcggctgttcctccgtactcgtcgcccgccacctcatcccgcggcgccgtctccctcgatcccctcgccaaagcgcgcaaggaaggaaggctctcccccgccaccgacgccgtccgtccagatctaaggttttgacacaatggggttattcaagggcagcttcacattcatggtgggaatgggatgtggtgtctatgtagctcagaactacaatgttccaaacatcaagaagcttttcaacacatatgttttcatggcaaagcacatcgaggaaacgtatcggaagccaaagaaagatgatgactgatgatttccacagattttcattttggtgcccctggaaatcaacgtgtaactaacatgatacagaaatatgatgttcatgaatggggaagtcggtaaagtcggttctgatcgtcggcaattgaactatggtggcttaaatgctttaccggtgaaccactgtttactactttactatactgcttttaggggggttgttagagagacagaagttgctgtccagatcacaaatagaccaccccacaacgccaagacaccacccctaccaacggctcgggcggcggtggcctcccctccgccagatctagcgggagggtaggcgacaacagcggcgtgcggtggcaggagggaagcagcggggggtgccctcccattcgtcagatccggcgggaggagaggtgacagcagcatcatgcggcggtgggaggggaggcagcatcggcgagtggtgtcctcccctttgccagatctggcgggaggggaagcgatagcagtggcgtgtgacgatgggagggaagcgacagcagggacggcggcgtcccctccgccagatctgacgggaggggaggcgactgcaatggcatgcggcggcggcggagatggcggcggcggcggccggcggcgggaggggcggcggggcgcaggccgcggtggcggagcagatagcgcaggcggtggcggaggagaggcgcggcgcgcttggcggctgtacgggcgccggtggcggcgagggaccagggtttggtggtaattatggtggtgaggttggggggcgggctgtgaggaaagaaaaccttgtgccggaggcggatgcgccggtgtcgggtatcctggtggcgtccaagatgggagagtgaacggtggtggtgaccagccccaaggttgatagggtgggggtgttgatttgggactaggaggtggtggtggatggctattgccgggataagttggtggtgtcataggaggactaaactgctgtggtggtgttgtcataggtggagggcttgatggagttacacttgggggactagatgaaggtggtgatatggtaggtggaggggttgatggaggtggtgaggtgctaggtggaggactcgatgaaggtggcggcggtggctggctgtatgatggagctaccgtcgggggactagacggaggtggtgatgtggtgggtggagggctcgatggaggtggtgaggtactcggtggaggacttgatgaagctggcggtggtggctggctatacgatggagctactgttgggggacttgttggaggtggtgatgtggtgggtggagggctcgacggaggtggtggctggttgtatgatggagctaccgttggggcactagacgaaggtggtggtgtggtgggtggagggctcgatggaggtggtgagttgctaggtggaggactcgaagaaggtggcggtggtggctgcctgtatgatggagctactgttgggggacttgatggctggtgaaatgtgtangactgggaatcaccactattatctgccatct

SEQ ID NO: 49590 - DNA, 880 bp, Oryza sativa
  Clone ID: PAT_MRT4530_5215C.1
ttaaagtgcaaagattccaatgcagaggaacatgcacttaatttccaaaaacaacaagggtatttttgcaaaatcacaggatcctttcccttttttctttttctttcctttcttttccccttctctttccttatcttcttctcccgttgaccccgcacatgccatgtacggcacggtgggattccggggcggtgccggaagccaggcggcgcggtggtcgagcggcgcggcggcgcttctgcaaggcggacgagcggcgcggcggcggcactcccgtgtgacggggtatggccgggtcggcggagcgctgccgtgcggtcggcagcggcggtgcgacccttgcggaggcccgcatggtgcggatggcggcgtggcacggacggcgccggccgtgcggcagccaacggtggtgcggacgtgtggtggcgcggcctgcgcggccgtgcggcggcgagggtgtgcagccgacgacccgacgtcttcatcggcgccctttcgttttcttttctttttcttcgttcttgggtctgcttcttttctttgtcctctccgttttgctgttgctatcatggcggccggcgtgggcttgccgtcgggcacgatgctagtgtgcagcacgtggccagtgcatggcctcgtcgcacgttgcgtcgtacaggcgcggccgtggcaccgggtgcatgccagcgcggggcgcgtgttcgcggccgtggcgcgggttcgccgccatgccgtgtcgcggcacgccaactccgtgtctgtctaccgtgattttcaccaatcggcatacaccggcgactccaagtcggctgtggtggatttcatcgggaacgacaaaaacggaacgagaacggggagagggattcgttttcgcgattga

SEQ ID NO: 49591 - DNA, 297 bp, Oryza sativa
  Clone ID: PAT_MRT4530_52160C.1
atggcggtcagaccggcggcggcgacaggcgcggcaggtgatctcggcggtcagaccggagattcatcaccggtcagaccggcggcatccactcggtcagaccggcagatcaatctcgaagtctcacataggctcggatggtctcacatccttccaccaattgaaattcttagcccaaataatgcaccacctaaaattgaattgaaccccagaaccaaaacaaaggtcccaatgattgggaatggtagggaagatgcaagatccatggtccaatcagaccaagcaaaccatcattga

SEQ ID NO: 49592 - DNA, 398 bp, Oryza sativa
  Clone ID: PAT_MRT4530_52161C.1
cccctgggttttaatttaattccatcccgagggaaagcaacagggagttaaaaccccatacccaaggggaactaaattaaggggaacatccggggcaaaaaaccccaaacactggggggggggaaagggggtttttcgactggggagagccccgggacacaaaaacaactcgactggaaaaaaaaaagattctgccccggaaggctaaggaaaacgggccacaaggggccccaccaaaaagttcctccagaaaccaaccttggggccatccaccccaaggggggaaccattatgcccaaggaaatccagtttgccccgccaatccggggggagggggggaaaagtgccttttttaaagggggtgggtggggaaacccccaaacgaacgggggggaaaa

SEQ ID NO: 49593 - DNA, 303 bp, Oryza sativa
  Clone ID: PAT_MRT4530_52162C.1
atgctaaagcattggctcttcatcaccatcgactttgttgcctgctcgctgccggcgccggcgccggccatgctgaatgattgttcgcccatcaccctcagcccctcgccttctttgtcgcgccgccttgccggcaagtacttttgcggtcactcgctcggcgccgctggccttcttcttcttggacgttttggtcacctccgccgccgcctcattgccagcggcgccactagctgccgcttgcgccccttccgtcgtggcgcctggcatgttgttgggtgcatcgttggtggtggcgtcctg

SEQ ID NO: 49594 - DNA, 468 bp, Oryza sativa
  Clone ID: PAT_MRT4530_52163C.1
agtatgataattttttttttttttttttttttttttgttttttttgtttttttttttgggaaagagagcttttttttaatttaagacccccaaagctgcaaagggggaataggagaaaccgggagggtagtttaaggttcggagccgccattgggaaaaagggaaaaaaaaacaccgccaggggggggaaggggccggggggccccatattgcccagggggaaaaccaaagtaaagggggccgaaaaggggcaacagaggttggggtggggcggcctgcccaatgagggggacccccccaacggggggggggggcaccagggggggttggggccaaacaaggttagtgctcagaagaagagaagggggggccaaaaaggggagggggggcaagacatgggggggtacgcggggaaacccccgggaatgcaagaaggggttcggcggtttgacaaactggcggaagggg

SEQ ID NO: 49595 - DNA, 594 bp, Oryza sativa
  Clone ID: PAT_MRT4530_52164C.1
ttaaaataaaatggcgtttattttctttccgtgagagaaagagattcatatttttggactcgaattatgaaggtcaaacaagattttcttcgttctgggttctttcatattagggatggctctcaaataaagttttagaaagacaagtaatttagcaatgcttcgctgaggaattagtatccttgttgttaggcataaatagttgatcatctcatggatttccaaaccaaaccaccaaacttttcatggcgacaggacttaattgatgcaaaattagctgcgtggcacaaattattgcctcacatagatgatttggctttgataacggcacaagatgagtttcactagaacctcacttccagtggggtgttatcggtcaaatctcactacttagcactagttcatacgagtgtcccacatatcaataaacacatttggaaggtaaaaataccgctaaaagatttcctttggtgtttacgccgaggcgtaattctcaccaagaacaacttagctaagagaaagtggaacagcagtaagatgtgttacttttgtcatgaaaaagaaattccatcaaacatttattgttctgatgtt

SEQ ID NO: 49596 - DNA, 1008 bp, Oryza sativa
  Clone ID: PAT_MRT4530_52165C.1
tcatcctagtcggcggcggtgattcattctcctccgggctcgccaccgtcccttcttcccgttgccgccgtctctagccttcgggctggccgccaccccttctttccgctgccgccgcctccaaccttcgggctcgctgccccccttctttccgctgccgccaccacactcgcacccacttgccggcagccgagcttgcatcccactgcctccctcgcgtcgtcgttgttctcgcatggtgagaggggtgacgtgacccacctcgtcgctcgccccgctcgcccgagcgctcgggcggctgtatccgggcaaatcggccggattaatccatccatcatctagggggaatattcccctctgggctatcctatccggcggcaaggcgtcatcacccggcggcgccgccgtctccgccgccgtggcctctttcgcggccacttcccggggcggcgagaggtcgcaccggcacatcgggcaagtccggtgcgagtgcagccacatgtcgatgcactccacgtggaacaggtgcttgcacgccggcatctcccgcactatctcgccggcatgcagctcctccaggcacaccgagcacggctcgccgttcccggcctcgaggtcgccgccgccctgcgcggcgccagcgccaccggacgcgtacgcgaacgtcggcagcgcgtccaccgcggccttctcgagcccgaacgtgctggaggaagaagctcccggctgagcctcccgctccgcggcgcgggtgttcgtcccgccgcggcggcggcaccagctcgccggcgcgaggtagtcggcgacgccgaaggccagtagcaccatcccggcgagcacggacgccttccagacgctcccggcggcggcgcgcccgccgacccgcagcaccgccgcggccgtcgccgcgatgccgtagcatgcgcggcggccgcggccgccgccccgctcctcctcgccgccgccccgcagcgtcgccgccgatatcctcgcgaacacgttcgacat

SEQ ID NO: 49597 - DNA, 433 bp, Oryza sativa
  Clone ID: PAT_MRT4530_52166C.1
tctgccatggagtcatcttcaagggaaaatcatcttactcttccctttagagtaaagttcatcaccggtccctaaacttgtaccgctgtgtcatcccggttcctaaactcgcaaatcgaccgttcaggtcctcaaacttgttcgattatgtcatctcggtttctaaacttgtagatcactcgtttaggtcctccaacttgttcagttgtgtcaccccggtccctaaacaggacggtctaaaaactttatatcaaaaatttagggaccggggtgacacaactgaacaagttggaggagctaaacgagtgatctgcaagtttagggaacgggatgacacagtcgaacaaacgtggaccctcgcgcgcttgggacttgcacggcagaactcgaccggagcatggcgagattgtactactacctttctcactacacg

SEQ ID NO: 49598 - DNA, 2253 bp, Oryza sativa
  Clone ID: PAT_MRT4530_52167C.1
atgatgggaggggtggcggcagaggtggtggtggaggacgctgccgcggcggcggcagctgtgcccgcggcggcggtggcggggacgggagcgggagggggggaggaggggaggatgcggatggaggggtggctgtacctgatccgatccaaccgcctcggcctgcagtactcgcggaagaggtacttcgtgctcgaggacgccgcgctccgctgcttcaaggccccgccgccgccctcctcctcctcctcctcctccaagcgcgaggatcctgttagaagtgcaataattgattcttgtatacgtgtcacagacaatgggagagaaagtgttcatagaagtgttttttacatattcacactctacaatgcctctaatcattatgatcaacttaagttgggtgctcgaagttcagaggaagccgctaggtggatcaggtgtttgatggagtctgccttaaagtccccaagaaaagatgagcatattgttgcttgttcacatagaagatggcaagcttttaggctaagccgccgcagtaaccgcatgcactcaatagattggactgtattttcttctgtccataacgatcctatggcatctgatgttattgcgccttctccatggacaatatttggctgcaaaaatggattgcgtttgtttactgaggcaaaggatggtggttcagaggggaagtattgggatgatcatccagctataatggctgttggtgttgttgatgcgaattctgaggctgtattccagactgtaatgtcccttggtcaatcaagatcagagggaatgagaaagagggatctattacttaggcgatattggaggagagaagacgatgggacttatgccctgcgggaattcttccgagcaaaaaatggaaattgtgcttgcatagagttctcgtcaggtgagttgacaagggatatgcgtctgcaacaaggtgaaaatgagcggataaaaatcgaaatgctgtcagcaagtgaaaataacaggctagaagatcctacagaaggatcactgggtggttctaatagacacttaagtagcgctggttccttcattcaactgaacgatgcagcggatgagttttttgatgtcccggatgattcagaatatgatcaaagagaagccatgtggccttccgatgagagcacacattctgtggaccaacgacatgctaaattgtccaccgctgctgtcttcgtaaaaaagttgcatgatcttgcagtgcaaaagagaggatatgttgacttacaaggagctgctgatttcgataatggtccattttgctatggatatactcttccaaaagattcgaactgtacaatgccttctacttgggcaatgacagatcctacaacattcttaatccgaggggagtcatatttgcaggatcgtctaaagatcaaggcaaacaatacattgatgcaaatggtaggtgctgactggataaaatctgataagcgtgaagatgacctttctggccgccctggaggactagtacaggttcctggttcatccacatacagcttagccttgtattatatgatggataccccattggaaaaggttcctctacttgaaagatttgtaaatggagatgacgcattcagaaattcaaggttcaaactcatcccgtacatctcaaaggggtcttggatagtaaagcaaagtgtgggaaagaaagcctgtttggttggtcaagcactagagatcaattatttccgtggaagcaattatttggagcttggagttgatataggctcgtcaacagttgcacggggtgtggtgagccttgtgcttggctacttgaacaacctggtgattgaaatggccttcctggtacagggcaacacgcaagaagagctcccggagttcctcctgggcacctgccgactgaactacctcgacgcgtccaaggcagtgtccatagacgagtgctgaaggcgtcatcagccaccattgaccccgccaacattctttctgaggccaattacagtagtacagcgaaccaaggaaaaaaagaggctcaagtcattcgtttcccctgccggccccggtccaaagatactccttgtattgctccacacaaaagccgaagaattctggctcattctgcctgcctgccagcactgtacattctcctcttgccgacaggtattgcgatgtaatgatgatagcaatctacgcccattctttggcatgccatcatccagaaaaagagaaagggaagtgtatcct

SEQ ID NO: 49599 - DNA, 557 bp, Oryza sativa
  Clone ID: PAT_MRT4530_52168C.1
ggctttcaaaaaccttttcatttttggcaaaccgcaaatccgcaataaacaaatcgttcaaaacaatgcatatgcaacatcaagctcagtatacagttaacttgatttaattgaaatttatgatgcaacattagtttcggaaccacatgagttttcccatgcatatgtgggagcatgcgggggaatcttcattgccaatcctattggcatggctacccggaagcttgagtagtaattgaaggagctttaaaagtcttattagctggcagatagaatgatgaactttaatgtaaagttttcacctgtagttgcaaaaaagttcatgtagtacccattaccagcacaaattcttgactcttgaacgcattgataatgggacatggatttcttatcaatcaaatcaactttgcaagcttggcatatttccgtatgttatcttcatcggtaaagagcaatccttgattaatttttcagggcacaatacatgaatagatttcactagaccctaaatccttgggagatatcgtaggaaagcacctgtaggcttgcctcgggcc

SEQ ID NO: 49600 - DNA, 686 bp, Oryza sativa
  Clone ID: PAT_MRT4530_52169C.1
acccggtgatcgcctttcctggctccaaagattcataacttcacgttgctagagctatttgctctgaatccttcatggaaggtaacatcaccctggggataatgactgtcaaacgaaagagcaaaaaatacctcatcgggaaccccttcgagagcaagccccgccacattcttaaatccaaattttttgtagtattctgggtgtccgacaaggcaacagcccttggctcctaagcccttcaactgtgacagtccttcctgaataagagctttaccaatccccctacgctggtataggggtaacacggagaccgggccgagtccataccagttttttgtgccgtccgagatggccacaggggaaaatgcaatatgtcccacaacacgactattcacttgtgcaaccaatgacagggttaaagcacctgcggaacgaagagcttcgatgatgaactgctctgtgtggttactaatctctaggggcgcgaaggccgcaatagtcacttcagtaatgagaccggcatcgtcctttctctcatcccttatcaaaatttcgtgtcctgtcataggaatccgatttattcaaagccaactagggaactaggtttctgggttgttgatgagtcggtctatttgaacatagatgtagggagttaaaggctctcccgtttctgcttttagggtagc

SEQ ID NO: 49601 - DNA, 3117 bp, Oryza sativa
  Clone ID: PAT_MRT4530_5216C.1
atggtgcacagcgcgtacgacgccgtcgagctggtctccggcgtgccgggcgacatcgtggccgtggccgcctacgccgggaggctcctcgtcgcggggaaggacggctccctccgcatctacgcctccccgggccacgccggcggcgggatcccgcgggacgggccgtacgcgctggagcggcagcagccctcgctgtggcgccgcgggacgcccctggcgatggaggtcagcgccggccgcgagctcctgctctcgctcgccgagtgcgtcaacctccaccgcctccccgggctcgagaccgtcgccgtcatcgggaagaccaagggcgccaacctcttcgcctgggacgaccgccggggcctcctcgcggtcggccgctggaagcgcctgaccatcttccgccttgacagtgagaattcggccgcattgcctattcgttttcgttgtgatttgagtgtttgtggctatgatttgactgttacatcatttgggtttcggtggaaatggagatggcctgttggtgggagggagtttgttgaggtgaaggaatttggagttccggataccgtgaaatcaatggcctggtgtggcgacaacatttgtcttgggattagaaaggagtatatgatcataaatagtatgactggtgcattaactgaagtgttttcttctggaaggaatgctccacctttagttgtggctcttcctactggggagctcctcctgggaaaggataatattggagtatttgttgaccaaaatgggaaacttattcaagatggcaggataatttggtcagacacgcctgcctctgttgctatacataggccatatgcggtggcacgcctgccacggcatgttgagatacggtcccttagagcccccaatgcattggttcagacggttgtacttcgtgatgttcaaaagcttgttgaaactgagaactgtatacttgctgtgctagcccgctctgtttatggcttgttgcctgttcctattggtgcccagatagtgcagttgactgcatctggtgaatttgaggaggctctggcgttgtgtaagctacttcctccagaggattcaaacctacgagctgcaaaggaaagctcaatacacataagatatggacactttttatttgataatgggagctatgaggaggcaatggagcagttctctgattcacatgtggatattacttatgtcctatctctatatccatctcttgttctgcctcaaacgcacatcataggtgaacatgaccggctgcaagatctgccagaattagcaagagaatcatctgatgtgacagatgatatggaaccatactctctacaacttcatgaatctgatgataaatctccattggagataaagaaaatgagccacaatgctctaattgcccttgtgaagtatttgcacaagaaaagaaatggaataattgagagagcaacagctgaagtcaccgaggaggtggtctctggagctgtgcaccacagctcaatcttatctgagtcatatcgatcaaagaagccaaataagaagcgagctcagacgcatacaagctctattgctagagaaatggctactgtactggacacatctcttcttcaagctcttattcttactggacagtcttcaggggcaatagaattgttgaagggacttaactattgtgatctgaagatatgcaaagaatttttagaggaaaggagcgattatatggtgttacttgagctctacaaaagcaatgagatgcaccgtgaagctctccaactgcttaatcaattagttgaagaatcaaaggctgagatgggaaaaaatgattttaacaaaaagttcaatccacaaatgatcattgaatatctaaggcccctctgtcggtctgacccaatgctggttttggaatcatctttatatgtccttgaacgcaacccttcagacactattgagctctttttatcagaaaatgttccagcagatttagtaaattcatatctaaaacagcatgctccaaatttgcagtcaacttacttggaactaatgctttcaatgagtgtatctgggatcaaccctaatctgcaaaatgagctggtacaactatacctttctgaggttcttgactggcacaagattctgaaggaagagggaaactggactgagaaaacatattccccaacacggaagaagctgataactacattagagaacaattcaggttacaacacagatatacttcttaagcgtcttccgcaagatgctctttttgaagagcgcgctatattgtatgggaaaataaatcaacatctccgtgcactctctctttatgtgcataagctccagatgccagagcgagcagttgcatattgtgaccgtgtttacgaggaaggagcacaacaaccttccaaatcaaatatctatttcaatctcctacaaatctatctgaacccaagaaaagctgaaaaggaatttgagcagaaaattgttccagtggcatcacagtaccctggaattcagaaggttactaaggttagaggggcgcgtatgggtaaaaaggttgttgagattgaaggggctgatgatgtgcgctttagccccagtggaactgatagtggtcgaagtgatggtgatggtgatggtgatgatgttagtgatggaggcccaataatgttgaatgaagcacttgaattgttaagccaacggtgggatagaataaatggtgcccaagctcttcgtttgttacctagagacacgaaactccaggatctggtgttatttcttgaaccacttctgcggaactctagtgaacatcgacgcaattatatggttatcaagaacttgatttttcgggcaaatttgcagtgttattatgacggtatagtgtttattcttataattctcactttttatcaggtaaaggaggatctgtataaacggcgtcaagctgttctgaagattgatggagatagcatgtgttctctttgtcataagcggattgcaaatagtgcttttgctatttatccaaatgggcagacgttggtgcattttgtctgctttagagaatcacagcagattaaagctgttagaggagtaaactctgtgaaacgtagatag

SEQ ID NO: 49602 - DNA, 369 bp, Oryza sativa
  Clone ID: PAT_MRT4530_52170C.1
gaataaatacgatttttaattgatttttacgttttttctttgttttgatctacaattaaatttgttatcactacaaataaacctgatcttgaactatataaaaacccttggaatacatttttttctatgagagcacttaacgatgacgacgacgacgttatcaacaacaatttctttttgactaaatcctatataaccaactgctttggctctggctcctcattgatcaactaaactctaaaacttaacaaaaatattaagcgtttaagatttctttttttgtagtctacttttaggcgattcaattttcaagtcaattgtctttgttttgttattttgaatggattttcggtttttttttgtttggtt

SEQ ID NO: 49603 - DNA, 219 bp, Oryza sativa
  Clone ID: PAT_MRT4530_52171C.1
atggctattagctacgtatacgtacgtaccggctgcttctcagaatctggaccaaaagctgtactgattgggggagcttctgattctcggagaagttgcagcggctggaagctctcccaaatagacccaaagatggtgatgaacagtacatctaatgctgatccatctcttttattactcatgttcagagagtttgggaaacagggaggcatggcatga

SEQ ID NO: 49604 - DNA, 1897 bp, Oryza sativa
  Clone ID: PAT_MRT4530_52172C.1
atgaggacgagcacgagcaacgccgcgctgctcttgctggtggcagcagcgcaatgcctcgcgctgctctccgtcgccgccgcggcgaagccgcgcacgcgccagggcgactacctcgaccggctccgcggctcgccgtcgtcgtgggcgtcgctggccgaggatcgtggcgcgccggcgccgtcgccatcgccgtccggtgggcggcacgcggcgccagcggcggcggcggttgggagcaaggaggcggaccgcgtggcggggctgccggggcagccggccggcgtgggcttcgcgcagtacgccgggtacgtgacggtggacgcggcggcggggcgcgcgctgttctactacctcgccgaggccgacggcggcgccgccgcgtcgtccaaggcgcccctcctcctctggctcaacggcggccccggctgctcgtcgctcgggtacggcgccatggaggagctcggcccgttccgcgtcaagagcgacggcgtgtcgctctaccgcaatccctactcctggaacaacgtggcgaacgtgatgttcctggagagcccgatcggcgtggggttctcgtactcgaacacgacggcggactacagccggatgggggacaacagcacggcggaggacgcgtacaagttcctcgtcaactggatggagcgcttcccggagtacaagggccgcgacttctacctcgccggcgagagctacgccggccactacgtcccccagctcgcccacgccatcctccgccactcctccgccgccgccggcggcaagccctcctcctcgccgatcaacctcaaaggcatcatgattgggaacgcggtgatcaacgactggacggacacaaaggggatgtacgacttcttctggacgcacgcgctcatctccgacgaggccaacgacggcatcaccaagcactgcaacttcaccgacggcgccgacgccaacagcctctgcgacgacgccaccagcctcgccgacgactgcctccaggacatcgacatctacaacatctacgcccccaactgccagtcgcccggccttgtcgtctcgccgccggtcaccccctcgattgagagctttgatccgtgcacggattactatgtggaggcctacctcaacaaccctgatgtgcaaaaggcgctgcacgcaaacatcaccaggcttgatcacccgtggtccgcttgcagtggagtcttgagacgctgggtcgacagcgcttcaacggttctgcccattatcaaggagctcctgaagaacaacatcagagtctgggtgtacagtggagacactgatgggagagtacctgtcacttccagcagatactctgtcaaccagctcaaccttccagttgctgctaaatggagaccatggtttagcaacactcagggtgttggagacgttggtggatacattgtgcagtacaaggggaacctcagccttgtaaccgtgagaggagcaggccatgaagtccccagctaccagccacagcgagcgcttgtgcttgtccagtatttccttgaaggcaaaacgctacctgattgcgaaaaatgtggagaggcttagttataaaaaaaaaacttaacttatgtttacaaatataagtagtataatgtgccatgaccacaagttgcattattcccattgttgtccccattctagatagtgcaagaaagaagcaaaatgaaatgatattaagaagtactcaaatatagaaaccattgccccctgtatttagcagatcatgtaacggcagttcagcaaacgattttatatagagtaaaagattgtaagatggcgctcctctgatctgaatattgcttgccaaaatggttggctgaaatgaaaagcagatgcttcatgcttccttgtaaaaaaaaaaaaaaaa

SEQ ID NO: 49605 - DNA, 816 bp, Oryza sativa
  Clone ID: PAT_MRT4530_52173C.1
gtgaggcaatgtttttgaactttttaagaactgtaaaagggtaaaatcatgaagtgtttctatgtacaatggactcagcaatggcgtacaactcttggagaatcacctaagtatgcttatagtacaatcgaccaaccaggatgaataatcctcgtcagctcatacagaatcctcatgctccaaaccaggcttttcaccatccccagcagctttgggcttctgtgctaaaggcggtttcttcccggtatgtcgtcgctctttcagacccagataggtgtagacggacatgccaccgagagcgacgatggctccgcaaatgctggtgattccaggatcctggactgaagatcaggtaacctgagagcattatgactatggtcttgaattgccccagcacaacgtgtgacagagctgatgttgcgccaagtgccaaagcgccagaccattggagtaggaagccaaacaaggcgaaaatgatattagctagctgttccctgaattccaggcaaaacgcagccagccccggggatctcacaaaggcatcagtgccaatataaaaaatatatcgaccggagttgtcttccacaacaatcatgcaaaagcagcctaatttccactcgaggtaaaacatgtaacaagagattggaagtctattctgggcttacgcaagggcatgctaatttccactctgttgcaaatttgaccatagaattttgtttactgcactaggaacaatccaagccaatgctacaacagcaccgaagaaattgaactctagatcagtaacagtggctacggccactccaaatgacacaa

SEQ ID NO: 49606 - DNA, 2376 bp, Oryza sativa
  Clone ID: PAT_MRT4530_52174C.1
atggccgctcctcttcctcccgctggtatcatcccggttcgccaccccagcctcgccaggctatggctggcaagagaggcgagcaacacagcatttaggcagatgaatcgccttatctctgatctttactatgttgctcccggggttcttgatgacccagacttcctggagagatcggttctcgtggacggcgtggcgcccagcacaagcccccgggacctgcgagagagcttctccgtcctggctgtggaagccgcggtcttagttcgagacagctcgacgggctaccgcgtcgggctggtggtgttcgcggatgccgcagacagcgcgagcgcgatgaacctgacgcctcgcccgggcttctacgtcgcctgcattccggcggcgagcggacgcggcgacccgcgcggatacatcttggacgcactggacgatgaggcggagaggcggaggaccactgctgagcccgagcctgggctcctccggtcgctcgtgccgcctcggtacctgctggacgacgaggacgcggatctccacctgaggtgcgtcttcgtcgtccgcgtcgctggcacgtccgatggtggtggtggaggagcctacggtctttgccgcgcggcgagagaccacctcgccggggccgagtacgcgtgcgccgtggtggcgtggaggggcggggacgccggcgtgctcgtgtacgacgacgcggacgccacggagttggttgccaggagggcgccgcggttgctcgtcaggacgggcctccggatgctggactcctcctcgctgctgctcccggacgagggtggcacgtcgtccttgctccgtctcctgcttccgccgtacgtgatcacgcaggcggcggcggcgcagcaggaagagtacaggagccgggtgattctgctgagagggctgggcacagagcggtggcagtgtgacgcggcccagatcgccgactggctggagcaccgggtggagctgaggcaccaggtggaggccgtcgtgatccacagggccatgggtgtcgtggtggtcgtgctcgggagtccggaggatgtcgagcttctgctgcaggagcctcccgagacatggctgcacgctcctgggatgagatggggtgatgatgatgatgatgatgagatgagatgggggctttctcctcactgtctgatgatgacatggctgcacgtttcccggttcctgacgccgccgccgcagcagccgccgcagcagctcagcttcagcacgagggactgggcgggtcccgtggcctactgccaagccaagaactggctatccgacgagttgatgtctccaggaccaggataccatgtgaacagggtggtcgaggccagacggatcgtgcacaagctcatcgcgctgtgtgctctcgcgaaccctgctaccgtctggagcagcagcttcccggacaggtccttgatcctctcaggtatcccaatgtacacggaccgcgcagatctggaggctcggctgtccaccacctttggtgcgatggatgatctagtccacgcccgtctgaaggggggtcgcagtggccgtgttcaagtcttggcatggggcagcaaggctgggacggaggccggctgaggactggtacagcttggggttcaccgactgcagacgggtgccatacgccgcctacactcatgacttcattgcagctgtcattgtagataagttggcccggctccggagcctctacggaccatctccttgacctcagcggatagccagcccattcatgcattcttcttgctttcaggctgtgtacatgaaaacattagactgatcacctcctccttatattagttgctttaggctgctgcactttcatgtggttgattggttggattgaagtatacaccacctgttggagtcccgtttctcgcttattccttcagtagagtaggcaatctttgaagccgtttctccagttcttccccatttgagattattgactatgaatacaatcttgttgatgcatggctcatttggttcccacattattcttccccggaaaatgatgtgcactcccatgtttgtgttcatggtcatgaactcatgatgatgatggtgatgacggtgttcatggtcatgtataatatgttcattctctgtgcggtcatcatgtgactcttcagataccgcactttcgatcctgatccctcttcctccgtagtcgtggaagccgccgacgcgcctgccaggatggggtccccaccgcagccacagcccacagcccgcggtggagaggcgaaggcgcagtaggaccgcgaggcggagcgtggccacgccgtcgccgagagctgccgccgtggagatggccggggaggcggagcagagcgccgccgccgccat

SEQ ID NO: 49607 - DNA, 294 bp, Oryza sativa
  Clone ID: PAT_MRT4530_52175C.1
tctctcatcttccggcggcgcaccagggtggggtttttgaggagtgttagtctgcgccagggacgcggttcgggcggcgagggcggcgcagctcctggcggcgcagtcggcaaggacctagggggggggggggggcatcctgcataccaacacccattttggaccttccataactctacaattcaagatcttgcagcaaccgctgcaaactatagacggcgggatttgacagcctggctcccaagaccaagcacatactggtgcttggtggactacttgattttcgccttggcg

SEQ ID NO: 49608 - DNA, 193 bp, Oryza sativa
  Clone ID: PAT_MRT4530_52176C.1
tcaaccttcagtgattcggtacccactgaacaacatgccataacttaaattccttgcaatccaggttgcaggctagcagccaggcttctcccttttgtattgccagtgaacaattttgccttgtatatttaggccatgtgtgcataatatgagtataactatcaggatgccacacatttccaccgttaggctc

SEQ ID NO: 49609 - DNA, 211 bp, Oryza sativa
  Clone ID: PAT_MRT4530_52177C.1
gtacaatccatcgattccaccgtgtttctacctcatgtcggtgacgacggcatccggaggctgccctcggcgtcaacaagaaggggtgaaggcaaggggggagggggactactgcggcggcggaggcggcagcgggtggaatggcgatggcgacgagatcgatctagggcgccaccatgagctagagccaacgatgagaggggaggagtga

SEQ ID NO: 49610 - DNA, 568 bp, Oryza sativa
  Clone ID: PAT_MRT4530_52178C.1
gaatatttctcctcaactaattttgcaaacggagctcgggatgcgaagaattcgacggaggaagcggtgtcagctacagggcacggcacgggctgctggagctggaagatgaacagtatccaaggaggtaaagtggactttcggctggctgagaggaggggaggccggcggcttggactgggccgacgtgggccgcttggccacgtgcgaggagggagagagttgggccgaatacggcccaacggcttaggggaggatttaaaaactttttccaattaaaataatcactgaaatgatctttgaattgttaaaaatacttccaatgctcaaataatttcaagagcgcacggcgtcgagcggcgatttcgtgcggcggtcgtcgtcctggctttgtcgtcgttgcgattggtgcagtggcagtgggttgatggtgtcggacgggcgacggcgcgccaaggaggtcgggcacgcgcaagcggccccgaggccgacgcgcggcgacacggcgcgcggctattcggatgcccgggcggcgcgcgtgaaggggaggaagaggcaaagaaagcca

SEQ ID NO: 49611 - DNA, 797 bp, Oryza sativa
  unsure (1)..(797): unsure at all n locations
  Clone ID: PAT_MRT4530_52179C.1
ataggagacaacgaaggaggcggaccgacagaaggatttcaagaagaacaaggggatatccattcctctcatagagcacctgcttgcaagtcccacagatacaatgggttttggtgaaagcacccagggcaatcaacgtaagcttgatggtcctgggaaagtgtcaactgaattatccctagtcaatctagaagctaaaaatttgcatcctaaacctgagtgcaaccaacctattgaacacatacctaccaagggtatgaagtgtactccactgctaccactacctacagaacatgctgatgatgagcctatatatgtgaatgcaaagcagtaccatgcaattatccgaaggagacaacgtcgaaaaattgttggatcagaagataaagtagcagcaattcgaaagaggatccttgttgaggctcgccaaaagcaagcaaaattgaggcatagaggaaaaggcggacggtttattagcatagaacatccccttgaactttctatggatgatcagatatcgaaaaacggaggaagtgcctcgccttcttcatctacagtgtcagaaaactctagcaatgtgaacggttttacaggagatctctaatgccatggatagcagcaaaggtcaatcgcaatggctacaatctgaagaaaaaaaaaatctctagatgaagctgaacgtacatgtgcaacccacattattgctcatgtggcaaatggcaaatgatccctatctttaactatttggccgtgtgcttgntggcttagctatttgaggggtgcttagcaactcattt

SEQ ID NO: 49612 - DNA, 519 bp, Oryza sativa
  Clone ID: PAT_MRT4530_5217C.1
atgaaatgccgacccgggcgccgagacgtggcagcatcgttccgcaccgtgccgtctacccatgcacccacgcatcgcaccagggccgcgtcccgccaatcccgtaacaagccaaggccgcgccgcgccaagccgcaaatcccggcggaatccgaccatgtccctcgctcgggtttctctctaggagacacggtgccgcgtcaccctccgttccatcacggtgtcccgttgccaccgcctcatgacaccatgtcgtctggtcccgagctcccgtggacgcgtgtctcctccaaccatcgcaccgcgtccatgtcatccacctcctcgtgggaagtcaccgagcccgcgcctctctctctctctcacatcgcgtcgccaccactgcgtgacgttgcgctcgtcccatcgccgtccatccgctgttgtgtgcgtcacctcgcctcgcatcaccaccgttgcatgacgtcgcgccatcgcctcgccatctcctctatcccggaataccgccctagcctctag

SEQ ID NO: 49613 - DNA, 244 bp, Oryza sativa
  Clone ID: PAT_MRT4530_52180C.1
gcacgaggccccttttttttttttttttttttttttttttttttttcatcagaataaaaaacgttgtcgaaccataaaaccggatacgcggggtcccttaactatacacaaccggtcacccgaggtacttcggtggttttgaacccgtttttggtctatgtggcggctgagtcagcgtgggaccctgcgtaggacccacgtgtcaacgtgccacgtcatctctctctttccctttcttttttct

SEQ ID NO: 49614 - DNA, 1804 bp, Oryza sativa
  Clone ID: PAT_MRT4530_52181C.1
atggcggacgagttacaacacacagatgcaatgcccaaggatcttacgttcgatttgataaaacgtatcacagatgatttttctaagaagaatcaaattggccatggtgggtatggaatagtatacaaaggagtactagagaatgggaaagagattgctgtgaagaagctccatgacatagagtcactcgatgatgagaagtttatgaatgaatttgttaaccttatgagtgcccaacacaaaaatattgttcaattagttggctactgctatgacacaagacgtaaggttgtactgcacaatggcaagtatgttgttgttcatgtggaggaaagagctctctgcttcgaatatttacagcgtggaagccttgacaaatatctttctgattttgggctgtcaagactcttttctgatacactaacccgtcatacaacaaaaaagtatataggaacagtcggatacatgccaccggaatacattcagatatgccatatcacagagaaatttgacgtgttcagtctgggtgtgataatcattgagataatgacaggaactaaggaaacgtcaaaacgggctgacatgtctccccaacaattcatcgaactcgtccatgaaaattggagaagaagatttgagcaggcaaccccgatgtatacatcagaggaagtagagagtcttcgacttcaaatgaagacatgtatagaaatggcgttgcagtgtgtggaggcccagcgactgaaaaggcctacgatagccgaggttgtcagcagattgaatatactagatgatatggttcgcaaaatatcaccgtcacttttactttataagccaccaattgatccattgtcatctggagaccagtttcgtaaaggctgtgcttgcaaagattgggccctggggaggaaatgcagggaaagctcacaacatcaaggtggcgtcccatcgtctgctaagtgtcacagtctggtttgctgatatagttgatgcacttgcattttcttacgttgaccttaaagggaagacgaagcaccaagcaggcccgtggggtggccctggtggaagtgctcgtacggttcaatttgggccatcagaatttctgacagaaatttcaggaacaactggcccatatgtgtgtgcagtggccgatgtcgtaaaatcacttaccttggtcacaaatagtggtagctacggaccttttggacagggagggggaaccgctttccacacttcgcagagcaatggaagcattgttggcttcttcggtcgtgcagggggttttcttcattcgatcggtgtctatgttagtcccaatcgaccaactcttgatttgagcagacattttagggatgcgttgcaagcacttaccaagttcgggccgtggggaggcagcggagacatggatcgcgacatggaggtggtacctcaccgtttagaaagcttgacaatttgcagtgcagatatcatcaactcgcttgccttctcatacaacgaccataatgggaagcaacatacagttggtccatggggcggtgatggtggcgctgctttcacgattcggcttggagcttttgagcatataaaggggctgtctggaacagtcggttcatttggcatgctacaaaatgtcataacatcgcttaagttcacgacgaatctcaatcgcacctatggaccttatggaaaaggaggaggaactccattcgttgttccggtggaggatgctgccagcattgttggcttcttcggccgtgcagggccctgtgttgaggccgttggggtctatattcgcacatacttgtag

SEQ ID NO: 49615 - DNA, 195 bp, Oryza sativa
  Clone ID: PAT_MRT4530_52182C.1
tgggtaagccgatcctaagggacggacaaaccaaaaatgagagcgcgaccacgcgcgtgcacggacggggaacactcttaagaacctcagagccggcccggggctgctgcccgaaacattaggaagtcaccagactgcggcggacgcctcgggaagagtcctggtttctgcttaacagtccgacaaccctggaaa

SEQ ID NO: 49616 - DNA, 222 bp, Oryza sativa
  Clone ID: PAT_MRT4530_52183C.1
gacgccgaattccggtcgaccacgcgtcgccacgcgtcgatgcgtgaagcaagactagcaaggacggtgggctactgcgagtacttgtgttttggagtactaacactgagtttgaactggtggaacgctgcaggatctgagtaagcttaccctgcattgagttgcatcgggagagaggctcgcacttataaggacatgtgggaggtattctaatcacagtct

SEQ ID NO: 49617 - DNA, 2622 bp, Oryza sativa
  Clone ID: PAT_MRT4530_52184C.1
atgggtccaccaaaaggatctcgcacaattaccaagatcacaataaaggggtattacgatcgacagcatgacgaggatcaaaacatgtcaatcaagattaaactaaaaaagttaaacatttcaattttagaccatctatggagtcatgaggagcttatgcgctttaatgaagcctaccgtctacatgtgaaaaactggaaaaagttcagtgcatctgtgggtgggaacttagtagatacagtaggagcactatagagtatgcaccggactttgttatctcttccagaacgtaaaggtatggccatgggattagttgcattggtagcttgtcagtacactggttcggatgtctccaagagtcattaaaaaagtgatcaaacagttaaagtatttcagaaggtacggtaaagtgaagccacagtgcagaaatagaaggaaacgactcatgctcacagctcctatcatgaaagaagaactccagaatcatctactttaatgaaaagatactatggagaacttgtcaagatcattacaagacatccttcaaggaaacgtactccaagtgtacaagatatttttcctgcagacatgaatgttgctcatgctggcataccagaaacagaaaatgccatcaactgtaccaaaaaggctagtggagctaccaataatgagcttgaatgctcatctcatggaagtcctggaatctcagaatcagccaagtttgttcaaggccagactttcctggaagctaaaggaactggaagcttgaaaaagagaagaattgagcagagtatggaacaaggtcagacaattaaagatgagcataaaaccgcaatggtggctaaagaagggaatgaccttactgaatatcagagacttaccaatctattttccccagatgagatgttggtcttagatgtcttggagagtttagtgactgtacccagtaaaatatcagagcctaagattaatattccttcaggtacacttggaagggatgattctgcattgtctcacagaagggaggaaggtccttcagttaagagatccaaacaagggaagcaagttggtgaatgcagtgcctccaagacaaggaataaaaggagaaagaagttaatagctgaagaggtgcctactgaaggagtcacttctaatcatttagatttgccagaagagcgtcaagttgatgccactgagtgcgccttgaattctgatctggaaaggggaacagttgatttacctgaatcaactgcaaatatttctaccaaaatccctgatttgccatcacaattaaaacctgagataaatatgtcgagaaggagcaaaagaaaatccaaaagtccttgtggttctaagtatgtcgtttgcaatggagcagataatttacaggctaggagattgcagcattgcttgtcatctgagtcacttcgtagatggtgtacatatgagtggttttacagcgcagttgattatccatggtttatggataatgagtttgtgaactacttgaattttgcgaatttgagccatctgtcaaggctcactcggtccgagtggagcacaataaggagctcacttggcaaaccccgacgtttttctgatcattttctggcagcagaaaaagataaacttgaaaattatcgcaaaaaagttaggcaatactatgctctactaagtgaagattcgtgggattctctaccaccagacctagctcgaccattttcaattggtcagcaggatcgttataatgtccagtttgataggcctgaccttggtgttgatgaagtaaaggacactgattgtatgcctgtaaactggttggataatctgcctgatgacctcaaaaagaggagcttcctttcaaataattcacacaacagagtagaggttgagcaaattccaaagtttacttcaaaagagaactgggatcatatcagcggagaggccgagccatccaaaaccatgcacataacttcagatgaacaggttgaggttttgctgtccaaatctatttttaagaagcattacgatcatagtctatctatccatgggcaggttgaaattgctgtggatattgaaagactatccaacaagagtacatctggtaattgtggaccattacagccgctccagtctgttgatgacaatgtacggagtagaggtttgtcagagcacaggaatggtcacaatgatgagctagattcttatattacttcctttgtccaaatgtcattggcacaagccaagcagatggttgacgaagccatgaaggaaatctctgagaatggtaaaagttctctagaagaaacaggcatatcaaatgaagcgacggattgtacaggcccagaaccggaatctgctgctaattctgaacttccgcgcaacctgatattcaactgcattgccacgcttcttgcaatcaagcattttagcgagggccgacatccacctcctaacatagcaggcgtcctggagcgtgcttgcttaatgctgcgaccaagctgtgcagagaacctgcccatctataacgaaatagagaattttatcgctgtcataaagaaccagatactagctcttgtgccatcggcatcaagcaatgccaggctacccatgtacatgtaa

SEQ ID NO: 49618 - DNA, 1009 bp, Oryza sativa
  Clone ID: PAT_MRT4530_52185C.1
tggcagaggaggggctagggcgcgatcgaacacagtatctcttcttctcttctgttttcttgtgagccgaaagcaaccttgatgagggcttgtcccagaacttgcactgcttcgccgctgaaaccactgagtgaagtcggtgcttgagacagtgccagggttggcaaacccatcttggcatatgttccagcaaacataacatcagccgaacttcctccatcgatcaggatgcgccggacttcaaaaccggctatttctgctgaaacgaccaacgggtcctggtgcaggaatagaactccttcggcatgttctggtccaaaagatattggctgtgacaagtatcttggaacgctatcacctgctgagacaatgttgtgcacggcctgaagctacatcttcttttgccgtttcgacacttgtgaggggggatcagatcttgtgatgactcgtactactcttcgcctcacgtcgttcttttcgactgctccccttgctccgctcggggttgctggggcaggcggtagcgccgccaccggggcttccgcctccgtcgatcggatcgtgtcggctgcggcgagggttttcgggagccctgcgtgcgagccagcaatttcgccgctggtcaagacgaaggggaagtgtgcggccaccgaagcatctacctcggagtattcccttgcgacgccccacttcgcccctggtgacttcgagacccgggcggaccttattccctttgtggagggagtaagcaatcttgtcttgcccaccggcaccccgagcatattcaccgaacttaatgagttcgacgaggggtgttccaccattaaaagtttggcggttcggattcttgcggctcactgttcgacggagcgaaccgtgcgggcccgttttgacggttttaaaagccgtcttcgggccaaggatgatgaaataagccgcaagaacttggaggtggagtcagcggtaaaattgctggctctactgccagccaccacaatacgcctacaag

SEQ ID NO: 49619 - DNA, 1930 bp, Oryza sativa
  Clone ID: PAT_MRT4530_52186C.1
cggacgcgtgggccaagggccactttattgattcatcaataattgtttcttaagatcaaaatcatataagatgtttttactccaagctagattaaatatgcacaactgctttattcagccatagggttgagattcggcggtcaatttctcactacattggcaacgggtcctgcttgtattatgtctagcatagattatatgtgggcatttggattggtcttataatctgtttcctataagtattgctgactgtgtctgtaacgaaatttcaccggccgagggctgcactgatcgattccatcactctctctctctcgcctgctcgcggttgcctgtgcgttcgtctcgcgatttctcctcctcctcctgggatcatggcgatgtggagggcggcggcggggcatcttctcggccgcgcgctcggctccagggccgcgcacacatcagcaggcagcaagaagatcgtgggtgtgttctacaagggcggcgagtacgccgacaagaatcccaacttcgtcggctgcgtggagggcgctctcggcatccgcgaatggcttgagtccaaggggcatcactacattgtcaccgacgacaaggaggggctaaacagcgagctggagaagcacattgaggatatgcatgtcttgatcaccacccctttccacccagcctatgttagcgcagaaaggatcaagaaggcaaagaacctcgagctgcttctcacagctgggattgggtcagatcatattgatctgccagcagctgctgcagcaggtttaactgtggcagaggttaccggaagtaacactgtgtcggtggcagaagatgagctcatgcgcattttgattttgctcaggaacttcttgcccgggtatcagcaggttgttcatggtgaatggaatgttgctggcattgcctatagggcttatgatcttgaaggaaaaactgtggggactgttggggctggtcgtattggcaggctcttacttcagcgtcttaagccctttaactgcaacctgctgtaccatgacagacttaaaattgacccagaacttgcgaaagaaatttgggccaaatatgaagaggatctctctgctatagaaaaacaagaggtatgtttaataaagaaagaattgcaaagatgaagaaaggtgtaatcattgtgaataatgctcgaggagcaatcatggatacccaggcggttgcagacgcttgctctagtggtcaagttgcaggatatggtggtgatgtctggttcccccaaccagcaccaaaggatcacccatggcgatacatgcctaatcatgccatgacccctcatatctctgggactacaattgatgcacagctgagatacgcagcaggagtgaaggacatgctggacaggtacttcaaaggggaagacttcccggtgcagaactacatcgtcaaggaaggtcagctcgcgagccagtaccagtaataacccttccttgtgtgttgggtgtccatcctgtggccaccttcccgcagtgaagggaaacagagattcggataggaaccaaaacaccttgtgttgttgttgttgcctgagtgttccctgagaaactattggacaccggaaataatggatgcctgccatggcaaccatggctccgaagaataaaaagccctcggattaaacagttcagttcaaaaaaaaaaaaaaaaaaaatatatgtgctttctgctctctgtttttgatgtgaattttttggtccagtactccagttgcacataacaattgtacttgtacctgagtacctccatgccaggggccgggggcaccctttgccttactgcctcggcagtctgttggagggctgcagtctgttatttatggaatttttggttagttgttgccttaaaaaaaaaaaaaaaaaaaactcaagactagttctctctctctctc

SEQ ID NO: 49620 - DNA, 449 bp, Oryza sativa
  unsure (1)..(449): unsure at all n locations
  Clone ID: PAT_MRT4530_52187C.1
ggggcanctcctgagaagagcaccgggaactatccgcctcaaaaaggaaaggggaacgaacccaaaccaacggcaactacgagttattaagcgccgaaaccaaagaaggggacctcctttacgcttgatgcaggatttacccaataaaaagaaggtcactcttctgctgacctgagcccaaaagggaagcgactgaattccaattcttctttgctagcgcttgactcctggggaaatccattaacaagctttaaaaggaaagccctttaattggatttttgagataccaggtatttatagggtaaggtcgaaaattcactccgggggccggctaattaatgaaaggaattcctggaggggaatcaatcgaaaagaatgcccgcccctgctacaattacttactctttaggactagagggcgaagccggctccccggcgccccccctata

SEQ ID NO: 49621 - DNA, 412 bp, Oryza sativa
  Clone ID: PAT_MRT4530_52188C.1
aatccgagggctttttattcttcggagccatggttgccatggcaggcatccattatttccggtgtccaatagtttctcagggaacactcaggcaacaacaacaacacaaggtgttttggttcctatccgaatctctgtttcccttcactgcgggaaggtggccacaggatggacacccaacacacaaggaagggttattactggtactggctcgcgagctgaccttccttgacgatgtagttctgcaccgggaagtcttcccctttgaagtacctgtccagcatgtccttcactcctgctgcgtatctcagctgcagcaattgttcatttgccgtgaaatttcgttacagacacagtcagcaatacttataggaaacagattataagaccaatccaaatgcccacatataat

SEQ ID NO: 49622 - DNA, 291 bp, Oryza sativa
  Clone ID: PAT_MRT4530_52189C.1
atggcaaccgctgctcccgccgcggataaacgcatccggcaaccggcatcgaacgttccgatcatggcacagagctttgctccgacaagagctaagctcggagctagtaacacagtgtcagtggccctgtgccgaaccatggacaatgatgatggccttatcccctctggtaaccagacatggtgcctctgccttttttacaaggcactcaagctctcgaagaacgatgccagcaatcagtactgcagaagcagtgcatctgggaagtatattaaggatttaagaacatag

SEQ ID NO: 49623 - DNA, 3042 bp, Oryza sativa
  Clone ID: PAT_MRT4530_5218C.1
atggccgcctcggcgccgccgccgccgccgccgctgccacatgcgcactccgacagcggggaggcccccgtttccctcttcatcgacaccgacctcgggacccgcttcgccctgctcgccgccggcgactccaccatgcgcgacctcaagtcgacggtggccgcggagcacgccaccgccttccccgacatcggccccgtcgccgtcaaatccttccaggtgcgacggaagggtgcactgtatcacctctctgatttgatgacaataaggagcgccttcgccaaaatcaaggctggatgctttctgcatgttaagatgacagtggtagtgacagatagtcactgttgcagagacacttcaatggaggatagaggaaaatccagtgaaggttgtcctggagctgaagttcatgtggacaagtgtgttcttaagattcctgcgctgataccacaaattgcaaaccgtcgtcttcctgggctggaaaattccagcactgctggaatggaaaagaaaaggaaaaggagtgaaccagaggctaccagggaagttgtttctgctcaggagatggtgaaaccatcaagtggagcagtggaggtaccaggatccattggtcaagtcctgcttcagaaaaacaaccaagagctgcaagttatcaaaacagaaacacccaggggcagcgatgtacttggagtgcatggaaacactgtggataaaggtgcccttagtgcagtgttacctctgaaatatccagcggcaattcactctgatgctcccatcagctcacctagtcataataaggctagaggagaaaaattggaagtactgccaactgcacatgactcgtctcatttttcaggtggtgtacctgatgaaaatgcaaatgcagaactaagagaatctgtttctttgaggccttctgacaacacaagtgtttctaataatatttcaactgaaaatgttgtagtgcaagatgatgacaaaaacaaagccactaaacgtcagagaaagaagatttccctaaagcatgtccctacagataatgataaaactattcagtctttggatgagcaagttaaccaggttgctattgaggacttaaacggatcaaatgctaccaaagcagatttagttcaaggagggtctgtaattgatggtcctgcaggtactgttgaaaatgtacagaagaaaagcaggtctaccaagattcgtacacctaaagtccaaaaggctaacccttctgcacattttgaagatagtaaatccgccaaggacagccagggcaaatgtgtaagttacattggtgagagtgggacccatagtaatgacactgcagtaggagctccaacacaatcgtttgcagttcaggaagatgccacagctctcagaactttaacccctagtgctctaaagggaaggaagaaatcttccaagactggacttcagagtcagaatgcctctttggatcatggttctgatgtagatttgatgaactacaaggctgaacatattacagctagtcctaaaaaatctgctgttgctgttgaaccaaatgaaaaaatcaacttcctcgaccattttagccccaaagggactaatgatcaatatgtttctgcagaaaacaaagaaaacggcagagaggaaactgtaagagaagttgaggatgaaagtaacaaaagagaagtggatctgcagtctcagctcgctgataatgccaaaccaaatgatctgctacaatcgcatcatatagaaaaaactacatcaactaataattcacctggtgatgttggtgtgccatctgattcaacacaaaatgtggacatagcagatggaaatgtgaagaaaggtaagcagaagaagcgaaaaaagaaatcagatttgctcaattcagttccccagaaggtggatcctaacagtgatcatcgagacattgacaatggtgtacaagatttttcgttttctgttgcacaggaaggaagaatggagcatgacaggaaagagaataacaataatgtaatttggaacagtagtatgctgacacaggacccaaaagatgccacatgtgatagcagagtaaagaagctcaaccaaagcaagagtggttctgataaccagggtaatttgccaattgataaggatcatgcgcttatggacaaaggacaaagaaagtccagttctcagacaaagccccatgctgagagtaaaaattttgacaggtttagcaatggaaaggcagatccaaattctaagtctataagaaatcttgttaagagcttttccatgagcccaccagcatcaagtgacagcacacagggcacaccacaaaatagtcgatttcgactagcagctcggaaagttccaagaaaaaggtatgagcaaaccagtggcaaatccaaaaaagacaaaggaactggtacaattttcaatgatgccagcagtgatggctctgatgatgaattgggcatcggaagtgaaaaggctgccattgaaacttcttcagatgatgcatcctcatcagctgactcaggtatttcatctgcagcccatgatagtggcgagcctgatgacgatggcaatgcatcactatcacagaaatctcgcaaaggggggcttggctccatcctcagaggctcttgtagttacaagaaggcaaagcagaaacaagccgtgcaattggatgacaccgaggttcctgatagccagccaatggacattttctgagactgaacttgatacttgaaagaagaaacacggacagctttggttttccattattttcatccacctgattgcatgccctggagtttgagcattgcatattagtatcccaaccagccttgataccatgtagtggaaagaaaaatgcacttggctgattctcatgttaccacacggcttttctgctccttgaactaaatgttttgccagttactaccgtggctatttttgataaccgagtgcagtgtgcaacagctcgggttttgtgtaacttacaaaccccagttaccaccaccatatagtagtaatttatccttcaggtatcgt

SEQ ID NO: 49624 - DNA, 1615 bp, Oryza sativa
  Clone ID: PAT_MRT4530_52190C.1
atggcgatgtggagggcggcggcggggcatcttctcggccgcgcgctcggctccagggccgcgcacacatcagcaggcagcaagaagatcgtgggtgtgttctacaagggcggcgagtacgccgacaagaatcccaacttcgtcggctgcgtggagggcgctctcggcatccgcgaatggcttgagtccaaggggcatcactacattgtcaccgacgacaaggaggggctaaacagcggagaattaaggatgatattcatctggttgatggaaggtggaaaggaggttcttgatgtatgtgagctggagaagcacattgaggatatgcatgtcttgatcaccacccctttccacccagcctatgttagcgcagaaaggatcaagaaggcaaagaacctcgagctgcttctcacagctgggattgggtcagatcatattgatctgccagcagctgctgcagcaggtttaactgtggcagaggttaccggaagtaacactgtgtcggtggcagaagatgagctcatgcgcattttgattttgctcaggaacttcttgcccgggtatcagcaggttgttcatggtgaatggaatgttgctggcattgcctatagggcttatgatcttgaaggaaaaactgtggggactgttggggctggtcgtattggcaggctcttacttcagcgtcttaagccctttaactgcaacctgctgtaccatgacagacttaaaattgacccagaacttgagaaagaaattggggccaaatatgaagaggatctcgatgctatgcttccaaagtgtgatgtcattgtgatcaatacacctcttacagagaaaacaagaggtatgtttaataaagaaagaattgcaaagatgaagaaaggtgtaatcattgtgaataatgctcgaggagcaatcatggatacccaggcggttgcagacgcttgctctagtggtcaagttgcaggatatggtggtgatgtctggttcccccaaccagcaccaaaggatcacccatggcgatacatgcctaatcatgccatgacccctcatatctctgggactacaattgatgcacagctgagatacgcagcaggagtgaaggacatgctggacaggtacttcaaaggggaagacttcccggtgcagaactacatcgtcaaggaaggtcagctcgcgagccagtaccagtaataacccttccttgtgtgttgggtgtccatcctgtggccaccttcccgcagtgaagggaaacagagattgggataggaaccaaaacaccttgtgttgttgttgttgcctgagtgttccctgagaaactattggacaccggaaataatggatgcctgccatggcaaccatggctccgaagaataaaaagccctcggattaaacagttcagttcagttcgtctatgtatgatcttttatgtgctttctgctctctgtttttgatgtgaattttctggtccagtactccagttgcacataacaattgtacttgtacctgagtacctccatgccaggggccgggggcaccctttgccttactgcctcggcagtcggctggagggctgcagtctgttatctatggaatctttggttagttgttgcct

SEQ ID NO: 49625 - DNA, 424 bp, Oryza sativa
  Clone ID: PAT_MRT4530_52191C.1
ggggaaaaacgggaccccatttttttgaaaaacaaaaaaagtatcctttttgggtccaaaacggggaaaaaggtttccataaaactggatccccccattacagttttttccaaggaggaaggggggcgggaaattttttgcaacatttgggggcagtttgtttgtttgggaattttaaaggaaaaactttgttttccgggggacccatgggcttgggggttccctaattggctttaaaactttggaaaacccccctaacaggggggggggaacaagctttccaaaaatccccggggttctggcccctttgggtggcggcccgttttttttcccaaatttaaatgatgggagggattgggggggggctccctttttaaggggaacccgggggaccccccccgggaggcccacgggaatggacccc

SEQ ID NO: 49626 - DNA, 183 bp, Oryza sativa
  Clone ID: PAT_MRT4530_52192C.1
atgatggccagagacccaacatcgccaagcgagctcgccgccctgaccagccgctctccaaatccagaactcctgggtgcggcggctagggtttcatcgtctcccaagccacgcatgtgggagcaacgcggggcccctcctaatacaaccctctcgtttatcgtgaacgtgcttaatttctaa

SEQ ID NO: 49627 - DNA, 1747 bp, Oryza sativa
  Clone ID: PAT_MRT4530_52193C.1
atggccgccacccccaccctctccggctctctgcgcgcgctcgcctgtggagtgaccagagattctactccagcttgctactcattttcgagggtgttgatcatggatccgacctcggtgccatggagctccatggtgtacggtctcctggggctcgcgcttctgtggcaggtccaccggctgctggtgcggctgtggtggcagccgcggcggctggagcgggcgctgcgggcgcagggcgtccgtggcacgtcctaccgcttcctcaccggcgacctcaaggactacggccggctgagcaaggaggcatgggcgaggccgctgccgctgcggtgccacgacatcgcgccgcgcgtggcgccgttcgtgcaccggaccatcgcggagcacggcaaggcgtgcctctcctggttcggccccatccccaaggtgaccatcgccgacgccgagatagccaaggacgtgctgtccaacaagatgggccacttcgagaagctcaagttccccgtgctgtcgaagctgctcgccgacggcgtggccaactacgagggcgagaagtgggccaagcaccggcggatcctcaaccctgccttccatctcgagaagctcaagctcatgctgccggcgttttctgcgtgctgcgaagaactggtcggcagatgggcggcgtctcttggttctgacggttcgaatgagatcgatgtttggccggagatgcagagcctcaccggagatgtcatttctcgcaccgcattcggcagcagctaccttgaaggaagaaggattttccagttgcaggctgagcaacaggagcttttcatgggtgccattcagaagatctccattccaggctacatgtccttgcctaccaaaaacaaccgaaggatgtatcaaattaagaacgaggttgaatcaattatacgagatctggtccagaaaaggatgcatgctatgaaagatggcgagagaaccaaagatgatttgctcgggatattactagagtcaagcacgaggcatgcagacgagaatggacattcaggcccggggatgaccatcgaagaagtgatggaagagtgcaaagtgttctattttgcagggatggagacgacagcgatactcctcacatggaccatggttgtgctaagcatgcacccagaatggcagcaccgtgcaagggaggaggtgacgatgatactttacgaggttctccgcttgtacccgccgggaattgggtttgtccggcaaacatacaaggagatggagatcggtggcgtcaagtaccctgcaggcgtgatgatcgagctaccgttgttgttcatccaccatgacccagacatctgggggagcgatgtgaacgagttcaaaccggagaggttcgccgaggggatctccagggcgtccaacgatcatggcgcgttcttcccgtttggctggggcccgaggatctgcatgggccagaacttcgcgctgctcgaggccaagatggcgctgtgtatgattctccagcgcttcgagttcgagctagcgccgtcttacactcacgctccccatattgtgttgatgctgcgtccgatgcatggggcaccaattaagcttagggcaatctgatcgtcgatcttgtgatgttcatatcatgcattgtaggctttttttttaaaaaaaatggcatgtttggtttataccaatcaaccatgccaccaaaaaataatttagccatatcaataaattaattctccatttagtttgt

SEQ ID NO: 49628 - DNA, 137 bp, Oryza sativa
  Clone ID: PAT_MRT4530_52194C.1
tttttgatgcaaatggacatcttctgctacaggggcatcatgaatatcgaaaagcggttctaacctcaagaagacacatgatgtgccttgggcagtcagtcctcctagataacacaaactaaaaaagctgaagaata

SEQ ID NO: 49629 - DNA, 703 bp, Oryza sativa
  Clone ID: PAT_MRT4530_52195C.1
cctccttcacgagcggcagtattttgcaattttatttacagatggaatttaaaattgctctcaaaagcaaaactggtagtaagactatgtacagatctctgggaacagagtaaaggttgactgaccaacaagagtaacagcactcctgactggtaaagtacattggatgataagaatattggcccaaattctgcacaggactacaggagtacatgtaacgtgtatgatcaaggcaaacaaaatcgagtttttagaattttaatttattttttttttttaaccaaaaagaaacattaatgatgaaaaagaaatggtttggcaaaaagaacacacaaaacgattatggtgtctccactaggcggacggagcgtggaagcaaaaattcagcaaatatgggaaaatgtgaagaaggataaacaccatcaatattgtcatttatgacttcacagagtgcaggaaccagtggacgccctctaaacagtatccagtcaatatgcaagtcctgagtctgtcgatcccagcagagacaaagtgctctaaatattaatttcagaaactctagggcaccttgtttctcccctttaaatccatgatacgtatgtatgagtgaaacatttttgcggacacgagcatttggccaagcatctctcatatcacccacaacaccatgttctctgtaatgaaaccagtatgagataagtca

SEQ ID NO: 49630 - DNA, 237 bp, Oryza sativa
  Clone ID: PAT_MRT4530_52196C.1
atgtctgagcaggtcagtgagagcgatttgtacgacgaggagctcatcaggaacaggctggaggagctccgaaggcggagggaggaagggtcgctccgggatgtggtgttctgcatgcgtggtgatcttgtgaggaatttggggaacatgtgcaatcccgagcttcataagggcaggcttgaggttcctaagcttataaaagattacattgatgaggtttctgcccagctgaaaatg

SEQ ID NO: 49631 - DNA, 266 bp, Oryza sativa
  Clone ID: PAT_MRT4530_52197C.1
gatatcttacagagatctgagctagtaaataaaatcatagcaatccaatcccccttttgtaagagtatggccatcacacaagttgtacatttgcagactcagcttctgagagaaagaacctgtgtctgtaatatctggttatcttccaataacccggtcatattcaagcaggagctcctcagattgcttctgtagggccattgacatgtggcttcgggcctccaattctctgcctttccatggctcctcccggatttctgatttta

SEQ ID NO: 49632 - DNA, 2794 bp, Oryza sativa
  Clone ID: PAT_MRT4530_52198C.1
ccggttaactgaatcagcagtggcatgaaaaaaattgctggtcagagccaagctgcagctgctgcagggtttgtatagtgttcttgtattgtacagggttgagggttccaactccctttactagcactagttattattacatgatggaacatgtcatcatctcatctctgctctcttatacttaattaattaactctcttcattaattaatcactcgattaagctataaactctctgggtgaagcagcagcatccatccaagaaaattaagaagaaatgaaacttaattttccagggttaatcattaattgacccttcttgttcttgtcttggatggatcagcagctctagctagatggatacttggatagctgacgccgccggcgatggcgatggcgacggcgagcttcaccttggcttgaggcggtccaaggcgaggtaggcgatgacgcggtagccgacgaggaggagcgccatgacgcagacgtcgacccagtggttgttgagcccgacggccttgatggccgggaagtcggcgacgaggcagcgcgcgccgccgccgccgcagtcgtagtgggcggcgccgtcgccgaactggatgccgatgaggaggcggtagcagtagaagctgtagttgagccaccggagccagccgacgaagggcgggatgtgctggacgtagtagccgccggcgatgaggaagaccatggtgatgacggaggcgagggtggtgccctgcttgacgtccatgagcacggcgccaatggcgagcccgaggctctgggcgacgaggacgctgtagaggacgacgaggagggagaggaggaaggggccagggcgcgggtcgaggccgcccatccagtagaggatgacgacgaaggcggtggggagggcgagctccatgggtaggtcggcggcggtgcgcgcggcgaagtaggaggagaggcggtacatccccgacgacctctccttcaccagcatggggcgctcgagcgggaaggtgaacacggcgttgtagagcgggaagaagccccagaagacggagaagaagaagatgagcgccgtccggtcctgcaggtgcgccgccggcgtgcgccaccacagcagcccggcgaggctcgccacgctcagcacccctcgccggagcagcaccgtgaactgcgcccaccacccgttcgtccactgttccgccgccgccttcccaccaccacgcctcctcctccccgccaccgccgccgccgccgccgcgccctgaccaccaccaccgcctccttcccgcgcgcagatgtccagcttcaccgccggcgcaatgtgccgctcgtacgccgccgccagcttccccctcacctccttcagctccgcctcactccccccgccgttcgccgccgccgccgccgcgccaccaccaacatccccatcaccaccaccgccgctgatctgcggcgcgataccgttggcgaggtcgagcatgaggtcagccgggttgagcgacagcggcgaggcgaagccgactgaggcgaagtaggagagcgcgtcagcggcgaggccgtagtagatggggcagccgtcggaggagaggaggaggaccttgtcgaacatgtggtagagcctcgacgacggctggtggatggtcaccaccacggtgcggccgccgccggcggccatgcggcggagcgtgccgacgatcctggcggcggtggtggagtcgagcccggaggtcggctcgtcgaggaggaggaggctggggtcgacgagcatctcgagcccgatgctgacgcgcttccgctcgccgccggacagcccgcgcacgccgcggacgccgccgatcatgctgtgcgccaccttgccgagcccgagctccagcatcacctcctccgcctgcgcgcgcttctcgccggcgccgagcgcgcgggggagacggagcagcgccgtgtaccagagcgtctcggcgacggtcaggtgggggtagagcacgtcgtgctgggtcacgaacccggtgcgccgcttcaccgcgccggagaacggctgcccgttgtaggtgatcttcccggacagcatcccccgcccgccgccgccgccgccgccgtgccggccgcccagcgccgtcagcagcgtcgtcttgccgctccccgacggcccaagcatcgccagcatctcacccggccgcacaaccccggacatcccgctgatgatcgtcttctccttcgccactgccgccgcacccttcttcctcctcccctccccgccgccgccgatcgccgacgacatcctcgcgcaccaccccgccgccggcttgccgatcttcaccttgtacaccacctcctcgaacttgaggacaagagggtaagagttggcggcggagtggtggccggaggcgacggaggggtgacttgaggtagtggggtggacgatggcggcgccggaggtgttggtggaagaggacgacgcggcggtggcggtgggagaattggtagaagaagaagaagaagaagaagaagaagaagaagtggttgaaggtggagaactgaagtcgcggtggtgaccgtcaccggcgccgcccccgccgctgccagcgggtgtctggtggtggtggtggcggccatgatcatcgccatgcaactcctgaggcggcatggcgatcgatcgatggatgaaaatctctctgtctctcgggtgtttttcacacacaagccactataccaacaccacagctagctaggctgtgggattggatgctatactactacagctgcagtagtggcagctagtagctagctagcttgatcgagctgaa

SEQ ID NO: 49633 - DNA, 394 bp, Oryza sativa
  Clone ID: PAT_MRT4530_52199C.1
tttggtttttttttttttttggtttttttttttttttttttttttttttttttcaacagcaaacgggggaccagaattaggcaaacaaaaatgttaaagaatgcacaagtggggtagcccgcttaaccgaggggcttcacaaaacaatgttagcatgggcccgcttttgagatgcacaatcaaaaacctccgttttggcgaccaccttcctaagagtcaaacattaagattctggatataaagaaagaccctggaaagccttgtgacaaggggggattcccacagggcaaccctgggaaattttaacgagccccgggccatttttattaaaggaccttaattcccctgggttaacgggggaaaacttaggggggcggttgccccttttggggcc

SEQ ID NO: 49634 - DNA, 225 bp, Oryza sativa
  Clone ID: PAT_MRT4530_5219C.1
atggaggtaagcaccaccaccgcctctctaatccatgaagttcttcttctcctagattgtaacccatgcgtttatcctccagatgtgttccctttcatattattgaatattgaccctttatatgaccatcatgttatcccttctcctaacacaaaagttggactaccgcatctggaggctcctaacataaaacatcatggcactaagaacaacatccaaatttag

SEQ ID NO: 49635 - DNA, 5484 bp, Oryza sativa
  Clone ID: PAT_MRT4530_521C.1
gtgcttcgactcttacttcttccaagagttcgagtgcttctaggatcttaccgtttgtgcgttcggccgccccatttgactgtgggtgcgcgaccgacgcaaacctgatttccaggttaagcccttcgcacatttctctgaacttgtcagagtcaaactgcttgccattgtcagtgatgaactcttttggcactctgaaacggcaaacaatgtttttccatacaaacttctgtactgctgccgaagtgatcgctccaaggggtttggcctcaatccatcgggaaaagtattcgacggatacgattgcgaacttgtacccgtttcgcgccaccgggaacggcccaatgatgtccaatccccatctggcgaagggccagattggtgcgatgggctgcaactcatactggggcgcgttttgacttcggccatggcgttggcagctttcacacttcttgacttgctcaacacagactttcaacacggtgggccagtacactccttgtcgaaacactttggaggcaactgttcttgcggcctggtgcgcaccacagagcccctggtgtatctccctcgccatttcctcaccttcggtaaaagagatgcagcgaagcaagggttgaattgccccggagcgatatagctggcctgagaccatcttatacttcgtggctctgagttgcagacgctttgcttcttcttcatctttcggaagccagccagtttcaaggtgtttcacaaacggagttcgctagtcgcatggatcttcgcccagtttcacctggtcaattgccatgacctccaggctatccatgggcaccttggtgcatatagtacttcaaaaaagatgccaggcgaatgtgggccaccataagcagtagatttcgccaaggcctctgcttcctcgttctggcctctaggcaaatgttcgaccgttatgccggtgaagtacttttccagagaccgaacggcctccaaatacctcttcattccttcttcttttgcctcaaagaatttgtcgacatggcctgccaccagcttagagtcggttcggattagcaagcgccgaatccccaatgctttttcctttcttaggcccagaagaatggcttcgtattctgccgcgttgttggttgtgttgaactgcagccttgcggcataccgaatcggcacaccacttggtgaagtgagtactgccgcaatgcccgcccccttatgcgaccacgaaccgtcggaatacatcatccagggttgttcgacgggttcgggctcggggacgaatgccggtgtccattcggccacgaagtcggctagcacttgagacttgacagcagtgcgggcaacaaaatgcaagtcgaaaggggatagctctgctgcccacttcctaagccggccagtaacttccttgcctcggagtatttcgcccaaagggtactgcgatggcactatgactctatggggttggaagtagtgtttaagcttgcgtgaagccatcaccagggcataagtgagtttttccatttcaatgtatcttgtcttcgctccttgcaattcttcggagacgaaatagaccggtttctggcctgactctatttcttggacgagggcagcactgactgccactagcgaagctgccaggtatagtagcggttcgattcctggtgctgggctgatcagagctggcgggctttgcagatattgcttcagctcgtcgaacgctgcttggcattcgggtgtccaattgaattttcccgcgccccgtagggtcttgaagaaggacaaacctctttcggctgcaaggaaacccaacaacttgcctgcgtgaacgccaaaaacacacttctcaggatttagtttcatacctgctgcgggcaagttgtcgaaggtctcctgcaggttggacacgtggtcgaaagccttgcagctttttacgacgatatcgtcgacataagcttccacatttcgccctaactgcttgtaaaggaccttgtataccagcctggcgaaggttgccccggcattcctcaggccgaatggcatcctgagatgacgaaaggtgccgaacggtgtgatgaaggctgtcttggggatgtcggccggattcatgtgtatctggtgatagccggaatatgcatccaaaaaactcataagttcgcagccagctgttgaattcacgagttggtcgatctgtggcaaagggaaatcgtccttcggacatgccttgtttaggtctgtgaaatcgacacacatgcaccatttgccgtttgatttccgcaccagcactggattcgccagccattcaggatggtcgatctcttggatgaccccagccttgagcaatttttggacttcggcttttgctgcttcttggtgatcagcggacatcttgcgcagcttctgtttccttggcttggcgtccggcttgactgccaggtgaacatgatgagatctatcgaaacacctcccacttgattagggccctaggcgaagatatcactatttttcttgagtacctctagaatgttcgcagcctcttcttcgcccatgtcgccccccagcgatacgagctttgtggggtcggcgtcatcaatctgcatcttgattatcttgccgtgaggggcggactttagcgcgtgcttcgcccggtcatgtggttcggcctcaacattatgcactgctctgttgattatggccagatcgccttttgaagcggccgaaggctgaagccccttgaccacgatcactcccgccgggccgggcatcttgagcttgagataattgtggtgggagatagcttcgaacttgttcaaggtcgcacggccgaagatggcgttgtagttgtacggcatgtcgacaacgtcgaataatacttgctcttcacgtctgttttcccctgtgccgaaagctaccagcaactgtgcttggccaagaacttgaactgcttctccgccgaaaccacggagcgaggctggtgctggggtaagggctagggtgggcaaccccatcttggcatatgcttcggcgaagatgacatcggccgaactccctccgtcgaccaggattcgccggacctcgaagccagctatctcagctgagatcaccagaggatcttgatgcgggaacattactccttcggcatctcccggcccaaaagagatttgctggttcagatacttcttacggataggctgctgatggttgcttgcttgctgggtgtcgaactccttgcagagggcttgcacttcttcgacagccatcacagccttgcccgcacggtcggttctgaacttcctccaggtcatgggggcttggccttgccttggtggttgtccctagatcgtcggctgaggctggcgaatagcgagaggaggtggttcggcaacctgagcttgtgcttgggcttgggcggcagcgacggaagccttatcatactcagcttgtattgcttgacgtcgcttggaatcttcttcgccccttgcgtacccgtcaatgatgcgaagtaggtgctcaagcgtctgtggctccttgttggcgatttttcttgtgagttcgccctcgagtagcccggccgaagcggcgtttatgacagacgcctcggttatgtcttgcacttggcaccgggcttgtgagaagcgacgcatgtactaccttatcgactcccccggcctctggcgaatgccgagtagatgctgctgtgtcttcggctcctcataggtgcctcgaaagttaaggacaaagacatcgcgcaatttctcccgtgagtaaatgctattggctggcaaattaaaataccaagaacgggcgatgccgtctagagcgagatgtattacctttgccttggtattttcgtcaccatcagccgcttcgatcgcggactcgtaaatggagaggaattcctttgggtcagttttgcctgagtagcgttggacgggtgggaacttgaactggggtgggattggatgggtcttgattcccccactcagcgatagcctcttttcggctcttgccctgttcacggcaccttgctgcgggtatggcgtggcgaagggtgaaatcacggcttgcgcctgaggatgggccatggcattcggctacccggctctgattggtgatgcttgttgagccgccatggatgggtcgaacgtttgctgggaccatgctatggcgacctgatttggtgcttggtttgctccgaagcctggcgttggtgcttgcggccgaacggttggtgcctgaggggcattgatgaagtcgaattgcggtctttgactccaaggcgaagcccccagacctggctgattcgacggcaaccaactaggtgcaccttgacttgtattcccctccgggtggaccgaaggggctgtacctgaaatgctgtggggttagctgagatgctgaaggaaagcttggagctgcgcctgcagagccgaagcccattctgccattgcttgtgacacttggccaggcggttgagggtgtacttgggcagcgaccggctgagcctgcagttgcacgtgaggagctggatgcactgctgcggtcgagggctgcccggtgaagtatactggcgcttgcgtaacttgtggcggaaggggctggatcggtgcttgtggatagacttggggtgggacgtagcttgccaaatattggaggactggggccgaagcgaccttggaccgcctcgccgcctgatacgcctgatgctgttcttgcatttggcgaagcatgtcttggagtcgtgtcatgttctgtcgcatggcttccatgtcggcttcgatttgtgtttcggggtctgggttgacttgggcttgtacagcggcgagcgcaatcgaggctgctgccagctgcgacggagcggcttggagcaccagcagttggcttgtcgaaaggatctccgcctggtctggagtgcccttgccgccgcggctgccttcgccatgtcagccgcattcagcacctgcgcagaggtggcaggagccgaaggcagtagtgatggtgcaggtgcggaggcagacaatgctcctccatcttcggcaactggcgccgaaggctctgctccctcttcggcgaccatctccacctcggcttcgctttcctttcgccttgtaaccttctccttcacgacccttttcggtggcatttgctctcagtggtttcgctcggaaatccccatggtcggcgccagctgttgtcgaaacgatacatggttgcccttatgaaagggacatttacatgggtacacagtgtaattgtgtttcatgggcccttaacgggccgtcaagtgattgtcgacccaattagcccttagacttgatgggccaggatggcttcttcggtcctcccgaggccgaatcttgctatggcgaagtcgacccccttcggcgtatactcttcgccctacatccttcgcctaggaggcctctggcttggcgaggtacccgcgtgattccctgcctctcgccgtccttgcttcctagtcttcaccat

SEQ ID NO: 49636 - DNA, 1908 bp, Oryza sativa
  Clone ID: PAT_MRT4530_52200C.1
atgtcgtcggcgatcggcggcggcggggaggggaggaggaagaagggtgcggcggcagtggcgaaggagaagacgatcatcagcgggatgtccggggttgtgcggccgggtgagatgctggcgatgcttgggccgtcggggagcggcaagacgacgctgctgacggcgctgggcggccggcacggcggcggcggcggcggcgggcgggggatgctgtccgggaagatcacctacaacgggcagccgttctccggcgcggtgaagcggcgcaccgggttcgtgacccagcacgacgtgctctacccccacctgaccgtcgccgagacgctctggtacacggcgctgctccgtctcccccgcgcgctcggcgccggcgagaagcgcgcgcaggcggaggaggtgatgctggagctcgggctcggcaaggtggcgcacagcatgatcggcggcgtccgcggcgtgcgcgggctgtccggcggcgagcggaagcgcgtcagcatcgggctcgagatgctcgtcgaccccagcctcctcctcctcgacgagccgacctccgggctcgactccaccaccgccgccaggatcgtcggcacgctccgccgcatggccgccggcggcggccgcaccgtggtggtgaccatccaccagccgtcgtcgaggctctaccacatgttcgacaaggtcctcctcctctcctccgacggctgccccatctactacggcctcgccgctgacgcgctctcctacttcgcctcagtcggcttcgcctcgccgctgtcgctcaacccggctgacctcatgctcgacctcgccaacggtatcgcgccgcagatcagcggcggtggtggtgatggggatgttggtggtggcgcggcggcggcggcggcgaacggcggggggagtgaggcggagctgaaggaggtgagggggaagctggcggcggcgtacgagcggcacattgcgccggcggtgaagctggacatctgcgcgcgggaaggaggcggtggtggtggtcagggcgcggcggcggcggcggcggtggcggggaggaggaggcgtggtggtgggaaggcggcggcggaacagtggacgaacgggtggtgggcgcagttcacggtgctgctccggcgaggggtgaaggagcggcggtacgagtcgttcaacaagctccggatcttccaggtgctgagcgtggcgagcctcgccgggctgctgtggtggcgcacgccggcggcgcacctgcaggaccggacggcgctcatcttcttcttctccgtcttctggggcttcttcccgctctacaacgccgtgttcaccttcccgctcgagcgccccatgctggtgaaggagaggtcgtcggggatgtaccgcctctcctcctacttcgccgcgcgcaccgccgccgacctacccatggagctcgccctccccaccgccttcgtcgtcatcctctactggatgggcggcctcgacccgcgccctggccccttcctcctctccctcctcgtcgtcctctacagcgtcctcgtcgcccagagcctcgggctcgccattggcgccgtgctcatggacgtcaagcagggcaccaccctcgcctccgtcatcaccatggtcttcctcatcgccggcggctactacgtccagcacatcccgcccttcgtcggctggctccggtggctcaactacagcttctactgctaccgcctcctcatcggcatccagttcggcgacggcgccgcccactacgactgcggcggcggcggcgcgcgctgcctcgtcgccgacttcccggccatcaaggccgtcgggctcaacaaccactgggtcgacgtctgcgtcatggcgctcctcctcgtcggctaccgcgtcatcgcctacctcgccttggaccgcctcaagccaaggtga

SEQ ID NO: 49637 - DNA, 252 bp, Oryza sativa
  Clone ID: PAT_MRT4530_52201C.1
atggccgctgatgaggctctcctccaactggtaggagcattaaggaagcgtagagatagacgaggtgtggcgaaggaggggaggaaggaggctaaatgtatggaaggaggggaggatggcggaaaagtgtggtatttttggcatcactgtcgtggatgctccaagcagctcgttgtcttcaagtcatcggaggaaaatatcgagaatattgttgagacggggactgtctatctctactccaaggacctctga

SEQ ID NO: 49638 - DNA, 156 bp, Oryza sativa
  Clone ID: PAT_MRT4530_52202C.1
atgctgggagaggcccctttccaatccaaggtaccagctgatgacaacaaggttggccgcctgatgatgcatcccgagaattgcaaggctgtccgaggagaaaaggaaagggtttcccaaaccgccagggccggggttaccgcgccccagcggtaa

SEQ ID NO: 49639 - DNA, 186 bp, Oryza sativa
  Clone ID: PAT_MRT4530_52203C.1
atgaagatgggatcgaagcggagtacgagatggagatcactccggaaacagaagatatgttttgggcaaaagtctgccgcaaagacttatggtatcttagagtttgttagagataagagtcatgatcaaatcaactggcacgctcatacacctaaaagcaagcttttgaacctgcacttgagttaa

SEQ ID NO: 49640 - DNA, 1322 bp, Oryza sativa
  Clone ID: PAT_MRT4530_52204C.1
tttttttttttttttttttttgatcaccaactttaattttccattcaattttcacttcagaccgtggatgatacattcatctcgtgtttgtactaagggatgacacaatatcagcatacaacaaactgatcgatgtagtggcgtgctcctaaaacttatattgcacaggttaaaatggaagctgcctccctcaaaaaaaaaacctcaaaaaaaaaggaagctgcccgacaaaacggtgaaatatgggtcagaacagccatatatcaccaggagcactctccatccacagagccttcttcagtcagaaacacatcacttgcactgccttgggtgaaacttctcctctgacaggagcgacgtcatgagccgctgcagccgtacagctcctcgaccaggctgaaggtgagtggtattgccgatgactgagcaagggtcacttccattttctcgtgtccctccacaccatcctccaggagtgagcatgtctgggccacgcaacaggatctccgcatctatcttgtctagaaccgggtcatctgcatgaaacttccgagcaaatggtgcatcgctagcaaccatcctgtccaagtcttcaattgtgaggtagtgcggatgctgcttcggagggttgtcccatgatatgtaatgcaggtcatggttcaccgtggtatttttaaactcctcagcattgcagaccacagtgtggaagtagccttctggtgaagagatgaaattggcgtagtacatgagtacagtccttggaaggttgtcccagccccatatgcagtattcgacaaacggcttagacagggccatccaagcagacccggtgaagagcttgaaggcagtggggacactccggcgctgcgggatccagaagacatcggccttcttcttcatgtagaggccagggtcaatgatgaccggcttggccctctgatactccttccacccaatgttgctggtgtggtcgatgaagttgagaccgcgaggcagcttggagaacacatggatcagatcatcctgcgtgaggagcgggtagtcggaggcggagaggttgatgaaccagtcccactccaagtgcgggtgttggttggtgtagaggaaggcggcggcggcgtggagggtgttggcgaccatggtggggccacggtaggtgacgaggttggcccgttggatgacgtggacgttggcggcggcggcgatgacagggtggtcggcgaggtcggcggcgaggttggcccggtcggagtctggcgcctcggcatcgaggtggaggatgtagaggttcctggggtggtagagcgcgaggagacgcggcc

SEQ ID NO: 49641 - DNA, 619 bp, Oryza sativa
  Clone ID: PAT_MRT4530_52205C.1
ttgataaaaaaagaaaactgtagcgcaatctctccccctcgcgtctcgcgtcccggcggcggcggcggcggcggcgtgcctcctcccggcgacctcgagccttccgctcatccatctctgcagaggacaccaccagggtcccatggaagcagcggcggcggcggaggcggaggcgggaacaggcggaggcggcggaagggacgggacggcgacgaagaagaaggcggcggcgtgcgacgtggcggcgctgcgcaagtgcctcgaggagaacaagggcgaccgctccaagtgccaggaccacatcgacgccttccgctcctcctgctccaccaaccccccgccgcctcgcaggtcctagagctttcgcccaatcagccaaagcaactctgtgtctttctttttttcttttttgcttttactatcctcgatccgaataaatggttgtttccagtagctgtttcgatcaaacaagcagagtaaaaacaattggcatatgaacaaatggttgctcagctgcactgcagtctgcaggatcaatgtttgttcttggttttgtctggaaatgtattggatgattaagagcataattagcttcatcctctctaaaaaaaaaaaaaaa

SEQ ID NO: 49642 - DNA, 192 bp, Oryza sativa
  Clone ID: PAT_MRT4530_52206C.1
gacatatatgaggataccccacctgcccgttgtattattgccagacctaatatccaggaaattaactaaatcaaatatgaagatagtattttgcctttgttttaacaccttatgctgatgctatattttatgttttatacaacctatgtttacctttcttcaaaaatcaaatttatttatttaatcattacc

SEQ ID NO: 49643 - DNA, 861 bp, Oryza sativa
  Clone ID: PAT_MRT4530_52207C.1
ccggccgggaaatcaaattctgcaaaaaccacaggccgcacagccacagcagcgtccacttcacgttccatcatctcctctacctccaaccacatcgttgcttagcctcgccaccgccgccgccgccgccgatcagtggtagatcgatcgatctagccggccatggattactggaagaccaaggttctgccgaagattaaggtcgtcttcgccaagggcggcaacgccaagaaggctgccgccgccgaactcatcaagtcgtttgatgaatctaaggaggggatcaacggcgagttcgaggagaagaaggctgacctccagcccaaggtcgtcgagatctacgaggctgctcctgcgccgctcaaggttctgatcaaggacagggccaaggtgtccgggatcaagaagaactccgccgccgtcaccaagttcgtcgacgatctcgccaaaatcgagttccccggagcgaagcaactgagcgaggggatcgccaaggtcggcccggcgctgctctccggcccggtgttcgccaccttcgagaaggtctccacgttgctccccgccgacgaggaggagatcaagcccaaggaggctacggccgccgccgccgaagaggagaagaaggaggaagccgccgccgccgccgccgccaccgacgccgccggcgaggagaagaaggaagaagccgaggagaagaaagaagaagaggccgccgcccccgccgacgagccagctgcagccgccggtgagagcgcacctgccgccgccgaggccgagcccccagtcgaggccgcagcgacgccggcggccgctgaggcggcgccggcgaaggccgaggaggaggaggcaccaaaggcctaa

SEQ ID NO: 49644 - DNA, 1758 bp, Oryza sativa
  Clone ID: PAT_MRT4530_52208C.1
atggctcaagacgctggcgacacagtgctcccggcatcacgcattatggcggataggcaccttagcctcccccgcaagaccatgccggaaggcaccgtcgtgagggcgggggagttgcggccacggccgcgatatccggagggatctgtgcacctcttgtcctttgctatggtggggttgattccgccattcttcggattcttccacgaggttttggatttctatgaaatccatgccttgcatctcgcacccaatgctgtgatgacgctgcccatcttcgcacatctgtgcgagatgttcatcggggtgcggccgatgatgcggctgttccagtctttcttcatcccgcagctgctgcaaggtgcggtggatcgatcccgtggcgcatgggagtacactggtcctaacgaccccatgcgcacgcatgtgggtgagcgctgggaatggggggaggaggacgcgaagacggtgattcggcgggtgttgggtctagactccgccgagcaaacactgattccagacgggatccttcccctctgctgtgaccgcgatcgggagagcatcctggctgtgatgtcggccggcaggagccggtcctaccggggcggcgccggtggcagcgctgccggcgtgagtggcggtgacgcgaccgtatgcgggagtcggacaagcggacccggcgggggtggcagctccggggcacccggcccgagccacggacccagggacgactcggccagcgacctgaaagggaagcggaagatgcccaaatctcgaccgccctctcccccgcgtggagggggcgccgagcgtgtggcggaccgaccgccagcaggccacaagcgccccgtcgagcctgaggccggacggaagaagaagcggctccggaagataggtcaaacggagccgtgttgggggagcttcattgagcccctgaagtggactttcaaccgccctccccgcagcgagattctttcccaggggatctcggggtccgaccctttgcaggggatgaaatccgaacgaatggagtggcccgggcttggccgatccagggccgtggggccttcacagcctctcggcggggcccacgggccgcacaccgggtccgaccccgggctaacctcagccgggactcgacccactgcgagcgatagcggcggtgacgtccctcccgggggcggctctgagaccgggatccatgcggagcgccactcgggatcggggggcgagggaggtcgcggctcggaagccgaggccggaggcggccttgagcccgaggtcgaggctgaaattgggggcgggcacgagcccgaggccgaggctgaatctacccgaggacccgaagcgggggccgagagggacggccgctcccccttgcacttgggacgccctcggggctggtcgcgcagaaggggggctgagagcagcccccagtctcgcgggggatccagcagcactctgtcgtcctggggacggaccgcggctttttcttctccgactccggcaagtatggagccgctcctgcaggtgctcgctgccgccgattccaccgtccgggaggggctcaatgccaatgttcaagccctggcggaagagcgagcggccctggaggcagagtgggcacagctcgctgcggaccgcgcgcgggttgacgagggacgcggcgccgtggacgacatggtgaaggtgggacgcaaaatgcgccaagcccaactagccgaaatccaagcgggactggccagaccgaggctatga

SEQ ID NO: 49645 - DNA, 1701 bp, Oryza sativa
  Clone ID: PAT_MRT4530_52209C.1
atggctcaagacgctggcgacacagtgctcccggcatcacgcattatggcggataggcaccttagcctcccccgcaagaccatgccggaaggcaccgtcgtgagggcgggggagttgcggccacggccgcgatatccggagggatctgtgcacctcttgtcctttgctatggtggggttgattccgccattcttcggattcttccacgaggttttggatttctatgaaatccatgccttgcatctcgcacccaatgctgtgatgacgctgcccatcttcgcacatctgtgcgagatgttcatcggggtgcggccgatgatgcggctgttccagtctttcttcatcccgcagctgctgcaaggtgcggtggtggggggatgttacttccagccccggccagccacggcggggcaatacatcgagagtcatctccgcaagaaatgagtggactggaggaaggactggttctacatcgcgctgccggaccacccgcgacttcggcttcccgctggccctcccgaacgatccgccgcatggctggcggtttcagagttgggcgaagagtacgacgcggtgcaggatcgcctcaggggcctgtgaagcctaggcctcacagcggcaatggtctttggcgattatttccgccgccgcatcgcgcctcttcaggatcgatcccgtggcgcatgggagtacactggtcctaacgaccccatgcgcacgcatgtgggtgagcgctgggaatggggggaggaggacgcgaagacggtgattcggcgggtgttgggtctagactccgccgagcaaacactgattccagacgggatccttcccctctgctgtgaccgcgatcgggagagcatcctggctgtgatgtcggccggcaggagccggtcctaccggggcggcgccggtggcagcgctgccggcgtgagtggcggtgacgcgaccgtatgcgggagtcggacaagcggacccggcgggggtggcagctccggggcacccggcccgagccacggacccagggacgactcggccagcgacctgaaagggaagcggaagatgcccaaatctcgaccgccctctcccccgcgtggagggggcgccgagcgtgtggcggaccgaccgccagcaggccacaagcgccccgtcgagcctgaggccggacggaagaagaagcggctccggaagataggtcaaacggagccgtgttgggggagcttcattgagcccctgaagtggactttcaaccgccctccccgcaggggctgagagcagcccccagtctcgcgggggatccagcagcactctgtcgtcctggggacggaccgcggctttttcttctccgactccggcaagtatggagccgctcctgcaggtgctcgctgccgccgattccaccgtccgggaggggctcaatgccaatgttcaagccctggcggaagagcgagcggccctggaggcagagtgggcacagctcgctgcggaccgcgcgcgggttgacgagggacgcggcgccgtggacgacatggtgaaggtgggacgcaaaatgcgccaagcccaactagccgaaatccaagcggaccaggagacggtggatgcccattctggccaccgccctcaatcccgcgaggagtccttcgtattccgccatgttgttcaggagacgttgggtggaacaggttcgtccactggggtccactc

SEQ ID NO: 49646 - DNA, 404 bp, Oryza sativa
  Clone ID: PAT_MRT4530_5220C.1
agcggcaggaatcgaagatcgacgttggcggccggagttggggaagaaatcggtgatctcagtgtacaggctcctggggtcgagccgatgacgatggcgcagcggcttgctccgggatggactagggtggtcgggcgacgatgatgccgaagcggcggcgttccgaagctcccgtgggcacggtcgcgttccggcgtcaccactgcatgtcaagaggagagattaggagtcgagacgaccgcggcacgatggcgatggcgacggtcgtcgtctccacggccgccggcgagaatgaggatgacagagaggcagagggcctttctccctcggcttcttcggctctagagtgttgaatggtgaagggcgactgagttggcggagttgaaggtgaaactcggcgtcgg

SEQ ID NO: 49647 - DNA, 302 bp, Oryza sativa
  Clone ID: PAT_MRT4530_52210C.1
atgtgcctcatgacatacagtgggggcacaaccaaccccctagatcaagtggtatgcctccatctccaggtgaatggcgctcaagttcctctcgttgggacttgggtgaaatcactaggagaatggtgaatgtgcaaacgggagagatctaatacaacctcatggaacacatagcacagacgcaagaatggcaacagactgctgatgctcaatttgccaacatcaacaacatgacgcagcaacagcatgatgaccttcaagcatatttccgctttcagcgattcaatccttaccaaggatcc

SEQ ID NO: 49648 - DNA, 190 bp, Oryza sativa
  Clone ID: PAT_MRT4530_52211C.1
agaaaacaacagacctggatggttataagggggggagatatacaacaatagggatactttcaggatttcaaatacatgttcacaacttgcgtaaaatggttcttatggacaccatatcctctattcattaatacggaagttggattatgtgatatgggggtgtaaaaatacgattgacatgttcaccaca

SEQ ID NO: 49649 - DNA, 404 bp, Oryza sativa
  Clone ID: PAT_MRT4530_52212C.1
caaaccttcgacagcaaaaacgaaggcacgtcattttcttgagtgaaatcgtatatatacatcatatcccattacaaatactacgaagagcatcataaacacgctctgctgtttcttcatcatcacagtaaatagtagtcctttcagatgtcaccttcaccagggcttctcctggactagtgatcgaaattacacgttcacgatctgaaggtgcagagtaatcagcgtctgcagaaaacgagcatacaattcccttttcctgcaaggctgacggtatacagctcgcgtccacagttccccagtgtagcaagtgccgctctgatcgatctaattcactctttgcagcagctagcacatattgtccattgcttagaaggagctttgctttcaacctcgcaacagct

SEQ ID NO: 49650 - DNA, 318 bp, Oryza sativa
  Clone ID: PAT_MRT4530_52213C.1
acatctctctatcatcaggaggagaaaggaaggaagagggtggcatgaggaggaggaggcccccatgatccttcctacctcccatgggctgaacagatacggccgaccgcaacccagacgccatgataagatacacccctcgcgtgcacagaaaccttgctaacaatcgactcaggtctgtaaatagggctaaaaaagctatgcatttttacaaaaaagcctgacagaaaagacatgctccttcactaaagaaccctccaccaataatgcctactgagactcttttaaacaaccctcagaatgattacggtccaacaa

SEQ ID NO: 49651 - DNA, 662 bp, Oryza sativa
  Clone ID: PAT_MRT4530_52214C.1
tcactgcaagctgcagtcgaagaagcctaagcagaatccaatcagggcttcgtagaggttgtggccttggccagcatagaaaaattcagcttcaccctgggagatctgcttaactccagtgcagatccaaaagcttgcctttaggtgtatgagcgtgccagttgatttgatccgtggacgaggatcttgaggagtcggcgaaacgtaggccgtctgggaggtctcctggatggggaagtcggggccgaggaaggcggcggtggtggtggtggcttctacgcacgtgctccgctcaccagcggcggatctagcagaaggggaggcggcggcggcgctctcccctccgccagcgccctccgccggcggcggcggcggcggatctagcggaaggtgaggcggcggcggcctgtcggcgtcccagtggcggcggcactctcccctccaccagatccagcaggaggggagccgccggcggccagccatccctgcggcggcgacggcggtggttcggcgacgacggcggtggcggcgacccccttcgatctaattttttgtttttatttggatatatatgtgtactatgcatcatgctttcttcgattttgttgtgtgattgaactccgattgggatttttttggggtttactaaaaaaaaaaaaaaa

SEQ ID NO: 49652 - DNA, 343 bp, Oryza sativa
  Clone ID: PAT_MRT4530_52215C.1
atgggagccggcaaggcgccgctccgccgcaagtggggaggggaccaggcggcagccgtgcgaggccagggccggggccctgccctgccaccgtcatccttggcgatggaggcagccggccgtcggggggcctcggcccccggcctcacggcggccggcctacctccccaatcacggcgaggggcacgcctgcctcccacctatccggtggcgacggcggggcaggcgctctggccccggcctcggctggttggcgtgctgcacttccccggcgccggcaaccctgctccaagcgggattgggaccttcgcgggattggaactctgccggcagccctgctccg

SEQ ID NO: 49653 - DNA, 1110 bp, Oryza sativa
  unsure (1)..(1110): unsure at all n locations
  Clone ID: PAT_MRT4530_52216C.1
ccggccgggatcactcatttcccaaaggtacaaccaaagtacctttttgtaacataagtggaattatgtcgtacaatatgttgctaaacctgatttagtatcctcttccagatcttgtgcattcatttgctacgcgcttctgttggtctagatggtgaatttgttaagcgtgggggacacatttctttccctttacttcttgatctttcaccatttgctggtggtgcattaatccctggacagggacctaaaccttcagcaatgaacaagcaaagacatggccagcaaactctccatctgtggcgacagctgaatgcagagatgcctgtgaatatgttccccgctgccactgatggggactcatcaagtcatcattgtggtgatgaatcaataaacacacttggacgctcattttacgtgggaaatagggatgcagatagtaggttcttgtcttcatcatcattgacagacaagttatatggcctctcatctgtcgtggaacactacggcgtatgtggaggtgggcattatgcagcttaccggagagtaacgccaaattcggattctaatgaaccagtgcaatctcttgcaagttttagaaaggagtggctttacgtctcggatgatcatgtgtcccatgtttcagagtgtgaagttttggcagcggaggccaccctgcttttctacgaaaggctgtagcaccctgttgagtacatgaaaggcccaaaatacacaattccacaggcacaagggcctttgcagaaggggaagcagcatgaagggctaaattctgttctactgctgccaaggatgttattttagctgaatggacaccttggcatagcnaatagaggagttatgtgtgtcagcgtgtgtgctttcggttttttttttcaatttcttctcttttttttttcctctctttctcttttcttcttctttatttcttatttctttttcttttttggcttggctcctctgatcttctcttttgctagacaagacagatacacttgcagctaaagctggctctaccagaatttacctttttagctggaatttatacaaggcaagtcagtatatnccatcgaaaaaaaaaaaaaaaaaaaa

SEQ ID NO: 49654 - DNA, 125 bp, Oryza sativa
  Clone ID: PAT_MRT4530_52217C.1
aggctgtgggagcaaggcggtgccgcacggccgtcctgcgcgaccgccagtcctgcggaatggaagaacgacaccgtctcgatccaacgtctccgttgcgtggagcaaaatccagccgtaagtag

SEQ ID NO: 49655 - DNA, 501 bp, Oryza sativa
  Clone ID: PAT_MRT4530_52218C.1
atggaggccgcgttccgggcgctgcagaacgcgtcgctccccggcgacgagcgggcggcgtgcgccgcgtgcagggacacctactacgcgcaggcccggagctccaccgtcgccgccatgaacctcctggcggagtgctcgctcgggcagctcggcggggagtacgccgccgcggcggacgccatcaaggcctgccgggacgcgcagtcgaagctccagtcgccggcgatctacggcctcgccgtctccgacctgatggtggcggcgctggcgtctggtcttggagagctcgtcatttgccaagcagtgacctggtgccagttttttacgatttcaacccgcggaggtggaaaaaggcctataggtgccggttttagcactatcggcacctatagtggcgacacctatttgatgttttgtagtagtgggagcaaagtccacatggtcaggatatccaaaaagcacgtatttgttgtagaactttatgaaaacatggtataa

SEQ ID NO: 49656 - DNA, 420 bp, Oryza sativa
  Clone ID: PAT_MRT4530_52219C.1
aaaaagaaaaacagaccgcaacgcccacaccaagggccgagggcgccagcgctgaaccccgccgccggaggagacccgcggagccacacttcccccgacgaccgctccgccagctggccacggcggccctcggaccgcgccggcgaggctgacgcggaggacacgcagcggccggcggcgagcccctacgaggcgccgcgaagcgagcgagacgcaccgccgacggagaccaaggcggcgaaccggagcctagcgaagcgctaccaccccgacgcggcggcgcagagggcaccggagacagacggcgacggagacagcacccagccccgaaacgcgaacgacacgctgtccgaaccgccggcgagggcgacgtacgacaggacgcaggcggcagcgcacggcggaaaacacaggcaggca

SEQ ID NO: 49657 - DNA, 516 bp, Oryza sativa
  Clone ID: PAT_MRT4530_5221C.1
tgaatttcttcaccgaaggcaatggcggcggcggcggatgcggtggaggaggttcggctggatgttggaggcgtcctttcccttgcttttctttttctctcattttcttgcttttccttgagtctctttcttgcttcttctgctccgtcgttcccctcgttttttccttctttctgttttccttcttgtcttcatccctgtcatctttctcctcgtgccgctccttctcccgcccatgacgtcttccggcccttccctgacgcccactatgtcctactacctcccgctctttccatctgccatactcttcttcttctccccctccttcgcacgcccacgccttttttcttctgtttctactttttccgtctcttcccgcccccaggttttcttccttttctccccactccaccttttttttttcccttttttttttatttttttcccgtcctttcttcttttttctttttttctccttatctcttttttccccttctttcctccatcttttttctc

SEQ ID NO: 49658 - DNA, 1905 bp, Oryza sativa
  Clone ID: PAT_MRT4530_52220C.1
cgcaaccacccggcctttgactactctgggcagaggacgcgacccagttttctcctcggggtccggacagcgacaccgtgccacgccgcgtcggccaggtgatgatcagcgcccccgcgacggtgagcgacatccctgtccccctttgtgagaagggtccggctgaacgcgaggccgcaatcaacgctttccctctgacggacatcatcgggccgctcgcggaccattaggcggtggcgtcattgaaggagggcgtcaccaaggaggcgtccgatgtcgttgctgccgctaccacgagcggcagcaacgttccgaagaaggggaggaagttttcctccatactcgggacccgtcggaaggcgcctaacctagtggcctcggacgcgtctcccccgcctcagcgaagacagaggctggtgacgatcggcgagaacgcggtgcgggcgaaggcggcacaagacgggaccggtgcgacctccagcgcgtcccctgcagcggcctcgatagatgtcatggtctcaactgaggaccgggaggcgacgccgagtagccccgccgtcggccttgtgcccgcacggggcctgcctgctgatgccctcacctggggggagctccaagccaagatggagcgcatcctccaggctggtgctcgtggcgtaggccgcgagattgaggaggccagggcagcggcgtcgtcggcgaaccaacgcgccgacaagctagcgcgcgacctggcggaggggctcgagcactagatgtcggagctcgagaacaacttgtcagagatccgcagctcgctgcgagtatcttacctcggcctacactagctctccggggagtgcggcgtcacgaccaccatcccggcgaaccctgacgagttctcgttgacgtcctcgctcacggagctggctacggcgatggaggagatcccctccaagcatgcggccaggatcggcgaggagacgtccaacgggatctacaccagggcgtgccacgtccttgcgtgtgtgaggttggtgcaccctgatctggaccttaagaaggctttggatcagggggccgccgatgatgcgcgcaagggcgtgatggaggagttcagtgacttgggggaatccgtgctccccctttttgaagaagatgtcgatgtcgaggctgtccagcagtgcgggcaccctgagatgccggtgatcgtgccagcccttgcactcgagccgaacgtgccgcgttaggaggtcagcgaaaacctgcccgcggaagcgaacatggggctgacttccctagaagtcgaggatgcgttggctgaccaagatcgtcgaatccaatactggaagacgaaactcgaggtggccgaacttgagaggaccatggtggaagtgaagaaggaccaggccgtggaagctcttcgaggtcacgaggtgtggttcaactcgtacctcaagagttgctgcacagcgatggcaggagtctgtacggagctccgagtccctcgcggaaatccagaggagttggcgactggatatatctcatggctgaatggggcctcgcgtagctcgaagggatcggcaagcgcatcgacgaagccctgaagcaggagtgtcgtcacgcgagccgctatgccggagggcatgtgctggcctacatccgagatcattgcccatagctgcacctcgagttccttcatgaagggttctcgcgttctcgaaggactcccgcggagatcgacgatctggtgcagttgatggcgccgtttgttgagaaggtttttcggtcgatggattggcgctggccgtcctggtagttcttgtatccgaaggccacattggctgaaaacaaggaccgaagattgactcggccaaaaagaccaagagccaattcagccgatacgacataacctgggctctgcat

SEQ ID NO: 49659 - DNA, 454 bp, Oryza sativa
  Clone ID: PAT_MRT4530_52221C.1
gcacgaggttttgacttaaatcacgcatgctgctcaatgtgcttggttgttcagtggtagagggttttaggtgggaaatttgccgttgcctgtgatgattgttcatttattaggttggtcggatcggagtgccaccgggactttccttataatcttgtactaggggtttatgtgggcttcttattgtcgaaatgcactagttttatgtagtcagattgctataactgctcagaatctctgatattttgatactccattgagatattttgataccccattgctgatgtgaatttgcctcaactcgtttattgttactatgtgtgaccggaataggccgtttccgtgtatagcggaagaatggtacctcatggttcctcttattatagaccagcattgtcattaaatgtggtggcaaatgatgcagttgatgtacctttcactgtattgcagcact

SEQ ID NO: 49660 - DNA, 495 bp, Oryza sativa
  Clone ID: PAT_MRT4530_52222C.1
atagtactagaacgcgactgacgccctttttttaaactgttgaactggatccacatacccagaaagaattatgatggcgcgaaccttgtaaaataaaattgtaccgcacatgctgaaataataaaacctcaattccagagatgcactaggaagcgctaaacataccaggtcgaatctaaactattatcagacactgaagggggcccagaactcaagactgaattgcgaggaggacggctcagaccaacaactaacaaacaggtgcctaatgaatattaagcgggtcaagactgaacttctgcggacgcaaggtcacctgacagtaagacagagttggacagcattaagcacctgatgaccaatgcaagcgagcctatagtctacgctagctgaccaataacagacgcggctgcactgacaagatcaaccttgaggggaacaggtacataatcagcaaccgagtcgatcaaattcatgctaccaaaaccatccaac

SEQ ID NO: 49661 - DNA, 259 bp, Oryza sativa
  Clone ID: PAT_MRT4530_52223C.1
tattgtacccccagcttttataggttatagactgccctcataaaccaacacaagtcttttctgcacattttgtcctcactcgtacgcactcgggaagaattttccgatcggtcacgcatccctaaattgctctaggccaagcacgcttaaccttagagttatttagagattggcttccggaaaagaagttgcaacttgttgatatgagtattctattaattatattaagccctaggccgggatgttacaccctggtacc

SEQ ID NO: 49662 - DNA, 145 bp, Oryza sativa
  Clone ID: PAT_MRT4530_52224C.1
ggacagaaacaaaagtaggcggggtaagcactgatcccacccacaatttacatgatcaatacatcgtccataacacaggcacttatgcttcgaatacacataggagaatggattcgggggactagctcaatgaattcgattagcc

SEQ ID NO: 49663 - DNA, 369 bp, Oryza sativa
  Clone ID: PAT_MRT4530_52225C.1
gacagaattgggactgccattacatttgaacaagagatagacacagtgttttctttgacagaacacccgtattatggcggctacggatttaacacgtgcacacgggagcgggcgttttccgaaccccaaacggtataccggggggaacgagctagaagtgtgtctctctgttagggggcatgcacagtggtacaggggtctgctcttagcatacccacaccgggtaggctaatgccttgatgggggcggattcgcttctgtggaggcacataccgcctggacctcctggtgctcttgcacggccgcggtgacgctaacgacaaggttgtagtgagcccccctgggcatgctggaggcgacgtccttggg

SEQ ID NO: 49664 - DNA, 1575 bp, Oryza sativa
  unsure (1)..(1575): unsure at all n locations
  Clone ID: PAT_MRT4530_52226C.1
aaaggaaaaaagagagaataaaagcgtgacagtataccaaatcnttnagtcccccccccccccccgcccccaccggcggcgacacccgttgcgcctccgcatcagctccggctccggcaccagcaccggcccccgccactcccccacccgctcctcccctcccgtcacccctcagtcagcgctgccccgccctgcccactcgccgccgaacagcgcttgctcggcgcgccgccgtactccgtcctcccgccaccacggccgccaccgccaccgccgccgccggcgggggcaccgaccgagcccgacgacgacgaaggctccctccattccctcctcgcctccctctcctcctcctccgcgctccgcctcctccccttcccactcctcgccttctcccgcctccgccgccacctcccgcccgccgcaggcacctcccacctcctcctccgccccgtcgccgctctcctccatcaccaccgctcccacctccgcctcggcgtccagctccacgcgctctccctctccctcggcctctcccgccaccccatcctcctaccgcgcctcctctccgtctacacctcccacccctccctgctcccctccgccgcctccgtcgccgccgactccacgctcccgctcccctacaacgtcctcatctcttcctgcctccgccatggactcccgctccaggccctggcggcctaccaggaaatgggcaagaacggcgtgctcccggacgtcttcacctacccctccgtcctccgcgcctgcgccaccaccatcaccagcctcccgtcgttgccgcattgaccacccacgcctggctgggccggcctccctgctattgcttgcgccgacctcctgacgtcgtccatgccagcttccgctgccaccggcgccacccgcgcaggcctgcccgtatcaacctctcacgacgccgctccggcctaccaccgccaccgggcgcttctagttggcgccccatttcctcccatccccaccaccttcctccctcgacggcgtgcaatcacacccttcctgcctcgccctgccacctccacgtccgcgtcgctgcctccacgcaaccgcacaccaccgtcggcggcttgggggtcgccctcccgcaccggggaggccggatccagatgggagagggctggatatggcagctacaccgcctccacgtccccctcctctttgtctccccgagggggtcggaccgctcccgcctcggccccgagggccgaggcgccccgaccccttgcctcgccccatcccgtcaggacgagagcctccaagcactcgtccctagccggagccgccaaacccacgccgtcgagctcgtactccaccgccccctccaccccctccggttccggtgtggcagcttcggccgcccccgggtccgccacctccgacgcgcccgggtagccggcctcgccatcgctgtcgtccgcaccgtcgtcaccgcactcctcgttggagttgaaggcaaacgcgagccgaggggccgctcattattgtcggtcggttttcccttgctgatgcgcgcgatttgcgaccgccgggattctg

SEQ ID NO: 49665 - DNA, 536 bp, Oryza sativa
  Clone ID: PAT_MRT4530_52227C.1
gtttcttctccccggccgtgaaccgggacgagctgctacgcctgctgctgcacacaagctcaagtggccggccgagtcgtccgttcaccgcggcctactgcatctgccggcaaggagctcaaagatgagggctgcggggaagccgacgagcggcggcaggggagcgttgagcacgatcaacatccgtggcctactgcagcacttgctggagcacaaacgattgctggacgtgctactgtaggcagcgctggcgtagggcgcgcaggagcgggcgggcatggtgcacacagggagacagcgctcataatgcgctggagcgggagaggctgatgctcgagcaggcgtggacctagcgagaggagcaggcctgggtcagggaagaggcatgggctgagcggtgggacgagctattggacagctcgctggacacgctctggcacgatgatgaattgttgggatgatgtgagatgtctaactgaaacagagaaaggaccatgtctaggatcatagctagatgggaattcttttttctagat

SEQ ID NO: 49666 - DNA, 2607 bp, Oryza sativa
  Clone ID: PAT_MRT4530_52228C.1
aagagaaaggatatctcgattctccataggggggcatgagcatgatcatacgactacatttgttgtcatagaaatattccactaaatttgctgtcatctacatttataccacaacccggcagcaaggggctgatattcttactagcttcttcctagcagtagcaaaatttccatgcacacgtataataaccgtgtgcaggagcaaaaagaaaagcttgtactgcggcatcaccagcagtatagctgcagcctgcaaaaattagaaatcaagcattcgcccacccagatagcttataaagatctatatactatgtaagtctgtaacaaccaacattttggtgcttaacacaacactagtcactcaaacaacaaccttcgctgtctaaggactgggaagaaagtcacagctgcctatttacatggtgtcctttattcattattgcagtgaaaaaccgcacatgataaaaccctaggtttggtttttcactgaagccaacacaagggtactatagaaccctcagcttggtaaggaagtctgcacagaagtccaggaaaaggagctgaggccccgtaactctctgcatatccagcagatacttctcgtctctggtcttgtaaagctggatttcaaacttgatcacagcaggtagcctcccatttacatcaccgttatccattatgattgagtcatcaacaaagctgttgttaacatctaacatatcagtggcctgagtcccaacgctccatctgcatttcatgttgtactgtccattcttcttccaggagacatttaagtcttgaagtgcctttaggacctcaatcattatctcgcgaggttgagctcgtgactgaagtccaagagcccattttctttcaacaggataatgtgggcgcaaaccactggcatgaggatcactgcttcctggaagataatgccttgtatttgaacttgctgattccgatgaagcaaagcgattaaaattcctctccaaagattcttgatagtctgctcccaaatagccactggtagctcggaatcgattgtccaagagtaaataatatgcaacagttgcctcattctgcagtctattgcgcagagattcacacacatggtcctttccataacccaagtttacgacatcttgaagggtatcttcatcaatcattttggcttgctgtgctgtgtctggtggaggcactgctaagtaacgaggaaggcgaatctgaaaccactgatgctctcgaatttcacgaattgtgattctcttcattggatcaacaacaagcatccttgggatcaaatctctggccagagcagataaatgacttgggagagtatatataccaccctttatctttttgaataggttggggatattctcatcatcaaatggaagagtaccacaaaggagagcataaaggatcactccacagctccatacatcaacctcaggtccagcatataatttaccagagatcacctctggagcagcatagtttggactcccacagcttgtcttcaaaaaatggccatcatgcatgacgttactcaaaccaaagtcagcaagctttacattatactttgaatccagtagcaagttttctggcttcagatcacgatgaaccaccatgtttctgtggcagtattcaaccccagatataatctgctggaagattcggcgagcctcatcttcctgcaacctgcctttctcaacaatgtaatcaaacagttctccaaacttgcagtactccatcacaacatatatatccgtaggagtgtatataacctcataaaggcgaatgatatggggatgaatgaacaatctcagtatcttgatttctctctttgctttctcctccatttccatatttctcatttggcggcggttcaggatctttatagcaactctgtgtcctgtaagcttatgctctgcaatcttcacttttccaaatgagccaatacctaaagttcttccaagattgtagttcttcagtgcctcagaatgcccaccgcctttagcatttccatccattttcactgagcacgccggagctccccgccctcgccgccgatcgggtggtggtcaaccgaggtggagcggagcggaggaggaagagggagagagcccgcccactggagcggggacgggaagagacgggaggcgtgccggggtccggcctgctcgctggagggatggatggggatcggcgcaggcggcggtggcggaggatgtgactgctcaccgggatggatgcggcggaagcagcaggacgacggcgaacgacggcgaccctgctcggtcgctggcgggatggatggggatggtaatatgaaagaaaataactgaggtctagcattccacaaacaattttacactttggatggcatatttatgacatgatgcacacctttgaaccaacgcaaaacatgacgcaagatccaagctgtgctaaacagcttgttcataatactaggatgatgtatacggtgtgtcacagaaaccatgcaatatgtaattgttcgagttaacatgttcacctcaaagatgagctatgtatatcaattcatagtaacaacccttcatctctaactggttggaacggaaa

SEQ ID NO: 49667 - DNA, 2484 bp, Oryza sativa
  Clone ID: PAT_MRT4530_52229C.1
tcgccgtcgtcctgctgctttcgccgcatccatcccggtgagcagtcacatcctccgccaccgccgcctgcgccgatccccatccatccctccagcgagcagggcgggcgccgtcgttcctcctgctgcttccgcccgcatccatcctggtcactgtgaaaatggaaggaaatgctagaggcggtgggcattctgaggcactgaagaactacaatctaggaagaactttaggtattggttcatttggaaaagtgaagattgcagagcataagcttacagggcacagagttgctataaagatcctgaaccgtcgccaaatgagaaatatggaaatggaggagaaagcaaagagagaaatcaagatattgaggttgttcattcatccccatatcattcgcctttatgaggtcatatacactcctacggatatatatgttgtgatggagtactgcaagtttggagaactgtttgattacattgttgagaaaggcaggttgcaggaagatgaggctcgccgaatcttccagcagattatatctggggttgaatactgccacagaaacatggtggttcatcgtgatctgaagccagaaaacttgctactggattcaaagtataacgtaaagcttgctgactttggtttgagtaatgtcatgcatgatggccattttttaaagacaagctgcgggagtccgaattatgctgctccagaggtgatctctggtaaattatatgctggacccgaggttgatgtatggagctgtggagtgatcctttatgctctcctttgtggtactcttccatttgatgacgagaatatccccaacctattcaaaaagataaagggtggtatatatactctcccaagtcatttatctgctctggccagggatttgatcccaaggatgcttgttgttgatccaatgaagagaatcacaattcgtgaaattcgagagcatcaatggtttcagattcgccttcctcgttacttagcagtgcctccaccagacacagcacagcaagccaaaatggtactttgtgtcacattcttaacgagttgttcattaatgtatcaaactttatatactaatataattttcttgagatatacttatagagtatgataaataatgttttgccaacataaaaccgtataaagcagtggtgaaaggcattttgaataacattttatgatatgaggcttgtggagtattttcttgctagtagtagtttatcttagcagaaatccttcatgagatgtaaaagaagcagataagttttcacttgcaatatcacttattacatgtttgattttttataattatcttgccactttgctaatatcttgatatatgaccttctttgaagattgatgaagatacccttcaagacgttgtaaacttgggttatgaaaaggaccatgtgtgtgaatctctgcgcaatagactgcaaaatgaggcaactgttgcatattatttgctattggacaatcgattccgagctaccagtggctatctgggagcagactatcaagaatcattggagaggaatcttaatcgctttgcttcatcagaatcagcaagttcaaatacaaggcattatctcccaggaagcagtgatcctcatgccagtggtttgcgcccacattatcctgttgaaagaaaatgggctcttggacttcagtctcgagctcagcctcgcgagataatgattgaggtcctaaaggcacttgaagacttaaatgtctgctggaagaagaatggacagtacaacatgaagtgcagatggagcgttgggtatcctcaggccactgatatgttagatgtcaaccacagctttgttgatgactcaattataatggataatggcgatgtaaacgggaggttacctgctgtgatcaagtttgaaatccagctttacaagagcagagacgagaagtatctgctggatatgcagagagttacggggcctcagctccttttcctggacttctgtgcagccttccttaccaaactgagggttctatagtaccccgtgttggcttcagtgaataaccaaacctagggttttatcatgtgcggtttttcactgcaataatgaataaaggacaccatgtaaataggcagctgtgactttcttcccggcccttagatagagaaggttgttgtttgagtgactagtgttatgttgagcaccaaaatgttggttgttacaggcttacatagtatatagatcttgataagctatctgggtgggcgaatgcttgatatctaattttttgcaggctgcagctatactgctggtgatgctgcagtacaagcttttccttttgctcctgcacacggttattatgcgtgtgcatggaaattttgctactgctagaaagaagctaggtaagaatatcagccccttgctgccgggttgtggtataaatgtagatgacagcaaatttagtgaaatatcaacaaatgtagtcgtatgatc

SEQ ID NO: 49668 - DNA, 495 bp, Oryza sativa
  Clone ID: PAT_MRT4530_5222C.1
atggcgatgtcgacgacgttctacgtctgcgccgacgcgctgccggtgttcgtccaggagcgccacatccacatccgggatcgagacagcccacaacgcctaccgccgcctctcctacgtgatcgccaacaccgccgtcgcgttcccgccgctggtgtccctgtcgctggcgttcgcggcgaccacgttcttcgccgtcggtctctccggtggcggtgctgcttctcccgtggcgtcgagatgttcgacggcacgccgatcgtcgggttgtcgaaggccgtgaagatgtcggtgatggacgccaatcaggcgtacgctcggcaccactttgacggcggacacctgcgtggtgaccgcgccgacgtgctggcgcagcaggctgggatggatatcggcaggtggaagtgcctgctggtcaccgtggcgtttggtttctttttccgttttctgttttatattgtcctgctctttgggagcaaaaacaagaggcgctag

SEQ ID NO: 49669 - DNA, 412 bp, Oryza sativa
  Clone ID: PAT_MRT4530_52230C.1
aaaaaaaaggggtctaaattaattaaatttttttttttggggaacgccattttatttatttaaaaaaaaaaccttttcaaaggaaagggggaggggaaaaaccgggtacaaagaaaaagaaaacactagctagaaaaaaaaggttcaaaggcccccccaaaaaaaaaaaagctcttctaagggagagaggcagggccatttaattccgggtaaaaaaaatcctttcccccccctcggggaaaaattggggggggcacgcgcgcgagcagcaaaaaaatagttttagggggggcggccatggaaaccctagttgggtaaaccccacacccggggaaggggtttttaaaatacgttgcctttaataacaccggcgggaggaggggttggggggccaccggggcccaacaagggg

SEQ ID NO: 49670 - DNA, 166 bp, Oryza sativa
  Clone ID: PAT_MRT4530_52231C.1
attagtggcggtcgtcggcctgttggtactggatggcctgcaggtggtggtcgagccgatggcggctgcaagatgcaggggatgccccgatgagcatcacgggaccatgctcgcgtacaggagacaagaaggcttgcgatgaagacgcacattgaggcataacgga

SEQ ID NO: 49671 - DNA, 180 bp, Oryza sativa
  unsure (1)..(180): unsure at all n locations
  Clone ID: PAT_MRT4530_52232C.1
ctggcctaatgaaactctgaccctcncacanccggggtgtagctccatctgagatctaccattcactccccataaccaggacggtaacatttgtgtgatgatcacacatatgccgatgccgtaggttactcgacacacggttcttaacatcattggtgaatggatgtatttccttacagg

SEQ ID NO: 49672 - DNA, 216 bp, Oryza sativa
  unsure (1)..(216): unsure at all n locations
  Clone ID: PAT_MRT4530_52233C.1
tcgagggctnygtcagagagmtctctgctcastagtactctcgcgcgcgcgagcgcgtgtgcagagagggctcgacggagcgctgagggctkgcgcgcgcgatcactgcgatacgacgggacagatcacgtcgtcggkgtcgcggaggagtctcaatgccgwcacaggatgattgagagctccatgaacggcgtcgagttcttgattgtgvatacc

SEQ ID NO: 49673 - DNA, 604 bp, Oryza sativa
  Clone ID: PAT_MRT4530_52234C.1
cgggctgcaggttgagttgcatgatgactcatttgtactgaaagcaatgagttcttgtggagaagaacaaatcgacggtattcatgatctaatttcaaatggaggtgagagctcaagcatgccaaatatttataggcagcaagtgcagcaacctgcaagatcaactaatggtacagctagattgccaagctcaccccctattccaggaatactgaaagggcgagtgaagcacgagcattagtgtagtgtgtttgttgattgttgtctggcgtgtttggtttattatttattattttttagtgtaaatggcctgtaaattagtgggcattggaaaagtagtttattccgatttaacgctgcagtctgattggtagagtggcgggtgccctgaccagacctgtatcactccccgagtaacttctaaccggcttttaatctgttccgccatggttgagaaaagacgtcttttaacgtcatgtaattgtttaaagcatcttgaagtagttagcatttgatctgagtgaaatttcagccttttgcatgcttattgtaggcatatacatttgtattggatatttgccttagttatatgatatactactac

SEQ ID NO: 49674 - DNA, 349 bp, Oryza sativa
  unsure (1)..(349): unsure at all n locations
  Clone ID: PAT_MRT4530_52235C.1
aanccggcttcaaanccntcntcgtcccantccgccgcggcggcggcggcggcaaccgcntccggcaaggtnagggcaaacccatcntanccgcctccgccaatctcgtcctcnaacccccaaatctgtccgccnaacccgatggcatcctcgggctccccagccccggcctcctcctccnacaaangacgcggtggcgggcggcaggccaaanctcgtcntcggaggcctcaaagggggggcccggtacccaattcgcctatantgagtcntntnacaattcactggccgtcnttttacaacgtcgtgactgggaaaaccctggtnttnccaacttaatcgccttgna

SEQ ID NO: 49675 - DNA, 972 bp, Oryza sativa
  Clone ID: PAT_MRT4530_52236C.1
cattataatttatcagtatgatataccaccaccccaattttggtgtaacaaaaggggattcgagtggctttaatgttatctccaggagcaatattttccaaaaaagatggttgctgaaagggcatagtacgatggatggctcagctgagcgcacctggtaattcaggagaggacagccattagatctgacacccgcaacactatgtagctcgtgccatcagagcccttgaactcgctgccagcatatttggaatatagaacagtgctgcctgcagagaccgacaatggaatcctcttgccttcctcatccagaggaccagggccaacagccacgaccgttccaatagacggcttctcctttgttgtttcagtaagcaataggccaccaggagttttatcttcagcttcagcgaccttgataagaacacgatcgctaagaggcttcatgtcctttgcatcatcagtctccagaataccaatgatgtcatcctctttaagaatcagatggttggaatcattcaactccacctctgttccagcatattttgaatatacgacttgggatccaacctgaatgctaacttccactttgttatccccaacagttcgtccctccccaatggcaactacctcacccccttggggtttagactgagcagccgaaggaagcaaaatcccaccagttgtcttctgctcagcagacttaatctttacaagcactctatcagccaagggcttgagcgttgtatacttcggggcgacgctggcggcggcggccctgacgacgaggccgcgtgacggccgcggcgcctggcggagcacccggacggccgccggcggcgggaggcggagcgcgtcgcgggaggccatccccttcgtagcgaaggccaccgcgccaactccagcggcggagaactgcacgggcgccatctccggtggattgctcgccgcgaaatccgacggcagcaggag

SEQ ID NO: 49676 - DNA, 496 bp, Oryza sativa
  Clone ID: PAT_MRT4530_52237C.1
atccccgggctgcaggtggaatgctcgtaaatttctgcatgttagtgtctatttttttccggcataagtgtgcatggtcagattataattatcggttagttgttatatgttaaatagtaataagaccctggataacctcaggatgcatgggggtgaaaagttataaatgagatgcaattacctcatcatgacatattttcctttggtatttcttttgtattatgaaaaataaatcagtttgaacttcttggttccatacttgcagcagtaacaactaatgagaagtttagataagtgtgtatatttgtgtattgcttgtaaatattccaatagcgattgttgcatgctttgccaatcagttaggtacatggacccatgtttaatgggagatgtagataatcttggcatcaaaacataatcttgaacttaccttttcagttacccattatagaatattaaaattgctaacatactgttattaagtgaacaccaaata

SEQ ID NO: 49677 - DNA, 393 bp, Oryza sativa
  Clone ID: PAT_MRT4530_52238C.1
atggataagaaaaataggagcacatgtacacaaataagaaggggtacagtaaggaaggagagtgagaggaatgaaaatgacacctgcttggtcgccaatgcatccgaagttccaaacgggattggtgatgctggcgcatggtcacggaagatgcaagttaggagaacacaagcaatccaatttatagacaaacattatcatcatatgaggaggccatcagactggggaacaatgggagaggaagtggcgccacacactgatgcatgggcgtttgactcgacggtttccacatctggagagaactcgaggagacaattcagctgcatgggaggtggtgccgagccaagggagaggaagcgaagcggtgggggaggaggggcgcgacgggggtag

SEQ ID NO: 49678 - DNA, 779 bp, Oryza sativa
  Clone ID: PAT_MRT4530_52239C.1
cgtggcacgccggcgtcgactggagccatggcgatggcggaagcggccgagggacagcggccgcggcagcggcagcgtcggcagccgcagccgcagcggcagcagcatccaagctgcggcatctgcatggagcccatgccgccctccgaggcgcaccgcggcggcggcggcggctgcgcgcacgccttctgccgcgcgtgcctcgcgggccacgtccgcgccaaggtcgagtccggcggcggcgcgggcgccgtgcgttgccccgacccgtcgtgcggcggcgcgctcgacccggagctgtgccgcggcgcgctcccgggggacgtgttcgagcggtggtgcgcggcgctctgcgaggccatgttcgccggcgcgcggcggacgtactgcccgtaccctggctgctccgagatgatggtcgccgacgccgacgacgaggggtgcgcgggcgtgacgcagtcggagtgccaggcgtgcaggcggctgttctgcgcgcggtgcggcgtgccgtggcacgccggcgtgagctgcgccgagttcgggcggctcggcgagggggagcgcgggcgggaggacctgctgctggtgcaggccgcgcggaacggcgggtggaagcgctgcccgcgctgcaggttctacgtcgagaagtcccacggctgcctccacatcacatgcaggtgcggctttgaattctgctatggatgtgggagacagtggcagctgatacatgacggctgctgctccctaatgacacaacaagctggagaagtgccaaatca

SEQ ID NO: 49679 - DNA, 480 bp, Oryza sativa
  Clone ID: PAT_MRT4530_5223C.1
atgagccacatccaacatggagaggggtgcccgacggggagggctatgcccgatcagagggtggcggggagaaggacgaccactaatttggagagggtggcaaccgacgggaggaagcgagtggcgcgcggcggggagaaggacagcgctgacttggagaaaggcagaggctgcactcgtggatggagtcatggaggagccatcagacacggccaccgccgtcgtcacccgctgccacccaactcctctcttgtcggccgctcaaggagggaaccgaaggtgcagcggaggccgggggtaggggtgaggtggtccatcacggaagcccgctaccgcctagctcccctcccattggccatcggccttctccccgttggccgccgccgcgctggagagatgggcaatcagaggtgcggtgaaaggccgagggtggcaggtagtccaccgcggaagcgcgctgcccttcccgccagccgttga

SEQ ID NO: 49680 - DNA, 1287 bp, Oryza sativa
  Clone ID: PAT_MRT4530_52240C.1
atgggtggcatctatcccttccgagcccaaggggtcgggctgccccgacccctcctggcggtcaccacgtggccaccatcctgtgaccgatacgtgaccggccgaataacagatgggatggtggcaagccacgcacgccctagccgtatgtcaggcggcatgcggcaggtggtactcacagtgcatgtgggaaaccccttagagtataaaaggaggtccatatccagtgaagagggggttcgaaagactgaagattgtaatgaggaaccggccgggatgccgccatgcatgatacgtagccggcgctgcacccgcgccatgttgattgttgagaagggggatgatgaagaaatccaacaattaatggtagttagaggaatcattaataattcaagtaagattttccgtgtcgttaaattctgttgtaaagccatcagagtactaaacagagcctttgagatgtattttgttgtgattgatgacatgagtgcagaacggtggtgtgatatagagcctgctttccctgtagatgacggtatcagcatcacgatagttgtgaccacaaatatccagtccatagataatgcatgcagcactgcagacggttatgtgtacaaaatgggaaactcaacactgaatattcgaaagatttgttcttccaaagtgcttctgttgaggattgttcaccagacatggagagaggctcagaacaacttcggaagaaattccatggagtacaaactgctgcaagtcttggatctagaagaatgtgacggctttatggatggctatctcgacagcatttgtaagctgttactgctcaagtatgtgagcattgggggagctgttaccacacttccaaagacgattgctggactaaaacttttggagacacttgatttcaggagaaataaggtagaggtggtgataatctcagtcgaagtactcgtgcttcctaagttaattcatctctttggaaagtttgaacttccaggcagtgtatcaaataaaatacaaaaaaaaattgagccgggaaagagcaacctgcaaattctggcaggatttattgctgccaataaccatggttttgtgaaactgatgtgccatatgaagaacctgagaaaagtcaacatatggtgcaagtctataacaaaaggaaacaagttgaattccctttcaattgccattgagaagttcattgagaatagcaacgatccaaacgatgcgcgcactctgtcagtggatttcagtcaatgctccgaagacatcctgcaaatttctatttag

SEQ ID NO: 49681 - DNA, 912 bp, Oryza sativa
  Clone ID: PAT_MRT4530_52241C.1
atgccgagagcgcgaggtctttcctgcctcatgtcgccgctcagcggcaagcgccacgccggtgacgcacgccgcagcagcgccgcgtgcatatgctgcatcggcccacaccacaagccgtcgtccgccgtcggcggtggcggcggctgcgtgccctgcctcgctccccacgccgaccacagcgtgagagcgcctctcaccagctgctgcggcagcggcggcggcggcggtgacaacaacctccgcggccgcagcagcaccaccaccagcgcgcgcacgccgcgcacacccaagacgccgtgcacgcccacggccaggcgactctgcggcgtccgctcccgcaccccgcgccgcgggcaggtcggctgcttccagtcgtcggcgcctgccgccgcaaggacgccgcggactcccacgacgcagcgcgcgtgctacgtccgtggcacgggcacggctcagggcaacgcgaagctgggcaggcggcgccgctggctccggtccacgggccagacgccacgccgcacggcgcgcgcgggtggcgacgtcggcaacggcggcgacgtcaaggtttacaacactggcctcgtggaggccgccgccgaggagtcggtaacaaaggaagaggagaccagctcgaacgacgagtacgcgctgctgtgcaggcagggcttcccacgcgaggacgtggccgcggtcaccatccaagcctacttccgaggccacctggcgaggcgagcgttcaaggcgctgaagagcctggtgcggctgcaggcggtggcgcggggggcgtacgtgcggcggcaggcggaggtggcgatccactgcatgcaggcgatggtgcggctgcagatgcgcgtgcgcgccaggcagatgctcaccaagcccaaggaagggcagctcttgccgagctga

SEQ ID NO: 49682 - DNA, 252 bp, Oryza sativa
  unsure (1)..(252): unsure at all n locations
  Clone ID: PAT_MRT4530_52243C.1
gaaattcaagaagtgaacagaggaggaaaggaaacatgncttcgtttgcatccacggcggcgccttggggatgcntcgccggagctcggcgtggcggcggcgccgccgggcggtgtggngtgcgcccntcccggcgntggcgntngtgaagcngcggnaggacgnactacgaggtnctcgnngtcntnncgnncgcnacagggnngagatcaaggcggcgtaccgncgtctggcgttccggcgggcncccgt

SEQ ID NO: 49683 - DNA, 688 bp, Oryza sativa
  Clone ID: PAT_MRT4530_52244C.1
atggagacccgtaaaggaacaattgttcagaggtacaagatgaaattagttgctgatgttcctaggacaaattcttccaaggatggagaagtacaacaggtctcagatggtacaactcaatcaggcgataaaggcgctgcagatggctcaggtgacaaaggtggtggttctcaaggggctcaaggtgatggttctcagggatttcatggtgagaatcttaaccaagatggcaacacgacacagctacagtttaacaacttccaatatcggattgactatgccctacaacatgctttgattaatcaatctggaatgttagtcaacactttgtcaaacatggtgaagtcgatggttgatggctcaatagctgaataccaggctacaggaccggtttatttgccaggaggtgttttcccaaactattggcccttgatcactaataatcagccagctgttcagccaattcctcccaatgcaccatcggctcaaccgacagcaccagtatcggctcctgcaccagctacgccatcatcgacaccaggtcaattaattaatcctcgattgttgcctactgttgacctagtccagcaacagccgattcagcagacgccaccaaggcagcaggttgtgcagccgattcagcagacgccaccaaggcagcaggttgtgcagccgattcagcagcaag

SEQ ID NO: 49684 - DNA, 202 bp, Oryza sativa
  Clone ID: PAT_MRT4530_52245C.1
cttatgaacccacacgccaaaactcccacgatgtaaggctagctacttagtttatgtcttatgtttactggcaccaaccaaagtacttttggagttcgaatcctcctcatgctaaaccctttttttttttttttttgtttttccaagcccccacttgattattataatctagattattaaaaaaaaaaaaaaaaaaaaaaaa

SEQ ID NO: 49685 - DNA, 720 bp, Oryza sativa
  unsure (1)..(720): unsure at all n locations
  Clone ID: PAT_MRT4530_52246C.1
gtangggcggttgctggaggcgggcnggcgggtcgcagcgcggcagaagtgagggagaagatgagggggacgggcccccccggacnnnagcgcgcaattcgccagtcntccaatcgcgcggagccgccgccctcgctctncacacggcgcgccacgagcgtgggcgcgcgcggagaaaagcacggcgcccctccgcggcggcaatcgggtgcagaagcagcgaanacccgagcaggttaccccgccgccgccgccgctctcgctactccccccgccgccgcgtccgcccgacaggacggccgcaccacnncccgatggccccaagccgtacgccgtcaactcccgcacgagcacccatgtggcacgcgcagcccgggcggctcacacgggggggggccccccncgcagggggccgcgggggcgggccattncacaggcgtccattcctgctacacaacctaccaacgcagtgtcacgccacagagcagaggcccacggacccggcggcggcaagggagcccgaagagacaagcacaggngagtgccaacccgaagggggaatcacgacgccacatangnancattctatctanntacggagagcgggtgtggggggggcgcaggagtgggtggatgctgggggtggcgttggcgggaaggggggatgcggtctggatggggggagggggtgtggggggcgcaagagtgggtgaatgctag

SEQ ID NO: 49686 - DNA, 267 bp, Oryza sativa
  Clone ID: PAT_MRT4530_52247C.1
atgccaagcctggcgccgacctccggcaaggacgacctcaactttgtgttgttcagcgtccaatacccattcaaaatattccagttggtcaggatggatagggaattcaggatggtagttggtaatctcctgcagaattgcagatcaatgatgcatggcaaggtgttgttaggtttggagaagtttggactgaatcaatgcaatggacaattcatagaagatttcaagcagtggaaaaaggagacttctacaactgccacaggataa

SEQ ID NO: 49687 - DNA, 221 bp, Oryza sativa
  Clone ID: PAT_MRT4530_52248C.1
aataaaatcaccctccatcttttggcatccagcttgctggcctgccccagtccgttgcagcactgccccatggctggccagctgctggttcccagctgccaggtagcacaccttgaacacttgttacaagcaagccgtgcgtatgccatctcacccatactcatccattgttgttgctgttgttgcacattgttgcattgccagcacacaccatcaacagc

SEQ ID NO: 49688 - DNA, 1740 bp, Oryza sativa
  Clone ID: PAT_MRT4530_52249C.1
atggcgctcgtcgcaatggctagcagcagcggcagtggcagcagtagatccaccaatgggatgctcgaggagaccgtcgccgacgtcgcggcgctcgtcgagaagtggcgctccgatgatgatgggcggcgccggcgccggagctctctgttcctcgacggcggctttgcggatgcggggaggtttatgtccgccgccgtcgagctccaccgcgggatgctcgtgctcgcgtcgtcggatgtcgaggatgcgcggggacgtggggaccgtggggacgaacggcttgtgcgcgcgcagggggttctcgaggacgccatgcggaggctgcagctcgagctggagattttgctgtcggcggtgaggtcgaacaccgccgacgacggcgacggcgacggcgccgccatgtccggccatggcttggatggtgacggtgctgttgtggtggggcatatacggttggtcgccgaggccatggtggcggctgggtatggcatggagtgcgtcaccacgttcatgtcgcaccgccgcgcggagttcgccggcgcggtgcgccgcctgctcgggtacgcgccgtcgcagcacgcgcgcttccgcaagctcgcgtgggacgacgtcgacggcaaggtgcggtcgtggcacaccgccgccgggttcgcgttcaacttcgccttctccggcgagagggtgctctgccaccgcgtgttcgccgccgccgacgcgggcgtcgccgacagggtgttcgaggggatcgccagcgaccacgccgcggacctcctcgccgtcgccgaggccgccgtggcgcgcgcgcgccgcgcgcccgagcggctgttccacgtgctcgacgtccacgccaccctcgtcgagatattcccggcgatcgtgtgcgtcctcggcgacaagtcggaggccgccgtccgcgccaccgccgctcttcgcaacgccggcgaggcggcgcgtggtattctcgtcagcttcgaggaagcgatccagaaggcgacgtccaagtcgtcggcggcggcgaccggcggcgccgtgcacccgctcgcccgctacgtgatgaactacctcgtcctcctcgccgactacgacgacacccttgctcgcatctaccagcaaggccgaggcagcacgtcgccgcactctccatcgtcgtcgtcgtcgtcgtcgaacccgattggtcgtctcgtgtccgtcctgctgcgcaagctggacgccatggccgggaggcaccggtcgccggcggcgaggtccctgttcatggcgaacaacacgcactacgtgtccaagaaggtgcgcggcagcagcaagctggtgggcatcgtcggcggcgagggatgggcggtggcgcagagcgcggagacaaggcgccacgtcgacgcgttcgtgcacgcggcgtggcgggacgtgctggtggtcggcggcgagggcgccgacgcggcggtgagggaggcggtggcgtcgcagcggaggtgggtggcggtggcggacgacgagatgggcgacgccgtgagggcggcggcggctgcggcggtggtgccggcgtaccgggcgctctaccggcggcacggcatggcggcgtggatgacgccgggggacgtgaacgcgatgatcggccggctgtttggtgggccgcggaatgcagcggcaggtgccaggccggtcgccgccggcggtgcgacgccgcgacgccatcgtctgcgtctcacctcttcgtcgcagaaattggcccataaacagtag

SEQ ID NO: 49689 - DNA, 1036 bp, Oryza sativa
  Clone ID: PAT_MRT4530_5224C.1
ctattccactatatttgttagagctaacatggcaggttctcaatcgagtgtccatggtgaaaatcgtgacgaacccgatgcccctgtcacatgggctaaggtgcagcaaatggggaaaaatcttcttcaagcgatggaatggttgctgaatgcacgacttccgattaccggaggtggagtggttcaaccactgcttgttgatcccgtggatgagattttggatgcacattcggcggatgatgctgatgacgaactccatctccatggcccgcttaatggtggagccccatggcgtcgcacgcagcaaactaccacttttgtcggcgctcgttctcagggagcctctacacgagcatctccacctgctgctacagccaagccacaaccatcttcggcatcatctccagctgcatgcatagattctcgtcagcctgctacacccacaacaacatctttgtcccgtagtcacgatattgtgtgtcataaatgccatggtcgtggccacattgctgctgagtctcctagtaggaggaccatgattgtgaatgagacgggtgaattggactcagcaagtgacaccgaggatgatggtttacgtgaccaagagttggttaacgagcagcgaatagtgttgctattcgcgcagataatggagacaatacttgtttcatctctcgtcgagtgcttagtgtgcaagttgcacaggaagaacatggtcagcgacacaatatttctcacactcgagtggttgaatgactatggtgcactccgggtgaaaactattgtgacggttcatttctccattattcccaagaaatatggttcatggcgcatgtgtgtcgattgtcgagctatcaataacatcaccatgcactataggcatcccatacctagacttgatgatatgcttgatgaacttagtggttctactattttctccaaaattgatttgcgaagtggctatcatcaaatccgcatgaaagaaggacagggtgtggaggtggatgaagaaaagatcaaagctgttcgtgaatga

SEQ ID NO: 49690 - DNA, 483 bp, Oryza sativa
  Clone ID: PAT_MRT4530_52250C.1
cctaaatataagggattttggttggatacaatatatcctaatacaacgaatctggactggagcttatctagatttattgtactaggatatatcatatccaaacaaaatcccttatatttagggacggaaggagtatgatagatcaatgacagacaaataagaattagtactcttatctgagctaaaattcagcctgtgctctgaaatgatagcaagtagtttgctccatcacctctgttccatggttgtcccttgagaaattttctcctcccacgtttacaatacggttggcgaacattggaggctccactttgcgctatatgacatacatctatccatgaccaccatcgcattgacaaagttgagggcgattgtgaactcgatatacagccagccagttttccgctagctcagagtaaaggcttagcagcacgatccatgtaccactcatggcaacaaaaagtggccattgtgatctcatgg

SEQ ID NO: 49691 - DNA, 527 bp, Oryza sativa
  Clone ID: PAT_MRT4530_52251C.1
ggccgcgggttttttttttttttttttgtcgcataagctcatatttctagccaaactcatatctaggtaggtgtcagtttaccctctatttttgaaaaagattttttcgcgacccttgcgggttgtcctgcaattcgccgtcgtaaacttttgctcgctcatcttgaacaggtcttgccatttgcatttctccatggtaaatctcgatgacgtttaccagtggaaggatgagaaggagcatggagagaagctgtccgaaactccagactgtctcgccctggtctttcagctcgatggatggatggccaaatgcttgggacagcagaatgattcgaacagctgcgccaacagtgatggctgtcatcgaaaccaacccggcaatctggatagccttgtagaacctctgctgtttgctgtggaggtaccaagtagccagaccaaagacgatgcagttgccggcgatgacgacgattgtcccaacataagacagtccagccatagacgcagctcctgtaccatcaactttc

SEQ ID NO: 49692 - DNA, 415 bp, Oryza sativa
  Clone ID: PAT_MRT4530_52252C.1
tcgctgaattaataagattatcgtgaagactaagctaaggctgttactctaaaaggtagccgcaactttttaggcatatgtaccattgaggacatgacaaaccttaacggtctacagcccagaccgcaaaggattgtggagcacaaattcgctgatgcagagaaccctactgcccaagctgctgtaaggctagcattcgtcaataggcaaaaaaactcgccccttgagagaaatcttggtacaggttctttccccgaatataactaatgccgccgacacatgacttggtgggtcagtcgcaccaagtatatacggggagggaactagttacgacattgctttcaaaacgctgatatattttcctactgtacgaagccatgcaatcagatgcattatatgcagaggtgctcactct

SEQ ID NO: 49693 - DNA, 492 bp, Oryza sativa
  Clone ID: PAT_MRT4530_52253C.1
atggccggttgggctcggtggtggcggcaccgggctcggtggagggcgtcgccggtcggtggaggcggcaccgggctcggtggaggcagcggtctcggtggcggcggcggcgggctcggcgaaggaggagttcgcggcggcggcggcgggctcggtggagggcggcgccggtcggtggagacgccggtcgggcaggtcggcgccgggcgggcggcggtctcggggggggtcgtcggtgaggaggcagcggaggtccgaatggagggccgaggaggctcggtggtggcggccgtgggctcagcgagggaggcggcggcctcggcctcggcgtcggtggcaacggcggcaggctcggcgagggaggacatggcggcggcggcgggctcggtggcgacggtggcgggcttggcgagggaggacgatggcggcgctagggttctaaggaggcgggaaactgtagcgggacttagaaaaattttcgatccgatctaa

SEQ ID NO: 49694 - DNA, 489 bp, Oryza sativa
  Clone ID: PAT_MRT4530_52254C.1
atggtgtcacggacagcgaggctgatcgcggtggggggcgccgtctttggagttgcgttgctgcaggggttaccccacggcccagctgtccaactcgtgtcgctacctgccagagctggcctgcatgccgctaggcgtcgacgtcgtcgcgtgctgttcgggaaggacggggaccgagtcaccgagaacgtggcgtcggaaggtatcctatctccggccggggatagctatgatcatcggagtctgataatctgtccatggcaaatgcttggtgctggagcctggcggcctctcaatctactccaacagcatctactcagaggaccgggaagcagataccctatctcgatagctttgcagcatgcgaaccgttcatacagccacatagaccagtacattaacaatttacagcccggcggctcaatcagtcaagatgtcagtccgcccgaattgtcgtttgccgcgctttgctctgttggccgccggtag

SEQ ID NO: 49695 - DNA, 1286 bp, Oryza sativa
  Clone ID: PAT_MRT4530_52255C.1
gggctgcaggaatcggcacgagggctgctcttgtagatccaagctttcttcttcttcctcttgcagctagctagtgttcttcttcttcttcttctcactgttccctagtttcttcctctcagatccattttgtatatcttctctcttcattgttgattctctcaagaattgggctcatgaagaggcccagctgcagaggctcctccatggccatcatccatgacacctctgatcaacaagaggacaacatgaggtcgtacatggacggcggcggcgcggcggcgtacgaggaggaggaggaggaggttgaggacgacgacggcggcggcggcggcggcggcggcggcggcggtggggggctcggggagaagaagcggcggctggcggcggagcaggtgcgggcgctggagcggagcttcgaggcggacaacaagctggacccggagcggaaggcccggatcgcccgcgaccttcgcctccaccctcgccaggtcgccgtctggttccagaaccgccgcgcgaggtggaagaccaagcagatcgagcgcgacttcgccgccctccgctcccgccacgacgccctccgcctcgagtgcgacgccctccgccgcgacaaggacgccctcgccgccgagatcgccgacctccgggacagggtggacggccagatgtccgtcaagctggaggccgtggccgcggacgaacaccagccgcctccgccgccgccgccgccgccactggcgtataacagcaaggtggtggacggctcgacggacagcgactcgagcgcggtgttcaacgaggaggcgtcgccgtactccggcgcggccatcgaccaccaccaccaccaaactccggcgagctacgacacggcggggttcacctccttcttcgcgccatccaccacgctcacctcgtccctctccttcccttccatgttccacgcgtcatcgcatttcgatggccaccaagaactcctcgtcggcggcggcggcgccggcgcagtggccgacgccgacctcggaggcgccggattcttcgccggcgacgagcacgccggcggcctctcctggtacggcgccgagggttggtagaagctagagcttagctagctagcgagagagtgagctcagctaagcttaattagctggcttgattgcttgctttgtggctggttggtgacgccattgttgtaaattacggcattgttaagttgtacatgcatgcatgggggtaattataactaaagtcaatttctatagtttttactaaaaaaaaaaaaaaaa

SEQ ID NO: 49696 - DNA, 224 bp, Oryza sativa
  unsure (1)..(224): unsure at all n locations
  Clone ID: PAT_MRT4530_52256C.1
ttgtgtgtggaccaggaaatcgaagaaacaaatgaccgttctgggtgactgtatttgtaatgttgcagtnggctactcaatgtgtgctagatgtgtctaggtggtaataggttgtattgaaaattgtgatgtcttggaaggtgtgaatgagtaagaatctgtaaggtatggtaatatatgtaatacaaatgaaaaaaattggaataaaaaaaaaaaaaaaaaaa

SEQ ID NO: 49697 - DNA, 303 bp, Oryza sativa
  Clone ID: PAT_MRT4530_52257C.1
atgaggatgaagaggatgatgacgatgacgacgggtcacttggttccggtgtacgattacgaggacgccgtccaggttctcgaggatcctgtcgtcgccccccgttgttgtctcggcgccgatctccatcgtcttcatcgttttggcggcgtcctcgaccagtatcgcctggcatccgccgttcgcgatcatcgtgatcacggcgtgtggcgggagttcgccattagcaccgccagctggcggctgttccgggtgcgctgcagcagcggcctcctcgaacgtattgctgaggttggtcactga

SEQ ID NO: 49698 - DNA, 290 bp, Oryza sativa
  Clone ID: PAT_MRT4530_52258C.1
gcggcgtgtcgggtgttcgctcgcagtggccgcgttgagcaggccgtcgctgcggcggcggatggacggggactgatgcagctgtcgtcagaggtgccggcggacggacggggacgtgggtgcgcggcgctggcggatggacaggaacgcggcggcaccggcggatggacggggacgcaggcggcggcaaacggacggacgacgacgaggaccgacgtcggcggacggagtggcgtagaatgaagaaaattcgcgtcccaatggcgtattctgaaagtattgcgaattag

SEQ ID NO: 49699 - DNA, 665 bp, Oryza sativa
  Clone ID: PAT_MRT4530_52259C.1
tcggatccgtcttcctcgcgccgccgccgccgcccgaaaccctagcgcaagccgccgccgtctccttccaaattcggccgcgtctttccttctccggccaaatcaatagaggggaaatgatctccgagatctcctcttccttttctcttttggaagcgtcgcctaattcggtttggaaactcgtggattcgatctcgaatcggatcgacttctctcctccgaatccccgacctttccttctcgccgccggtcgccgtgggcctccgtcgccgctcgctagcccctttaaaaggacccccgagctctcctctatccgccaccacctttgccttagccggggatcctctagagtcgacctgcaggcatgcaagttcttccttcactccgaaggtggtgaactccaaaccactcacaaacggtgccgggcctcctccacaatctcctcggagaggtcaccgggcaacacctccacaagccgtctaggaggcggcaacctccaagatgtagtggccggtcagaccgtccacggctcggtcagaccgccgtcggctcggtctgaccggttgcggctctggcagctctgtatcgccaccaaaaaccagaccagtgcaacaaaccagtggggccggtcagaccggccttaccacgccggtcagaccggctaa

SEQ ID NO: 49700 - DNA, 729 bp, Oryza sativa
  Clone ID: PAT_MRT4530_5225C.1
atgccgacgaggaggcgagggatcgcggagggggggcacgccacccgggcggccgtggtccggtgcatcgtcgccgcgatactcgccgccatcgtcgtcgccggcctcgtcgcgctcgtgttctggctcgtcgtccgccccaagcccatcgagtacaccgtcaccagcgccgccgtgcgccacctcaacgtcacgccgcgcgaccgcggcccgggctgcagcgcccccaccgtcaacgccaccttctacctcaacgtcacgccgcgcgaccgccgcccgggctgcagcggccccaccgtcaacgccaccttctacctcgccctcgccatcgacaaccccaaccgccgcgtctccatgcgctacgaagacagcgtcgcgctccgcgtgctctacggcggctccgagctggagctcgccgccggctacgtcgtgccggggttccaccagccccaccgcaacgagacgacgctgccggtgcgcgccgtggcgcgctcggcgccgttcccggtcccggtcacggacctggtcgcctgggagctggagcacgacctcgccgccggcgagctgagcgtggacgttgaggtgaccacgggcgtccggttcatagtcggcggcgtcgcctccaggtactaccaagtcaatgtgacctgctcgccggtgaacatcggcttgtcgccgtcggcggcgcggtccttcaacagcgtgccgtgcgacgtcgagatctcgtga

SEQ ID NO: 49701 - DNA, 300 bp, Oryza sativa
  Clone ID: PAT_MRT4530_52260C.1
atgacggttgtgactgttggaatggtcggtaataccctccaaccgccactggggagccatctcagccgtccaggagaaccctggatcaaacggagctgcgggaggttcggccgaaccaccaggttcagccgaacttggggccggcccaatctagcccaatttcggctagcggccttctccgttgttcttctcctcagacttgtgaattttggcccagtttgtcgtgtcaattctgagttcttggcccattcatacatacgtctggttctcgacatcgtctgattgatttatcgtttgagt

SEQ ID NO: 49702 - DNA, 548 bp, Oryza sativa
  Clone ID: PAT_MRT4530_52261C.1
ttattgaagtctatttgtaaatctccaaccataattggcaaatagttgcataaccgtggtctccaactttcggcatgcaacttttagaaactcttcatcttcatcacacctttgtagttgtgcccaaaaccggacccaatgagttgccctgaaaatgacccttaaaagccaagttaccaatccatctatcttcccaaaatctaatttgttccccatgaaagtgtcaattaggcctagagggagggtaaataggaaacggtgccgggcctcctccacaatctcctcggagaggtcaccgggcaacaccgtccacaagccgtctaggaggcggcaacctccaagaggcaatcattgagcctactcaacctggccggtctgaccgcagtgtagtggccggtcagaccgtccacggcttggtcagaccgccgtcagctcggtctgaccggttgcggctctggcagctctgtatcgccaccaaaaaccagaccagtgcaacagaccagtggggccggtcagaccggccttaccacgccggtcagaccggctaa

SEQ ID NO: 49703 - DNA, 1559 bp, Oryza sativa
  Clone ID: PAT_MRT4530_52262C.1
cactattagtggggagcactgcaaagcgtagcttataccagtagcagtaggaagaaggcgccatggccaggcacaagagctcgccgccggcgatccgccgccgcggggtcggcatgctccggtgggcggtgcgcgtcgcctcgagcatcgtgctctggacggccctcctccatttatccagcctcctcggcctcccccgcccgccgctcctcgccgcccggccctcctgcctaggcggcggcggcggcagcaactccagcgcctcctctgctgtaaccgtcgctgccgccgacgaggtcgggcgcctcgcgcccccggctgtgcctcgcaggactagtgatacgttaacgttatgtcagaatttgagatcttcacatgttggaacttggaacctggaagctatatgtgacatggtaactgtagcacgctatatgaacctgactatggtggtacctgaacttgataagcagtccttctgggctgatcctagtgattttggagatatttttgatgtaaaccacttcatcaattctttacaagatgaagtaaagatcatcagggaactgccacagaaattcagcaggaaagttccattctcaatgcagccaatcagctggtctagcgagaagtactatttgagacagatcttgcctctagtacggaagcataaggtggtacgttttagcaggacagattctcgccttgcaaataatggccttcctttaaagctccaaaagcttcgttgccgtgttaactacaatgcactacaatttgcaccatcaattgaggctcttggcaaaaagatgatatcagctcttaggaaaactggatcttttattgtgcttcatctgagatacgagatggatatgcttgcattctctggttgtacacatggatgttctgacgaagaaacagcagagctcacgagaatgaggtatgcgtacccttggtggaaagaaaaagaaatagattctgaaaagaaaaggctcgaaggattatgccccctaacacccggagaaacaacattactactcaaagctcttggtttccccagggacactcggatatatattgcctcgggtgaaatctatggtggtgaaaaaagattaactgaactgaagacagaattccctaacattattcggaaggagatgcttttatctgctgatgagttacgccccttccagaagcattcgactcaaatggcagccctggactatcttgtgtctattgctagtgatgtttttatccccagtaatgacggaaacatggctaaggttgtagaaggacatcgcaggtttatgggctttcacaaaaccatacagcttgataggaaaaagctagttgagcttatagatcttcttgaagatcaggagctgtcctgggacgaattctctactgctgtgaaggagctacacgagggccgaatgagcgaacccaccagaaggaaagctattgccgggcagccaaaggaagaggactacttctatgctaatccacatgaatgtcttggagctgcgagaaagcgaagggagaagctaaaacatactgagatatga

SEQ ID NO: 49704 - DNA, 363 bp, Oryza sativa
  Clone ID: PAT_MRT4530_52263C.1
aacaccatatatttcttgtcgccgctagtatattgagctgcattgcttcgacctctgatttgcatccatccatccatgcgcacataacgaagaacggagaggagtagatgtgcagaacaatctgagctgaatatgacgatgctaacatccctggatacactctctctcctgcacgtcgcctgcctgccactcggcacttccatacatctctcgtcgtcaatcctccttcaccatcatctgctcaggcgaaaataagatcaagaacgacgagccctaccggattgcacgtggcactgtaagtcgatattgatgaattaggtaggaagaggacgaagaagaggtgtgtacactattcatagacaa

SEQ ID NO: 49705 - DNA, 1083 bp, Oryza sativa
  Clone ID: PAT_MRT4530_52264C.1
ctccacttgattaacgcctactattccttggattcgactagtcaaactgtgggtcatgactccatacaatgatgtctaacaaatgccaaggaaaaaaatgatgacacataagcatgatagtatcttgcaagaaaatccctgctgattggaacgttttgactaactgtttggaagaaatgccagatgatgtaactgggcgcagaaatttgctcacaccaagtgattacactcactaactgtttggaaaaaatccctgctcgtcagtgagctgatagcttcttactcttatcctgaagttatcagtattactccaaatcagaagcatgagctaatgaccaccagaagctgggatttcctcgggcttaaaaatgaaccacccagtgagtttctgcaaaggagcaactcgctactgccgcagtactagcagctctagatgatgctatccatgatggagtcgatatcctgtccctctcacttggtgttgatgagaattcatttggggcactccatgcagtccagaatgggattactgttgtttatgccgggggaaatagaggccctcgacctcaagtcctttataacacagctccttgggtcattacagtcgcagcgagcaagattgatcgatctttcccaactgccatcaccctgacggcgcagccggcgaagggaggggcgcggccgtgggggcggaaaccgcttccgccgtcggccggacgcgtgggtcgacccgggaagggtgccgtccgccgccgaccgaagtcggtgcacaacgccttcacggcgagggaggccggcaagatggtgctctccatcgacaactccggctcccggaagcggaaggtcaccgcctaccggtacttcgtgcgcaagccgtcggcgtagaagtcgtcggcggcggcggccagtggagtgctttgcatcgttgcttggctttgaagagggagaggtttaatttaatttaggggctacttaattagtgctataacgacgtgcatgtattaatgccatatgtagaatataaattgtaagagctgtcacaacgaacttatcatcatcctataaagcttcgagttcactatt

SEQ ID NO: 49706 - DNA, 1939 bp, Oryza sativa
  Clone ID: PAT_MRT4530_52265C.1
ttttttttttttttttttaagtctaaaaaagcagattccatttcttgtgtagcttttttggagacatttctagtgtggctacgcattctaataagggtttgtttacaacagaagaaacagaaacaaaaagggataaaacagtagataagtaacagaattttctttgttgccaaggacatccctagtggtagacaaggctaggaaaacgtccattgctcatgcaatttattcttctcatacttctgtacaaaggacatctaaataattgttgtgttgtactgcaaagacattttgctccatctaattaaccaactgatccctcaagcttcaggttcataagtgcatccatctcatgtgcaaactcgtaaggaagattctcgaaaacagccctgcagaatccaccaatcatcgctgcaacagccttttcatggtctatccccctttgttggaaataaaatagctggtcctcccctatttttgaagtgcttgcctcatgctcaacacgactagaaatgcaacccacctgaatagtcggataggtgttggcagcagcgttatccccaatcagcaaagaatcacactgtgaagaattataagcattttctgcgcctgagtttatctggaccaacccacggtagcaattccgtgacttcccagctgagatacctttggatataatccgactccgcgaattctttcccttgtggatcatttttgtccctgtgtctgcctgctggtaatccttcgtcagtgcaactgagtagaactctccaacagtatcatccccaagaagctccacacttgggtacttccatgtaattgctgaacctgtctcaacctgtgtccatgagatcttagagccccgccctttgcaccgtcctctcttagtaacaaagttgtaaatgccccccttcccctcctcatcaccagagtaccaattctgcaccgtagagtacttgatctctgcctgctcctcacacacaagctccacaaccgccgcatggagctggttggagtcataagctggagcagtacacccttccagatagctaaccgtgctcctctcatcagccacaattagagtcctctcaaattgcccggtctccttgtcgttgatcctaaagtatgtcgatatctccattgggcaaaccgtatccttgggcacatagcagaacgacccatcgctgaacacggccgaattgagggcagcatagtagttatctgccggcggcacgacgctgccaaggtagcgcttgacaaggtccgggtactcgcggatggcctcggaaatggagcaaaagatgacgcccttcttcatgagctcctcccggtgggtggtggcgatggaggtggagtcgatgacggcatcgacggcgacgttggcgaggcgcttctgctcgctgagcgggatcccgaggcgatcgaaggtgttgagaagctccgggtcgacctcgtcgaggctgttgagcttgggcttggtcttgggcgcggagtagtagcagatggactggagatccaccggctcgtacacgttgtcgctccaggtgggctgcaccatggtcaggaaccggcggtaggcggcgaggcggaagtcgagcatccacgccggctccgccttgagctccgagatgcggcggaccgtggcctcggagagccccttggggatggagaaggactcgaaatcagacacgaacccatacttgtactccctcttcagcaggttctgcagcgtctccgattccgtccccgcctgggacgacgacgacggcgatggcttctgcgggcccgtctgcacggccaccaccgagaggcgtccacggcgcgtgcacggcctccgccgggatccgtacgacgacgggcacgccgccccgagcttggcggtcgcggcggcgcagcagggcgagaagaggggcgtggacgacgcggcggctgcggccat

SEQ ID NO: 49707 - DNA, 321 bp, Oryza sativa
  Clone ID: PAT_MRT4530_52266C.1
atgcgacagaaggtgagggcgagcgctgtgtcgccgccgccggcgaagtgggcgccacagcgttgggctcggaggcagaggcagaggtgggggctaggagccgtggcggtagccgcggaggtggaggcgaggcccggcaccatggagctggactcggagccctggcttgctcccgcaccacatctccctttctccgcatgccgcgacggcctaggtgacggcgagcacacacttcgtgaggagcacgcaacggtaggggaccttggagccctcagccgtgagcgcgtcgacgatgaacggcaccaatacaagcaaaaatag

SEQ ID NO: 49708 - DNA, 131 bp, Oryza sativa
  Clone ID: PAT_MRT4530_52267C.1
gtttccgtgagcgatcgacaggaggacatggcggagagcggctcaaccttttctcagggggggatatgacgatggggtagttatactaatctaacacagttcttcactctgaatggacgctacaccacttt

SEQ ID NO: 49709 - DNA, 429 bp, Oryza sativa
  Clone ID: PAT_MRT4530_52268C.1
ttcagtcttcgcgcacagacgcgtaacaagcaagggcaggggggctatgaactgagacgacggtatcgcaccagccaaaaggcaccaactagcgccctagctgaagaagctcgatagccctgcataccaaagaacgagagatcacttacccacgaaacacaggaaggaatccaaggagctcttggacatgaacgtcgagcaggagggatgggcatgggccataacgaagcggctcataacgttggttgggggacaagaacggacgaactccatgatgcaagctatgtcaacagagtgaagaggctgacccgatcagagaaaagactgaagctgaagcagcgacattgaagcgcaacacgcagcactgcacgccacagaactgaccgaactgtgctccagaggccagggacaacacaccaacacactggc

SEQ ID NO: 49710 - DNA, 1744 bp, Oryza sativa
  Clone ID: PAT_MRT4530_52269C.1
atggcgttcgcggcgcggagaagcctcgcctcccgcctctcccaccacctcacccgccgcctccacccggcgacggcgccccacctcctcgcctcccactccgacgacgacccctcgccgccacccgagctcccaccattcccccactccccgtctccgcgccacccgcgggcgggccaagccctagaccgccacctcctccccttctccctccatcacctcgcggggctacgccgccgcggcttctcctcggccgccggcgaggtcgatgctgccgcgggcgtcctcgccgacgccgcggcggcggcggaggctgtgccggcgccgttcccgggggaggtggcggcggcggccgctgactcgttcttccccgtcgccgcgctgcagcacgtcatcgattacatccacaccttcaccggtctgaactggtgggcctgtattgcgctggcgacagtgctgatccggagcgcgaccgtgccgctattggtgaaccagttgaaggctacacagaagctaaatgcaataaggccagagatggaagccatcaaagaagaaatgaatgcgatggatccaaaatcagcaaaggaagggaaagctaaaatgactgcactctttcaaaagcatggcgttagtccatttactccacttaagggactcctgatccaagggccaatatttatgagttttttctttgctataagaaacatgattgacaaagtaccatcgatgaaaggaggtggatcactttggtttactgatctaacaacaccggatcctctttacatccttccagttttaacggcattgatcttcttggtgacagttgagcttaacttgcaagaaggaatggagggaaatcctatggctagaaaaatgaagaacttttctagaggaatggctgttttgacagtcccattcacaatgagttttgccaagggaattttctgttactggattacatcaaacttgttcactctgacatatggttttgttatccggcgaccggctgtgaggaaattttgtaatcttcctgctttggaagctcagtctgcatctgcaaagaagcaaatgttcaatctatttggtggatccaaggcattaactacagcagagtcacctgtagcaattacgggaggtccgcaatctagtttggagcaacctgatgctgctgctctgggctatcgggtcaaaaatcctgagaagaaggcaaaatccagaggcaaatctcggaggcgcaggtaaattgtcggcacacaagagcctagatgagcaaactgtcatttggcgttgtggtcagtggagatttgacatttgtggtggtaagatttgattttgcatgagataaaggctggcattgcttttttggtggaataagccagtttaattttgatagacaatagcttatacacaaatgtaacttgagttattaagtaactttacaaagatcaacgttgttgttcgtttccaaggatttaggtgagaatagcttgtttcttggagttttagtaacgctcattggcaccagagaccaaatgttgtagttcagtgacaccagtggttcggaccatcaaggggtaggaatgcttgtttctttttcatgactagatattttttttatgattagatcttttgtatctgcacatatgtggaggtcctattcatgattgtttagagggcttgtgcagcagttgtgcgcctgaataaaaaggtgaacagatcgtgaaatgaaaaaaaaaaaaaaaaa

SEQ ID NO: 49711 - DNA, 276 bp, Oryza sativa
  Clone ID: PAT_MRT4530_5226C.1
atggctatgctcactactggccgccgacgctgcacagggaccagtatcgtgacccgagagtgggcgcagccaccaccgcttctgctcgccccacagagcgtcccggccgtcacccaagcgctctcggcagctggaacatgccagcaaggggccatcaccctcacccaacaatctcagggctcgtcgagcacaggatgtaggcgtatgtacgattgcgaagacaagggagttggagacagtgatctacgtcaccttatttcacaagtctattattag

SEQ ID NO: 49712 - DNA, 138 bp, Oryza sativa
  Clone ID: PAT_MRT4530_52270C.1
atcttaaacattctacaaaatgggagttttgtaagatcattcctctgttacagggaagaacaaattttgttcattttacacaaatactgtagttatttgcatgaagcacgcaagccttatattaacagttttaatatg

SEQ ID NO: 49713 - DNA, 648 bp, Oryza sativa
  Clone ID: PAT_MRT4530_52271C.1
gacagcaatggcaggtgattatgattcagtaattatctgccttggtgctagagctagctcacttccagaactcacaaataagctacctcttagaacatgccgaggagttatagctgaattccagttgccatcagatacaatagaaacatatggcagtcaaagtccttcaatcttatctgatgcttggctggcattccaaggtcctcgtaccgtttccattgggtcgacttggcagtggaagtcagaaaactattcttcatctgtatctgatgatgaagctctcaatgcaatggaagagctgctcccaaaagcctctgctgtttatccaggaataactaaatggaaatttgtacaagcaagggctgggataagagcaatgcctccactgacagccaacggatcattgccgctgttgggttgtttgaatgatgtgataggcaagaggagcaactgtagtttttggctagttggtggccttggtgccaggggtcttctgttccatggtttggctggaaagcttactgccaaggctgtaatttcctgcgacgaaaacctaatacctcctgaattcacttgctggaaagaaccttagaacttcaaatgagcaaaggaacttggaggatggtggtagtcgaactgatccttaag

SEQ ID NO: 49714 - DNA, 114 bp, Oryza sativa
  Clone ID: PAT_MRT4530_52272C.1
gccctcagtatctccattttccaaagaagtgggaccaaggaggtacgattctctgatggcagtacggagcagggtttcccaaaccgcctaggccggggttaccgcgtcccggcg

SEQ ID NO: 49715 - DNA, 832 bp, Oryza sativa
  unsure (1)..(832): unsure at all n locations
  Clone ID: PAT_MRT4530_52273C.1
ttctagaattattcacgaattattgcgcaattattacttattttctcaaaggaaaaggctgtgctgacgtcatcaagggggaggggcggcgccggcaagcaggccccaccggtcagcgacacaagggcgtcgatccaccgtggaccgggaccaccgaggcggtccaccgccggtccacgggaaccgacggcccggattggcccaaagccgatcagatggccacgaggcggcgcggctggggcacgggcacggcatgaaaccggctcggccgagccatggtgcggggcagcgtgcggcctccggaggcagcagccggcggcgccaaacggcggcgagtaggcggaagacggcggcgctcacgggcagtggcgatgcacgcgaaagggaaggggagtgggaggaggggctcaccgagcgtgcggaaggcggcgaccgggcggcggacggggaagagcgggacgcggcgaaggaggcgatgcggccggcgcgtcgcggcggcagctggggtgatggcgaacggcgaccggagacggaaaaaaaaatggccggtagggtggcgtggtggggaggtggttcgaggcagtggcgtggcttgaggtggttgaggatggcggctagaggcggccggaggtggtaggcagtggtgcacgaggcggcggtgttcccgaggcggagaggggaaatggagtataggccgggctgtggcacgggtccgcgaagccgatggtggtgtcggattggccagacgttggttgtaccacgagtggcgggcggccggagctcgccgnaaacgggcggtgcaaggnaacggcgtgngggtntcgagctgcat

SEQ ID NO: 49716 - DNA, 786 bp, Oryza sativa
  Clone ID: PAT_MRT4530_52274C.1
atgagtggaagtcgtttagtcacaaccgcccctagtacgttgtcgctgcgaatctccactgggccgctgccaacgtcggaatccttctccgcctctccgattcccagcccactaccacctctgccaacgtcctttgccgtggtcagagaggacatcatcttccgcccggactccaaggcctccgccgccccaagggctgccatcgccgattggatccaccttcacctgaaccatctgcatcgggctgcagctgccgcaaccgaggaggtcattgcttggactcgcacaccgccgctgcccctagggtcgcccgctagctacgaaaccaccttcgccggaaccgccttctccttgccgaggaccggacatcaacgcttacgtcgccgttctccacagcatccaccgtcgcccaaagaatcgtgtcgccgacgtcttgccgacccgccgccgcactgcctcccgacccctccactgctgcgcgcaaggtgcggttcggccaacgccgctcgccaactcgcgcgcctccgtacctccggaccacctccgcagccgcgctcggcccggccggccaccgccgcccacggccccgtcaccttccacgccaccagattttgggggccggaaccccagactcggtacagccctcagccgcgtcgtggtctccgccgaaaggccccgctgtcgccttcctcactgccgctcggcacgccggcggcctgctcgggcggcggcaaggcgaggagacaaggaagcgagaaggagacgaggaaacgctgtgaggcgaga

SEQ ID NO: 49717 - DNA, 488 bp, Oryza sativa
  Clone ID: PAT_MRT4530_52275C.1
tttttttttttttttttttttttttttttttttttttttttttttttttttttttttttttttttttttttttttttttaaaaaaccaaaaggaaaggggggtaaagtcaacggaattagggggggcttcgaaaaaaaaaaaaaaaaaaaaaaaaaacgggcttggggaaaagggggggaaaaaaagcaggggggaaaaaaaaaaaaactgtttggggcggggttccaaggggggaaactatgttgggggacaaaaaagggggaacaggcttttcaaagggtttttaaaaattgggccgcccaaaattgggtatggtaaatttcgagggggggagttaatccttttttggcaccgctttggtgaacttgaaagccgggaaattccggacgggacccggggggggaaccatttttcctaaagggggggggaataaaaggtgggggaaaaaagggaaaaaggtggtcccgggggaaaagggtattccgct

SEQ ID NO: 49718 - DNA, 600 bp, Oryza sativa
  Clone ID: PAT_MRT4530_52276C.1
ccccccctcgaggtcgacccacgcgtccgcccctttctcatcctagatccaatcggccagggggcggcgacggcgaggcagccagccgccggctgcgccttccacggtcctccgcgcgacatccacgagcctccaagctgcgccgccacatgcatgccgagcttccgcgagacctcgacacgccgctgttgttgtctccaagcagatcttgcgctcccatcctcttctggtcgactactccacgcggcggcccgctgctacagctattgcacgttgtgccatggctgattagttgccactaatctttctggtttttcatgcttgattgcttcttgttggactattttgtgcttgattgcttttgcatgtgtaagtgtgagacagatcttttgttttcagccatcaaacttgttaatttttgttgtttcctgattaattacttaagaatggcgtgtgtttttgcacttggcaagtgtttagctaagcattgcccctgctgatgtgtatttttgatgatttactgatggtatgtccatcgtttgtactgcatatttctgaacttctgaaaaaaccaaaggttggagcaaaaaaaaaaaaaaa

SEQ ID NO: 49719 - DNA, 798 bp, Oryza sativa
  Clone ID: PAT_MRT4530_52277C.1
atggagaagatacgcctaaaatatgacaggtttaatttggcagataaatcaggagaaagctcttggtctgatgacctttcagtaaatgtaagaaaaggaaaggatgaaaagaatgagagtgaggctttcgttatttcgcaaaagaaaattaacatgatcaagcagatgacaagcaaatataagataggttgtagtgcagctgtccttgtgtggtacgagcaagtagtacagtgccgtgcacacgagcagcagacagcagaggcagcttggttggtggttactgctccagaaactgagagagctgctaattataatcagcaattcagcacacgaatgggcaggacagtagtacagtgcagtactccatgcggcggtctgaaccgttcgatggctacaatcaacagggagacgaccagacgtggtgctcgggttgatggtggcggaagcgattggcgatccagtcggtgggtcggacactccgggcgggtggctcggactttccggtgctggcggaggtcgtcgcgggctgtttccggcgaagggaagcagcacgtacccgtgtggggtggaggcggtgaaggatcatgtggcggatgtgctttccaggtcggacacggcttcttggtgcaggcgggtcgaggcgcagaggagatcgactcgaacatgtggagtcaggagaaagaaattatagggatagcggagtctcttgttcacggtgagcctggtggagacttgtcggggctgctcgacgggaggagcgctcgtaatcagtgccccagagatgtaggcctcggctga

SEQ ID NO: 49720 - DNA, 170 bp, Oryza sativa
  Clone ID: PAT_MRT4530_52278C.1
gttattgtccaatgcaaaatccaatcgagggggtggcgaaccctaaccctaggcaccgatcgagggaggcggcggcaattgccgacgaggggagcgaccacgagggccgagcgggcgccttctaggacgagggggatcctacggtcaccatcggtgagcacatcgagggg

SEQ ID NO: 49721 - DNA, 395 bp, Oryza sativa
  unsure (1)..(395): unsure at all n locations
  Clone ID: PAT_MRT4530_52279C.1
tttttttttttttttaaagggtcatgatattgatgctgcacgcggggaaacaagttgtatgtttgccgcggcttcgagaatattacaggctgctggtaatacaaaacaaggtcgtctgtgcttgcaaggcgtgcacggattcgcaccagtgccttcatctcatgcctcagcggcagatcctttccagtcgattagcagccgagggagagctgccaggcgactcatccacccagcaatctaacgggtaggacgtgagacgtgcngcgggcaaaatcgaccactgtgctccagatcaacaaacaagcggtcggaccgctccgctcgaggaaacccttgcacncgcggcgagccacacaggcntggaatacggctccgtcgagccaatctcgcgctcg

SEQ ID NO: 49722 - DNA, 4354 bp, Oryza sativa
  Clone ID: PAT_MRT4530_5227C.1
ggccaccatcgtggttgccaagatcatgatgacccggataatgttgcttgggtaaagttgagtgttcccaagtttattggaaaggaagactcggatgcttatcttaattgggacgaacagtgtgatcaaatttttagagtgcataatcttttatctcagaggagagtaaaccttgcttccgtggatttttctagttatgctctctcttggaggaatcaaatgcaagaaaatcagtatgtgttgggtcatgaccctattgaaacatgggatgtcatgttatgagaatgttttgagtcttcaagttataggcgtgaccttcacagtcagctgcaagtgttgagacaagggactcatacagtggatgcgtgttatagggaaatggagttgctcctgatccatgctcaaattagagaagatgatgagtcaaaaatggcaagattttcgcatggtctcaatgatgaaatttctgactttgtggagatgtttccttacaacactttgcaagatctttttgatcaagcttggcacacggaaatgtccattcggcaagaatgacataatcggtcctctaatggccgctccaatgcagccccatggcgtcgcacgcagcaaactaccacttttgtcggcgctcgttctcagggagcctctacacgagcatctccacctgctgctacagccaagccacaaccatcttcggcatcatctccagctgcatgcatagattctcgtcagcctgctacacccacaacaacatctttgtcccgtagtcacgatattgtgtgtcataaatgccatggtcgtggccacattgctgctgagtctcctagtaggaggaccatgattgtgaatgagacgggtgaattggactcagcaagtgacaccgaggatgatggtttacgtgaccaagagttggttaacgagcagcgaatagtgttgctattcgcgcagataatggagacaatacttgtttcatctctcgtcgagtgcttagtgtgcaagttgcacaggaagaacatggtcagcgacacaatatttctcacactcgaggtaccataaataatattgtttgtcatattattgttgataatggcagctgcaacaacattgttagtttgaagttggtgaaaatattaggcttgagacaacgacatcatccagccccatacaaattgcagtggttgaatgactatggtgcactccgggtgaaaactattgtgacggttcatttctccattagtaagtatgaagaccaagttgagtgcgatgttgtaccaaagcaagcatgtcagttgctgctcggaagaccttggttatatgatcatgatgttcaaattagtggccgcaacaacaagcatgttttaatttacaaagacgagcatatctcattactaccgttaacaccacaggaaataaaacctgatgatctcaaaagacaatagcgagaaagatgccaaagccaaataaaaccccacagctgcaaatgaccaaactaaggggaaaagagggtttggtgatgatggctaggaatgggaatataaaagaaatgagtgaacccaatgccatattctttgtactcctgtagaaagaaagtttattatcaactaacgacttaccctctaccttgcctagtattgttctttatcttttgcagacatatgagaatgtattttcagatacagtgccacctgggctgccaccgaaaagagggattgaacataaaatttaacttattcctggagctcaacttccaatcgcccaccgtaccgcaccaaccccaaaagaaacaaaagaaattcagcaccaagtacgagaattgctcaacaaagggtttgtaaaagaaagtcgttatccttgtgttgtccttgttcttttagttcccaagaaatatggttcatggcgcatgtgtgtcgattgtcgagctatcaataacatcaccatgcactataggcatcccatacctagacttgatgatatgcttgatgaacttagtggttctactattttctccaaaattgatttgcgaagtggctatcatcaaatccgcatgaaagaaggtgatgagtggaaaacagctttcaaaaacaaaatttagtttgtatgagtggttggttatgacatttgatttgacaaatgctccatgtatactttcatgagactaatgaatcatgttcttagacccttcattgtcaagtttgttgtgatttactttgatgacatcttgatttacagcaaatctattcatgaacatgtcgagcatatcaaatgtgtgcttgctgttttgagggaagaaaagttgtatgctaaccttggtccttgccaagtgcaccttttgcaccgtcaaggtagtctttcttggctttgttgtttcaggacagggtgtggaggtggatgaagaaaagatcaaagctgttcgtgaatgattacccccacaaaatgtgagccaagtaagaagctttctaggtcttaccggtttctaccatcagtttgtcaaagatttcaacaccaatcaatgaattgacaaataaagatgttccatttcaatggggtgaagcacaacacaagacttttgagttgctaaaagataagttaacatcagcaccactacttgcactaccagactttggtaagacttttgaaattgaatgtgattccactagtgttggcattggaggtgtacttatggaagaaggaaagcacattgcatattttagtgagaaactcagtggtccaactctcaattattctgtttatgataaagagttgtatgctttagtgcaatctctggaaatgtggcaacattatctatggtctaaagaatttgtcatacattctgtccatgaatctttaaagcatcttaagggacaattaaagctgaaccgtaggcatgctaaatggagtgaattcatataatctttcccttatgttgtcaagtacaagaaggccaaggataatattgttgctgatgctttgtcgaggcgtcatgtattactttctcaacttgatgctaaaattcttggccttgaaagtatcaaagaattatatgctcatgacatatatttttctaacccctatgctaaaagcagtgatggcaagggttgggataagcatgatttgcatgatggatttttattttgagctaacaaattgtacattccagattgctctgttcggttactccttttgcaggaagcttatatcggtggacttatgggtcatttttttgccaagaaaattgaacatgtgttgaccgatcatttctttcggccaaagatgcggcatgatgttgaacgatatgtgctacactgcgcgacatgccacaaagctaagtcctttttaaccctcatagtttatacactcctctacctattcctagcattacttgtgaagatatttcaatggactttgttcttggtttacctcaaacaaagagggggagggactccatttttattgttgttgattgatttaacaagatgacacattttattccctgtcacaaaagtaacaatgcttcacatattgctgcattgttttttcaaggaaattgtacatctacatggagtgccacgcaccattgtttcagatcgagacaccaagtttttgagctacttttggaaaacattgtggggaaagcttggcacaaagctattgttctctaccacatgtcacccccaaactaatggacaaatagaagttgtcaaccgcacactcggtatgttgttacaggctgtccacaagaagaatttgaaactatggtaagaatgtctacctcacgtggagtttgcgtacaacaacgcaatacactccactactcatctttgtccattcgagattgtttatggtttcaaacccaacgctcccatcgatcttttgccattgcctttacaaaggcatttgaactttgatgcaagtaaacaagctgattatgtcaagaaaattcatgagaagactcgcacaaattttgaaaagatgaccaggctatatgagaagcgtgcaaacaaaggacgaaaaaatatgttgcttgaatcaggtgattttgtatgggtacatctactaaacgatcgatttcctaatcaacacaattacaagctacagccccggggtgatggacctttcaaagttctaaaacgcatcaatgataatgccatcaatgataatgcatacaagattgatcttccaagcatctatagcgtcagtgacaccttcaacgtctcttctctatttgtatttcttttatgaattgaccaaactgcccttgcctctaatcagatcagatcgggccgatccaaatcgagcgtgcgcctgttcccagcaccctcgccgccttgcgctcgtggacgctgtcctccag

SEQ ID NO: 49723 - DNA, 1168 bp, Oryza sativa
  Clone ID: PAT_MRT4530_52280C.1
aatggccaggactaatgctgcaccttgcttgggaactagtactgctgctgatccttctgcacaagagctgcaagaacctgatgctttgctctctggagagttactcagtagtacagcactgaaagaaccgataactgcatctacgtcttcctctccacagacagtacggcgtgacggcattgacgcttccacaccatcagggtcatctcctgggtcatccattttggtcaggagacctcctggttggtattttgtattctacatcaggatggatcctgggggacgtttgcacatgtatcctgatgtgggtaatgggccatatcggagcctgccggaagttgatgatgctatcaaccaacatcttcataacctgcggattccagagatgggcgaggagcttgataggctccctctcattgagattgggggttatgaaaaggataaccgttgtttggtccaagctttagttgagaagtacaatgatgatcataatcttttgggggattttgcttatgaactgaaggaatttttgcaaattggagtaatgtatgaggaccaaaggtattactaccatatcaatttcactacaaaaacaaaaggagcccacaagtctggctgtgccatggacaacctattctttgctgaactatcgcatatgcaaggaaaggatgaatgggtgatcagctgttgctgtgtaattaaacctgccgctaatggtcactgctatggttgtagaaatgatggaaaatctggtttgaagcaccccaacaattctgatgcttacagtggtggtcatttggatggctgtttgccttttggactaaacgattcgcgcagcaaatacgacggtctcaatccggaagatgaggaggctatgctaagatctttgtataagaaaaatgtaacagcattttcaactaaaatctcaaactctctggcaagccagcgtcaacctctcagcaaagcactcctctactatctactctcggtcacaggctgctttctgcagcagcagccacagaaaacgaccgagaaaagaaaagaaaaaggccgagacagacgatcacaccctgatctatctgaggctccaaacaccttaaagaagaagacaatatggatagcctgcctatcttgcttcaatttcttctccagccacatacatttctga

SEQ ID NO: 49724 - DNA, 920 bp, Oryza sativa
  Clone ID: PAT_MRT4530_52281C.1
cccattatttgttaaggttggtgaagggaaagagtgtatcctacaagcctatggtctgcctcggacctggccctgtcctaggtcccagtctcaccttagtccttgtaggttctacggtcctcggcaaaaggggcgtagaaatctgcaagatttatatcttaagagaacaagctaaggtatgcttcgggcccggcctactcttgggccccgggctcaccttagttcgcatgagtcacgcactactcgaggatgatgagtgccaagacatacaaagcataaaggtgtaaactgaggtttgcctcaggcccggccttgtttcgggccccgagctcaccttggtccttatagggctcactccctctgcctagaggagcatcgagacgtacaaatcttggaatattccttcaccaacgacatcttcgagaaactcatccgaggattgccaaacttgccgggaagttgggcgtgctccatagccagctgtgaggcagtatgccccgccataattgaaacaggatcatgggggatccccaactagtctgaagttgaaaggacgtggacaagacaccagcgctgagtcacctaggactagtgacgccttggacacgcgtcacacatgcctcgcaccacttgatttatccaagcaagtggagaagcaacggtggcactgtttcgggcaagtcgggtctcgtcaggcccaccacgcaccacgtggcgagcacactggtgagatcctaactgtctcagatggagcccggggtaatatgaatcgcaagactcaaagggtttcttgaagactgtgttagggaaccagccggcgacaataagacagctgataagacaagactaatagtagattgcctgaaaaggtctccattgtacttagctgatctagagaagacaacgaacaccaacataga

SEQ ID NO: 49725 - DNA, 1122 bp, Oryza sativa
  Clone ID: PAT_MRT4530_52282C.1
atggcccggatcgaggcggtgatagcgacgaaggttgtggtggctcccttgttgggcggaggcaggggtggccgcaggaggtgcctgcgcggtcgtcgtggccgtgcgcggcaacttcaacagcagcgatcgagcgcggcgacggcctcgatgggtgcccgtccaggtggagatggaggcgggtggcagagaggggaaaaggggtggctggctgtggtggggagaaaacagcacgaagagaaggctgctcctggcgatggttttgcttgtaatgccaatggcttcgaggagaatgatcggcacagtggtggaagggcgatgtggcgcgcgtccataggttggacggcggcggcgcgggcccgggtgtcgacatcgacacagtggaggggagagcgaggatgcgaggcgtggacgaggagtagcgacgctcacgcgggcgacgtcctgggaggcggcgaagtgaccatcggtcacaaggcttccttggagcacgtgtcgtcggcggatgggttggacggcgataatgtgagccccgagtgtcgacatcgctacaagaaggaggcttacaagggaatgccagggcatggcttcggtgcacggcggggtgcgtgcgacgcacggggagggcgtgcctgcgaccggcgcggcgcacggccggggtttggtggctcggtgcaggagcgcaatgcggcgtggcacggctcgacgcgacgcggcgcacgcaatgaggaggagcagcgcggcacgacgcggtggctcgggggcctggtgcgccagccttgcccgactcggcattttgccgagcacgtggcgggcggcgtccgtgcgccgccgccgttccagtcatcgtcgtcgctcggggagatcgccgtcgtggtcgccaagtcgccgccgtcctccgtcgtccgttgcttctccgccgcttctttggttaccggtgagttcgccgcgtcgccctctacccgttggtgccctccgttcgcgtcgccgcgccgtcgttcgccggcgagcatgcgcgtccgagccgccgccgccggtggtgacgtcatcgccgacgtcatcgtccccatctcccgtgagccggtcgtggaccgttcgatctcggccgtccgttttggatag

SEQ ID NO: 49726 - DNA, 899 bp, Oryza sativa
  unsure (1)..(899): unsure at all n locations
  Clone ID: PAT_MRT4530_52283C.1
ttttttttttttttttttttttttttttttttggntcaacttgtggcgcccccgggcggcgggttgagtttatatgttgctgcaattctcagtgaccaggaatgtacagagaacaaaccaaagcatttgcatgacagtcctgatgaagtaccaccactccaccagcacgtccgaggcaaacttcagtcaaaatcaactccatatgttatgatgaaaaacaaggaaaacgatacattaatacattttgcccaactcttccaggtacagtattgattacccacaagatacaacatacttactttaaataccattgcatcatctgggcaaaaactgtacctgcccacaacatcttggacctgtccactaggactcggatatatcacagatcggcgtgaaattcagaaagtagagtatctatctgtcaacccgattccagcaggtaattcaccttaacaacagtactcttcgtttcgattcactgctgacatgcaacctctcatgccatgataattcctttgtaaactgtatgttcaacttaaattttgcattatatagaaggcgtctcagtttccccaaacgttgtcccatgagttgttcccttttggtgcctcaatgaactgctgcgcaggtccctcgaaagctggggtatctgggccctgaaccttgcccttctttgactttgttcggattcctaacatgcgcaagacaaatctggcaagttcgccataaagcatcccagaccgatcaaagagctgcaacatagctgtgataaacaaatagaatgcttgtgtgttctgctcaacaaggaatgcaactcgcccaaagaaattgacaacaccatgcatcactcgtaggaaggacacccagacacttggtgggtggtncanganggccaaatg

SEQ ID NO: 49727 - DNA, 1363 bp, Oryza sativa
  Clone ID: PAT_MRT4530_52284C.1
atgccgacgcggccgtggggggaggcgctggccgcggcgcagcgcgccttctgcctgccgctcgcggggcgcgtcctcgccgccgcggggaccgggaacgcggccgtgtccgcccccgccgtccacgtctccctggcgctcgccgcgggcggcgcgcggggcgccacgcggaggcaggtgctccaggcgctcggctgcggcggcggcggcaggggcggcgccgccgacgcggccaacgtggcgtcccgcgtcgtgaagcgcgtcctcagggaccggtccacctccggcggcccgcggctggcgttcgcgggcggcgtctgggccgacgcatcgaggagtctctcgccggagttcgtgggactcgccggcaatgtgtacggctctgcggcgaagaaggccgatttcaagaacaagccggaagatgctcctgatcaaattaattcgtgggtcaaagattccacaaaaggtactgttacaacacttctgcctgctggaacaatcgaccagaatacaggacttgttcttgggagtgcactgtactttaggggcagatggctggatagagatgatttgcggaggactactgaacaaaagttctactgcctggatggaacatctgtcgaagtcccatttgtggaatatgacagaacacgtctttttgccgtccatgataactttaaagttattaagcttccttacaagcaaggaaagaatgaaaggaagttttccatgtacattttcctccctgatgatcatgatggcttgtttgaattaacccagaagattttctctgaaccaatgttcctagaacaacatttaccaacagagaaatgccatgtgggtatctcggtgcccaactttaaaatatctttccagatcgatgtaaaggattttctgaaagatatggggcttgaactacctttcctccgggaagctgaattctctgacatgatcaaggaagatgactcaagtggtcctctgtttctgtctgatgtacttcataaagcggttttggaggttgatcaaaaaggaattgaagaaacttcagtatcaatgggcttgggcaagcctttgccagcacaacacttcaaggccgaccatccgttcttcttcatgattagggaggaggtctctggaacagtaatattcatggggcatgtgcttgacccttcatcacggacatagcatcaggttgtagtcttttatcacctgtttgcactaatgtattggagtatctctatcattgctagtctgcctggcagaagttttggtacatgagtatttatttttctcactttttgtaacacactggccaaacttttataaaaaagtatgcccttttgaaaaaaaaaaaaaaaaaaaa

SEQ ID NO: 49728 - DNA, 424 bp, Oryza sativa
  Clone ID: PAT_MRT4530_52285C.1
gtgaactaactgaaatttctgcaaggctgttagtgtgttgcctggcaggccgctggtaaagtgcgacttatttatggtttcttttcatataaaccctatgtattttacatgattctctcttttgcaggttatgtttctaacatttttttcactgttctttgtttttactcttgaaatttattgttttgcagggccttccaggtgctaacttttgtggatatatttttatctttcataaaactatttttgtatgattttttttctttttgagtgttaacccattcctttcttgtgcaggtaaactgctgaactgtcgttctgtcaccttgtgggaggaaaagaactacttacaccggaccacctggatccttttgcagcctaatctgataactacgtctcgtgctgagcagcatgatttccaatt

SEQ ID NO: 49729 - DNA, 738 bp, Oryza sativa
  Clone ID: PAT_MRT4530_52286C.1
atgccgctgctaccgccggtgaggtactacgtgccgttcgaagaagcggacgacaggagccacgacctcgaggatgaggagccttattgtcctccgccactgtcgccgccttactctccggcacagtcgccgccgccgcccacgtctcccgcctaccacgacgaccatgccgatcacaccacgaacagctgcaccttcacgagcgccggcggcgcgtacagctacaccatcacgagcgccaacgtcggggactacttctacttggacgacgacgccgacgccatggatgaggagcagccagatgagccggagaatcgcccggacccgctggtggtgctgcagcaggcggagtccctcgcggagtgcgcgctgcagcactacaacggcgacgccgccaacgaggtcaagtacgagctcgtcgccgccaccgccaccgccacggcgagcgacttcatggactgctgggacgccttctactaccacgtcaacttcttcgccagggccgccgccggcgccgatgatcaggctgctccgcgcttcttcttcgccgagctgcgccaccgcaccgccatgctcccgacctgcctcgtctccttggacaacgacgacgagatacagttggatccccagcctttgtgttgctttgatgacgtgccgtttggtgtcgtcatcaagcatccaaagggttggaagatgatcgatcgggacaatactcttatcagttccccttccgtgtaa

SEQ ID NO: 49730 - DNA, 666 bp, Oryza sativa
  Clone ID: PAT_MRT4530_52287C.1
atggggctcaagctcggctcgagcgctctactactctacttggctctcacggaagcttggccatgtcaccgcgccacgggtgacccaacagatgtactactagtagagcaggatagatccagcagtccaaatttcacaatttggcgctttttgaaaacttatttcaaatttggttccagccgaaaactatcaccagatctggaccccgggctcagcaccaggtgcgatggcgctgagataaaacgcctcagcgccaaccacgtcggcgctgaggtcctaacggccgtttctttcggtgtaccggcgtctgctgacatgggcaaccttagcgccagatgcattggcgctgaggtgggccattccagcgccagtttgattggcgcaccccccctgagagatggggaggagagagaggggagggcgccgccccttctcagccgagaggagcgaggaggaagaaggagtggcctggggccggctcggccccgagggataaggcgcgacctcagcgccagtcccgttggcgctaaggtcgcgaaggtcagcgccgatgcggttggcgctgacatttaccacgtgggccgtctcgctccgccgtttggagacagccgtcaggacctcagcgccgatgcggttggcgctgagttcggagtccagatctggtga

SEQ ID NO: 49731 - DNA, 1122 bp, Oryza sativa
  Clone ID: PAT_MRT4530_52288C.1
aggaattcggcacgagggtcgaacacatggcgcgcgccctagtccgccgggctctctccctcgccgccgcggcctcctccccggcgaaaccatccttctccaccgtcgtcgcgccgctgcgctccccgatggacgaccgcctcctccgcctcctgcgctccgagatcaactacatctccgaacgccgccctccctacccgccgccgaaggccttcaaatcgttcggggtggaggaccgcccgggggagcagtgggtgcgcctccgcgccacccgcggcgcccaggacgaggaggtcaaggtcgacgccaccatgttcgacggcgccgccgccccgcccccagacgcgcccctcttccgccgcgtcgagtcgctcgagcgcggcccgcgcctccacctcagcctcatcgtcgaggtctcccgggcggaccgcgtcctcggcttcatctgctccgcctggcacgacgaactcgtcgtccgccacgtcctcactctccgggacgccgatggctccagcaccagcagcggaggccgcgacttcgtcaagctggaggctagggagagggagtcggtgaggaaattcttgcaggagagggaggtggatgacgagcttgccgagttcttgcacgactacatggcgaacaaggaaaagatggagcttctccggtggttgaagactgtcgaatcattcgtcgagaagtaggcacaggagaagcagataaatcaggagttccttgctggtatccgcatgactctggacttatttcaaagttcaaactatgggaactgaaacaccaatagcgtctgggaagtgatgataagagctgctgtcctacacaccatgtaaattatccacctccgtggttcaatcccattgttcgtgctgtatgactctagtaatgagctgggttttcagcatattctgtggttcaattctagtcacatttgagaagatcactaggcacgctcgtctgattatattggtgctatggagcactaccatttgctgtggaatacagacaattcttatgcggttggttgtatggccattgctcgcctattcatttttattttaaacaatataagtagatctcctactgtgctaaaaaaaaaaaaaaaaaaaa

SEQ ID NO: 49732 - DNA, 543 bp, Oryza sativa
  Clone ID: PAT_MRT4530_52289C.1
gtcgcgtgcgcatacgggaggtgctcgacggggtgccatggattcccaagaacagcttcctccgccacttcaatctgtggctgcgtgacatcgacgccggccgcaccgggaaggtgttcattggcaccttaggctatggcatcttctcttacgacctcaacaccggcaagctggagaacctggcaactgaggatggaatgcagtacggccaccccatcttgccctacttctctgctccggtggatgctggctctgactgaacttctggggtgggaggactctgattcgtgggaattgcgggaataattgtagtaactcagcatctatgtaggtgttacacatgaattgcgggaataattgtagtaactcagtttcattcttcaacttttagtgtattttcaataggttggctttcttgcaagtgaacagtgccgcacagtaacgaacaagagcgcaagctattcaacctattgtgcacaacactgtgagattagactgacgctttgttgagacatgattgttttaataaaacattgttaatag

SEQ ID NO: 49733 - DNA, 372 bp, Oryza sativa
  Clone ID: PAT_MRT4530_5228C.1
atgcatctcgcccccgacgcatcaccgcggtttctgctcctcctcccggcaggcggcgtcgctggcattggttcacgccgacgtcgacgacggcaaggttctcttcgtgccgtgggtggagagggtgaacagttaggattttcaccattttttgcacttgctggagccattccgactcgccgcgatggagaaaccgaaggagcggctggcggcgtggatctcctcgcgtggccgaggatttgccgccgcgaccagcgcggccccgcacttggccaccccaccgccgctgtccgccgtgaagctctcctccgccccaaatcatctgccgccgatgaaggtatcggtgccttccgcgaagctctcgtcccctag

SEQ ID NO: 49734 - DNA, 200 bp, Oryza sativa
  Clone ID: PAT_MRT4530_52290C.1
gcgggtggcggcggcagccggcgctcgtggagtcgcagtcctccgtcctctgctcctctccacatggacttgctgttgcaaatgcgggtggcaggaggcagcgcgaaaaacgagtagtcaagtcagtgaacctttcgacctgcctgccgaagcaccaaggaaccagagaaccagcatggagcagagcaaagagaggataa

SEQ ID NO: 49735 - DNA, 677 bp, Oryza sativa
  Clone ID: PAT_MRT4530_52291C.1
ccttgaagtaaggattccacctaggattcccggcaaatttagttggggtgtccaataaaggaggcctaattagttcatcttgtagctcaccaacagcaagaaacactttgttgaaataacgtctaactgtttctccagacattctctcctagcacttctctttcttttccttgagtgaataatcatagccatcattaacaaaaatagattggcagcaacatcaaaaattaaaatcttggtcctcttatccatataccatctcggccgccgccggcggggcggaggcggcgctgctcgggaaggggcggtacaaggcgtgggcgctcgccgccatcgcgctcctcgcgctctggtccatgttcgccgcctccgtcaccatccgctggtcctccggcgacctcgccgccgagttcggggacctccccgacccgcttatcgacgacctcgaccccctcgagatggaggacagagagaagctagtgcgccggatgtgggatgtgtacacacgcaccggtgttgatcgggtacggcttccacggttctggcaagaagcattcgaggctgcatatgaggagcttgctggtgatgatacgcaggctagtgagacggcagtatctgagattgctcgcatgtcagtccacaggcctgaacttgaacaatcgtcgaacaagtattag

SEQ ID NO: 49736 - DNA, 491 bp, Oryza sativa
  Clone ID: PAT_MRT4530_52292C.1
tctggccgcaaccccgcacataaccctaccagcctgtcgccggcgccgccgcccatggccgtcgggtgcgtcggagcggccggccgccgcagggcgtgtcgtgtgatcccgcgccccgtcctcgagacggtcctccacaaccacgcgctccgcccgcgcgtgccgcaggcgctcatactccacgggccccgcggcgtgggcaggttccacccttctcctccgccgactcctcccgcagtggtctgagcccccgcacgccgccgccttcgtagacttcctccgccccggccccgacgcgccgtggtcgctcctcctccccgccgtcgagggcgctgtgccgtcgttacccgacctccgtctccgtctagagtcctcgctcgagggcctcgcgcgcgacgccgtgctctcgggtgccgtctggtccaaggacgtgctcgccgtgctctgccgttctacggcctgcacaccgtgctgacacgcctggcgggacc

SEQ ID NO: 49737 - DNA, 546 bp, Oryza sativa
  unsure (1)..(546): unsure at all n locations
  Clone ID: PAT_MRT4530_52293C.1
caggattcggcacgagcttnactccacttntgttcaatacacttnatttcgngtnctctatagggtanaaatatngcaggttatnanggtcctcattcngtgtgnaaatatacaacaatgcacgcacgttngaatttgcataatcttgcgattttgtnctngcntactcttccagaancantgatagcttttgtcgaactcctgatnttgttcatactntcaattatttgctggttatgggcccttccanccanccttcctctggatncntgttcntcgttactatcatcactgggcatcntacgcgccatatnggggcntatngtttgttgatntgagccgtctgtgccctatntgnttattngttgtntcaanagctgttgctttacttggaagtantagatgtgctganataaaacaattacggngtaatactccntattccgccatgactaacttatttgactgtcccngtcntctgtttngtattantgacctggttagagcatgtttaatattanataancggctataanctnatattaa

SEQ ID NO: 49738 - DNA, 519 bp, Oryza sativa
  Clone ID: PAT_MRT4530_52294C.1
gtcttccgagatcactaaagtattaaaagtattagatgtcagtgagagcaaaaacaaggagctcaaaagacagtgccgtaagctaagaggaaccattccgatcatccaagacagaaagtactaataatccaaggtttcatcttggattgatatgggccttattctagcgcctctgcataatcttttgcatcctacaccagttttgtgttgataagtgtgaagacgtcaacttgttccgcttccagcgtctacactaacatctcatataagttcttcgctgtcgctcctttatttggttatatacttattttgtcacctgttctcttttttaatctttcagctgttctgtcagtgagagaattgtgttgctttcacggaaattaatgatctgttagttcagctccttgtcaaatttgatgtctgagactcagtgtggcaaagtagttatctgatgaactaaacttatgcaaatgttaatgacacggtttgagagattgtattgttttaaaaaaaaaaaaa

SEQ ID NO: 49739 - DNA, 280 bp, Oryza sativa
  Clone ID: PAT_MRT4530_52295C.1
gaatgggaatatttttttttatttttttttatggggtttttttttttttggttgtttctccaacaggaaaggagacccattcccaacccagaggggggtttgaaagctaaataaagataccatttggttttttttaaccaagattggggcaaaaagatcagtcatttgttaaaatttaagactcccaggggggggcctgtgggttaaacccgataattccggccgggtccgagaaggctacccagtatctctaagagggggaggttaaaaagctgggtga

SEQ ID NO: 49740 - DNA, 2357 bp, Oryza sativa
  Clone ID: PAT_MRT4530_52296C.1
tcaacaatctgccagcaaaaccagggatccggaagagaaaaacaaccacacagggttttttttttttttttttttaactgaaacaccacattttatttaatctgggaaggttacaaagattacagcattcaacaatctgccagcaaaaccagggatccggagtagaaaaacaaccacacagggttgtcaatggcaagggccttcagaatgccaccttgcaaaggccggttccccaagggataatatcaggagacccctacaaacaccataagaggcaaccccccttgcaaacacacgcactcacacacacacacacacacctcttatgggtaaccttcaaacaaccagaaaatgagaggacacgaagtttgagctgcctccgctgacgccaacactgcaacaccgtagtcgctgaccatgcagtttgagagatcaagttcggcgagatcggtacagccctcagaaatggcaaacaggcttgcatcagtgatcctgctgcaaccttcgagactgaggcgtgcaagcgaactaccatgtgccttcaccaaggcagaaacagtagcatctgtgagattctcgcagccgttcaagtcgacatggaccagcccactttcggaactcttgatcaatggaaggagcccgttgtctgtaactgcaccgagaccactcaagtcgacattctccaactgagggcagatcatgccgaccacggccaagctggcatcggtgaaacctgggcaatccttgatggtgagggatcggagagacttgcacaggggaagctgcgcgggagcagagcagatgtccttgatcccgttgcacttgaccagtgagagggccttaaacttcgggctgcagttgaggaggaaggccagaatgcccatgagagtaaccttgttgcattcctcaatctgcaaactctccaagacctttgccgattccgcgaaatccttgagacggccatccgagacctgaccgcatttcttgaggttgagctgcttcaagctcgggcagaacttggcaatcgatgcgagcgcaagatcagtgactcccgggcaggagctgacactcatgaacctgagcttctgcaggccaagggcgttggccatcacccaaaaacccctctcgccaaccgcgggaaggcgagcgagggtgagatcggtgatcgccttcccgtagtacccaatcaccgaaagagaagcatcggtgatgctcaatccctggaggcgaaccttggcaagcgatgcggccgcggagcagacaaggccggagacaccctggtcaccgacatgcgcgcaattcttgatgttcaccgactgcagcttcgcgcagcaccggccaatcgccttgaggccctcgtcagcaacaccggggcatgcctcgacggtcaccaccttcaagtccgggcaaccctgagcaattgcagcgaggcccttgtcggtgatcagcgggcagccggtgatgtcaagcctcgccagcgaggggcagccggcggcgatctcggcgaggccggcatcggttacctgagggacatgccacagggcgagcgagaggagcgacgggcagccgcgcgcggcggccgagatgccggcgtcggtgacgccgcgcgtcgggtggctcccacggatgacgaggctctcgaggcttccccggagcgcgtcggcgacggccaccgccatgaggccgacgtccgtggcctcgcgcccctcgaggcacctctcggaggagcagccgccgccaagggggacctcgaactcgtcctcctcctcctcgtcctcgtcgacgaacacctggttgaggtccggcaccgccgccgccgccggctctcgcttgatctccgacgagcggatgccgccgaggagagcgagccagcggcgggagacggccgcggaggcgcaccgggcgcgggcgcccttcacgcggcggaggatctcgaagaggcactcgtcggggagagcgtcgagcgacggcgcctcccgctgctgctgctgctgcttctgcctcttggccgccgtcaacccctcctcctccaccacctccaccgcctccgcggcggcggagacgaagccgcagggcggcacggcggtgacccgcgcccgcttccgcgacctgacgccgccgaacagagccgccgacgccgccggctccatcacaagaacaccaccatctctgtaatcgtggaacggaggcatgccgacttcttcaagaacaaatcagaccaacaaatttggccccaaaaaacaacgcaagaatcaacaagagatgaggagaacgccgaacccaatcgccaggaggcgagaggggaaaaaagatcgcagatttagtgtgaggagatcaagggagcccacgcgtaaaaa

SEQ ID NO: 49741 - DNA, 2049 bp, Oryza sativa
  Clone ID: PAT_MRT4530_52297C.1
caataattatctaaggattatcccaattatgggcctgttaagttactcccaaacatattgttcaacactgacatttctgtactttgtactgaacataaagtttgttacacttaaaccacacaagctattggtcaatgagagctaagccatgaatctcaattatgctacttatcaagttgtgagcactctacacttgagcactcgatattggacatagaaccccggcattaccatgatctttacctgacaaggattgtgcagctgctgcttgtcaggtaggatgtcctccatgtacatctgatcgaatacgcggctctcttcgacccgcatgatcgtcagcgcgggggtgaaggagaaggccaggaggtggagcagccagacgcacttggcagcgacgaagaagcactgcagcagctgctccggccatggccgggaccaattcttcagggtggacacaatgcagctcatcttctggtcgcagaaccggctgaagtcctcgctgtagtacttggtgcccttcctgagcacctcgttccagctcaggttgcgcagtgcgacgaaggaggcgaagctctcctgggatccttgcttgggatcgaggcaccgtggcgagccgttcttctggaacgtgcagttctcgaagtcctggtacattgcctggttcatcagagcttccagatggtacagcaccagcttggagcaatgcttgttgtcagtgatcatgagctggtaaggttggagaagaatgtttagtttttctatcaaaccattgtcaggttcttcgacctgctggatcaatgccttgcagaattgcttcaccgaaagccgcgcctcggaggcgatctgcaagaagccttccaccatggcttcatggctgaccggccccgggagctcctggcttgctccgatcgatcgcgttgatctcctcgacatggaggatgatgatggttgagcgttgctggttgagctcgtcgctagtcgcagtgccttcttgagctccgagcagtaggcctcgaggccggcgagcttggtggtgagctctcccagggacgacctcatctcggcggcttcctgcagcgcggcgtcgcggtgcgcgttcgcgtcggcgagctctcgccggagcgagtcgagcgacagcaacccccactccttgagcagctgcgacatgttctcccgctcgatggcgctcggcgacatcggcttcgccttcttcttcgccctcgggaagagccacgagaggatctgcgcccttctgtgcttcgccggccggggctgcgccgccgccgccgccgccgagagcggcgcgccgctgctggcgaggaacttgagggccccgacgtcgatgccgtggtcccggccgatcgtcgccggccggaacgcgctgccgcacgtcgacggcgccttgagcagctccgccgtgccggccatggtcgccctccccgccgacgcgaggaaacggtcggccgacggcgcggagtgcaagaacgccgggtggaccttgtgccgccggtgatggtcggtggacgacgggaagcggagctcgctgttcgaggacgagaaggcgttgaggttgtcgtagtcggagaaggccgcgtcgtcgtcgtcgtcgccgctgccgccgccgcccaacgcgatgccgctccagttctccgaccggctccggttgtcctggcaaatgtggctgagtccggccatttgctcctcatcgtaagcatgtcctattaattgcagagtaatagtaggagcatctgggattagcggagtaaacaccgggtagtcctcgtcgacggtggccaccgccgccgccgccgcccccgccctggagagcgcgggggacgcggccggcgggaggcggatgatggccgggctgcggctggcgctggcgccgccgcctacgccgccgccgccgcgctgcagcagcgcggcgtggagcgcccgcagctcgaccgccttggcgatggcggcctgcacgtcctgccgcgtcgcctgcaccggcggcgtcgacgtcgccgccgccgtgccgaacgcctcggctgcggcggccgccat

SEQ ID NO: 49742 - DNA, 1099 bp, Oryza sativa
  Clone ID: PAT_MRT4530_52298C.1
aactgaaacaccacattttatttaatgggggaaggttacaaagattacagcattcaacaatctgccagcaaaaccagggatccggagtagaaaaacaaccacacagggttgtcaatggcaaggcccttcagaatgcaccttgcaaaggccggatccccaaggataatatcaggagacccctacaaacaccataagaagcaacccccattgcaaacacaaacacacacacacacacacacacacacacacacacacacactacccacgataccgcaagccgcacaagacctgaactggaacaaacatacgcacccgaagagatcgcgaacacctggacactgaagaactggagcagccaagtttctacgaacggtgttgatgtccaagactaacaagaattaccggaaaagaagaacacgctttgacaatatttgagctccgaacacgacgcaatggaaaaaaaacagcatgatgtaatgactgtaatcaacaaggaccaaggttgggatagaggggcaggggtgccacgctaatggcagccgaaggctcaaggaacaggcactatcccaagaggatacctgcaaaaaacgagcactcggctaaaaatgccccccggaaaacaaccggctctaagacgaaggaagtccaccatgactcaaagacaggacccaagaaaccaactctgctgctgcgaagcttgactgaagtaggagtactaccgctacggtcgtatatttgcatctggagatggatgacccagcacctccagcaactagttgttgttcctctaagcaaggatgtcgcaccaccagagctgcttctccagcgatgcaatgttgtggttgccaatgaagttgaactggagattgaggccctccaacgatgccgacatgctgcctaagaaaggaacactcttctgggtaaccttcaaacaaccagaaagtgagaggacacgaagtttgagctgcctcgctgacgccaacactgcaacaccgtagtcgctgaccatgcagtttgagagatcaagttcggcgagatcggtacagccctcagaaatggcaaacaggcttgcatcagtgatcctgctgcaaccttcgag

SEQ ID NO: 49743 - DNA, 495 bp, Oryza sativa
  Clone ID: PAT_MRT4530_52299C.1
atggcgacgtcccggcaagcagtgccacgcgtgcggcggcgccgccaagatcctgtgccccaacgacctgttcggctgctggagctacgtcgcctattacgacgtcgccggccaccagcgcgcctgcccgcacgcgccctgctcctgctcggagtcgcgctgcgacttcctcggctcgccgccgatgctcctcgcccacctcgtcgccgacatgtggttggtgtcgatttggaatggggtgaaatggactggaaaacggctgctctgaacacgatactagggagatggggcaagaaggcatcaccggagtggaacatcagcggtgagctctgcagcggtttcgcagctgataaaaccgattgggataactaccgcgacatcaacccgttcatcaagagggtaacttatttggatgtagttggtcaaatacctgcggagctacagaatctcacccatctagtggacctgtacggtatcgaagacttctcttcttaa

SEQ ID NO: 49744 - DNA, 563 bp, Oryza sativa
  Clone ID: PAT_MRT4530_5229C.1
cgacgcgtggcgacgcgtggcggacgcgtgggcgagtccaagtcgtttagtaacttttgggaaagactgtcttttgatggttgtccttcgccacaggacacaattgattggatcaattgccaactacattatggctgtcttgaagaaagcagagcgtggacggatgccaaatgatatgccgcaaatgcaagaccttacgctaacgccttcgtcaagccccacttgcagggaaaaactgctagtgattccgtgcccctgcacagttgatgtgagtgggctaaatgcgtatcgcaatgctcaagggagcaagcccgaagcctgcaagaacaacaggggagaagagcacggtgccttgcactgcctagatttccaacacaaatgactgacccaggattatcgaatgagtgccgaaagcgagacttgcagagtgaatggtgaattggagaactagtatcggcgtagagtaaaataaacacaccacaagtatgacacttggtggtgattctattcgatatcagtactaaataaaggttacaatttcttaaaaaaaaaaaaaaaaaaaa

SEQ ID NO: 49745 - DNA, 948 bp, Oryza sativa
  Clone ID: PAT_MRT4530_522C.1
atggcgaacaagggaggagagccggcagcaagagcagctgtgcgccatggtggaggccccgtcgcgttcaaggacgctgtcgacgtcgacgccacgccggtgcgccctccgacggagctcgccgccgccgtctccgccctgccggcgggcgtctcctacggccagccgatgcgctgctacggggggacctgggtgttcgagagctgggcgcagggcgtggtcgccatgcaccgcggcggcctcgtgccccgcgccggcgacgtcctcctcgccagcctccccaagtcggggacgacgtggctcaaggcactcgcgctcttcgccgccggccgcgacgcgcttctcgacgagctgccgtcgccgaggctcatgtgcacgcacatgccgctctcgctgctgccgccggcggtggctgacggcaactccaacaccaagatcatctacatttgcagggaccagaaagatagattggtctccatctggcactttcggaaacgcaatgtgccagatctgttgctccaagaagtgtatgagtctatatgtgatggcactgggtttgctggtcctgtctgggatcacttgcttggttactggagggcaagcaaaatagatctaggccgagtgctcttcttgaaatatgaggaggtgcttcgagacccagtgaacaccgttagagagctcgcacaatttgtcgggcagccattctctgacacagaggaagaagctggcattgttgcggagatcgtcaagctatgtagcctagagagtctaaggagccagaaagccaacaaagaaggcatacaaggtgtgtacatcaagttctcgcacgactcgtattttaggaagggggtggaaggggactggaggaaccacatgactcctaagatgggcgaacatctggattcgattatgcgagaaaagtttgatggatcggggctcaccatatga

SEQ ID NO: 49746 - DNA, 455 bp, Oryza sativa
  Clone ID: PAT_MRT4530_52300C.1
ggggttgggagagatagtcataaatcacccactttcttttgattgacaatatgccagacaaaccatacttttcatatgacgtgcgggtgtcccgaggacacacctcgtgcaaagcgcaaatgcatctatcaaactgacatagcctggtgactttgaatatagagaacagtgactcggggactcacgaggctgtccaataactgaccaagcactaaatactaacctggcgcttataggcagcttagaaacccgctatgatgacggtgcacgtaaagaacgcccagcctgaactaggaacgagataacattgttgccattgtccactttagcctgaatgaccgggccatccctccatttggattgaacctcactcgcagcagaacttctttcacagatccttgaagatcgggcttaactcgtgctcttgtataacaccttggacaggagttccattt

SEQ ID NO: 49747 - DNA, 804 bp, Oryza sativa
  Clone ID: PAT_MRT4530_52301C.1
atggcgccgacgagctcgccgtccacgccgtcgccgaaccacgtggccaagttgagcgcgaacagtgcggcgtacaggcagcacgacgagcagagcggcgccaagaaggcggcgtgggtggtgtcgcccaacggccaacagctgccatggcgacgtcccggcaagcagtgccacgcgtgcggcggcgccgccaagatcctgtgccccaacgacctgttcggctgctggagctacgtcgcctattacgacgtcgccggccaccagcgcgcctgcccgcacgcgccctgctcctgctcggagtcgcgctgcgacttcctcggctcgccgccgatgctcctcgcccacctcgtcgccgacatgtggttggtgtcgatttggaatgggtcgataaagatgaaattatataatgttatgcctactgattatatgttatttctattattactgtataaaacttacgcagcaaccccggctgctctgaacacgatactagggagatggggcaagaaggcatcaccggagtggaacatcagcggtgagctctgcagcggtttcgcagctgataaaaccgattgggataactaccgcgacatcaacccgttcatcaacgtcggcagcgcatggggaagcggcggctgccgcacggatagggaggtcggcgcaaacgccattgcgcgacggagcggccgcggcatcacgcgatgcgtgtctctcaagaagaacgccacggtgggtgcgccgacgaccatggtgaacgtgttccggattattatcgagatattgatctggctactacttggataa

SEQ ID NO: 49748 - DNA, 240 bp, Oryza sativa
  Clone ID: PAT_MRT4530_52302C.1
gtcaactgtttgctgggtgctaggtggggtttcttctgagggcatttgctgttccgttcaactttcactgcctatgtttattcgtgctttcactttgttgtattttattgtcttgtttcatgtagttttatctgacctactgcttgcacggttaatttttatgatttagaatttttgtgctttctcaacatcacaagatctgtttctgatgaaagttacagtttgactacttaacgaacc

SEQ ID NO: 49749 - DNA, 324 bp, Oryza sativa
  Clone ID: PAT_MRT4530_52303C.1
gggccccaggtgtccaagcagctaccctcttgtcctccccagaggcaggggcagcggcggccttggccctaaccctctcggcgcggcggctggtcttctcgggctctcggcggcgacggcggctgccgggagagtatttgcggtgatggaccgggagtcggcttggggataagacgatgtccagattggtcagagatcatggtggatactaaggctagagttcaatgcacgtggaaggtgaaggttccatatggcataggatgcggagttgaatttggaaggagtccaatttggtggaattggttatgtaaagattgtttcttg

SEQ ID NO: 49750 - DNA, 2021 bp, Oryza sativa
  unsure (1)..(2021): unsure at all n locations
  Clone ID: PAT_MRT4530_52304C.1
attatnctctcctcncccaggtcgtctccnccnccgggctcancccagnctggccaccgatgatgatngcgacggccgcgatggcggcgagctcgtgcgatcgaggcgacacgcgtaagaagctgcagataactgtagttttcctcgtccgcacgctactgctcgcgtgtataatagcccgcggggtgctcgcgctgatacgggttgcgttccgcgtcgccgtggttgctccggcgagaagcctcgtcgccgtcgcgggcgccgccttctccgccgtgaacgcgcggtgcgcgtggtgcctggaacaggcggcgctcgggcggagctgcacggggacggtcctcggcgacgcggtggtgggcgccatggcgagctcgtggaggctgctgctgcaggggatcacgtcgctggtgttcctgtgcgcgcgtggcgccgacgagtacgtccggccgccaccgagcccgctggtgctcacggcgcacggcaagccggcgtcgcatcctcagcaggtgcacatttcgatggtgggggagaagaacatgaggatttcatgggtgaccgacgacctgaacgcgccgtccgtggtggagtacgggacgtcgccggggaagtacacggcgtcggcgaccggcgaccacaccacgtaccgctacttcctctacaagtccggcgcgatccaccacgccaccatcggcccgctcgaggcgagcacgacgtaccactaccggtgcggcaaggccggcgacgagttcaccctcaggacgcctccggcgaggctgcctgtggagttcgtcgtggtcggcgacctcgggcagacgaagtggacggcgtcgacgctgtcccacatcggcggcggcggcggcgactacgacgtgctgctgctccccggcgacctgtcgtacgccgacacgcagcagccgctgtgggacacgttcgggcggctggtgcagccgctggcgagcgcgcggccgtggatggtgacggaggggaaccacgagatcgaggcgctgccggtggtggggatcgcgccgttcgcggcgtaccacgcgcgtccgcggatgccgcgggaggagagcggctcgccgtcgaacctctactactcgttcgacgcggcgggcggcgcggcgcacgtggtgatgctgggatcctacgcggagttcgaggaagggtcgccgcagcgggcgtggctggagcgggacctcgccggcgtcgaccggcggcggacgccgtggctgctggcgctggtgcacgcgccgtggtacaacacgaacgaggcgcaccagggcgagggcgagcggatgcgccgcgccatggagagcctcctctacgaggcccgcgtcgacgtcgtcttcgccggccacgtccacgcctacgagcgcttcacgaggatctacgacaacgaggctgacagccggggcccaatgtacatcaccattggcgacgggggcaacagggaaggccttgctctcaagttcatcaaggggcacaagtcggcgcacctgtcggagttcagggaggcgagcttcgggcacgggcggctgagggtcctgaacgagacgagcgccgtctggacgtggcaccgcaacgacgaccagttcgccaccgtccgcgacgaggtctggctgcacagcttggccgccggcgagccagctgctacagtagcctccgccgccggcggcggcggcggccatccggccgacgagctgtaggctatatatatctcacactgttaagaatgaatggaagaaaaggaaacttcaccacatttagcattgtcttttattttttttctttttcatcagccataaacattgtccatttgtccttgtaaatcaatcgtgatatcgtgtgtttcagctagtgtacagtgtttttcttgtgttagacacgtggtgaaatagaatttcagtgtacaaggccgtgtacaaggccaacactgatgggctcatcttttcgcttatactatttatacttatcatccaaaatttgaagtttcagctttcaaaaaaaaaaaaaaaaaa

SEQ ID NO: 49751 - DNA, 1750 bp, Oryza sativa
  Clone ID: PAT_MRT4530_52305C.1
atgtcggtgcaggagtacctggagaagcacctgctgtcgcgcaagatcgaggaggccgtgaacgcggcggtccgcgccaaggcccccgacccggtgctcttcatctccaaccacatgcgccgggcggcgccggccgtgatcacgagcgtgcgggcgcgccagatcctcgacggccgcggggagcccgccgtggaggtcagcctccacaccaacaaggccgtgcaccgcgcctccgcggccgccgcggacgcccccgagggcgccgccgccgacgccgtcagggacgccgagaagcggaagctgctcgccagggcggtcgccgatgcggtgcgggtgatcaacgacaaggtgtcggaggcgcttgtgggaatggatccgcagcagcagtcgcagatcgaccaggccatcatggacttggacaaggcgcatcacaaggctgagattggagtgaattctatgttggctgtatcaattgcagcttgtaaagcaggtgctgctgaaaaagaggttccattgtacaagcatatagcagaacttgttgggaaaagcgctacgacacttcccatccctgcaattacagtcattaatggaggaacacatgctggaaacagtctccctattcaagaaattatgatccttcctgttggtgccaaaaactttgaagaagcaatgcagatgggttctgagacatatcatcatctgaaggatatcatcttggagaaatatggttcaaacagctgcaacataggtgatgatggtggatttgctccaaatatttccagcataaccgaaggcttggatcttgtcattgaggcaataaatagagctggatataatggaaggatcaagctagcaattgatgtcgccgctaccgatttttgcatgggaaataagtatgacatggagttcaagtttgcagagaaatcagggcagggcttcaaaactgcagatgatttgattgagatttatagccagctttgttcagagtacccacttgtctcaatcgaacagccctttgataaagatgactgggagcattcgaagaagtttaccaccctagagctgtgccaggttgtaggtgatgacttattgatgtcagatcccgaacgcattaagcgggcagtaaatgagtatacctgcaatgctcttgttctcaaggctaatcaagtaggcactgtcacggaagccatagaggttgtgagacaggcaaaggatgctcattggggcgtaatggtgtcacataggtccggggacactgatgattctttcattgctgacttggctgttggtgctgctgctggacagatcaaagcgggtgctccttgccgtggagaatgtctcagtaaatacaatcagctgcttagaatagaggaagaacttggaagtgacggtgtttatgcaggggaaaattggagaaccaccgcaagcacaagctgacttacagcgtaggtacatgaggtgcaggttccatcttgacctgccttaatgtgctgagctttccatggttggcttgctcaattgtgttttgttctggctcggcaaagagcatggaacaggacagccaaagaaacgggaggggaacagtttgtattattgggcatttgggcaccacatttttttttttccgtaggtgtagtggatgaacttgcggagcattacctattttagtgatgtttgactgcgaattcatttctctgtggtgagcatggacgtgagtaaaatgagttgagaaaaaaaaaaaaaaaaaaaa

SEQ ID NO: 49752 - DNA, 735 bp, Oryza sativa
  Clone ID: PAT_MRT4530_52306C.1
atggccgctgccaccggatccgggagggagaagccctgcctcccgccatcgaccattgctgctaagctgctgtttcaccgtctgctctcgccatcacgggagccgctgcggacaccgctcccgtcgccgaattcgggcaggaagagtcctaccgccagccatcaatcgttgttgccacctcgtcgtcatcgttgtcggtggctccagacacggtcagttatggttcatctgcaccctaacgtggatctcgtccaggaaattcgtctaagtagtagtgtattgctactgatagtagtgtcaattgttctgccaatgctgtcgccgctgttgtttgtgaagtatacatacccggtctcgagggagaatggcagtgggccgtcgaatccaggaaggctcgtcacggcgacaccggccgccggcgccaccgtcgccgccgacgaggcaacccaacaaacgaagcagcaggcgagaggcagcagccaccaccaccacctcctccaatcacggcggctgccaatcggagacgatctcccccagagcggcggcgacctaggcggagacaaggccgtccgtcagccgcggagcccggcggaggtcgataagctgacggttgccatcggaggtaggggcggtggaggtaggacgacgagcaaaccgatgatgaccggacctgacaatgacggtgagggagacagccaatcggagacgatctcccccagagcggcggcgacctag

SEQ ID NO: 49753 - DNA, 404 bp, Oryza sativa
  Clone ID: PAT_MRT4530_52307C.1
acatcccaaatcatacaacatgttacgccaaaaatgcattcgccgcacaagtttacataacccagttggcagttgattatatgaaaaatctaaatcaaatgctataacaacacctcaatattgacaaggaattctgtcgactgacataatgtcgtcacctatagtcggttgaagccctaggtttaccgctgttcgaggagttgaggtgcagtgaaacaaatatcactccgataacaactatcaagcaacccacaagcgtgctgaagaaaagagccccaggatgtcttgtctgcacaaacccatagactccccccgatgttaccagaataatatcagttaaaccatcaccattgaaatcttcaagtaccagcgcatgggttggaggtgcacggagttcaatggat

SEQ ID NO: 49754 - DNA, 220 bp, Oryza sativa
  Clone ID: PAT_MRT4530_52308C.1
aaaatataaatttcttttgatacatttttttgggtgttttcacaaaaggatgggcccatacttaattaaggatcgacattaaaaacccaaataagtccccctttgacttttacgatggagccacaaccaaaaaaaaacgtgcaaacaaaaaaaagtctccaaattatactaactttggacaacgtcctatttaaacatattcaccatttaatcatgaaag

SEQ ID NO: 49755 - DNA, 1309 bp, Oryza sativa
  Clone ID: PAT_MRT4530_52309C.1
ctcccgcatcgatgtggcccctcagcccgctcccgcctcgcgttcacacatccccccttctccttcttccccccctctccccgcccgcgctgtcgtctactaatccatacgattttttctcattcgattgctggtgatggagccgtagcaaggtttccttacctctggaatttgggggattctcaacgcccaagctagagattacaatgacaatgcaggattcagcccacagatcaagcttttgaagcttttgaagctcaataattcacgacaaagtatagagactttgtcacattggtgtgtctttcattatcgacactgccgacaagttgttgaaacatgggaatctgattttcactcagctcctcgtgagaggagggtatctttgctgtaccttgcaaatgatatcgtgcagaacagcaaaaaggactctggtagatatgtaaatgagttctggagggttatccctgctgccttaaacgatgtgtttgtcaacggcgatgattttggaaggaatgtcgtacagagactggttgacatatgggaagaacgtaacatatttggatccctcaataattcacgacaaactcctcgtgagaggagggtatctttgctgtaccttgcaaatgatatcgtgcagaacagcaaaaaggactctggtagatatgtaaatgagttctggagggttatccctgctgccttaaacgatgtgtttgtcaacggcgatgattttggaaggaatgtcgtacagagactgtgttttcagcgcctccttggcgggatgatttcaagggagcaattgtggccgctgccttcgacgtgggggttcgcggatgttgtgttggcagagggcaacaagaagcgtgcgaaggtgctgctcgatggcaacatgcaaggctataactacgcaatggcatgttcttcgaggacgacaacaccattgcagctaacttcttcgattttgtttttctccttggctacatgtatgcataatcatgattgcaaatgtgttcataatcatgattgcaaatgtgtgaacaaacccccaaaagaaagcaagatccgattgagccctcaagtctggacgggcaaagcagtcaatggcggcgtccttaagtccgacacaattgaggtggatgcgcctgggtttagccgcatcagcaaccgaagcagctataggaagtgcggccgtcagcgcagatattgccggcgatgggcgaagaaaaataactgtggacaattaattaatcagctaatttcattggttaatgcatctttgggagcaaccacgacaccctgttccttgcaa

SEQ ID NO: 49756 - DNA, 201 bp, Oryza sativa
  Clone ID: PAT_MRT4530_5230C.1
atgaagagccgacgccaaccaatgccactgcatgatcaaatcatgttcatgttcgggaaggcaaagaaagggacaccaggagggagaggaaacggaagatgccccgagcacagatcaggtttatttgtgcaaggggactatgtgatctttaatccaggttcacctcgtgtcagaggctatcaggtcctcaaagatctttag

SEQ ID NO: 49757 - DNA, 980 bp, Oryza sativa
  Clone ID: PAT_MRT4530_52310C.1
cgaggtctcccctctcctctctcgcctcgcgttcacgcatcccccccttctccttctgccccccccctccccagccgcgaaatcccctactaaaccctaggattttctcccctcccaatgctggagacggagccgtagcaaggtttcttacctctggaatttgggggattctcaacgcccaagctagattacataacatgaatgcaggattcagcccacagatcttggcgcagaagcttttgaagctcaataattcacgacaaagtatagagactttgtcacattggtgtgtctttcattatcgacactgccgacaagttgttgaaacatgggaatctgattttcactcagctcctcgtgagaggagggtatctttgctgtaccttgcaaatgatatcgtgcagaacagcaaaaaggactctggtaaatatgtaaatgagttctggagggttatccctgctgccttaaacgatgtgtttgtcaacggcgatgattttggaaggaatgtcgtacagagactgggacacatcgggggagcacgcccacggtgacatgatgatggaggtggtctggctaaagagcaacgcgccatcggctaaagagcaacgcaccatcaaagacagagcaggcccaaccaatgcttgctttccttctcgaatatgacagtgttttcagcgcctccttggcgggatgatttcaagggagcaattgtggccgctgccttcgacgtgggggttcgcggatgttgtgttggcagagggcaacaagaagcgtgcgaaggtgctgctcgatggcaacatgcaaggctataactacgcaatggcatgttctttgaggacgacaacaccattgcagctaacttcttcgattttggttttctcctttgctacatgtatgcataatcatgaatgcaaatgtggtcataataatgagtggaaatgggggaaccaacccccaaaaaaaagcaggggagggtattg

SEQ ID NO: 49758 - DNA, 2259 bp, Oryza sativa
  Clone ID: PAT_MRT4530_52311C.1
atggcggccacggtcgctgccgccagcagccggaagcgcgggttctcagtcgcagacatcctcgacgacccgttccccctcccgtcgcaccacctggcgaagcgcggccggtgctcgtcgtcggccgcctccgcggctgacctcggggtgagtttggagttcgacccgatcgaagtgctgcagctcatcttcccccatgaagatccgcagctcctgaagagcttttttgaagcgtccggtaatgtgttggacgctgcaattaggggattcaagcatcgtttgcaatctcatactgatactgagatcacagaggcggcttccggtgatacaggaaacgaggtggtctctcctaaagttgaatctgatttgtcagcgatgaacatcccatccaatgggtctgaatgggctgagctagttgtcaaggagatgtcctctgctctagatttggttgatgccaagaaccgagcctttaggttacttgacctattcgagaaatccactgcagcatgtatcagtccagttgaaatgcggaagatgcgcgaggaacacaagatactgaagctgatgttaggaggccttctcgaacagaacggtgtcctgaagcgcgcatttcttaaacagcacaatcggctcaatgattatgaaaagaaaatgtcgcaggagcggtcgcagattatcgacacgtacgaaaaggagataaaggcgctacagtttgcaaccactgcaaagctgaaacagagaaacatggagcagtatctcttcttggccactctactgatactatctctcgccttcgtcaagctcaggccacgcaacaatggcgagaacccgcctccggggccatggcagctgccggtcatcggcagcctgcaccacctcgccggcgcgcttcctcaccgcgcgctgcgtgaccttgccacccgccacggcgagctcatgctgctccggctcggcgagctccccgtcgtcgtggcgtcgtcgcccgccgcggcgagggaggtgatgaggacccacgacgccgccttcgccacgcggccgcagacagcgacgctccgcgcgctcacccgcgacggcctcggcgtcgcgttcgcgccgcagggggagcactggcgctgcctccgcaagctctgcgtcacggagctcctcggcgcccgccgcgtccgctgcctccgccgcgcccgcgaggccgaggccgccgccctcgtcgcgtcgctgtcgacgacgacgcccgagccggtgaacgtcagctccctcgtcgccaggtacgtgaccgacgccgtggtgcgggcggtggtgggtgaccggatcagtgaccgcgacgcgttcttggagaggctggaggagggcgtcaaggtggccgccgggttcaccctcgccgacgtgttcccgtcgtcgcgcctcgcccgcgcgctcagcgggacggcgcggcgggccgaggcgcacagccgcgagatgacccgtctcatggacggcgtcatcgaggagcaccgccagaggagggccgccaccgggtggcgcgacgaggaagacgaggacctcctcgacgtgctcctccggatccagaaggatggcggcctccagatccctctcgacatgggcaccatccgtgccataatcatcgatctcttcagcgcggggagcgagacgacggggacgacgctgcaatgggcgatggcggagctgatgcggaacccggcggcgctccgcaaggcgcaggcggaggtgcgcggcgtcctcgccgggcactcccacgtcacggaggacgccctcccggacctccactacctccacctcgtcatcaaggagacgctccgcctccacgtcgcggtgccactcctcctcccgcgggagtgccaggagccacgcctccgcgtgctcggctacgacgtgccggagcgtgccatggtgctcgtcaacgcgtgggcgatctgccgcgacaccgcggtctggggccccgacgccgaggagttcaggccggagaggttcgacggcggcgcggtggacttcaaggggacggacttcgagttcgtgccgttcggggccggccggaggatgtgccccggcgtggcattcgccgtcgccatcatggagctcgggctcgcgagcctcctcttccacttcgactgggagctcgccggaggcaccgccgccggcgagctggacatggcggaggggctcgggatcacggcgaggaggaagagcgatctgtggctgcatgctactgttagtgttcctgttcctaacacggagacgagctag

SEQ ID NO: 49759 - DNA, 2790 bp, Oryza sativa
  Clone ID: PAT_MRT4530_52312C.1
atgtcgcgcggcggcggcgggtgctgcccgtcgatggatctgatgcggtcggaggcgatgcagctggtgcaggtcatcatcccggcggagtccgcgcacctcgccgtctcctacctcggcgacctcggcctcctccagttcaaagaccttaatgccgacaaaagcccattccagcggacttatgcttcccagatcaagaggtgtggtgaaatggctcgcaagttgcggttttttagggaacaaatgtcaaaagctgccatagcaacttctacacaattttcagggacttctttggaaattgatgatttagaggtcaaacttggagaactagaagttgagctgactgaagttaatgcaaataatgacaagttacagaggacatacaacgagctggtggagtacaacattgttctgcagaaggaaatggtgacagatccatcaaaacaagtgaagcttggttccctgagcggtcttgtgccgaaggaaaaggctatggcctttgaacgcatacttttccgtgctactaggggtaacatgttccttagacaagaacctgtcgatgaaactgtcactgatccattatctggagaaaaggtcattaaaaatgcatttgttatattctactctggggagagagcaaaatccaagattgtgaaaatatgtgatgcttttggtgccaaccgttacccatttccagaagatctaggcaaacagctgcagactattcaggaggtatctggaaaaatatcagagttgaaggcaactattgaaataggtttagctcaccgtgacagcatacttaaaaatatttcttccgagtttgagcaatggaacaccctggtaaagaaagaaaaagctatttaccacacattaaacatgttgagtcttgatgtgacaaagaaatgcttggttgctgagggatggagtccggtgtttgcaacaagtcagatccaagatgcacttcagcgtgctactgttgatagcaaatcccaagttggttcaattttccaagttctcaacacacaagaatctcctccaacatttttccagacaaataaatttacttctgcattccaggagattgtggatgcctatgggattgccaagtatcaagaagcgaatcctggtgtctttaccattgtaacatttcctttcttatttgctatcatgttcggagactggggccatggaatttgtttactacttgcaacactgtacctcataatcagagagaagaagctagcttcacagaaactggatgatataatggatatgatgtttggtggtcgctacgtgattttgatgatgtcactcttttcaatttacactgggttgatatacaacgaatttttctcagtcccatttgaactctttggtaaatctgcctatgcgtgccgtgatccttcttgtggagatgctactacagaaggattaattaaggtgaggccagcatattcgtttggcgtcgatcctgtatggcatggtagccgcagtgagctgccttttcttaactccttgaagatgaagctgtctattcttattggagttgcacaaatgaaccttggaataatgatgagttactttaacgcaaagtttttcagaaatgctattaatgtttggtatcagtttattcctcagctgatattcttgaacagcttatttggttacctttcactcctcatcattattaagtggtgcacgggctcaaaagctgacctttaccatgtgatgatatatatgttcctgagtccaactgatgatcttggggagaacgagctatttcctgggcagaaactagtgcagcttgtactacttctgcttgctctggtttctgtgccttggatgctgattccgaaaccatttttcctgaagaagcaacatgagcagaggcaccaaggccagcagtacaccatgcttcaggccactgatgaatcagtgacagagctagaagaacaccaggatgaccctcaccaccatgaggagtttgaattcagtgaagtctttgttcaccagctgatccacacaattgagtttgtgctcggtgcagtctcaaatacagcctcttaccttcgtctttgggctcttagtcttgcacactcggagctgtccactgtcttctacgagaaagttcttgttctatcatgggggtacaataacattttcatcctgatcattggagcagtgatctttctctttgccactattggtgtcttacttgtgatggagaccctaagtgcattcttgcatgctctgaggctccactgggtggagttccagaacaagttttacgagggtgatggatacaagtttgtaccctttgctttcgcatcaatcatcgaggaggaagattgaatctgaattgttgtatgtaatctagaatgtaaaatcgtaagagtccttcccttgaataatcattgtttatcaccattggtgaagattcagaaaaccccagttcgttgtgtctgagcaggggatgccaaatcattcttttttgcctacacgattagccatgctaggttattctgtatattatgatctgttattactttgagcggtgacaggagcggctgggacgaagttgcaaataagtctagtgcatagcataactgcctttttacatggtgctatgttaataaaagttctgtactcatggctgtgacacgagtgatgtgtcttttgaattacacttgtggaaataaataagttccattctttgtgattattaaaaaaaaaaaaaaaaaaaaaaaaaaaaaaaaaaaaaaaaaaaattcgagggggggcccggtaccc

SEQ ID NO: 49760 - DNA, 2046 bp, Oryza sativa
  Clone ID: PAT_MRT4530_52313C.1
atggcggcggcgactccggcgagcggcggcggcggcggcgggtactcgtgcgagacggcggagcagacccgcgagtggatggaggccatctccgcctttctccacctccaccgcccgctcctcgaggcgcacgtcgtcaacttcttcaaggagcactggcccagttcattgcgagattttgtactcactgcaaagtcacttgttcttccacgggagcagaagtcaccgcgatcactcctacccgacttgcatgtagcatcaattaatactgttctcgctcaaggaatgaactccaagaagaagcatgaagtaggttgcttaatgcagattgaaactctagctgggttggttcatgcaattaccaagagctgtggagcaaagacagtgattgatgtaggttctggccagggttatcttgcccaagccttatcttttgagtaccaactccctgttgtagcaatagatgcttcatcacatcatgcatcagttacaaatactcgtgcagaaagaataaagaagtactacactgctaaatgtgtagggaagcaacagctcagagtacctagaactgttacttgccatgtactttctagtgacacattagcagctgtgacattggaagcatgtcaggatgatcatgctgaacatgtaccagaaagtaaaaacttcaacgagagcagtccacagattgagaaaccaaatgacagcattcctccattagtccttgctggtcttcatgcttgtggtgatctttcagttaacatgctaaggctttttgtgtcgtgcgaacaagtaaaagcattgataagcattggctgttgctacaacttactctctgaggaatgccacgaagacacaaatacctgtcctggttttcctatgagcaaggctgctaaactatctaatttggtgcttaggaaaagcacccgtgaccttggttgccagacattctattttggtggtggaccttatttgaagagtgcagagagatggagaagtctcactaaggacatagccctacaaaattttgatatacatgccttccgtgctgcatttcaaatgtttcttgagaaacatttcccagaggtgtcaagatcgagtccatcaattgggaggcaaggaaaagcactacgccgtcaaaggcttaggaaagttatggaatcccctatggctatggcagaaactgacgctttatcatattccactcaaaaggaacaaatcatgaccaaagacgatccactgcccacaggccctaataattttaaagaggttcatgtagactttcttcccgagctttcaacagggtttgttgattcagctgtatctggagctgccgttgtaccagatgacatctatcttgataaatcacaaaagttcaccctgtttaaagatttcacagtgtcaggattaggtcgccttggctgtgattttgtggaaaatgttagtttacttgaaatatggaaggacgtgcaacccttcacggaatttataggtcccttctggtgccttcgggttgctttagggccactggtggaaacatatattttacttgaccgaatttgttcacagatggctgcgagaacgacagtgcctgtacttccgatgatggatcagcatcaaggtggccactcagagccgtcgcgactcttcccgtctccaaatccttatccagatttgtacactcggaggtgccatgcaaagccgcaggctaaaagtgatggaactgggggcaatcggcgtgcggtgttaggccgtgcgaaggaaggggagaaatggggggaggactgcagaaggaatatttccagcaggagaggaacagggagggatggcgattggggccgtgtgtgtgtcactgtgtcaggtcagctccctcctcgtctcgtatgctccacgtcatatggtggtggtgtctactggaatgtgatcacctctgacagcgagcgcatctcgggaggcgtgccacggcggcggcggcttgacagctggcacaagatcctacattccttggcctggagctctggtgtcaaaatgtcagccatgggctaa

SEQ ID NO: 49761 - DNA, 126 bp, Oryza sativa
  Clone ID: PAT_MRT4530_52314C.1
tatgtgactttgtagtgatgaccaaagagaaatgactggattccagggaatggcaatgagttggacaacaggatcctatcagaaccatatgatgtctcatagtatagactgaacagtatctgtgtg

SEQ ID NO: 49762 - DNA, 250 bp, Oryza sativa
  Clone ID: PAT_MRT4530_52315C.1
atgtctttcgtgattagtctcacacttctcatcataatagaagatgctataactgataataatttgattagctcctggtttggaatggtatattcctggtttggagatagaactgtgcagccgggatggttgttcagaatggttgggcctatgcaacagggtatgttgtatagtgttggattaatattgtttaattatcacttaactgttttataattctcaaatgtttgctaaatgctgcttttgcaaa

SEQ ID NO: 49763 - DNA, 323 bp, Oryza sativa
  Clone ID: PAT_MRT4530_52316C.1
atgcagctcaacccgaaagcaagaacttgtcaaaataaaactaaagcaaaaaggatggcgatgcgccgagattgtattgaacgtgactctatccttgcgtggcaatcaccatgaagcacattaactcaacccgatatcgcacaccaagtcgtattatcggaatcggctatattggctaaccccgtccgactcaaactctgtcgatcctgaccgtatccgttggatacagccgattctttctctgtttccgcaacgatcttcgtcctggactccacttcgatctaaccttcttctccgatgctgacactaccaaatttggtcgt

SEQ ID NO: 49764 - DNA, 555 bp, Oryza sativa
  Clone ID: PAT_MRT4530_52317C.1
cacctgattcaattgcaacagctgcacaatacacagcaacagtcatcgcagacgacgcagcaaggtcagcaacacagccacagaaatccgcatagatcaaggtcccaaaagctggacctcctcctatcgcaagcagttgatttgaaatcatgatgagcatgatgaaattgaaggatgatggtggtccatactatataatatacatatatatatttatatatatatatatatatctcagacagattgtaggataggtatggtggtatagcagcagaagatgggtcttctgttgcgagttcttttgttcaaggtggtaaatgccttagctggagtatcctatctcatcgccatcgcatcgtattatacatgagtaccggtcgcctggcctgaataggaggcatcgtgtttagtcctatgaaagattctttccatggtgcttttgtacttttgtccaagaggatagcgtattacaaatgtaccacagtacttatgctggctgtaatagtgtaattacctatagcgttgcttaaaaaaaaaaaaaaaaaaaaaaaaaaa

SEQ ID NO: 49765 - DNA, 339 bp, Oryza sativa
  Clone ID: PAT_MRT4530_52318C.1
tttcagctgaagggaaccatattgcgatgggctgatggctgcatgctgggtgaaccagacgtccatgctcgccaatgaatgggggatgctgatcgtggtgctgtgcagatacgccgcccacctcgacctcgcgctcctcgacgggggtcgtcggcccaaggtcagcggcttgccggtgctcctactatgggcggcgtaccagctgggcggatgggccgggacgcacactgtccggagggtgtcacctcagggagacgaggaccaagtagcccgacctcttgatggtgtacatgcccatggtgtttatgaggaacagatgcccggtttctttcagcaatt

SEQ ID NO: 49766 - DNA, 147 bp, Oryza sativa
  Clone ID: PAT_MRT4530_52319C.1
cggatctgaatcaatccaccatcccggccacggatcggcgacacaccatggaggaggacgatgacaccgtgtcggttgatggcagtggccggcggcggttgaggcaatggcactactttagccctcgctgctggacgctaggcagca

SEQ ID NO: 49767 - DNA, 155 bp, Oryza sativa
  Clone ID: PAT_MRT4530_5231C.1
tccccctcgtggtaattgtggtcaccattcctccttatcggttatctagcgcaatccaattttaaattcaccccattatttgcattttccccaggagaggcgaggataatccatatcgggtatctcgacacacaggcgagatcctcgtgagcact

SEQ ID NO: 49768 - DNA, 573 bp, Oryza sativa
  Clone ID: PAT_MRT4530_52320C.1
atgatcgatgtgatcatccctgctccaagatgtggcagattcagaagaggtgtgagctgcaaactacaggttcagacatgttcgttttcaggaggttgggccggcgtgagaggggaacatcgccacatcagcacatttttcttggtctcagattatgctgttaacaatgacattgcagtgagatgtgacatattggcgtcgatgagaactaaatgttttggggagaactatcttgttgaaaggggcaagatagctaattgtttggagtactacagaaacggttatcactgccgggtccgattcctcctattcgccttcctctcccgtgccctcgcctctgccctcctctcccgcttccccttcacctcctcctccaacgacaaacgacttcggcccctcgccaacaaccttgagcgacgcggcctcggcggggatgacgaactccttgtggcgcaacagcagcagcacaaggccgttgcggcgctggccgcccccaatgtcgtcgccgctgccaacgaccaccgttggccgctccacgaaagggcatgcagtctagtggttacagtgacctga

SEQ ID NO: 49769 - DNA, 444 bp, Oryza sativa
  Clone ID: PAT_MRT4530_52321C.1
atggagccctgccaaggagggcatggagcaacgacgcgggtggtacatgaagatgctagcggccgctttgccaatggcatgttggagttctgcggcgcatgggacaccatttccttcttaggaaagggcctccttcctgatggccagctagtggtggggcactggtgcgatggccgcgtgctgatgccaacaatctttccttgccttgtcaccggcgtcatctcccacagggaccggcagtcaggtgactatcttattggcgcccaggcagcgacttcagcgagcgtgggcctcaacgcggccttcagcggtagcgacgcgagaggaggcgatggcgaacaccattgtagccaggtgcgtatgctgccactaggtggttccattaagcgtcatgccatgcgagccgtgagccatcggatgacttggacggtggatgaggactga

SEQ ID NO: 49770 - DNA, 363 bp, Oryza sativa
  Clone ID: PAT_MRT4530_52322C.1
atgggtatcgagctggtacatgagtatcagacctttgtacctagcttctcgtcgctcgtgttgtgccaagcgctcacccttggtggccgcatccaccgctccccgaccgtaggaggcgccagcaccgccgaggaggagaagggcggcagcggcgaggaagccagcgacaagaacgacgaagaggaggagcggcttgaggagcttgatggggaggcttctcgacggcggccgtcgcccgtggtggtcgggagccccgccggctgtcgtccaggtcgtccgcgggggctggtggtgacggcaccgccatcgtcgtcgtcgtcgtcgccgtcgccgcctccatgctcatgggtggtagtcacatag

SEQ ID NO: 49771 - DNA, 986 bp, Oryza sativa
  Clone ID: PAT_MRT4530_52323C.1
caagttcactttataagatgagaaggcctggtgcgagatgcagggaaggacatgcacatttcaacgggaaccacatagatgggcaatataagaatttcttcaaggttatgattggtcgctttcgtgagagaatgatcataccaaacgaatttcttcaatatttcaggggtaaaataccaagaactataaagctgcaattacgcgatggttgcacttatgatgttcaagtcactaagaatttgggcaaaatatcccttcaatcaggatggaaggcatttgtgactgctcatgacttgcaaatgggagattttctagtattcagttatgatgggatctccaaattgaaggttctgatctttggtccaagtggctgtgagaaagtgcattcacgctctacattaaaaaatgctacacattgtggtgagaagtgggaagaacccctgcacatttcaagcaattcgcatgatcttcctgtgaaatcaccacaaaatgtaagcaaatctgagaaacaatgggatagctcagaacaagaaaacgacaccgcgaatatcgaagaagttgcattgcaaggagatgatctccaagggcatccggttctgaattgcatcctcccaaagcacacccgccttacagatatgcagaagcagcagctggaaagcaaagttggagctattcattctgaaatccccatctatgggtgcatccttaggaagagtcgcgtccacggaaaatctcaaaccgtagacatatgtcgagaatatgcagatgtatatcttccattcaaggagttaaacatgacgcttcaacgtcatggcaaaaattgggaggtgctatgtcgcactaaggatacaagaaccaaaaggctctcgacagggtggagtcggtttgcacaggaaaacaatttgcaggtgggagatatctgcctctttgagctactgaagaagaaggaatactcgatgaatgttcatatcattcccaaaaaatga

SEQ ID NO: 49772 - DNA, 269 bp, Oryza sativa
  Clone ID: PAT_MRT4530_52324C.1
atgaagcaggatggagaaaaacggttactggcatttaccaaaagaggcacgaggattcattcagatttctcatataagcctggggattggttagtatttggctctgagacgaaaggtttaccacaatctgcccttgaggactgctctagagaaggcctaggtggtggaactatacgaattccaatggtggaaacctatgtaccggtgcctaaatctttctgttagcgtcggagtagcactgtacgaggcagctagacaactcaactaag

SEQ ID NO: 49773 - DNA, 308 bp, Oryza sativa
  Clone ID: PAT_MRT4530_52325C.1
gtggcgtacaataaccaatatatatcaggggggacccaataatccaataacagaacttactccaaataacaaccagcttacccaaggctttaaactattttttattttcttgctgtacggaaatgaaaagtttcagggagaagccacatatcatctagaaacaccacaaaagaagagaccaagctattgactgtatgttggtatggtttggagctttatgaaatgccttacaatgttgtgcgtaaggccccccccccccccaaaatgaatttgcccaaaggagaatttaattgtacctcttgagtttt

SEQ ID NO: 49774 - DNA, 381 bp, Oryza sativa
  Clone ID: PAT_MRT4530_52326C.1
atgccgttctcggcttccctcgcaatcagcatgcccgtcgccttcaccaccttctccgtcgatcggagaggagtggctgccaccaccactgtcgccaccaacaccatgaacgtcgggctagggctggtggccgtcgccaccaccctcgccgacgcattgtgtggtgacactgcccggcgagccatgcaatatttccccggagatggagtcgctgccgccaccaacaaccgctccttcaccacctccaccgacaccaagccgacgccgacgccgttcccccactcccacgccaccggggtccggcaggaccggtaccctggctgcgtgcacgggggagccgcccttcttcaatccgtcaacgtctcgtcgtcatgccggtga

SEQ ID NO: 49775 - DNA, 180 bp, Oryza sativa
  Clone ID: PAT_MRT4530_52327C.1
atggtctctgattcaaggaactctcttatattatttggattatgggagctttctgttcatctttgcaagctgattactctgaccactatcaaggtaagggtggatggtctgaacatggagtactgcggtggtctggtcagcaataaacaggtggatcggttggtacctgattcaagctag

SEQ ID NO: 49776 - DNA, 858 bp, Oryza sativa
  Clone ID: PAT_MRT4530_52328C.1
atgtggtctgaagttaaacaagtgcttgaggtcgcgggctccggtggtggctctcccccaccctccccgtgcggatctggtgacgggcacaagcgggaggccggcagcggctctctcccgtcctctccgggcggatccggcggcaggcgacacagtggcgaaaagcgaacagaagattcaacaaagaagtaccgatgcctacctttcattggatcatggatgccgttctcggcctccctcgcaatcagcgcgcccgtcgccttcaccatcttctccgtcgatcggagaggagtcgccgccaccaccacggtcgccactaacaccatgaacgtcgggctagggctgggggtgcagtactgcgcctaccacggatggacggcagtggtgacactgcccggcgagccatgtgacctttccctggagatggagtcgctgccgccaccactgaccgccccttcaccacctccaccgacaccaagccgacgccgacgccgttcccccactcccgcgctactggggtccggcagaaccggtaccctggctgcgcgcacgggggagccgcccttcttcaatccgtcctcgtctcgtcgtcatgcaggtgaagccgccgtttgccgtcccggcctccgccacaccttcatcgccattccccatggctctcctagccgtacactccctaacggggtgccggggaatggcgtccgggctcggccggcctccgattccgatgaggatcgggagccgtcggcctaatccggccggcaaaccgccggcggacggaggggcgtccgtggcgccagtgtatggtggatggcgacaacggtgggtagcgaattgtggatgcaagcggtggtggac

SEQ ID NO: 49777 - DNA, 958 bp, Oryza sativa
  Clone ID: PAT_MRT4530_52329C.1
ggccgcttttttttttttttttttcgtcctgacagctgattcatctttttcatcccaggattgatgatttacacacatataatacatatatatgatatcaattttagagaaaggatacggtcggggcacagcagcatcgctactaaccattattaattttaatttaaagctatatatattctgctagctagcccacacgaggcgtctcggcgacggtgtcgacgaagattcggacacggttgaagcgaaaatcctctggcaccgccgtgccgaatggcagcacgacgatgtcggcgtcgggcttgtccttgagaatcaccttcttggcctcctctatgctcagcccaaccacctccggccacgacgtcttcgccgacgagctcatcttccctcgtctctgcttgtagagttcatcgagagcaccgatacaaggcacgtatttataatagagttccagaggcaggtttggatcaggattatagcttgccaaggtggatctgactgtgtacgtgccggtagagaagaggagatcgctcctctctctccctttagcgtccctctcgacaaccgacgcgatgttcctaaatatcgcgtcccctttcattggattatggatgccgttctcggcctccctcgcaatcagcgcgcccgtcgccttcaccatcttctccgtcgatcggagaggagtcgccgccaccaccacggtcgccactaacaccatgaacgtcgggctagggctggtggccgtcgccaccaccctcgccgacgcatcgtggtggccactactccggctgctcctcctccgcctccgtctccggttgccgccgtgcctcgccgtatcctggctgcgcgcacgggggagccgcccttcttcaatccgtcctcgtctcgtcgtcatgcaggtgaagccgccgtttgccgtcccggcctccgccacaccttcatcgccattccccat

SEQ ID NO: 49778 - DNA, 630 bp, Oryza sativa
  Clone ID: PAT_MRT4530_5232C.1
caggaattcgcacgaggccaaattcaatcgatgccatcgacctgtgaagctctcatggaaagaggcatcaagcgctctctaactgcgtgattatccacggtaagcttgctttgacgctttgtcatcaacactttcgttgggagctagactagctgctggttctctctttcatacggccatccaccactgaacatccctgtcaatacaacgaactcatccgacatggtgggaatttcgcacgacgatgcgccttcaacgaccggtcgatccagttcttccgatgttgatgccgagcgaggacgattgctatcaggaaatgatgatgaggctaatgccgcagagagctatgaggatgctgagcgacttgagagctggcacctgcagcataagcggcgcgagaccagacgatggagttgtctcgttatggtaatcagcacaatcgcattgatcacagttctcgctatttgggtccataacaacactttgacttctgggtgtgagtacgacggaagctgtaacgacatttccaaactttggggccaatactcttcattcttttcggttccatcggagatcgactcatcaacacccgatggctgcgatgtcactatcgctgttgtcttgtctcgt

SEQ ID NO: 49779 - DNA, 595 bp, Oryza sativa
  Clone ID: PAT_MRT4530_52330C.1
caggcaacaagctatagaggagaggaagaggagattgggggtggcgtggtctgaagcaaattacgtgatctgtggtgataacatgctctcgatctgagacagcattcaaataagcatcgtcgaaggtgtcctactgggttacacaaacttctttcagaagcgagaagaagatggccaccaaaccccagccatagattcccatttccaagcctgcctcactccaccagcatgatgaaacatcacctacgtcgatgtggtgctgctgctttcaccatggtccgatgtttctgccactttccgcatgctgtatccacgtcacctccaattggatggaagtgcccttctcctcggctatactccaccaatgagatgaaccagcagcttcctgcgaacctggtgggggtcatggagcagagaatgaaattgatcgagcagaggagtgcgtacctccaggagcaaattaaccaggtcatctttggatgggcaacctctgtttctagcactgttcagttcttgttatcatgtggccatgtagagctttcaaattttaggttggaagtaaaaataatcttgatttgagtttgacgttaatgaa

SEQ ID NO: 49780 - DNA, 660 bp, Oryza sativa
  unsure (1)..(660): unsure at all n locations
  Clone ID: PAT_MRT4530_52331C.1
gaggctgtagccctcccttttttttttttttttttttctctcttctcttctcttctcccaattcacacaagattcactcaccagctgtgccctcccattcccctctgatccaagcctttcactcaaagcttccagcttttccaattgcttggccacttcaagaatcaaggaatatgttcttgctcttggggttcctctgatccgactctccatcttccagcttccaggcttctctctcgttctgtgccatttttgctctgcctgagctctgtgcttgttgcattggtcactccaagaaaaggattttgaaggctggttttattgttcttctgttcctgggatccgaattgcaggcgagctcgctgttcgtgtggaggtttctttctttcattcattcgcttgaagaattcggcaaagccatgcgagcaattcgggatgatttctcggggcctttggaacgcgtgatgattctttgacccaccattgcttcggttttttttttctgggagaattctgcaatttcgcgagtttggtcgttgagctcgagcccgtggtggtgttcttgatccggtccatgggtctttgtcatggcaagccgagccaaatcccggagcccgaggcggangaagcggcggcggcggccggtgtagccgtcccgcg

SEQ ID NO: 49781 - DNA, 156 bp, Oryza sativa
  Clone ID: PAT_MRT4530_52332C.1
atggcagtggcggctcgacaacagcggcaacagctcaacgacggcggcggaggaggaagtttaggagggcaccagctccgactggggcatgagcatgaccacccaacgcggtttcttttgtcaccgagtgccttccacctgacaatccctgacgag

SEQ ID NO: 49782 - DNA, 1048 bp, Oryza sativa
  Clone ID: PAT_MRT4530_52333C.1
ccggccggcggtgctctccgccgacctccgccgcgcgcccactcccttctcccttctccctctcgctctcgctccgccgccgccgccgcctcctacccttcttcggcgccggccactgcttctgccgcgagccatctcctcctctacctcgccgccgccggtccaggagatggaggcggcttacaagttcgggccgtacaagatcgacgcgagggaggtgttccactccacgccgctgtcctacgccatggtcaacctccgcccactcctccctggtcatgttctagtgtgccccaagcgtgaagtgaaacgatttgctgatctaagttctaatgagattagtgacttatgggttaccgcaaaggaagttggtatacggcttgaacagtaccacaaagcgtcttcacttacatttgctattcagtgcttacaggatggtccacaagctggtcaaactgttccacatgtccacatccatgtcatccctagaaagaaaggagattttgagaaaaatgatgagatatatgatgcgctacctttgacaagtggtaaagaacaatttgattggcaatttggctggttgtgttctgaagtgggatgtgactgttgcaccagacctgaggatttggtaacggtagtatgcatgcttcatctccatcagcaggagattctcatctgcaaatgcaaaagtagttctttcggcaaaaaatatagtgcctcagggcctccggcagatacggtccatgacaacgaccatagccatgacgaccgcgacatcgacgcctggcctgacgacgagggtgaacacgtcgtcgccgaggctgaccggtctggacatcacgccggcgttcttcctcgtgatccgcgctgcctcctcgccgttgctgccacggatcttgcagctcctcatggagaagcagccgtcgattctgaagctggggctgggagaagcatcagagctgagctcttcctcatggagaagacttgctgctgtgacactgaaggagagctcgtgctgtccaagccttcttcctcttgtgctctgtaa

SEQ ID NO: 49783 - DNA, 660 bp, Oryza sativa
  Clone ID: PAT_MRT4530_52334C.1
tccccatccccatcccgatcccgcccaactcgcgcctccttctccggtcgtcctccctccgcatcgtgcccccatcgctcatcttcgagttgccccctccctctccatcgcgccggctaccaccgattccctgccgcatctgcccgttgccctcgcgcccggccgcatctgctgcccatctcctcctgccctagccgcccgcgcctcctccatccatgtcggcgccgcggctcttcccaacatcctcagccgcctccccaactcaaaatcccgtctcaatccacccccaaatcccggcttccaatcaccccatcccgtggcggacatcgttggagcgagtgttgtcgtcgtcggatcatcgggttgacgtcttcaatcatctccccctctgccatcgccagcggtgcctccctccactgccgccgcttcggcgtcgtgctcgtgcggcctgggagcgggtgtagcggcggggtcggtgtcgggtggtcgcatgaagcacaacaaggaggaattttgtcatcagccactagattgcttatgttaagggcatggcgacctggaggtgcactgtgcccatgtactttgtcccagttggcggcgaaccaatcccagtggtggtgatcctcacagtgatgaatccttttggtgctcatatgggtt

SEQ ID NO: 49784 - DNA, 312 bp, Oryza sativa
  Clone ID: PAT_MRT4530_52335C.1
aagcttagtaggctagagggaacacagcagaaaatttgagaagacggattatagcttcgtttagttcatattagcccactcccccttttatctctctttgacgcgaatctattcgctaattatttgatttgatttgatttgatccgctttgctctgttttgccaagaattatctatgtttaacagagtttgaccatctctctatcatttacaaaaatttgtttatattctatatatctatctctataaataaataactgattctttcttctcggctgcccaccggaggaatatccctaaaaaaaaaaagctt

SEQ ID NO: 49785 - DNA, 316 bp, Oryza sativa
  Clone ID: PAT_MRT4530_52336C.1
ttttcaaagtggggacggataaggcgctttgagatggaaatggggcaagctctgctgcggatctaccttctaactacctaatgaattctaaggttgttgggctcgagaaagctgtggccttcctttggcgtggcacacactccagatttgaagctgctatggatgatgcaagaatccggacgactgatatagcgacacatgctgacgttgctatatattggacctctatctgacttgaactatgacacatgaggatgattggcactggaccacagacgtttgttgagattgcagagggtcgccatgccttctgttc

SEQ ID NO: 49786 - DNA, 2325 bp, Oryza sativa
  Clone ID: PAT_MRT4530_52337C.1
atgtcgggtgcagccgccatcgccactggagaaggaggacctcttgtggcagttggactaggcggtggcaatgatctgcataacggcgatgctgctgtggttcttggcaagacttggtgctgggcaagcaggtatccgggtgatcaatatgaccggttctggtggcagctaggatacagtagcccgacgtggaagaacctttccactgtttcggccatcacgcaagattccatctacactgtgctcttgaccattatccaaactgccgttgaggcagtcggcaacaacacgatgctgaacattacatggcaagatcaaacgcctcgtggtcgtggcttgaagtttttcatgtactttgctgacttccagaacagccagcttcggcaattcaatgtctccttcaacgacgttgagccataccagtacagtccaccgtatctaaccaccggtgtcttatataactctggatggtcaactgccaccgatggcaactacaacatcagcctagtgcctacggctgcgtccaagttaccgccgatgatcaatgccctagagatctacactctcatttcccatgacaatccaacgacattcccagtggattttgaaaccatcatggcaattaaactcgagtatgggataaagaagaattggatgggtgatccatgtttccctgaaaaatttgcttgggaaggcgtaaaatgcagcaattcaagtagtaacacagcgaggatcatctctttgaatttgtcatgcaaccaactgaacggaccagtccctgactctctacgtaaaaataacacaggatcattcattttcagcttcaattctgatggaaatatgtgcaacaaaccaataatagtcccatctccgccaggaaaaaggtcaaatagagcagctaccttagctattttgatagtggtccctgcgacggtgattgttgttcttgttcttgtgtttttgatctggagacagaaaagaaactccaactattctactgaggatcctacaagagatcgatcaaatcaacttgagaattccctagaaaaaagtcaaaatcatggggatgtcctgcaaatagttgagaatcgccaatttacatacattgagctcgagaaggtcactaataagtttgaaaatcacattggacaaggcggctttggacctgtgtactatggttgtttagaagataataccgaggttgctgtcaagatgcgttctgaattgtcgtcacatgggcttgatgaattttttgccgaggttcaaaacttaacaaaggtgcaccacaggaatttagtttctttgattggttattgctgggaaagggatcatttagcactcgtttatgagtatatggctcaaggcagtatctgtgaccgtttgagaggtaacatttttgttgaaaatcagcatgcatcacattattctattctaactatcacttttcacatatacgaaggactggattatttgcataagggttgcagtctaccaataattcaccgcgatgtgaaaaccagtaacattcttttaggtaaaaatctacaagctaaaatagcagattttggactttccaagacttatctcggcgagacgcagactcacatatcagtcactccagccgggacagctggttacattgatcccgagtactaccaaaccggcaggttcacggagagtagtgatgtgtatagctttggcattgttttactagagatagccaccggtgagccacccataatatcgggtcaaggccacatcgtccagcgtgtgaaaaataagattgttgctggtgacatcagtttgattgccgatgcacggctcgatggtgcatatgacatcagctccatgtggaaggtggtggacactgcattgcagtgcactgttgatgttgttgctcaaaggccaacaatggccactgtggttgcccaactaaaggagagcctggcattagaggaatctcgtgaagacagtggcttcatgggaagcacaagcacagtcgagtacgtcctcatcctgctctactctgtcatgagctgctgccttgtaaacaagcaccttctcagcatttggctgacctacactcatggacttatatcagaactctcaacagcatcactggggaatttacctgcaaatgagacaagtttgaagatcgtcatggatgttagtttgagctttgagttcaaagctgcacaagctttccttcaattgcatgactaccggacattgttggcctttgggaagaaatatcatcacagcatctggaaccttccacaaggagttgacaatataggaacatccaagacgttcatctgcaactga

SEQ ID NO: 49787 - DNA, 709 bp, Oryza sativa
  Clone ID: PAT_MRT4530_52338C.1
gctatgttaactggttaggaaacaatggtgaagtggatacatgtttataaattatgcagaatttcaactcttcaaggtgatctgttcagagaatagtatgatcaaccaagaacagggttaaacagtatgttttcctcaatgcatacatttcgacatcaaaggtgagttgcaggaatgccaaaaatttccagtgtcaaagagaatgtcagcagagatgaacacaaaaacacgaggggaaagtcattgaaagcaaaggtgaaaagatggaacagatagcagttttgactttgctggttgattattagcggtcataatcgttgttgttacctgccgcagcttgcgataaccaagccagatcatagctcaagtttttctcctgtggcgagtactgttcatctgggatccaatccattcagtcatgcatcaactaggtaagttaccagtaattaaaaaaaattggtagtctccactgattgctgctgaacctaattaattatagttggtgtggtagctctcctagccttgtaagaatattatctttcttagatctgtcacccactcaacaaaaagaggacctccttggcaagtgttcattggatgaggaagttgatgcctttcttccggcgcccgcgacgttggtgcagcagcaggagaggcgtcgtcatcttctccggggaccatgtcgaaggcgatgcagtgcttcgggttc

SEQ ID NO: 49788 - DNA, 387 bp, Oryza sativa
  Clone ID: PAT_MRT4530_52339C.1
gcagcgcaggtcgagcacgtcgccgcgcgcatcgcgttcgcctcggcgtcgctgccgacgaagagccggtacgccggcccgcggataataataaacttcatgggacacacatgtgacatcccggcccagagcttaataggattaatagaatactcatatcaacaagttgcaacttcttttccggaagccgatttccaaagaattccaggttaagcgtgcttggtctggaacaatttgggatgggtggcagaccgggaaattattcctgggtgcgcaagagtgacaaagtgtgcagaaaagacttgtgttggtctgtgagggcagtctatgacctgtgaaagctgccagatgtaagcgtgcccggcctgggagaggcgggacgttaca

SEQ ID NO: 49789 - DNA, 423 bp, Oryza sativa
  Clone ID: PAT_MRT4530_5233C.1
gaagacgcgctcgtctcattcctgcgggagaactccgacgtcttcacctggaagccgtcggacatgcccggggtccctagggcggtgatcgagcaccgtctcgccgtgcgaccggacgcgcgacccgtccggcagaaggtcatccacccagggtggctggcgaacccggtggtcgtcgccaaggccaacggcaagctccggatgtgcatcgactacacggacctccacaaggcatgccccaaggatcccttccctttaccacgcatagatcagataatcgactccactgtggggtgcgaccttttgtgtttcctagatgcttattcagggtaccatcagatccgcatagctagggaggatgaggaaaaaactgcttttattactcctgtgggcacttttgttatacaactatgcctttcggtt

SEQ ID NO: 49790 - DNA, 1053 bp, Oryza sativa
  Clone ID: PAT_MRT4530_52340C.1
atggctagtttctcgacggttttcctgctcctcagccttgtctgcctagcttcgccgtgcgccgcgcagcgcgtgatctgcgaagccccaccgtgcaccaccgcgtcgcaggtgaagacaaccccgacaaatcgcgcctcccacgtccgcctccccgaaggcgtcaccggcgccgagagcctcgccttcgactccagcaaccgtggccccttcaccggcgtctccgatggccgcgtcctcaagtggggcggcgactccgccggctggactaccttcgcgtacaaccggaattaccggagcaaccctacgtgcgcgtcgtcatctgaggagacggagagcacatgcgggcgtccgctgggtcttgcgttccacctcaagacggggatcctctacttcgccgacgcctacaagggcctgatgcgggttgggccgcggggtggccaggccgacgtgctcgccacggaggccgacggcgtgccgttcaattacctcaacggcgtcgacgtcgaccaggacaccggtgacgtctacttcaccgacagcagcaccaccatcacacgccgataccaagagaacatcatgaggaaccgcgacgcgacggctcggctgatgaagtacgacgcgaagacgaagcaggtgacggtgctgaaggaccggttgccgtacgccaacggcgtggccgtcagccacgacgggaggtacctcgtggtggcgcacacggggccggcacaggtgttcaggtattggctcaagggggccaaggccggccagtacgagctcttcgccgacctgcccgggtaccccgacaacgtccggcgagacgccaaggggggctactgggtggggctcaaccgggagaagattacgttcaacgtgccggcggcggcttctccggccaagcacctggtcggcgtccggctcaacggcgacggcgtcgaggtggaggagctgacggctgctagtagggctgtgacgctgagcgaggttgtggagagggaccgcaagttgtggctcggctccgtcgatctcgactacgtcggcctactgcagtag

SEQ ID NO: 49791 - DNA, 2133 bp, Oryza sativa
  Clone ID: PAT_MRT4530_52341C.1
atggcgggccacccttcgtcatcccctacgccggccacgtctccgccgccacgcaagagcgcgcgtgacgcctcgccgccggaggaacaggagggcggccttcccagaggacctccgtcgccgtagccgtcgcggacggggtacatcagcatgtgcagcggggctactcagccggtttgcttccctcgcgggtttcttgcatcgccgcggggggggctgctgcccctccagcggaacacgcgtgagaggcctctttccctcgcccacctgatccccccagaatcttatggacattcctatgcccccatcgctgccccaaacaatcaggccactgcagcctcctgtgacagctccaccgctcagcatcctgatgccgcaatgcagccaacttatagttagtttccatcatccaacaatagcgaaattaagcacaaactttatagtcaacgagcttttactgataatgcttaagctaccctctaaaatactaccacagataatgccgcccacgaaaagttcatgccccaagttacccctccaagatcacaatacttaagaactacatctgagccaattatcgtgggtacagaacctgaggccgcaactaataatgatgatagtcatcgcgctcgtgggtccgagtacctacctccttccgcttctcatccaacgcagccagccgcttctgtgcatcatcaaacttcttatattccttttctaactgctcttctgtgctccatgtcccctactgcaccttctctggtgtgtgacaaaccacattctgcggcagagaatgatgagaatggttgctccagtgggtcctccatgtcatcgcctgctgggtacatcttcatgtgcaatggcgtgacgaaagctgagtgctacaggcaccgggtgatgggcttgccactggggagtctagacgtggtgtcccggatcaggcgtggcacagcgctctttctctatgacttcgatgccaagcacctctatgggccctaccatgccgattccaatggtggcctcacactcgtcccggatgccttccggggccgctttcctgcccagaggaagcgggtttttgttgtgactatagttcaccaagttaaatttacagttgatggtgatttcatgcctatcccagagagtagcctaagaactgctataaaagagaattattccaatgggaagttcagcccagaacttacccttgtgcaggttgagaaactgagagcattgtttcgtccaattattgtaatgccagaatctgcactcttccataatgacagtgacaggcatcctgttcctcctgctgtttacctacctcctgcttctcatccatcacagccagctgcttatgtgcatcagcagcaccaaacttcttatattcctcctttgactgctcatccgatgccacctgaatcttatgcacattcatatgctcagatgcctcctccaaacatgcagttcactacacctccttaccatatgtcaacagctgagtatccatatcaagcagcgcacacagcatatagttcattgccctcagccaacaatatctctatggccaacaatctctatggccaacaatctctttctgatcatgtttcggctactggctactatactgccccatattatgccgcccaccaaattggcatgcacccagttgatcctccaagatcacactacttaggaactacatctgagagaattacctacggtacagagcatgaggcggccacgacaaacttgcaacctattagccattatgggtccattccaagtggtgcaaccgcagcacctgaggcagctgcgacaaactcagaactagtttgtaattctggggctactccaagtgcttcagcaactggggcagctatgacaaacttacaactcgttaggaattatgggtctatgccaagcagtgtgattggagctgcggcacattcatctgaggggagccaattcgagcaggcagccacttacatcactcatgcacctggaacctactactgttatggagcttcctcggcgatctactcctacccagggaacacagcatcctgtgatggaaacaatgtggctgctgctccgtcagtatatgctgtcgcagcaccaccagcataccagtga

SEQ ID NO: 49792 - DNA, 502 bp, Oryza sativa
  Clone ID: PAT_MRT4530_52342C.1
ctgtcgcgtccgcccacgcgtccgcttcctcctgcgcacgcgttctcccgatgcgccgccgcctcctgctcctcacgccaccgttctgtgccgccggccccgcaagggaccaccgcgccgccccgcctcggaaaccgcctgggcgccgccacctcctgccgccgtcacctgcgccgacttcgcgaggagccgccgcgtcgcctgccttgggaagccgccgcctgccacctgggagcacccgccgtcgaagtccggcgccggttcctcgccgggaaccgccgccgccgccgcaagctcctgcccgagctacgacgaacgccgcgccgagcaccacgccgctgcacgccgcctgcaatgacgcctccagccgcccgtgaactcgccgccccaaaccacgctgcccacgaaatcagagagaacgcacctcgtatctttgaatcggcgggcgctcgctcgctcgctgtgaactatcttgcttgttttgccggctgcgaggggagca

SEQ ID NO: 49793 - DNA, 504 bp, Oryza sativa
  Clone ID: PAT_MRT4530_52343C.1
atggtcgataacaaaggcatgggtggaagtgttgacgacaacgattgtgccgactgtgcatgcagtgcaaagggcccaacaagatttagcgatggtggagccggcacggagacaatgaaggccggctcaaggaggaggagacactcatggccaccccgagcatggaggggtccgctgactgatggggtggaagaccttgacgtgccccgtctccgcccactagacctggtgacagcccgacgtggtggagtgagggcattgtggtggcagagttctagcgagggcaagtcccgtcaccatgatggcaacggagttatggcaacggagagggcgcaacaaggatggggaaggagccaacaaagaatgaagtcggggcagtggagaccgaggcgagtggtgaggcctactattgatatggcaaaatggctctctaagtttggccaatgtgcggtgaggtttggccagatggagaacgagttacaaactgtggagcttgagcattag

SEQ ID NO: 49794 - DNA, 642 bp, Oryza sativa
  Clone ID: PAT_MRT4530_52344C.1
atggcgggtggcggtggcgtggagagtggcggttggcagcggagagtggtggttggcggcttggcgccttggcgcggtcacgctcacgtggcggcgccgatgcccgatggcgaagggggttggcggcggcggggaccggcgtcgatgtgcacgatggggaacggcgctatggggaatcaggcaatcggcaaggggatgcactggtcattggtggcaactagggtggaggagcttcatcgttgcgttgaccgcgggtgcgacgagctgcgtcagcggcggtcggaggtctccgcggcgagggaggagagaggagcggtggagaagcgggaaaaggggagggaggcggcgacgggagcacaggggagatcgagcacaacggccggcggagcggcaccgcgcgaagccggctcaggcggtgttggcgcgtgcgcgaagagggctggcggcgacggcaagcgggcagcggccggcgcagtggaggcgggaatcaggctgcctgcgcacggatccgccgcccccgacctcgggggcaacgacaacgtgtggatccaccacccctacctcgggagcgacggcggtgcgcggatccgccgcccccgacctcaggagcggcgggcgacgatgacagtgacggggggctag

SEQ ID NO: 49795 - DNA, 326 bp, Oryza sativa
  Clone ID: PAT_MRT4530_52345C.1
atgcggcggcaggtcggccatgcgacggcgaggagtggcgcggccggccgtgcggcgcctgcacggcacagcggcgaggcggccaagtggtgcggcggccaagcggcgcggcagctcggcggccaagcgatgtggcagcgcggtggcctgcaaggcgcggcggcacgactgttcaccggctgcaggacatgcgacgacgtgaggcgggcaacgacgaggccgtgcggcggtgctgccggctacgccgcgttgaagtggacgaggccgtgcgacggtggcgaggcgcggcccggcgaggaccggacggtggtggcgcgaccctgctg

SEQ ID NO: 49796 - DNA, 243 bp, Oryza sativa
  Clone ID: PAT_MRT4530_52346C.1
gttttgttttggttgtaagctgacacccggggaccgacccctgatgcgccggcgcgctgagcgggcacctactgctcctgaccgggggtcgctgccttgcttccgcgatctgccatgggggacgacttatgccggctggggaccagccgtggtctctcttccccgaccttccatgcaccggtggcacctgcacttactcgatggtggggctcatcgaccacgacgacaccgcgacacggctga

SEQ ID NO: 49797 - DNA, 420 bp, Oryza sativa
  Clone ID: PAT_MRT4530_52347C.1
atggcagcggcagccgagcccactgacgggccaacccttagcgtcgtctcgaagtggctccacgcgctgcggaagaagcacaacaagattatccaaatggaggagccgctcgctgacgggcggaagctgaacaaggagcagggggaggatctcctcgcgctcatctactttggctccctcttcgacgtcaagccacagaccgagttcatcgccaccatgctcgtgcgtcccaaggagtgggactgctgcatcacctttgactatgtccgcccttgtcgcctcacgcgctgtcgctcactggtcccaccgccactcgcagctcgtcagtgcgggaagaagacaggagaaagaagaaaaaaagggaaaaaagaagagatggatggaaaacatgacggcgatggcacagttccaattttgtaa

SEQ ID NO: 49798 - DNA, 370 bp, Oryza sativa
  Clone ID: PAT_MRT4530_52348C.1
gaggcaaaggtgatgtggctctggctttttgttcaggtccgcatgctcagtgtcgtagatcggttacattttagggtataattctagtgggttattggtgtagatcgagaagtaaaaccagatggtaaggcaacaaattgagttggtttttttttaatgcaactgcttgcaattttggtgcccttggaggtgtgtgcgtgcgtgtgtatgtgagtgtgatattactgtgagtttcaacagtaatgagaactggtgtcctgcgtttgggagctctctgtaattcaggaggagcaattttgtttaaggttgttaacctgttaggtgtatctatcttgataattgtctgagacctatggttgttatctcttag

SEQ ID NO: 49799 - DNA, 434 bp, Oryza sativa
  Clone ID: PAT_MRT4530_52349C.1
ggaaccaaaattatcggaaagttttataaaagtttttttttaacttaaagggaagttacaatataattcccttacgattttaattaaatttttaaaaaaaaatttttcgataaatttgtggcaaaatcgaaaataaatttaaaaggggatgcgggcccatgcaaaaattcccccgggacatgccccccaccccggggttcgtgtttgggcaatccttgaaaacggggactttcccggggcccaccattgtggccccccagggcgtgcccctccccggggaggggcaaaaccaccttcccgacgcccaaattctcccgggggaccccaaagtccccaccgccttccccaaaaaggggggggtccccaccgtggtccacctccacgggggggcccaccccccggagtttgacggccacccctttgcctggttcacc

SEQ ID NO: 49800 - DNA, 1163 bp, Oryza sativa
  unsure (1)..(1163): unsure at all n locations
  Clone ID: PAT_MRT4530_5234C.1
atgaggttgcagagcgcggcgagcacgtggtccaccgccataggcgatggagaggttcgacggcgacaagcgacggcgctggcccgatggatagcaggggtttctgaacgagagagagacagacggcggcgggcggcggcggcggcggcgagggagccgaagcctgagaggatggtgtttggccggagcaagtcgtcctcgtcgacggcgtctcctccccctgctgcggcggcttcctcggcggccgcggcggcgtgctcggagctgcgtgcggcgtaccacgagtgcttcaaccgctggtacgcggagaagttcgccaaggggcaatggcacaaggacgactgcgtcggcgagtggcacaagtaccgcgcctgcctcgagaagttacacaacggtgtagttgtccttgcatttggtttattggtttatggaaaacagttggggaagaatattctggaacatctggaagacaagaatctcaggcaaatcctattggaatcagaaacatctgcctactatgcccagtttgatgctgattcttcttctcgaaaagtgaaagctaccagtctaccactcactcagggaagcttcgtagcaaagcaaagcatcagccttcaccttgtccagagcccagagaaaagggatccccttcaagctgctgttcttcatggccaagaaaggcaagaacaactctaccagaagagcctctgcttcttcttcttcttcctctgccgcagccgatggcgatggatcgccatggctgcggctgacggccttcgccgtgctcaccctccactcggctttctctgcatatctggctagagatgacgcgaggctggtcgccctcgtcgtcgtcggctacctcctgatgctggtgctgctgttctatggcctggccgtgcctgtccaacagaagagagactaaggtgaggcttcagcaatcagtcctcaagcatgaacctgccttgtttttttntcctttttgctggtttggttttcttgcatggtttgatcttggtattgaactatggatgttatgtacaaccctgtacatgctgatcaaatgtgtatctgtatgtttaattattgatgttaccaaagaatcacatgtataatataagtaattcgaaagagccacaaaaacaaaaaaacaaacaaaacaa

SEQ ID NO: 49801 - DNA, 182 bp, Oryza sativa
  Clone ID: PAT_MRT4530_52350C.1
ttgttgtccgcccttcttttttttttttgatcgggaattaatttggattcatagggttggtattacatgtacaaactgtatttggtacaactgctacaatgaattttccagggactagtgcgttatgctctccatgattgggaatttggttgacttatatatgatcagaagttattttgttt

SEQ ID NO: 49802 - DNA, 921 bp, Oryza sativa
  Clone ID: PAT_MRT4530_52351C.1
catcatccaaatagcatggacaaaaagaaggcccatgctaacacagagtcttcattcacaagattctctgtgaaatatttttctgaagttgtgtcctctttgtctgattatcaaaaatccattatcaagaaatttgagtttgatttcttgctgatgttcaatagtagttatgtgcctatcaagtttgccacttggattgccaataaagttgatgtcaggacatcagagattattgtgaaggaaaaaattattctagtcatagttgaatcagttcatgatattcttgggcttcctttaggtggaataccttttagcaaagattatgaacgtggcaggcaatgcatcctttctatgtttggtcagtctgtattgccttcagttaaattttttggtgatctactgattcagcagaaagatttgtctgaagatcaaataatcacatcttttcttattgtcgccttggcttgtttcttatgccccaactcttctttgactccaagtgtgaagtatttgactattttcgaggatgtttctcgcttgaaatactttgattggtcaaaaatttacctatgattggttgatgacttatataaaaaagtttcagaagaacaccactttcggaggctgcttgttttattgggctgttttgtatcttgacaatgttgattttggctcaagaaatgttgaccaaagttgtcctcgtatttctgtttggaaagatgacatgatatcaacattctctgaattagacaaaattgatgagaacacttttggattaagacctctgaaagatttccaggacacttgctatttcaaggtatgtacttctaggttatttcaagatttaactgtaagtttaactcttagacattttcttaatgtattgtttaactcattcccattacatacagttcatgatgt

SEQ ID NO: 49803 - DNA, 600 bp, Oryza sativa
  Clone ID: PAT_MRT4530_52352C.1
atggcgatggtcgcctcccccgacgacatcgtcaagtcaccgctgccgccgccaccgccaccgccaccgccacctctgccgcccgcccacaaggacaaggccgcgtacaacccctacagcggctgtccggcgcacggcggcgacgacggcctcgacgggatcgtcctggtgctacgcgccgccgcggcgctgctggccttggtggccatggcgctcgtggcctcatgccgccacggggactggatggagttcacgcgctaccaggagtatcgctaccttctcggggtcgccgtcgtcgcctccctctactccgcgctgcaggcggcgcggacctttcgccggatgcgcgccggcaccgcctacgccgccacctttcttgatttcgccggcgatcaggcagtggggtacttgctgataacggcgtcgtcggctgctcttccgatcaccatccgaatgagatcagcggtggtgaacaccttcacggacgtcgtcgcagcctccatcagcttcgccttccttgcctttgccgccctcgccttctccgccttgatcgccggcttcaggctctcctcctcctcctcctccgcctacaactactaa

SEQ ID NO: 49804 - DNA, 586 bp, Oryza sativa
  Clone ID: PAT_MRT4530_52353C.1
ccgggctgcaggtgcgcatgcgtatctgctctgattctgatatgctgtgataagatttttatgcatgtgagtgacagtgagtactacctgaaaactcttcgtaccaagcagaaatgaactctcttaatactgtactgcagaattcaagaaagtagtgtactttgtttctcttcaaatcaagaaagtagagcaccaaatggatattataaagaatgtcctttgtgatgttatgcctttagaagtcaaatgttatttacatgcagaactgtcaatcaataaatcagtactggtaacagttcagtggtacttctctctcatttgagtgccaagaaaaatgttcttttcttaaaatgctggcctcctggttaagactgttgtttggacaatgcttagtgacccttgtgatttgtagctctagaagtactacataatatatcttctgatgaactgtgaaccccgtcgttagaccttgatgggatatctttgtcgctttatcttgtaatgatggttgcaagcaggaaatggattatggagtgttgcggaacaatgaacacctggtggattttcatggctctagtactaatta

SEQ ID NO: 49805 - DNA, 255 bp, Oryza sativa
  Clone ID: PAT_MRT4530_52354C.1
atgaccgtgggcacggctgttcgaacagaacccggtttggctccaatcgaccccgccccggcgttcccaactattggcatgcgaggagaaattgatcaaagggtgactttccttgctcaaggtcttcacgaagcttcacgaatctacgagaaatccctgatcgacgaaaatccggaattgatttatggaaaaggaaatggacgagggatgtatattagactttttcgggcggcaagggcgcagcccgagtgttga

SEQ ID NO: 49806 - DNA, 606 bp, Oryza sativa
  Clone ID: PAT_MRT4530_52355C.1
tcacttgtgtgtgcggcggcggctagctaagggggcggcggcgacggcgagctgagggggcggcggcggcgtcaagcacagccccgccggcgcccgctcgttgtggtggagggcagcggcggcggcgagctgaggcggtggcgacgacgtgatgtacagccacgccggcgcccatatgccgacgagaggggtcccagaccaacaacaggttaggtcccagaccatactgtgccaggaagcccaggggtcctcccagacaccaccccggtgaatccacatgtctcccattccacccatgtggtcgtacttgtcttatgtttggatgaaattccaaggaaacagtccttaagtgcaagagcgggaaaccgtacacccgattttaagtttgaaggcatccgttgatactcgcgcagggtgcacgaatatcgagacgcaactagatggttacaaggggacatggtggcttgccttgctcgagagctgaagcttgatcctcgaaatcctcgcactgcgggtcttagggctcggaaactacacgcgaaacgggacaactcaacaaacggcgaaaataaagccctattaatgacctctaagcgtgctattaga

SEQ ID NO: 49807 - DNA, 2005 bp, Oryza sativa
  Clone ID: PAT_MRT4530_52356C.1
tcacgatccctcaaaggcgactccttttcgcacacccaatcctcgctgctgctgttgctgctcgacggagaaatcaaagtcgcggtcgcgctcacggtactgcgcgccgacgcggttgtcgcaacggcgtccccgcccatagccgcaccgagactccgagaagccgcggggctcctccgctacgtccgtcaccgccgctttgcccgtcacgtcgatgatatgcggagcgctagcgtactcgcgcgtgcacgtggtcgcgacggtgagcgtgagagttgatagggacaacgggtgcgcgcgaattgctagagatttctggcgcgtactgttctccaggatctggacgtggaagtgcgaccagtgcgtgtgcggttcgacgatggccgtgccattctgaaacgtagaattgtccgccgtgccgccagagtcgccaccggcagtactgccagtggcagtcgaccaggtgaacttgtcatcgatccccgcgtggtacagcagcgcccagaggtgcgtgatgaactcgccgccgtcgccgagccccttctcgtgggcgctgacgctcccggacggcgcgagcgatatcagcagctccgaccagaactccgccagctccgtccaatccacacggccgcgggccttgagcttgtccgcgagtgccttgcctttcctcatcatcatattatcgtccccgctaccgctgccgctgcccctggcggcggctgcttcttggaccaacgtcttgcaggtgtacctcaccgagttgttgccgaccgatcccagcagcttcggcttgtagaacaacaggtaggcgcagtacttggacagccgggtggccacctcgtagctcttgcgctgactctcatccaccagcttctgaaggtggcacgtcgcgacgtgccacacgacgatggtctcgatcgccgtcgggtgccgaccgtatcgctgcagcatgcttgctgtcctgggcagaggtttaccttgagtcaactccgtcttgttcgccatgagcgtctgacatattgccttcttcacctcgtctggaactcggatagtcttacctttcatgatgcggtactcgccgtcgttgttgagcaggacgaacgatctcgcggcgtggtacaccttgatgacgcacgtcgggatgcaccctctctttgccccgtagacaaggttgaactgtcccaaggagttgccgattggctcggcgatattgccgcagcacaccaaccatataatacggtcgaggagatagcatcgcccataccgattccggacgtattcagagataaccataaccttggtccagttcgaggagagatgcatggagaactcgcagatgtccatggccgtaaccatgctcacgataccaaatgtgatggacagatccacattcttgccatggaccaaattgggcgagctcccgcgaggaacccggtaatgcaggatcgccgacactatgatccatatagacacgccgagcgtcgccgcgaacagcacgacgctgaccaccgggaagccgcagcatatgccgacgagaggggtcccagaccaacaacaggttaggtcccagaccatactgtgccaggaagcccaggggtcctccccgacaccaccccggcgaatccacatgtctctcggcatcaaggctcccctgataagctagttactcagccaggggtgtcccattccacccatgtggtcgtacttgtcttatgtttggatgaaattccaaggaaatcggtccttaagtgcgagagcgggaaatcgtacacccgattataagtttgaaggcgtccgtcgatactcgcacaggatgcacgaatatcaagacgcaactaggtggttacaaggggacatggtggcttgccttgctcgagatctggagcttgatcctcgaaatcctcgcactgcgggtcttcgggctccggaactacacgcgaaacggaacaactcaacaaacggcgaaaataaagccctattaaagacctctaagcgtgacactaga

SEQ ID NO: 49808 - DNA, 195 bp, Oryza sativa
  Clone ID: PAT_MRT4530_52357C.1
tggccgcatttgggaaccttggtcatcaagggacaagggagatatggtgaaaagcacgggttggggggctgcctcgggtgttgctcttgagcaccgggtctctagcttggcctgtcttaggccggagcgctacctggtggcggggttgcggtggtgggggttcacgcccgtgccccctctctcgggggggggggg

SEQ ID NO: 49809 - DNA, 328 bp, Oryza sativa
  Clone ID: PAT_MRT4530_52358C.1
gggggaaaaattgggaagattttgtttaaaacacaattttaacaacaatttaaggccccagcccgtttaaaaacaaagggcaaaccggccccttttggcaaggggcttttcccgtttaattgccccccgaaaaatttttttggggccgcccggagggggcccaatttggcttaaaaaagaattttttagggggtaaaaatttttaggggacttaacaaaaaaaaagcctcccggtttggtacttaagggggggtccccctcttgtaaacagagccggcccaaaagctttgggggatgacattgtcaaccacccgggtccccccttttt

SEQ ID NO: 49810 - DNA, 557 bp, Oryza sativa
  Clone ID: PAT_MRT4530_52359C.1
gtctccattttgattgtatattgtttgacaatttgctagagttgcaggctcaccgaaactattatctgttgtttgaaaggttttttaaattgaagaaataagaaatgtgatcattgaaacttcagaaagcacatttaactcttatctaaggctctgagctacatgcaattttttccccgttttatagtcgttctgacatcaatggaacctattcgtgcagtgtggttactctgggcatatccaaattagctcatccctagatctccacaattgccccaattcatttcttctgccccttagccatttattatagttgtgtcttcatccgagttgtttcgtggtggtgcttgaatggctagtcatacttgggagtagggaatgcagccgtgatgatttgcagtgttgctctacaaattagcagcaaacttagttttgcacaaaatggtttctggtatggaacagcactggcactattagattgcagaccattgctacctacatggcagatatgtataaaaagatatgaatgtgatatatcatatgaatataatttaatg

SEQ ID NO: 49811 - DNA, 360 bp, Oryza sativa
  Clone ID: PAT_MRT4530_5235C.1
atggtggttttgtcgccggagcagcgcgtactcacaaagcttgaacccagcacggtgaggtctggtcgtctggacaacggcggcagtggagaagatggctcggcgacgaaggatggcgtcggcttcacggcgacgggctcgctccggtcgatgggatgctcagaaaaggaggatgatggcgagaggactcagctcggggtggtatcctccgttgggcacgacgacgatgctagtgccggcgacctacggtgctcgctccgggacaacgatggcgagaaactacacaggggtggaggcatcaggcaagccagtgaggatgtcaagtggatcaagggcgatgtggtctatgggtgggtgtag

SEQ ID NO: 49812 - DNA, 318 bp, Oryza sativa
  Clone ID: PAT_MRT4530_52360C.1
ccaaaaaaaggggggcttttttatgcccccaacgtcacaaacagaacccaaacaaaaggggaaaaaaccccgggggaacccagggctaaaaccccccggaccaactaaaaataataagccctaccccccccagctcaaggccctatggggggggggccagggcccacccaacaccccaaaatattggtgaaagggggatacggggggggtaaaactatcttgggccccttaaacagggggggcagcggaaacaggagccccctttcaattaacttcccccaggccaacccccctcgggtttctaagggtgggggcccc

SEQ ID NO: 49813 - DNA, 339 bp, Oryza sativa
  Clone ID: PAT_MRT4530_52361C.1
atggatcgcccaacagcatttccgctctaccagcgagctattggtattgtgccattttcgttgcagttctgcgctgttatgcttggtgtagaatgcattggccagactcatatgctagagttgtcccagcaacggcttgaccgcttgagcaaaaaaatattcccgtcaaaccaggtcatttttgagttggggcactttggggttagcaggcattgtgatgccatttttgaatggagttgcttgaggactcgggagagtgttgctggtgatagatcagagtcaacttgggagaagttgatgtccagggatcaagagatcaagcgggatactaaaggctag

SEQ ID NO: 49814 - DNA, 1299 bp, Oryza sativa
  Clone ID: PAT_MRT4530_52362C.1
atgatgagcaacacactatcctttagcttcgttctcatcatttgcgtggcagcattgcacgcaaatggatcgccagaagaggccagattcagagagttcgtgcgatccagaaggagcagcactgttactgtcagtggcagcaatggctacagtgcacatgagccaggagcaagagttagcagtagactcaaagaagagtactctgtctccgaccagagcaatctgaaggccgccgataagatcacggcgctgcctggccagcccaagggcgtcggcttcaatcagtacggcgggataaacagcgacaataaaacactcagcagaaatgagtacgcctggaacaatgtggctaatgtgctcttcctggaatcgcctgctggtgtgggattttcttactccaacacatcttctgactacgacaagagcggcgaccaaagaacagccaatgactcgtacatcttcctagtcaattggcttgagaggttcccggagtacaaaggacgtgccttctacatctctggcgagagctatgctggacactacgctccacagcttgcagccaccatcctgactcacaacatggagagcaagagaatgatcataaacctacagggtatactggttggcaacccttgccttgacgagttcaagaacctgaaggggcaaattgactacttgtggagtcatggggtgatatcagatgaggtgctggccaacatcaccaagaactgcaggttcagtccgtcagacggtaaagcatgctctgatgctatggacgcatttgattctggtaacaccgatccctacgacatatacggaccggtttgcatcaacgcacccgacggaaaattcttccccagccgcattgtgccaggctatgatccatgcagcaactactacatccacgcttaccttaacaatcccgtggtacagaaggctctccatgctagagtgacaacgtggttaggctgcaaaaagtcttataatatgaaacggaggaagtacatatctgccaaaatgcaagcttgtggcaaatattcaaatcgaactgtaactagtactatatttctaagcggcgacctcgactccgtgtgcccgctcacagccacgaggtactccgtcggtgacctcggcctcgccgtcactgaaccatggcgcccatggacagcaaacagagaggttggagggtatgttcagcaatacacgggtgggctagtgttcatctgcgtaaggggagctggccatcaggtccttacttccagcctgagaaagcactcatcgttgtcagctccttcctga

SEQ ID NO: 49815 - DNA, 348 bp, Oryza sativa
  Clone ID: PAT_MRT4530_52363C.1
cggacgcgtgggcggacgcgtggggttttttcaaaaaaaaaacaactttggataagcatctacttcccagaggtgcgagaaatcataattggggctgccctttcacaataaccactcttaccacggcgagcatgacaccccttctctcttgtatggcgcaacctcaatacaatgccttggtctccgttttcaagggtgtcgcgttgaaaacccgcgctacatccccaatttatgatgtacgaagcacatccccctttagccaccggccatattagacatgagggcgggaccgataagtccttctcaacattttcccaaccctattggcaaatgggcccccccctgacc

SEQ ID NO: 49816 - DNA, 1526 bp, Oryza sativa
  Clone ID: PAT_MRT4530_52364C.1
atcacattatccgtcctaatcatcatcctcctagcactaggcgcatcagtcacagacgcgtcgtcccattcccaggaggatcagctcatcaagttcatggagtccagggccttgaagaggctcagaaacaggcccaacaaaaacgggcctggagaagacgaccaatgggccgatcccggcagattcagccacctggcgacgcgcagcgtcagctcaccggagagcaccaaggaggacgacaggatcgccgcgctgcccggccagccttgcggcgtcaacttcgcgcagttcgccggctacgtgacggtggacaggaagaacggccgtgagctgttctactacttcgtcgagtccccctacgacgcctccaccaaacctctcatcctctggctcaacggagggcctggttgctcgtcgctcgggttcggcgcgatgaaggagcttggtcctttccgggttaaccccgatggcaagacgctaagcaggaacaagcatgcttggaacaacgtggctaatgtgctcttcctggaatcgcctgctggtgtgggattttcttactccaacacatcttctgactacgacaagagcggcgaccaaagaacagccaatgactcgtacatcttcctagtcaattggcttgagaggttcccggagtacaaaggacgtgccttctacatctctggcgagagctatgctggacactacgctccacagcttgcagccaccatcctgactcacaacatggagagcaagagaatgatcataaacctacagggtatactggttggcaacccttgccttgacgagttcaagaacctgaaggggcaaattgactacttgtggagtcatggggtgatatcagatgaggtgctggccaacatcaccaagaactgcaggttcagtccgtcagacggtaaagcatgctctgatgctatggacgcatttgattctgaagagatacaaagggtcacctcctccatggagtactatttgctcgagtcttttgtgtgtgttctgaaaattgtttctgtttctaaattgtgcaggtgccaggctatgatccatgcagcaactactacatccacgcttaccttaacaatcccgtggtacagaaggctctccatgctagagtgacaacgtggttaggctgcaagtgagatctcttgcactggaaagatgcaccagtgtccatggtgccaacgctcaaatggttgatggaacacggattgccagtgtggttgtatagcggcgacctcgactccgtgtgcccgctcacagccacgaggtactccgtcggtgacctcggcctcgccgtcactgaaccatggcgcccatggacagcaaacagagagttttcgcgtcaggttggagggtatgttcagcaatacacgggtgggctagtgttcatctccgtaaggggagctggccatcaggtcccttacttccagcctgagaaagcactcatcgttgtcagctccttcctgaggggagcactcccgccttatgtcaaacagcagtaaattttt

SEQ ID NO: 49817 - DNA, 300 bp, Oryza sativa
  Clone ID: PAT_MRT4530_52365C.1
atggaggttgatggagtagtgaggcttcgactactgtacgcgtcgaggcgtgaggcggtgaaggcggcggagggaggagaactcgatgacggcacggctcggcgtcgatttgggggtggagaggtggcgtcgggcagcctcaccggggagtgcctggggcggcacaggtggtgcggtagagcggcggcgcatcgggaaggggcgagcggcgtcggcgtccacaaggtgttcgacggcggtgggcccacggaaagagaggcggcagctcagtcctcctgggccggctgggccgtgagctag

SEQ ID NO: 49818 - DNA, 106 bp, Oryza sativa
  Clone ID: PAT_MRT4530_52366C.1
ccttttcaacaaggtaatggccgtacgagcctgacgactgtccatggattgtagactgtattaagctacaacaagctactaatagatctcaagaatgagttccgct

SEQ ID NO: 49819 - DNA, 519 bp, Oryza sativa
  unsure (1)..(519): unsure at all n locations
  Clone ID: PAT_MRT4530_52367C.1
gcaatagaatcagatcttaaattatatactaccaatggcaatgatgaataatgaatatgtatccaggacaaaatagcggacctagcccgtcagaaaactggacacattccacttcgaatgtgtcacgcgaagggctagggagagtatcagcctaccaaaatttgtcaggcttacatcgatcagtacagacatggggactcaaaccattaactgaccaaccagcctgaaacatctacttaccaagttctaaactgcaactttgagtttgtaaccgagaaaaataactcttcctcttctatcttatatttttgngtgtgtgtgtgtgtgttgttattggcttcttatgttatcatttctctaccttaaactagaataaatcttttggttccgtgattaattaattaattatgggggcgggtggcgaagcagaaggggagggaagaacttgatcagcagtaggacggagtggccagtgccagcctcggtgcccacgacgctgatcccccggcagtctccatc

SEQ ID NO: 49820 - DNA, 584 bp, Oryza sativa
  unsure (1)..(584): unsure at all n locations
  Clone ID: PAT_MRT4530_52368C.1
ccccccacccaggcccccgggtcacacaacgattctatacgacaaaggcgaacgagttacactacatcccatacanccatccggcgcgcacgcagcctctacggcacggaccgaatgacccaacggcacggatcgcacgccacaccggacgacaacatcccgtcctggaggcacacaaagttggaagaactatcaaatcacacaacgcggcgcgacagctgagacgccgcacgcgccaccgctacaccccctcccgccccccgcccaaatcaaatattcataatgtcgcggcggggggggtgcggccctacgaccccaggccactctcggaactcgggaacgacatcccaccctcggggagacagagggaggggtggccacgtcaccctcgggcccgaccccctcgagggggtcaggccacgtgggtgatcgcggctaccccggcctctagtcacgatacccccagccccatgtcaccgacagcttcctacgaaaccgcgatctcagtaccagtcccaggacatagtgctggtacccacggtgacaaatatggatcattgcaaatccttaaaacaaatagatga

SEQ ID NO: 49821 - DNA, 270 bp, Oryza sativa
  Clone ID: PAT_MRT4530_52369C.1
atgtcgccgatctcctttgtcgtcgttgtcaccctcaaggttgttgtcatcgccactacttgctatggaaccactacaagctgtgtgagaggagaggttgaggccatcgccgttgcttgttgtggaatcactgatctcctagcgaccggagtcgtcgttggcctcccactcaatctgaaggaagagatggagagaaaaggggggagggggatagagagggagagagcggaggagggttgggaggtgcggcaactgagacagtggaggtag

SEQ ID NO: 49822 - DNA, 589 bp, Oryza sativa
  unsure (1)..(589): unsure at all n locations
  Clone ID: PAT_MRT4530_5236C.1
tccacgcttgtagggtttccggatcggaggagagagccccccacgccgccgcagccatggttcgcggatcgctcgggatcggtggaggaggtcaaaaacaccttgaagaacgtcttccctagtgagaaagagatagttgttaagagtcaaatcctggctggtggccgtggattgggaacattcaaaagtggactgcagggtggtgttcatattgttaaggcagaggaagctgaaagcctcgcagcaaaaatgcttggccagattctggtaacaaaacaaactggtccacaggggaagattgtgagcaaggtctacttatgtgagaaactgtcacttgttaatgagatgtacttcgccatcacccttgacaggaatactgctggtccgctcattatagcgtgcagcangggaggaaccagtattgaagatcttgcagagaagtaccctgatatgatcatcaaggttcctattgatgtattcaagggaatcacagatgatgatgcagctaaagttgttgatggtctggcaccaaagacagctgacagacagtctttcgtaggacagattaagaagctctatgaactgttct

SEQ ID NO: 49823 - DNA, 359 bp, Oryza sativa
  unsure (1)..(359): unsure at all n locations
  Clone ID: PAT_MRT4530_52370C.1
ggtgnttnntttgcgcccctcgaatcgaggaacacatgttgagattgctagcacgtacggcttctgaatctcactatcactaatatatgatccgtcctatcatttactcatcaatgacaaaaatggtaaatcctgaaaattcaaagaaaaaactccttttccaaaattgtaattgcctttcatccttggaccaccaatcaatcaaactgggaaggccaattgttttggggccttaggaggaattattcaacgcatgctgccaatccacaccctttccatataaacttaaagcctaatggcataaggggtagtaattctgatcaatcttatgacttcctgaactcatcctaaattcctga

SEQ ID NO: 49824 - DNA, 580 bp, Oryza sativa
  Clone ID: PAT_MRT4530_52371C.1
ggcttattagaaatctgatataaggttgttagactgtctgttccgtgaacttgcataagattgcataccgtgttttactttagcctattgttgtggtattattcaatctatgttggcatctatagaaactagaaagtagtggatacagttatttgcgtatgcctcattcctgtgcaatcaatgacagttggccctgacagacttgaaaggttaacctgatagtgttcaacattctggctgacagcagtttgatagctataagatgatgatgagaaggacatagttctcaaacttctgtctgcatctgcataattgcttgctgtttccaccttcattgtgatgatgggtggtgccttgtatggtcaatctgctggaaacattagatgtgccgttttcttaaattggttgatgggcctaattccatgctcagggaggaagtatgcttctggaataaaatccttttgttgaatgcgctcattcagtcatgcaaaacaagctagatggatctctggccactcctgaagaaaaatgcaacattagttcgtgcagtttgactgtattcataatttgttttgaactt

SEQ ID NO: 49825 - DNA, 318 bp, Oryza sativa
  Clone ID: PAT_MRT4530_52372C.1
gcacgaggagaagagcaaaacggactcttgatccaaataaatgggtccatccatctgtatagagctggcataatcccacagattgtttctttggttcttctgaataagtgggtgaagcaaagtgcttctcgactgtaaatgttgtgctagtgttgtaataggctgtagcagtgtaaaaggcggctgattgtctagaattaactaatggggtgtagtcatttcattccccagccgattcattaggagccaaggctatgtaaaatgctaactcaacttctttttcagtgtgtaaataaattctgctaatatcccttcaaa

SEQ ID NO: 49826 - DNA, 2265 bp, Oryza sativa
  Clone ID: PAT_MRT4530_52373C.1
ctagctggacggcgagagcatagaagcactcgctggctcaacgctgctgcaaaatagctcatcatcctcatcctcattgtgcccccaggttctcccaagtctctctattgcgtccattacaatgtgcgattttacgaccaaatatgttagcctgctgcaccgcactgcccttttaattgcgatgcgtgggtctgccggcttctcctttggcctgccaacccgtcgtcgggttcttattggggttgcatgtgttactggactttgagattgatcacttaatatagcaggaggcagcataacatcgggtattggatttatcgacatggagtaggtcaagcggtagcattctgttctgaaatacttcacacagtaatcgtaagggcagtgtccaatccgctctattactgcaattgcatgcatgcatggcaacccagaaatatgccactttcggcaggtacactcccatgcatcaatattgacaacattaacagaatcatcacacaccttgaacacattgccattttcattactttcagaagggatgacgttcagggtgtgggctttgctcacttcttcctgcaatttctgattagctgcaggtgttaataactcagcccacgcattagaagactccctgcgtgtgtacatcatctccatgagcttgcatcttatcatgtcaactaactggacaattgaaagctcgtatctggtggggatccactcaacaatagtgctaggaaaattgcatgaatactgcccatgccttgaccctttgaaaaaggcatctgaccatcgctcgggtttaatctccagaagccattcagcaagcttgtcagattcacctttgattagttcaatatactgattgaactcgtcaactgtgcatgcatatatggccttcttaagatgctcaaccatgacatctcttgcttcttcggtccatgcatcatccaattgtgtcttaaattcttcaataagatagtccacacagtatccgtggtgactgtcagggaaaaccaaaggcacttcatcccatagtccattttctccattcgatatgaatgttatggcacgggaagctgacacagaagatttaagttgctcaagaaaccaatgccagtgttcactgctctcatcatccactacagcaaatgcaactgggaacacatcaccttcactatcaacagaagtggcagtaagtagcttccactgcttatttggttttgcagatattacatcaagaaaaagtaatggtctgcacccatgctcaaaaccatgaagcgatgcatggaatgcaacaaacaaacgaaattttgaatcttccataggtactacagtggccacactttgagggtttgtctgcatgatccgtccacaaaaccaaggtagctgactggttacctcatcgtgtgtgctatgaagttccttttgagcaattgatcttccacgccaagcctgagagtaatttaggcatagtccatactcacgctgaagatcacttgcaatatctcttggcctgtagtttggactatcgcgtaacttttcttttataacactagcaacccatcgctgagaagccagacgatgacttttgactgtctctgattcacaggtgtggctttcagatattttcttgatcatgaattgcttcttggcaggggatttggaagcatgtattcgccaagggcaatcttcaccagtacattccgcagtcacacgagatgaatcattcttgataaatctgtaatggaatttatgggcaatggcatacttatgtaaggcatcacggaaatctttaggaccatcaaacacttgaccaactccagtaatcacattcttccatgttgcacagatcttctgcctcttagacccatcctgagtcgttggcacaactgcagtggtatctacaggagtaccagagtcagcaacaacaatcgatgccctgttgtcaaccttctttttcatgacatagatgtatgtagtctcagattctgcatggaactcaaccatgcggtgtagatccttgtcattggaaatagaaatcaaggttttcttattttttggaaggaaatacttgaacacaaactgatcgactctgatattattcagcgttgaagatatttcatgcttgaatgcactgaacgtccagtcacttttgacaagcattgcgtgtgcttctccaccagagtaagacattagtccatcagcatctgtgctgaattctccacctacttgaagaacagccacaatttctcccttccccat

SEQ ID NO: 49827 - DNA, 513 bp, Oryza sativa
  Clone ID: PAT_MRT4530_52374C.1
agaacgggaaaccagatcaaattggacagcattacataacagcaaacctcccaagtctctctattgcgtccattacaatgtgcgattttacgaccaaatatgttagcctaacaaagcaagcaaatacaaagcaatttagagctagaatcaatgactgatgcatgtaccgagttataaagaaatagcatcactcgtattacagcaaacaagagcaactctccacctaaatgtacataggagaactgaacccatgggtagactatgtgctcagaggaactttgcaggttgctttattgtggccataaccctggcacctgctgcaccgcactgcccttttaattgcgatgcgtgggtctgccggcttctcctttggcctgccaacccgtcgtcgggttcttattggggttgcatgtgttactggactttgagattgatcacttaatatagcaggaggcagcataacatcgggtattggatttatcgacatggagtaggtcaagcggtagcattctg

SEQ ID NO: 49828 - DNA, 399 bp, Oryza sativa
  Clone ID: PAT_MRT4530_52375C.1
cccacgcgtccgcggacgcgtggggtgagatgcaccagcatgactcaagctcagctctctttgactgattaggtcaagagctaaaaaggatacccaagagtcattacctgattagagaaagtgtcaataccatgagtctaaccgaagaggctcaaatccatctggctaaatgcaggaggggaagctctcctctccagtgatttctcaactacatatctagctgagctgcttgagattcagagttatatgagcagcccggctctaggttcctacttgtctggtaactattagagtgaactatcacaagagagttgatccagactcctaccaaatttgtggattgagccggcatacaactgataatctcatggaatcatcgacatcattcctcgagctaag

SEQ ID NO: 49829 - DNA, 138 bp, Oryza sativa
  Clone ID: PAT_MRT4530_52376C.1
atgcaggactttggccacaagatccttgtgatgcacgagattacaagaagcagcgccactggttcagatttcgtaatgggtgcttccacaggagaaggtggtgatgcagagttgttcattcttgttgcaatacaacga

SEQ ID NO: 49830 - DNA, 183 bp, Oryza sativa
  Clone ID: PAT_MRT4530_52377C.1
atgaccggagatgcggaggatgatgacggcgagaggatgtggctgttcgtcggccaggtgcccagaagcatggcggaggaggagatcctcgccgtggaccgtaccgctgctcgtgccaacgacgccaccgtcatccacgactacgccgcagtgttcacgttccgcctccagaagtccggatga

SEQ ID NO: 49831 - DNA, 1062 bp, Oryza sativa
  unsure (1)..(1062): unsure at all n locations
  Clone ID: PAT_MRT4530_52378C.1
atggcggcgcgcgccggcgacaccggcctgagcaaggtcaggcgctactggcccgggagggcgccggactgggcgtgggcgggcgccgctgtcgctcacgacgaggacgacgcacgtctcgtctcgacgcttgacgagatcaagcacgtggaggaggaggtgctgaggtcgccgcgccgccgccgtgtgcggcgggctcccgagatcgcgtcggcggcaccggcggtagatgactggcacgagcccgatccgatcgaggaggaacaagacgaagatgatgatgatgatgcccgggaggagcgcagagcgaggataagggagagggcgctgctcctgaggcggcatgaggaggagcagcttcttcttcttcacccgcagcatcaggaggaggaagatgaggaggcgtctgagtctgaagagacngcggaatcggactccgacgtcggcgagcagatggccgtcgtctacatggccgtgccactgctcgaggacaggaaggctcagacgaggcagatcttgctccaagagatcatcaacgaagagctcctcgccgccaacacagcttcagatgaagccgccatcaacggcgtggacaccgacgacgaggtggaccaagccgaggagtacgagtcgtggcggcgccgggagatggcgaggatcaagaggatcagggaggagagcggcatcgacgacgacaagtcgatcatggaagacgagaacccggttgctgatcgtcccaagaagaagatgaagatcaagaagcagatgaggttcatgcaaagatactaccacaagggctgcttcttccaacaagacgccgacgatgcggcgcagacggcaggatcatgcgaaatctaccggcgagatttctccgggccgaccgggttggacaagatggacgtaagcgtcttgcccaaggtgttgcaggtgaagcactttgggcggcgtgggggaaggaagtggacgcatctagttaacgaggacaccacgtacaggacaccacgtacgggagacaacaatgcatcccttcttcgatcatgtgtcgagaccgtattagagtaa

SEQ ID NO: 49832 - DNA, 1146 bp, Oryza sativa
  Clone ID: PAT_MRT4530_52379C.1
atggcggcgcgcgccggcgacaccggcctgagcaaggtcaggcgctactggcccgggagggcgccggactgggcgtgggcgggcgccgctgtcgctcacgacgaggacgacgcacgtctcgtctcgacgcttgacgagatcaagcacgtggaggaggaggtgctgaggtcgccgcgccgccgccgtgtgcggcgggctcccgagatcgcgtcggcggcaccggcggtagatgactggcacgagcccgatccgatcgaggaggaacaagacgaagatgatgatgatgatgcccgggaggagcgcagagcgaggataagggagagggcgctgctcctgaggcggcatgaggaggagcagcttcttcttcttcacccgcagcatcaggaggaggaagatgaggaggcgtctgagtctgaagagacggcggaatcggactccgacgtcggcgagcagatggccgtcgtctacatggccgtgccactgtttataccaaagccgcggcgtgacaccatccggctcaaggaggaagaacggcagcgacttgaggacgagctgcaccggaagaggctcgaggacaggaaggctcagacgaggcagatcctgctccaagagatcatcaacgaagagctcctcgccgccaacacagcttcagatgaagccgccatcaacggcgtggacaccgacgacgaggtggaccaagccgaggagtacgagtcgtggcggcgccgggagatggcgaggatcaagaggatcagggaggagagcggcatcgacgacgacaagtcgatcatggaagacgagaacccggttgctgatcgtcccaagaagaagatgaagatcaagaagcagatgaggttcatgcaaagatactaccacaagggctgcttcttccaacaagacgccgacgatgcggcgcagacggcaggatcatgcgaaatctaccggcgagatttctccgggccgaccgggttggacaagatggacgtaagcgtcttgcccaaggtgttgcaggtgaagcactttgggcggcgtgggggaaggaagtggacgcatctagttaacgaggacaccacgtacaggacaccacgtacgggagacaacaatgcatcccttcttcgatcatgtgtcgagaccgtattagagtaa

SEQ ID NO: 49833 - DNA, 514 bp, Oryza sativa
  Clone ID: PAT_MRT4530_5237C.1
gcacgaggccagaccaacgcatgaagatagaaatggaccaacctattagacttactgcttcacagaaggcgactgcatgtggttgtgtgttggcaggacaatggactagagcaatacaattttagttctttagataatcttccagagatctacaaggctgtcctattctcaaggagaccacaggagacatgttctctatatgcatgccttgaagctttgataaaggaggaaccgttaggcccagaagacatgtggtattgcccaggctgtaaagagcatcgccaagctagtaagaagttagacctttggaggctaccggaaatccttataatacacctgaaaagattttcatacagtcgatataccaaaaacaagctagagacatgtgtggacttcccggttcatgatcttgacctttcaaagtatatcggtagcagggggcaacagatttccaaccactatcgactgtatgctattagtaatcactatggaagcatgggaggtggtcactata

SEQ ID NO: 49834 - DNA, 1455 bp, Oryza sativa
  Clone ID: PAT_MRT4530_52380C.1
atggcggcgtggcaggggagggtcggggcgaccaacatcgggaggctgcggcatgggaagacgtcgtcgtcgtcggcggcggcggtggcggcgaggggcggcggcgtgacggcgtggcacctgagggtgttcgccggcgtggtgggagtgatggggtgcctcctgctggtggcgtccctgatgatgtccgccgtccaccaggtgcagttcaggaacgcagccatttccaggagcttcaggggccttcaggaactgaagcaaaattctgtaaggacggagaaagcagagcagataatgcacccaaggcttctgcaaatggcaacttcagttgtcacaaagcttttactcatgtcaaattttccctccctgccagtgcagaacgagtctgacagtgacagtgtaaaattttcactatgggaagagccctacaaacaagcacgtaaatggaagccctgtgctgcaaagcatagtttacctgatgaagtgcctgaagagaacaacaatgggttcattctgatcagcgcgaatggtggtctgaaccaacagcgtgtggctgtgtgtaatgctgttgttgttgcagctctgcttaatgctacactagtcctccccaggtttctttacagcagcgtttggaaggacacaagccagttcggtgacatatatcaggaggactactttgtgaactacatgaagagcgatgtgcacattgtgaaagatttgcctccccatcttcagtcactggatctcgaagcaatcggcagccaaatcacagacatggacatctcgaaagaagctgcgccatctgaattcatcaaagctgtgctcccaattctccagcagaatggcgttgtccatttcctcggattcggcaaccggctcggcttcgattcggtgcccgttcatctgcagaggctgcgatgcaggtgcaacttccacgcgctcaagttcgtcccggagatccagcgggcgggctccctgctggtccagcggctgcgccgcgccggcgcgatgcggacggagatggacaagcagctgttcgggagcaacatgctcgacgtccccgccctcctcgccggcggcgagccgagcaggtacctggcgctgcacatgaggttcgaggaggacatggtggcgtactcgctctgcgacttcaggcgcggcgactcggagagggaggagctgcaggcgtacagggagacccacttcccgacgctcgccatgcgcctccggaacacggggagggcgccgacgctgcacccgaaccggaagcgatacgcgcagatcctgggcgaggaggaggggatcgggtggggcggattcgagaggagggtgaggaacatggtggaggagtacaagcgggtcagcgcgcggccgcgggggcggagcgtgtaccggcagccgaggacgcccgggtgcatgtgcagggcagccggcgacggcagcgtcgacttctga

SEQ ID NO: 49835 - DNA, 623 bp, Oryza sativa
  Clone ID: PAT_MRT4530_52381C.1
ccacgcgtccggagcgatcggctccgcggcgttcgtcgctgtaaaatccattgttcatcgtctccctcaccagcgtttgtgttcgtgagtgtgagagtgttcctgggctgagccaacagctccgcctataccacctcccgcacctctccggccccccatcccgccgaagctcgccacccactccaacctcttccagctcaccatctcctggaccgccgtcttcggcccagtcatctccttcctcgccgctcgctatcctcgacctctccttcaactcactctccggcaccatcccgccatcgctccgccccagccgtcggccggcttgccaagagaagagggagagagagagagaggaagggagagaattagggaaagagagaggaggccgacgtggccacatgcacatgtgggtcccacgctgactcagtcgctacgtaagataaaactagggtcaaaatcatcgaaggacctgttgtgactagttttataagttgagagacaccggatatctggttttgtggttgagggacgattttgtaactcgatgacaagttgagggaccttcggtgtactttttccttttaattaaaaaggcctataaaaatactcatctccagcac

SEQ ID NO: 49836 - DNA, 1806 bp, Oryza sativa
  Clone ID: PAT_MRT4530_52382C.1
atggcgccgtggcatcgtgatcgggaggcgccggcctccatggaacgttgtcgcgggcggtcgccggcgtcgtcggcgccggggaggtcgccgcgtggcaggggcgggtcggggtggaccaacatcgggagcgtgcgggttgggaagacgacgtcgtccctgccggcggcggcgtcgccgagggtctgcggcgtgccggaggggcacctgaggaagttcgccggcgtggggggagtgatggggcgtctgctgctggtggcgtcttcgatgaggtcggccgtcgcagaggtgcagttccgcaacggacccatttccatggagactccgggggcttcagggcttttactcatgtccagtattgcctgcgagacagggcaaaacgaggctgacagggacagtgcaaatggttcactatggggagagccctaaagacaatgacggagatggaagacctgtgctgcaaagcatagtttacctgatgaagtgcctgaagagaacaacaatgggttcattctgatcagcgcgaatggtggtctgaaccaacagcgtgtggctgtgtgtaatgctgttgttgttgcagctctgcttaatgctacactagtcctccccaggtttctttacagcagcgtttggaaggacacaagccagttcggtgacatatatcaggaggactactttgtgaactacatgaagagcgatgtgcacattgtgaaagatttgcctccccatcttcagtcactggatctcgaagcaatcggcagccaaatcacagacatggacatctcgaaagaagctgcgccatctgaattcatcaaagctgtgctcccaattctccagcagaatggcgttgtccatttcctcggattcggcaaccggctcggcttcgattcggtgcccgttcatctgcagaggctgcgatgcaggtgcaacttccacgcgctcaagttcgtcccggagatccagcgggcgggctccctgctggtccagcggctgcgccgcgccggcgcgatgcggacggagatggacaagcagctgttcgggagcaacatgctcgacgtccccgccctcctcgccggcggcgagccgagcaggtacctggcgctgcacatgaggttcgaggaggacatggtggcgtactcgctctgcgacttcggcggcggcgacgcggagagggaggagctgcaggcgtacagggagacccacttcccgacgctcgccatgcgcctccggaacacgtcggtgtcgccggaggagcagcgcagcctggggcggtgcccgctgacgccggaggaagccgggctcgtgctcaccgcgctcggctacgaccgcgggacgttcatctacgtcgccgggtcacagatatacggcggcgccgcgcggctccgcccactgacgcgcctcttccccaacctggtcaccaaggaggacgtcctctcctccgccgagctagccccattcaagaacttctcctcccggctcgcggcgctggacttcatcgcgtgcgcctcggcggacgtgttcgcggtgacggactccggcagccagctgtcgtcgctggtgtccgggtaccgggtgtaccacggcagggggagggcgccgacgctgcacccgaaccggaagcgatacgcgcagatcctgggcgaggaggaggggatcgggtggggcggattcgagaggagggtgaggaacatggtggaggagtacaagcgggtcagcgcgcggccgcgggggcggagcgtgtaccggcagccgaggacgcccgggtgcatgtgcagggcagccggcgacggcagcgtcgacttctga

SEQ ID NO: 49837 - DNA, 171 bp, Oryza sativa
  Clone ID: PAT_MRT4530_52383C.1
atggtgcccaagaagatccgctcgccgacgggccaggatcatagtgccgaccaccacgacgctaaggtgcccaacctcagcaccaagcatgttggcgctaagcgaggcgatgggctcaagctatatgtggacaggggattcaggaccaacatgcctagcattgagctgtag

SEQ ID NO: 49838 - DNA, 447 bp, Oryza sativa
  Clone ID: PAT_MRT4530_52384C.1
gaagcacaatcaatatttctggtatttcggagtagtttggagtgcattggtttttacaagacaccggaaatcacactgtttgtttacaccaagtgtaatagagctgcaaacaacaagccaaatgaattgggtgtgattttccatctcagtatgaggtccaaaaaggaactagtctacttccgtgcattttacatcctaaactggatttaccgttacttcactgagggtcaccacagcagatggatcccttggattgctggattggtccaaacagctatttatgcggatttcttcaactactatttcttaagttggaacaacaatgttaagcttgaattgtttgattgatagttgtttggaatcttataaaattgttccatcacatgaaattttggagattctttttttttgtattaaattgttaaagaagggggaattttctaattt

SEQ ID NO: 49839 - DNA, 474 bp, Oryza sativa
  Clone ID: PAT_MRT4530_52385C.1
atgtcgaattcgcaggctagctgtatactaatgctccgtgctagcgtcgtcctcaccgtgccgggttgtggtgccgttgagccaactgatggagcagtggccagtggcgtaaacctgatcctttgggtcatgggagctgatcaaaatgcagatccgttgaacaatattttcgaccaatctctaaacatactcctgctattgttgtctaagagaaggatggcagagctgtcagaggaaaaatatgagcagcatattgaaatcatcaccaaaaatccaacatatttattggtaggagccagggggtgtacccaagctcctcagttaatagtggtgctcaacaggatggtgagatctgtagcatcacctcccttgagccgtgatgaacagagaatgagatggagggtctgcgagattaacttcttgcttattgattccaacatctcccttaatacagaagagaggcccaacacttaa

SEQ ID NO: 49840 - DNA, 274 bp, Oryza sativa
  Clone ID: PAT_MRT4530_52386C.1
agccaggaatcggctacccgacgtacctgctgccgtgatgccgctcgttcgtgaagcgccagtgcgtctgccccgggacggtggaccaccaggtccggcgaggctgctgacggtagctcgccgccatcgacagcatctggtgcaagtgcgatgcgctcaaccacatgctgaggatcatctacagggagagcggcgccgccaacgctgtgcaccccatggtcgaggtgtacctcggctgccggagaggggacatccagcgcgcggcggcgagcct

SEQ ID NO: 49841 - DNA, 784 bp, Oryza sativa
  unsure (1)..(784): unsure at all n locations
  Clone ID: PAT_MRT4530_52387C.1
nctntntnnnntcntanntatctntncctcnnncnnttctctttcttnttcgcgnttnntactctnnctanttntctntcnanntctnnnnnncaatttctcgntnnnanctntnttnctctnnntntanatnnntnnttcatcnatanctnnnncccacctttnnttccanatcatananntntccntnttnaanntaatanntncacgcnatnnnaatatttnttaattcnanctttaccnanntgntcntntcnnnantncntttcgnncnntacttcntnnaatntnnnatatcttnnanntntcnatcnttcnttaattanntatncnnnnanancnancntcnctnnntnnccagtnnnnnntcannnaattngatntnangtnttatcatgtncccnttaggnannactnttnnnanntnnaatnntntttcntcntnattnncncnntanatnntcncactntnctnnncnncctntatnannnctannncctnngngtgntcctgntntcacnacntctacncatcatcnncgngcnacggatcgnncggcgacgtcgncancanccctaccgttnccttgctgcgtntgggcngnanncnctgctcntgtnctggttcntcgtgcancnctcatgtnacaacgagcagggcctnactctactactactgnttttgttttttaactttcacggtttcaccacgtacccgngtgtgatggttttnatggnanaagtnannaatcngtttaatttcctttnaaaaaaaaaaananna

SEQ ID NO: 49842 - DNA, 671 bp, Oryza sativa
  Clone ID: PAT_MRT4530_52388C.1
tggatgtacgacgttgagatccattccttaccactgaccatccacgatcgtattcccacacacacccaatgccgtaggatggtggctcaagcaatacaaggtaacagatggattagagacatctgtgatgccctcggtgtgcaagcgatcttggaatacttgtagcattgggtctctactccttgtgatcggcttaccaaggcctttttctagggtgtgtccttcctccttatcgatttggagaacccctcgcacccccacattgtcgctacttcctatggttggtggcactatgacgctgctagatggttgaccggctaagcaacattgggctaccacgctcggatcatggcattctttatgatcaacatgaggagactatctaccacatcctagatgtctccctggaatcctgaaaacttttgtgtacagtcctcggtgcaattcgacagtgttattgtatgtcaatcaacgggcactccttccacctccggctttgcaatagccagagaaagatcctaaaaggacagaggagagattttgacacggtcgttacactcggagcttgaatgatatggaatgagcacaacaatcacgtgttcaatcagatagagtggagctagcccaaggtggcaaaggcaatggcggaggaggcagcgcggtggcggctg

SEQ ID NO: 49843 - DNA, 669 bp, Oryza sativa
  unsure (1)..(669): unsure at all n locations
  Clone ID: PAT_MRT4530_52389C.1
cggaattcccgggtcgacccacgcgtccgtgtctatttggctttaaatttgttgttaccatggcttcctctgccaataaccatctgagtcatactttattttcaatgatgcattaatttcaactttattgtatgtatgaattctcttaacgctttgatattaggttgtttcctcttaatgaaatgtattttctttagtgtgtttgcgcctattttgccatatccaacaagaaattagttcttctatattgggtagactttgaaaaataatacggttgcaacatgtatatggattctgttaggaatgttgttgttttatataccatcctcatctctttgaatttactcacatttatttgttgagctttttatgtccttgggaaggtagcaaacctaactctgtacattttgaatgatggtttttttagataatggaataaaattccagcatttgctcacagagctaaaaccaattattacaaaaattgggaacaaaccgatcacatnacaacgaaatatgaaggacacaaccaaactgatagaggcacacaccagcataaaaaaccacaacttattgaattctatntgtgatcctccagccgaagtttgtgaaaagttacataaccattgacttaagatggcgacatgcaacttttattaacttgatatc

SEQ ID NO: 49844 - DNA, 1044 bp, Oryza sativa
  Clone ID: PAT_MRT4530_5238C.1
atgtattccgatggctcgtggtctcacaagggggcgggtatctctgtgatcctaatttcgccaggaggagtcctgatacgctacactgcaaggttgcagttcaatacgaccaacaacacggccgaatatgaagcagtgttaatgggcctgagaaaggcgaaagcattgggcgttcggcatctcctaatccgaacggacacaaagcttgtcgccagccaggttgacaaatccttagaggcgaaggaagaaggaatgaggaaatatctagaagctgtttggtctatggagaaaagtttcgccggcataatggtcgaacacttgccccgaggccagaatgaagtggccaatgcgttagcaaactcagagctgcgaagtacaggttggtctccagacagttatactgaattgttgtactacagcccgtgcttcattgtgtccctttctccgaaggagttcatcactgacaatggcaagcagttcgatttcgaaaagtttaaagaaatgtgtgagggcctaaacctacaaatcaggttcatatcggtcgcacacccgcagtcgaacggggtagccaaacgggcgaatggaaaaatcctcgaagctctcaaaaagagacttgagggggcggcgaagagaaaatggccagacgaaatgttatccattctctgggcccttcggacgacccccagaaggccaactaagttcagccctttcatgcttctctatggagatgaggcaatgacgccggccgaactaggggctaattcggcaagggtgatgttctccagaggcgaagatgggcgtgaagtgtcgctcgaactctatgagcgccaccgtcctccgctcgtgcgccgtcgcctttggctgccactgccgcctttggcgccgtgcgccgccgcttcccgctccgccggtcgtcgccgtcagcggccgtgcaccgccgcgttcaccatagccggccggccggctataggccgagccgagcctcccagctgcctcccacgctgtccgatcagcctcggggacgatccggaccgtcggtcccat

SEQ ID NO: 49845 - DNA, 273 bp, Oryza sativa
  Clone ID: PAT_MRT4530_52390C.1
atggcaatttcccccgcgggggaccctgccgctacggaggtgggggtgggtggattttctgacccaaggagtcggggccggggcctgcaattgggcgggggagaggcgcggcgggacagcgcccgcggcggcgcggcggcggcgcagcgtcgcagaggcgtggcggcggcgcaccggcacagcacacaagctgagagcgtctctgagacgcacgtcgagagaaactctgagaggtatttcttggtctatatctctgtgttctttcatccctaa

SEQ ID NO: 49846 - DNA, 172 bp, Oryza sativa
  Clone ID: PAT_MRT4530_52391C.1
gggggcgcaccccgcctccgaggcttcggggcgcagcatacgggcccgcgctcccttgattgatccgccgaccaccggtcaggacgcgacggctcgagactcttcggccgcaggatcacgccgccactcgactcctcgacatcgatgcgcgagcagacgcgttgccatgtct

SEQ ID NO: 49847 - DNA, 3792 bp, Oryza sativa
  Clone ID: PAT_MRT4530_52392C.1
tagtccagatcactgtgcaccgttgcgctgtcttttgaaagtccgtgctgctgaactcccaggtccagaattattacgttgaggatggcgagactgatcaaatctaccgacggaggtcctcgatgaccgaatatgccctgaagctccatctggatgattaaaggacttctgaaaatgaggcgcattaagaggtttatccgataacaaagacatgaggaaaccgccaggtggaatataaccgactctacgaccctgagagaatctgcttgattcagctgaactttggtttgaaccctgacttgtagcaacatcatcagatgtaatcatagcaggcaagccatcgtatgataggatgcacgcaatagcatacatagttgctccaagatcaggtgggaggacatcctgtggatgtttgactttgaaaagaatagctgatgctaggcgctccctaaggcagtatatttgagcaacatcaagagctgtagcatcaaaccgaagccatcgatcaataacaactgaaacagagttatcaggagaagacattatctctttatgttgtcccaaagtgactttctcagtttcatcctcactagaatccccatcctcttcatcactatcatcgtcctcaggtggagcaacaaccatttccgtagcaagaataattaaaggataggacccaacaaccgaagagttttttatgtacattccaccatcgcctcgagtgatctcatcatatatcactaatgggttcccagaagtcttacggaaagacaagttaaagttgcaagaatgtggatgcagtcgaactttggcaccacttgctgtttcaatgactgctcttctagtatttttgcgagggggaagcaatctccctaccattggataagcaccggccataaggacagcacgaatgatacctggatctctagcatttaagctgcatgcagatgcatctacaggaacaaatcctctttgggctagttcattctgaagctgtttcctcatgtttgaaagcatattcatggtgttagaagacacaaaatacttagaacaaaattgagcttcttggcccctatctttggcacgtctccaacagtccattgctgctacaactgcaagctgatcactgtatccaccatacaatgaagcaagctcaactttggctgcagcagcccttttcctctcatctggagccattggaaggaggaaaggatctctataatctgctgcacatgccaatgtcaacgccggatctaggcaattcattaatataccaaacaagagcatcttgcttgtagatggatggaccggaagggagcccaacttttcccctaactctgtcagttgttcatcttgagtcaaagcaccaagatcctgaagtacggtgatagcatttcttacagtttctggaattggagggtccaaagttttccttaaaaagtctgcaattctgcagttcggatcaagcagtttgacctgtaaacatagttcctcaataggcatcctctttatttcagggatttggtattccagtaatgaggctgctcgaaatctagagtagagatggtagcacgttcctggctgacaacgacccgcacgcccttgacgttgtctggcattagcttttgaaacccaggaagaatgaagtgttgagacattattatatggatcataacttttctctttcattctcccactatctatgacaaatacgacgtcatcaattgtcacagcagtctctgctatgttggttgagagaattattttacgagatcctgctggtggacgcttgaaaacttttttctgctccgaagatgggatcatggaatggagtgacaacacaagaaactttgacgaatcctgaaagaagggagaagcaagcaacctttcccgtgtttgatttatatcttcccacccaggaagaaacaccaagatagctccttcattggaatcaacacaaatttttctgagcaaccgttctattagcacagtatcgatgtgctcaggattgatggttgccaagtatttattgagcagctcattctcttcagttaactttgctgaaccacattccatatgtttcttaataacttcgcaaacctcttgctgattcccttgttctgcccaacctaatgcagattttccatcatgatcccgtgtagaacaatccaccccaaatgatagaagcatgcaaatgtccccaacctgaccttttccagcaagaaccatcaaaggtgtcacaccagtttctgagtgctggtaattgaaaatttcttggttctgctcagcagaaataagctcaagaagaggatcaaattcatcattatccaaagctaggttaatggcttcatccattgagcttttgtaatcatctgttaacaaactgctctgtttcagatcatctgttgtaggatcaagatgattatcgcctacagattgcaaaatagaaagcacatcctccaaatagaaagttttgaccaaacgcagatgaggatacaacggcagcaaatctcttagaatagccaacatgaaatctgaaaacctgtccctttcatggatttcatccaaatgctctgccctctcagaattacaaaggaacagttggtaaatgttttctgcaatacgcctgcctatcaatagcctcaaaagaacaccatttgtgcagaacatgattgatgagttcttccctccttttgactccaagcgtatcttatacccaactgtgtcacccacagactctcctctttccgcagagattctctcagcaactgagatagctgatattcgccttggttgagtgcatacaatcttacatgattcacccttaccccacatatgatccaagatatattgaggaacctgtgttgttttaccacatcctgtttctccagaaataagaaccacctggtgattctctaaagtcgaagaaattgcatccttgtatgaggaaattggaagtttagatctatcttggacaattttcgatgcaagcatctccaccttcttcaatatatccggtttgcgcaatgctggcctacaaaatgcaccatctggcttccactgaatctttacagccttatcactagaattcctgacagtatgcccatttagctccgcatcatctgggggataatgcataaatagatcttgcaaaacatttctcgcttccacagaaaatccaagatggctaggtccttcttctgtttcaaggccctggttctgttttcttttgtaaacagataggcatcgtcgttccccattcccagaacttttggatatcatgcccatttttctacacatctcatgtatcgccgctcgctcttgtttcgatatgccaggttcaaatttgtacacctgggcgtcggaggcttggaagtcctcgagcactttcgagacgcgcaccagcgtcgcctcccgaacaccccctcccccgcccccgccgccgcttcctcctctgccgcctcctctgccggcaccgccgcctctgccaccggtgccgccggcgccagccgccgcgtccttgcccttccgccctctcctcaccatccttcctccctcctcctcctcctcgtcgtggagcgggggtggcttggttgctacgacgtcgggcgaggcggcgcggccggctcggctccggcccttcccgcaagcggtcgcttcgttgcttccgcgccgccgctgcgctctcccggaaaacctaggcccagatggcggtggctgcgcgctgcgtgcgagcgggcggcccatgaaaaccaggttcagacgggcggccacgcctgacgtgtgggccat

SEQ ID NO: 49848 - DNA, 277 bp, Oryza sativa
  Clone ID: PAT_MRT4530_52393C.1
tttggcctcagaacctaagctcatcagatagttcaccacccgtcggacacactcacaatacacaccataaaaacatatacaaactacatcaaaaccacgggtaggagtctttacatggagaacgggaagggcaactggcttggcaccaccaagcagcagcggtgtgtcatgggggagccaacacgacatgaatgatatgactcctcgaagggggcacctagacccatccttgacgtgctggccaagcgactagcagcagatcacggctatacatgtg

SEQ ID NO: 49849 - DNA, 507 bp, Oryza sativa
  Clone ID: PAT_MRT4530_52394C.1
atggccggcctgctcggcgccggcggcgtggtgacggcggcggcgggcatcggcgccgccatcagggggctcgacaacggcgttctggacggtgccgatgggtggttccagaagatcgtgtcgctgatgccgcaccggccgatgtccatcgccggctcgcgcggggtaaaagactccggcgatgaaggcggagaaaattgtgtggtggaggttggagaaaaaggacagcatgccactccatatggtgggtttcgacaaaatgccacccaatatattgcaaaggataaaatgccactcaatagtgtgggcaaggcgatggtgggaggtgggacagattttgtttctgtatccgagtcatggtatccccagtgtgggcaaggcgatggtgggaggtgggaccgtgggagggccgtgggacgctggggatggagtatagttgatttggcctataggatcggagtggtgaactcctggattggagtggtgaactccttctttttatattag

SEQ ID NO: 49850 - DNA, 434 bp, Oryza sativa
  unsure (1)..(434): unsure at all n locations
  Clone ID: PAT_MRT4530_52395C.1
catttttttaccgtctatttaatcaaatggcacggtttttttcgaaagggtttcaccaatccatattattatccatttactgtcattaccactaatcatggttgctgcatggaaacaaaaatggtttctctttcatgttaacagaagctatgaaccatcagtgatataagtgaaatcagtgatattatgtgtatgtgtnacaaaaaatgagttattatctgcatgtgtttctcaaatttagatagcaggcctaatcttttgtcgagctaggagaagccctgagtgccctggttagggntaacctgggagcttttttattattaaatgaacctggagctaaaagagttttttatgttctgttgtagctgccagaatggnaaatgcctgaacattgctctgaagntgcgtncacttttgcaggcttgatctgtgca

SEQ ID NO: 49851 - DNA, 513 bp, Oryza sativa
  unsure (1)..(513): unsure at all n locations
  Clone ID: PAT_MRT4530_52396C.1
atgggcgaggaagccagcaagaagcaggggaaatgcaccaccgccaagacggcgaggaagcataggacgatagggcggacgctgagccggagcatggaccgcagcgtgagcctcgacaccggccngcgcaccaagctcngccccncgctcnccgcggcggcnggcggcgggaagaagaaggtgtcgcncaancngncngccgccgccgccgccggcggcaagaagaacaagacgaaggggaagaagaagaagaagcaggaggcgcagctgcaggaggaggagtggtggagcaagggcggcgagttcagcgaggccggcaccagcagcaggacgagcagcaccaacagcactagcagcggcggccatggaagcagcagcagcagcagcatcggaaatggccatggcggcggcaacccgaaggctcaaacaaccaggagcaggagcagaaagagaattgggtgctatggtttcttcaagaaaaacaaaagcaaaaatggaggtgctgaagattag

SEQ ID NO: 49852 - DNA, 926 bp, Oryza sativa
  Clone ID: PAT_MRT4530_52397C.1
cctcccactcccttccagagaaataaacgcagagtgagagcacctcatctcgcccccatcttccttcttcctccttgccggccgagagaacttcatcgtcgccgccgtgtttctgtgaatctccgggaacgcacatctctttttggaggcccggagcgcggccggcgtcgtcgcgtcacccaagcttccagtgttcccgacgttccaggccgagatactgggtggtgctgctcattctagttcatcttccatcttcctcccagatgtaacaccgtcaagaatcagcccaagccgagctccaggcgtggagaacgctcgccttctttcctcagccccgatctagacccgttggctttgttcctccctgtccgatctagtcgttctcgggtcgtcatcgtgtttgttgtgttgccgggcatctccaacgccgtcgctgcttcctggacctctccgacccctttcagctgcacgattcggagattctggagagtaacgagccatatccagaggatgatagtgactaccctcagcagcaaggtgaggataccggttatgagttatgcttcttgtgtggtcattgctctgccgagggcggcgagggcgatgagtgatctcttgcagcttggctcttgcccggttggtttgccctttagtggggttgtggcaccaccggttttatcttttgcttatgaactctatttgagacttccgctgctatatttatgtgttgtatgttgggacctcggaccctattatgtgtcatgtacctcgctgcactttaaccctattatggtacttgctatgtttactaatggcttgcgatgaaagtgtgaggctagtcgcattcctggggactagctaagcatgagtaacaggttttgatcgcttgagataaaaaaaaaaaaaaaaaaaaaaaaaaaaaaaaa

SEQ ID NO: 49853 - DNA, 477 bp, Oryza sativa
  Clone ID: PAT_MRT4530_52398C.1
atgggcgagctcggtctcttgaaggcgcgtcgcctttttcaagatgatgagaaggccgctccgcttcccgccgagcgatatgtgggcaccctgttcaaaaaagcaggagatgaggtggtccacaagtacaccatgcccaccgctactccaaccactccaaagaaggaacggttctgcattcagggagtgcgaactcccgacgatgggtatggtaaaggcttgctccggcctttgacagcatcggagaaggagggggcagcggaatcccgtagccctccacttatgaaggtgaagcgtcatttgacgcccccctccaattgtctgaacacctggaagcactatacactgcagaaagttgctgagggatcaggcgccagagtggttcggccgaaccaaagctggccccaatccttctcaattttcacaggtatgtcacagtttgtccctacggaactccacatatcagccttagagtag

SEQ ID NO: 49854 - DNA, 153 bp, Oryza sativa
  Clone ID: PAT_MRT4530_52399C.1
gtaggctctttagagggggccccccttttttttttttttttaacatatagagtctaatattattacaagcctagacagaatccacaaaattgagctaatcatctccaggctttatacagagcacttatactcgcttacccccctcctaacata

SEQ ID NO: 49855 - DNA, 1990 bp, Oryza sativa
  Clone ID: PAT_MRT4530_5239C.1
ggaaaagaagacgacagaagaaaccgggtgaaaaatcaaacccgcatatagagagagaggaacagcgaaagaccacgcgtgccatccctccacgcttgtagggtttccggatcggaggagagagccccccacgccgccgcagccatggttcgcggatcgctcgggaagctggcctcgcgcgccctctccgtcgccgggaaatggcagcaccagcagctccgccgcctcaacatccacgagtaccagggcgcggagctgatggggaagtacgggatcaacgtgcccaggggcgcggcggcgggatcggtggaggaggtcaaaaacaccttgaagaacgtcttccctagtgagaaagagatagttgttaagagtcaaatcctggctggtggccgtggattgggaacattcaaaagtggactgcagggtggtgttcatattgttaaggcagaggaagctgaaagcctcgcagcaaaaatgcttggccagattctggtaacaaaacaaactggtccacaggggaagattgtgagcaaggtctacttatgtgagaaactgtcacttgttaatgagatgtacttcgccatcacccttgacaggaatactgctggtccgctcattatagcgtgcagcaagggaggaaccagtattgaagatcttgcagagaagtaccctgatatgatcatcaaggttcctattgatgtattcaagggaatcacagatgatgatgcagctaaagttgttgatggtctggcaccaaagacagctgacagacagtcttccatagaacagattaagaagctctatgaactgttctgcaagtctgattgcacactgctcgagattaatcctcttgctgagacagctgacaacaagctggtcgctgctgatgcaaagttgaactttgatgacaatgctgcctttaggcagaaagagatatttgccatgcgtgacacaacacaggaagatcccagagaggtggctgctgccaaagctgacttgaactacattgggcttgatggagaaattggctgcatggtgaacggtgcaggattggcaatggctacaatggacatcattaagttgcatgggggtacgcctgccaattttcttgatgttggtggaagtgcatcagagggacaggttgtggaagcatttaagattttgacttccgatgatagagtgaaggctattctagtgaacatttttggtggtatcatgaaatgtgatgtgatagcaagtggaatagtgaatgcagcaaaacaggttgacctgaaggtgcctgttgttgttcggttggaaggcaccaatgttgaccaagggaagaggattctaaaggaaagtggaatgaccttaatcactgcagaggatcttgatgatgcggctgagaaagctgtaaaagcatctgtcaaataattaactatttgtagtataccaacatcaagtttattttttgctggcacaagatgagcggtgctcatgacatatttcaggggtctgaagttgggaaccccaaatccttttgaagtggaattattttggcttgatttcccctagaaacattttggtctactgttaataaacctctgtcggcaccaaactgagcaaccacttctttttgccaaagttaaagtggagtttatctgtttttgccttgagcaagagagtacggctttacactttgcatatgcgcgataactgattgtaaagtctgtaacatcttggctataggttatgatgacgtgttatgatcatattgttctgttctaatactgaaatggtattggacgctagctaatgctatgatgccaactaacccttcttttgatgctgaactgtgcactacattgtgccggaaatcaagctgaaggtgtagtcactttgtattacatatgtcaaaaagaaactgtgtggcttgtgcccgtagtttggcatactttgatttattacgccttcctctcgcgatcgtgacccaaattgatcagttatctgg

SEQ ID NO: 49856 - DNA, 186 bp, Oryza sativa
  Clone ID: PAT_MRT4530_523C.1
atggatccgcgcagcagccaggcgcaagaggacggcttcttccacccacgcgacggcgcgtgccccgccgactccagccctttaggagtccagaggggattcagccttttctcccttctcaacagtgatcttggcgaccagatgctatgccaatgcgctggtggagatccagccagagatcactaa

SEQ ID NO: 49857 - DNA, 949 bp, Oryza sativa
  Clone ID: PAT_MRT4530_52400C.1
atgcagatattcgttaagaccctcactggcaagaccatcaccttggaggttgagttctccgatacgattgacaatgtgaaggctaagattcaggacaaggagggcatccctccggaccagcaacgccttatcttcgctggcaagcagcttgaggatgggcgtactctcgcggattataacatccagaaggagtccaccttgcaccttgtcctccgccttcgtggaggcatgcaaatattcgtgaagaccctcaccggcaagaccattaccctggaggtcgagtcctccgacacgatcgataatgtgaaggccaagatccaggacaaggagggaatcccaccagaccagcagcgtctcatctttgctgggaagcagctcgaggatggccgcacccttgcagactacaacatccaaaaggaatccaccctgcaccttgtcctgcgcctccggggcggtatgcagatctttgtgaagacccttactggcaagacgatcactctggaggttgagtcctctgacaccatcgacaacgtgaaggccaagatccaggataaggagggcatccctccagaccagcagcgcctcatcttcgccggcaagcagctcgaggatggccgcacccttgccgactataacatccagaaggagtccaccctgcaccttgtcctgcgcctccgtggtggtctctgagcgtgtcctgtggtgcagcattggacttcattatacctatgccgctcagtctgtcatatcagtgtccactggcgtttggttggttttttggtttggttttttgcgcgttggggttttctaaggagttccctaagttgtgttgataccattatccatactagtacatttgcttcactgtgcatcggtaccatcgatgatattatcattctacttctgttaatgtttctgagatgtttgatccgaaaaaaaaaaaaaaaaa

SEQ ID NO: 49858 - DNA, 303 bp, Oryza sativa
  Clone ID: PAT_MRT4530_52401C.1
atgaagacatcttccattcagcttcccaacggcgacaacgtccactcctcctccccaagatactgcgaaagcctcatcacagcactcgcaaccacctatgttgcggtcgccaccgttcaaactcttcatgtcgaggataacgggtacatgcgtctttacgttgtgatgctgagggcatcgatcgtcaagggagagggccgcttgtatgttggctatggtggcgaggagatcctcttgtttgccggcaacgacacaacatgggcgactgcgagcaccatgacaaggttggccacggtgtcttga

SEQ ID NO: 49859 - DNA, 1182 bp, Oryza sativa
  Clone ID: PAT_MRT4530_52402C.1
ccggccgggatagcgagtcgaatcgaccgaaggggagggggagcgaagctttgcgttctctaatcgcctcgtcaagatgcagatattcgttaagaccctcactggcaagaccatcaccttggaggttgagtcctccgatacgattgacaatgtgaaggctaagattcaggacaaggagggcatccctccggaccagcaacgccttatcttcgctggcaagcagcttgaggatgggcgtactctcgcggattataacatccagaaggagtccaccttgcaccttgtcctccgccttcgtggaggcatgcaaatattcgtgaagaccctcaccggcaagaccattaccctggaggtcgagtcctccgacacgatcgataatgtgaaggccaagatccaggacaaggagggaatcccaccagaccagcagcgtctcatctttgctgggaagcagctcgaggatggccgcacccttgcagactacaacatccaaaaggaatccaccctgcaccttgtcctgcgcctccggggcggtatgcagatctttgtgaagacccttactggcaagacgatcaccttggaggttgagtcctctgacacgatcgacaatgtgaaggccaagatccaggacaaggagggtattccaccagaccagcagcgcctcatcttcgctggcaagcagcttgaggatggtcgcacccttgcagattacaacatccagaaggagtccaccctgcaccttgtcctgcgccttcgtggaggtatgcagatcttcgtgaagaccctcactggcaagaccatcactctggaggttgaatcctctgacaccatcgacaacgtgaaggccaagatccaggataaggagggcatccctccagaccagcagcgcctcatcttcgccggcaagcagctcgaggatggccgcacccttgccgactataacatccagaaggagtccaccctgcaccttgtcctgcgcctccgtggtggtctctgagcgtgtgctgtggtgcagcattggacttcattatacctatgccgctcgtctgtcatatcatcgtgtcatggttgtgttgtgttttggtttaaagtccctaagttgtgttgatactattatccatactagtacaatttgcttccctgtgcatcggtaccaatcgatgatattatcattctacttctgtc

SEQ ID NO: 49860 - DNA, 1912 bp, Oryza sativa
  Clone ID: PAT_MRT4530_52403C.1
cccgggctgcaggaattcggcacgaggaatctgaccgaggggagggggagcgaagctttgcgttctctaatcgcctcgtcaagatgcagatattcgttaagaccctcactggcaagaccatcaccttggaggttgagttctccgatacgattgacaatgtgaaggctaagattcaggacaaggagggcatccctccggaccagcaacgccttatcttcgctggcaagcagcttgaggatgggcgtactctcgcggattataacatccagaaggagtccaccttgcaccttgtcctccgccttcgtggaggcatgcaaatattcgtgaagaccctcaccggcaagaccattaccctggaggtcgagtcctccgacacgatcgataatgtgaaggccaagatccaggacaaggagggaatcccaccagaccagcagcgtctcatctttgctgggaagcagctcgaggatggccgcacccttgcagactacaacatccaaaaggaatccaccctgcaccttgtcctgcgcctccggggcggtatgcagatctttgtgaagacccttactggcaagacgatcaccttggaggttgagtcctctgacacgatcgacaatgtgaaggccaagatccaggacaaggagggtattccaccagaccagcagcggctcatcttcgctggcaagcagcttgaggacggccgcacccttgctgactataacatccagaaggagtccaccttgcacttggtcctccgccttcgtggaggtatgcagatcttcgtgaagaccctcaccggcaagaccatcaccctggaggttgagtcgtctgacacgatcgacaatgtgaaggccaagatccaggacaaggagggtattccaccagaccagcagcgcctcatcttcgctggcaagcagcttgaggatggtcgcacccttgcagattacaacatccagaaggagtccaccctgcaccttgtcctgcgccttcgtggaggtatgcagatcttcgtgaagaccctcactggcaagaccatcactctggaggttgagtcctctgacaccatcgacaacgtgaaggccaagatccaggataaggagggcatccctccagaccagcagcgcctcatcttcgccggcaagcagctcgaggatggccgcacccttgccgactataacatccagaaggagtccaccctgcaccttgtcctgcgcctccgtggtggtctctgagcgtgtgctgtggtgcagcattggacttcattatacctatgccgctcgtctgtcatatcatcgtgtcatggttgtgttgtgttctggtttagagtccctaagttgtgttgatactattatccatactagtacaatttgcttcactgtgcatcggtaccaatcgatgatattatcattctaaaaaataaaaaactcgagctgcttgccggcgaagatgaggcgctgctggtctggagggatgccctccttatcctggatcttggccttcacgttgtcgatggtgtcagaggactcaacctcccagagtgatggtcttgccagtgagggtcttcacgaagatctgcatacctccacgaaggcgcaggacaaggtgcagggtggactccttctggatgtagtaatctgcaagggtgcgaccatcctcaagctgcttgccagcgaagatgagcgctgctggtctggtggaataccctccttgtcctggatcttggccttcacattgtcgatcgtgtcaggcgactcaacctccagggtggtggtcttgccggtgagggtcttcacgaagatctgcatacctccacgaaggcggaggaccaagtgcaaggtggactccttctggatgttatagtcagcaagggtgcggccgtcctcaaggcatcttgccagcgaagatgagctgctgc

SEQ ID NO: 49861 - DNA, 407 bp, Oryza sativa
  unsure (1)..(407): unsure at all n locations
  Clone ID: PAT_MRT4530_52404C.1
ctctgtttctcctcttcttttcttggcttgtgctctgttttaatttctttgcaatgatggggaggcagagctcgtcggcggcgaggagggtggtggtggtggtgtacacnactgatggtggtggcagagacagcagcgcataactacactgcgacggacaactactgggactggatcacggacaccggcaacctgtgcactaatgggaggccgtcgcatatcaccttcacctatcctccgtacggacagacctacatcggctcccctacctgccgctgctgcgacgggcgcgtaaccacccaacatctcccgagtaattttgggttgtccatcctgaccccaggaaaaatgacgagcgcctcctacaataagggagcgaacatggctaataccggaggcacccgcat

SEQ ID NO: 49862 - DNA, 834 bp, Oryza sativa
  Clone ID: PAT_MRT4530_52405C.1
atgagctttacagctgtgttaatctgctgtgctggcacgcagtcgcagggaggggaggccgggagggtgctcatgtgcagcgcggccaggttcttccgtcgaatcggagcccggcaccctcgggtgcaggcgatgcaagggacgggataccgttgcctcaacgggatagcttcagctccacctccatcagctgcaagagcacaaggcacaagggccgagccggcggcggggggagagcggcggcgggagccggagcaagagagccgggggagggggcggcggtggtggccggagccgagggagagagcgacggcggtggccggagccggggcgccggcagctggagccagagagcggagggatggggcggcggcggctggagccagagagctgagggagggggcagcggcggtggccggagccagagagccgagggagggggcggcggcgatggccggagccggcgggggagggggcggcgacggtggccggagccgggggagggagcagcagcggtggccggagccggcaggggagggggcggcggcggtggctggagccggcaggggagggggtggtgacggtggccgaagccggatccaggggatgggagggggtggcggtggtgcgtcgccggagccggaggagggagcggtagcggtggccggagctagggaggaaggggcgctagggcggcagtggtcggcggcgtcaatgtcgggtgtgtatcgcgtgatacctggtaggtatcgcgtgatacttggctggtatcgcatgattcctgataggtatcacctgatgcatcacaagtatcatctaataggtatcgcgtga

SEQ ID NO: 49863 - DNA, 4902 bp, Oryza sativa
  Clone ID: PAT_MRT4530_52406C.1
atggtgggggcggtggagaaggtcagatccatcgtcgcaagccacgcgcaccagcacaagggcggcggcggcgacggggacggggaggcgcggcggcgctaccagggagagggcgcgccgaggccacgcagcccggagtcgcgctccgccttcgagccgcccacgccgccgcgcgcccgcgcgcccgacgcgagatccgggaccaaaggcgacgccgctccctgctcgcctcctccctgccgcgatattaggcgagcagatgaggagattgacgaacccagggtccagttttttgccccagggacttacttctcacatgactcttcagattcagattctagtgttagtgttgctaactcaatgtacagatcagtaaccccaagcccatcagagagccctacggttaggcagaatgatgcttctgatcatggtgctacaaccatgtctgactcagatgatgctcgggagcatgtcggtgctagcatagcttcctggtgtgaagaggagcataaatcattccgtattgttgattttgatgatgatatttggtacccaccacctcctgaagatgagagcgatgacgttgaatcaaaattatgtgcatttgatgatgaggacgatgaatatggtgactccagcaattttgttgtgcctaattgcttcagtgctgataaatttgctggtgttgatagttccgttaatggatctcacatagagaatgttcaaaatgatttgctaaggcattttcaagctctagttgcacagttgttaacaggggaagctattagtttggccagggacaaagaatcaaaaggttggcttgagatagtgtcctctttggcatggcaagcagctaactttgtgaaacctgatacaaagaaaggtggtagcatggatcctagtgattacgtgaagattaaatgcatagcatcggggaaaccaagtgagaggtttgtgcttgtctgtattgttgcctacttatttcatgcatcttctcatcatcattacaagacactaatggatctcattgcatgcagcaattttgttaaaggaattgtttgctccaagaatgtaaaacacaaacgcatggtctctgagcaccagaatgccacattgctcattttaggaggggcacttgaataccagaaagtttctaataaactagcctcgataggaactatacttgaacaggaaaaggaacatctcagaatgattgttggaaagatcgagtcaagacgacctaatgtgctgcttgttgagaaaagtgtctcttcttttgctcaggagctcttagcaaaagatatttcattagttctgaatgtgaagaggccacttttggataggatatcaagatgcacgggtggtcaaattgcctcatcaattgacaacattgcctcagcaagactaggccattgtgacacgttcaaggtggaaaaagttctagaatcctcaacagaacattcagagaaaaagtcaactaagacacttatgttctttgaaggctgtatgaagcgtttgggttgcacggttctactcagaggagcttgccgggatgaattaaaaagaattaagcgagtaatgcaacttgcagtctttgctgcttatcatctctcccttgaaacgtcattctttgcggacgagggtgcaacacttccaagagttccttcaacatcttctgtaggtgcaccagaaatgcaaaccaatagagagcacctatcatcttgttatgctaatcagggtagtcctgttagtttgagaactgaagaagaaaaatatgcacacaatgcttctatcagccagatctttaatggtatttctggaccgccaacttttttaccattggatggggaaagccagggaatagtatctgaacatagggaggttgaatcccctgccaatcatattaaaggtgacaattcgttccactcgcaccatccaaatgctttatgcaatgtgcattcagtttccttgggcaacaaccttggtagtatgggtgtgacaccatattatgatccgtgcaactctttgcaatccccagttggtgtttcggctaatatacttggagaagtacataatctggaaaactgtgggtgccccatatcactagatgactttcatgttggaggcctgaatgaccagaacaagctttcaggtggttatttccctggtactgacaaccatcagagcatcttagtttcattctcaagcacatgcatcccaaaaagcttggcatgcgagcgttctcacctcttccgcatcaaattttatggtagctttgataagccacttgggagataccttcgagaagacttatttgaccaggcatattgctgcccgtcatgtaaggagcattcagaatcacatgttaggtgctacaagcaccagcatggaagcctaacaatcagtgttagacgtcttgtatctcaaaaattaccaggtgaacatgatggaaggatatggatgtggcacagatgcacgagatgcaaactcgaggatggaatgcctcccgcatcacatagagtaatcatgtccgatgctgcttggggtctatcatttgggaaattcctagagctcagcttttcgaatcatgcgactgccaaccgacttgccagttgtggtcactctctccagagggactgccttcgtttctatgggtacggaaatatggtagctgtcttccagtacagtcctatggttactttatctgttaacctgccaccctcaatgctagatttcaattgccatagtacacaagaatgggttaaaggagaggcagttgcggtatttggtgaaatggaatccttacatgcggaggtatatggattcctttctaatactgaaaagagtatcataaccatggatgaatcattaaaaactggcatagaaagacagatcattgagatgaaggatttgcttaacatggaaagaaatgaatatgaggtgactttgcttctaccagttatcagggggagtacccattccatgaaatcaagtattgatattttggagctcaaccgtctgagacgtggtctcctcctagatgcttacatttgggactgcaggctttgtaacataagttcaataacaaaagatggccgtgcttctagaataaagggttcggaagctgaattacaccaggcaattacaaatcacggagaaatgcatcaagagccttctacttgtccacagtgttcttcaggaagtttaagaaaatctctactatctagagagggccattccatggacactgagattatcttgcctgagatagatttgccagttggtatggtggatagttttgtgcatgatataggaggccttgacttggttttcagcaaatttgatgtgtcgggaatagcacagagtctatcaaaagattccatcaagacagaaccagtggagagattaccctcacttgcatctattttatctgataaaatagatatggcatggagtggatcttgtgaattacacaacaacctccctgagagtacaaccaaaggcaatgaaaatccaagttacagtaaagcaatcccccctgttcgcatccattcatttgattctatattcagattgcatcagcgggaatcaacgggattattgcctgcttcattgcatttgtcctcaaagtcagttgattcctttcgagatttgacaagcctagtaaaagatccgctgacaaacatgcggagggccttttctcacatatctcccagggaaagaggaaacttaaatgtccttactcatttgccaacgtatatcaggtctgctgctcatatggtgagcgatggggcacgactattactgcctcatattgactttgaaggtggcgttgttgttgctgtctatgatgatgagccaaccagtattgtgtcgtatgtcatgacatcacaagaatacattgaacacatcacacataaaatggatacgaagagcagctttcatcatccagtaaattgtgctgtggccagtaataaccaatttgaggaatcttttctcccacaagaaggccattcagaatttaaaggaacccacttcagtttttcttttgatgatgaagcattttctgctgataatacaaagttttctgtgacatgttattttgcaaggcagtttgctgctcttagaaagaaatgctgcccaggtgatattgattacatacgctcactaagtcgttgtaagagatggagtgcacaaggtggaaaaagcaatgtatactttgcaaagacaatggatgagagattcataattaaacaggtcaccaagacagagctggactcttttataggatttgctcctcactatttcaggcacttggcagaatcactaacttctaggagcccgacttgtttggctaaaataatgggactttatcaggttaatattaagggcttgaaaggagggcgtgaggtaaagatggatcttatggtgatggagaacattttcttccaacgaacaatatctagggtctatgacctaaagggttccgtgcggtcacgctataattctgatacatccggccacaataaagtacttttagattctaatctcatagaggcacagcatacaaatcctatatttttggggagcaaggcaaaacaaagaatggaaagagctgtctggaacgatacatcattccttgcgtcattggacgtcatggactactcgcttctggtcggcgtagacgagaggaagaacgagctcgtgatcggcatcatcgacttcctccggcagtacacctgggacaagcagctggagacgtgggtgaaggcctccggcatcctgggcggctccaagaacgaggcccccaccgtcatatcgccggtccagtacaagaagaggttcaggaaggccatgtcgaggtacttcctcgccgtccccgacgactggtcctcatcataa

SEQ ID NO: 49864 - DNA, 498 bp, Oryza sativa
  unsure (1)..(498): unsure at all n locations
  Clone ID: PAT_MRT4530_52407C.1
aagaaaccttaccatttccgttggtgttttgatggagtggatatgataggattgggttctttctgttattccctgcaagtttcgtcaagctcagctttgcgattagttactatgagcttattacaattttttacctttctacaagttattcattaccgatttttgtacctaataatgtggttcaatttgggatttggaagtatgcctgcgattttgtctggtattaacaatttagctctcaacaagcaaaagcaaccttttgaggctagttgcaggctgcagcagaagcagagtgaattaagggcattcaagtgtaaagaacagaggcaatggcttcatcttcggacccatggatgaaagagtacaatgaggcatctaggcttgctgatgatatcaattccatgattgccgatgagggtctcttcacaatcaggcccggaaattatacgtcacacatcagccattcgaagaaaaataactatnctttgtactagactg

SEQ ID NO: 49865 - DNA, 129 bp, Oryza sativa
  Clone ID: PAT_MRT4530_52408C.1
cctgactccccaactaactaacaatggtcttactaccaggcaggcggacctactcctcggcggaggatatgtcttctagagggacagacggctgtctctgtcaccaacgttagctcaaaacacgcctaa

SEQ ID NO: 49866 - DNA, 116 bp, Oryza sativa
  Clone ID: PAT_MRT4530_52409C.1
gcacgaggggtaacgtagggctagagagatagtagaatactaggcgagaaggataacatagatgcaaagcttcttcctaagcagagactactcaagtaacctaataacctaccgag

SEQ ID NO: 49867 - DNA, 699 bp, Oryza sativa
  Clone ID: PAT_MRT4530_5240C.1
atggccggagcagcagcggcggtggcaggcgagggccggagcggcgtcggccaagcagaaggcggtgctcaaccacagtccacagtcacacgctcgcgtggcatgacggcgacctcgcggccgatgaggtctgtcgccgccgcgtttgtcctaaccacttctccagcgctcaaccatctctccttccccttcgcccaccatcactgccatagtgtagttcctcggtggaggcctgcgcggtgccgtgcgaagccggcggtggaggacgtggtagacgacgagaaggagaaggagacctggcggcgggaggacaagcccgaggggaaggacggaggagaggaggtgctcgggcgcgggtggttcatggttgatgagattggcatggacatcctcaccatcgccttgcctgctgtgctcgccctcgccaccgaccccatcacggcgctcatcagcacctccttcgttggtcatgccttcctcgataatctcccgcaacagctcggccctcaacccctcgtctgcctccttcgccggtgctcagacgaagtccgcctccttcgccggtgcttagacgaagagaagggggagataaagagaacagagagagaccgagagaagagagagagggaggacgaagaaggaaaagagatagataatgacatgtgggccccacatgggtcccacaattattatttttaa

SEQ ID NO: 49868 - DNA, 849 bp, Oryza sativa
  Clone ID: PAT_MRT4530_52410C.1
atggcgatttgtcggcttcggctcacagctagattggcaggtggtcaattggaggtcggagcggatttgttggcgacgaagaccgagtggcaggaacacggcttgatgtggtcgtcgtgtaggtgccagcgggtttcgacgcaggctggctcctgtgattggaggcggcggctttcgcggggagcagtggtgtcggttgcttcggggagaagttgcggcggagctctgaggcggaggcagtgtcgactgactccatgcagggatgttcacgtagatgcacgtacggggacagcttaccaagtcggagtcagcttgtggccatgggaagcggaggcaagaagcgattcggctgtgaccaagttgcattcggagagcttctcaaacggcatgaagtgggactcgacggatataattatcaggaatgcagtctacggatgccggagaagcgtggatgttggatttattagctcggttcataagacgacaaggaagaaagggttctcttcatgtctggtgagtttgatttatctatttggtgatgacatcgggttatctggccatggattagatcaagtcaaatttaagacggaagatggaggtgaacatagtcttcggggagtctatgatgtgacagctagggagaaattcaatttcgcttggcaagacgactgtggtgatatgagagaaggtggagcattgttgcaggtggagtcaagaggaagaaattacaaggatagcaggagtctcttgtttaacggtgagcctggtggaggcttgtcggggcggctcggcgtgagtggcgaaaaaggatcaactcaagtcctggtacacgaaggttcgagcaagtaa

SEQ ID NO: 49869 - DNA, 168 bp, Oryza sativa
  Clone ID: PAT_MRT4530_52411C.1
atgctgccggtcgaagaccagtcgcagctgtccctcaaccatctgaagtcatctgaagtcatggttgggcgcgacgactctgcatttgtcgagatcgttctcgataatggggtgtactcgaccacaacctacttgagtgctcaattgttcctaaaaaatattttctag

SEQ ID NO: 49870 - DNA, 295 bp, Oryza sativa
  unsure (1)..(295): unsure at all n locations
  Clone ID: PAT_MRT4530_52412C.1
ngtccaaccttgaccagttcacaggccatcgcgcccatggtacattctcaaaagctaacttctgtgagcgcccatccaaagctagtgtctcactacaaatatatttccacattcaccagggggcagcagggnatcacttggcacagtgtgggcacacacatctcactncaggtcaccatccatccatccatccacccaagccaccaccaaccctcagcaggttccccaagcacaggggccattgtccattggacatccacacacacaccaggaaacacggctcagacacatatca

SEQ ID NO: 49871 - DNA, 213 bp, Oryza sativa
  Clone ID: PAT_MRT4530_52413C.1
tatttatctaactgcagcgatggcctccaggggggcttttaataacatgcgcggtcctcaccaatggaaaggcactcctcgttaaccgcctccaacgcgcatggcaccaagcaaccattgcaccaaaaagcaaccctaaatgacaagcaaccagagctcaacaaactaccatgaagctgcaacagccaacatcaaaccactgacacaccaact

SEQ ID NO: 49872 - DNA, 420 bp, Oryza sativa
  Clone ID: PAT_MRT4530_52414C.1
cgaaagtgcaagtgagactaaccttgtacctgtagtgagtactggtgatgatggctgcgagtaacggagaggaacctcctagcacatccatggcaacaagttcttctccattgcccatggtcgctcaactgatggtcaccacagaccgtgctgtaagccagcagctgaaggatctagtgaataaggaaaactccactaccatggtggcggcgttgtccttaagtagagaggcttatgaggtggcgatggcgttgaagaacggggaggagcatcggcaagggagatgcagcggcaagggagatgcagcggcaatgttgatgatgatggcgtccaaaaaagaagacgccgcaaagccttccactgcgtccatgaaccccctgttgctatcactagcatcgcagggtcgtctaaatgattatg

SEQ ID NO: 49873 - DNA, 1574 bp, Oryza sativa
  Clone ID: PAT_MRT4530_52415C.1
atggctgaccggcttgaccgggtcaagccgacgtggcgcctatgtggcgaccacgtgggcggcgagaggaggaagaaggccggccggaggacgaacggctggcggcgacggcttcaccgggacatggtgcggcgactacagctcaaggggagcacaccagatcgatgggaacccgtttgtggcgtcggatgggatggggaggcgccgtggaggtccggcgacgagaggcggcctccgggagcgggtggcaatggcggcgaggccgtgccgggcggtgacggcgcgcaatggtggggcggcacatttagggggacgagcgagcaaccaaacggctcggggcttatccaagatgatgcaaatggcaagaatttgggcgaggagctcaccggcgtgaggaaacggtatcggcggcgatttgaggatggaaaggggtggaaggccgatggcggcacgcgaccgagcggcggcgcacggcggatgacgccgaggcggcgcggcgtcggggcgagtgcgtcggggaagatgagagggagtgcgaagatggggcggaccggagctcctctttggctcctcgcgctcgccggctcccacggcacgcgcgacaacgacaatggcagtcaaggcggcaatggtgtggtggggagaggaggcgagacaacgggggagatgggagggctcggatttttatagtggagcgaggtcggtttgggaggcatgggcgagaccgtctcctgccccgaggaaggtggaagccacaaacatgttagagacgctccgctccagggagggaccttgagatcagcccagtaagtgtggccaatgcgctgaagccaaagccagggtagatgtagcgcgaagcctatcgtgctcaagtccactatgcctaggccacaaaccgacaacaggatgccaagatagatgcaagggaactcagagatagaagaggggaaggtgctctgaaccaactccaagtcctctgctgtgcagcggatcgaagtaatcgagcatttggaaaagttggtgcgtaactcgaaggccgaacaaaagatggagagaatgtcatggatgaactccaaatcctatctcacaggggagaggaagaggaccagatcatcggtgtagaaagaagcacgatgtcgcaagcgcgcggtcattgagagggagaaaaccacccgtgtcagattgagcacatccaagactaggaggaagagcatgagagaaaggggatcgccctaccgaagcccctccgatggaggaagcggggattgggaaccctattgaccagcaccctgaagaaggagcaatggaggatcagggaaatccaatcacaccatcgatggatgaaaccaaggtgaccaagcacttcaagcaggaacgtccagctgaccatgtcaaaggccttcgcaatgtccactttaaggaccagatgaagcttggcccgggaatggagagccctagccgcaagctggacatagcggaagttatcatggagagaacgagaggcttatcaggcagaagtccttgacctccatagcatatccaaatgtgcattgagttagcaataactaatttct

SEQ ID NO: 49874 - DNA, 923 bp, Oryza sativa
  Clone ID: PAT_MRT4530_52416C.1
aaagcggccgctcgcgccccgccccccaaatccacgagcaccagcgatcgccgtcatcctccgccatgatccggttcatcctgctgcagaatcggcaggggaagacgcggctggccaagtactacgtcccgctcgaggactcggagaagcacaaggtcgagtacgaggtgcatcggctggtggtcaaccgggatcccaagttcaccaacttcgttgagttccggacgcataaagttatatacaggcgatatgcaggactgtttttctcaatgtgtgtggatatcactgacaatgagttggcatacttggaatgcatccacttgtttgtcgagatattagatcatttcttcagcaatgtgtgtgaactcgacttagtatttaatttccacaaggtttatttgatattggatgagtttattctcgctggagaacttcaagagacaagcaaaagggcaataatagagcgaatgggtgagcttgagaagctggaataagaagaaacggtgtacactagcgtacatgggcagatgatcaagagtgttgccatctctttctctgccgtgccaagacattgctctgcattttgtacaattctttgtagctattgtgttatacctagctcacctacattttcaccggctgttcatctgtgtaagtctcctttgttgcttggtgaggctactacacactgctagattgttctgttgattaccatggaatcagtcatctttgtgcatttgcttgaagtaatcatcattatagcaatctcttttttttcaaatgtctgattgggagtctgatcttttgatgctgaatcaataatatgactgttttaagcaaaaaaaaagaaaaaaaaaaaaaaaaaaaaaaaaaaaaaaaaaaaaaaaagggggggcctcgtgccgattcctgcagcccgggga

SEQ ID NO: 49875 - DNA, 1349 bp, Oryza sativa
  Clone ID: PAT_MRT4530_52417C.1
atgaccgtgggcacggctgttcaaacagaacccggtttgtccgaccccgccccggcgttcccaactattggcatgcgaggagcaattggtcaaagggtgacttgccttgctcaaggtcttcatggagcttcacgaatcttcgagaaaaccacgagtgacgaaaatccgattttctcgggcggcaagggcgcggcccgagggttgaaagatgctcggccgagccatttgggccggcgcgggcgcggggaaggcggcccattagggcgcgcggggagagagggaggccgacggggtgggcgcgatgcggtgcgccggttgacaaggaggcggcgggccacgtgcagcctcatggctcaccggggtctgcgcgcacggggatgaaggggcgagggcgagcggctgaccggcttgaccgggtcaagccgacgtggcacctatgccaggccacggtttcgtttctagtgtcggatggagcagagggactccgagagaagccggtgacggcgaggtgcggtgtgggttcaagcggcgtcgacggcgagcttatggcggcgtcgacggcgctagggaatgatttgggggggacgagcaagcaaccgaatgactcggggcttatccaagatgatgcaaatggcaagaatttgggcgaagagctcaccggcgtgcggaaacggtatcggcggcgatttgaggatggaaaggggtggaaggccgatggcggcacacgaccgagcggcggcgcacggcggatgacgccgaggcagcgcggcgtcgaggcgagtgtgtcggggaagataagagggagtgtgaagatggggcggcccggagctcctctttggctcctcgcgctcgccggctcccacggcacgcgcgacgacgacaacggcggtcaaggcggcaatggcagtgcaaaagcggcgacggcgtggatgcaagggcgctgtggaggcggtggatcggacggcgagaatcaaaccgcgagcgcgggctggcgcggtcaaggggacgaggcggtcgcggtctcttgccattttgacggcaacgatgacgtcggcgatgacgtcaccaccggcggcggctcgggcgtgcaagctcgccggcgaacgacggcgcgacggcgcgaacagaggacaccaacacgtagagggcgacacggcgaactcaccggtgaccaaaacaacggcggaagatcaacggacggcggtgctccggcgacctacggcaaaaaaggaggacgggacgaggacggcgacgacttggcgaacccgacggtggccttcccgagcggcgacgacgaccagagcgacggcggcgcacggctggacgaacggcggcgacggtggcgctaa

SEQ ID NO: 49876 - DNA, 228 bp, Oryza sativa
  Clone ID: PAT_MRT4530_52418C.1
gtcagtttgcttgctaggtcctggtgtcactttttgtttgtagaatctcaatctatccccttctatatggttgatttctacatatacgtatgtagaggagatgtgaatgatctgtggttgattgatggctcatttattgaatgatgccgccttttatcaattctcagcgcatatcttaccatgactctgtttattttaccctgcccattcgccaaatttattgattga

SEQ ID NO: 49877 - DNA, 807 bp, Oryza sativa
  Clone ID: PAT_MRT4530_52419C.1
atggctcgcgattttacggcgacgtttcttctgctgctcagcgtcgcgtcgctgctggtgatctcgccgtgcgcggcccagcagatcaagaccaccgacacgcggtggagctaccacctcccgcttcccgacggcgtcagcggcgccgagagcctcgccttcgacggcaaggacggcctctacaccggcgtctcggacggccgcgtgctcaagtggggaggcagcgccgccggctggaccacgttcgcgtacaatgcgaactaccggaaaatccctctctgctcgtcgtccgaggtgccaccggaggagagggagagcatctgcgggcgcccgctggggatccggttgttcaggaagaccggcgagctctacatcgccgacgcgtacaaggggctgatgaaggtcgggcccgacggcggcgaggcccaggtggtcgcgaccgaggcggacggcgtccccttccacttcctcaatggccttgacgtcgaccaagctacgggtgatgcctacttcaccgacagcagcagcacgtacacccgcaggttcaacggggagatcacgatgaacgccgacgcgacagggcggctgctcaagtacgacgcgcggacgcggcgggtcaccgtgctgaagaccgacctgccgtacccgaacggcgtcgccgtcagccgagacaggacgcacctcgtcgtggcgcacaccgtgccgtgccaggcgttccggtactggctgcggggcaccaaagccggcgagtacgagctcttcgccgacctcccgggctaccccgacaacgtgaggcgcgacacctag

SEQ ID NO: 49878 - DNA, 316 bp, Oryza sativa
  Clone ID: PAT_MRT4530_5241C.1
agcaaaacggtcacaatgccgactgagggcacatacttctactatggaggccctggaaggagcttaaactgaccatgagctcatgacaaacgtgcgtgaacaccctgtgcatgagtttaaccattcaagagggatacaccatctgctgcagtgccatagccctagacagtgtgtgtcacgtgaatgggtacaaggtgctgctctctaatctctctctgccttgagctatctttcttccttttttgaaatgccaagtcttgtgaagagaagcaacgacatctggtgggggctgagatgatgcactacccgccttttt

SEQ ID NO: 49879 - DNA, 2321 bp, Oryza sativa
  Clone ID: PAT_MRT4530_52420C.1
gcctggtgattttgctccttgcttcaggtgtgggctgcttgcgtgcccaggaggctccatgttcgcctggttggcgtggcgctctccaggtgttccagggtggggtcctgccagactctagactggaaagctaccggcagcataattatgcagcttcttatggctaaacaccaccactcacattgaacagcattcatgacgcaacacaagtaaaagcgaaagggaacacattgagacaggaaagaagattgacagcaagaatttcggaactatgaaattggaattataacctaaagggaggtgaaacaaagcctataatgttgtacaactgaagcagcagcaacacctgacataaccaacctgctcttttaacccttctcacctccataagagcatcatatgatccaactgctgctccaaattagtaaatgatatgggggagaaaatcgactgctttactccacagggctagcgttcgtgctcgccgttccatcttcagccttggtggttgcggtggacgcttcatcagctgaagaaacaccctcaactgcaggcttgctttcgccattctcagtttcttttagctggacagtctgaccaaatgtgtctgagatgtgggccataagttctcctagggccttattctctgctggtttctgcagctctgggctggcaggctgctgctgacgtctattctcctgcaaggctttctcccgctgctcatagaagtcaaagtcttcaagaatgttcgtctccgattcatggttcttgaagatagttaacatctgcagaccatgttccagcttcacctcctgggtgtccctgctattagttacaggtttgttgtcattgttctcaagaatgatgtgccgcagcaggttgttcgggacatccttaataatgtgccacttcacagggaactggccactccacttgtcctgctgccaataatcgacacttttgtcaaaatcgacgggtccaatcatctcagctacaccacagaactgaccactgccattaaccgagaaaaatagaaaaatagggcaatagtcttctttttctttggccaagcgataagcagaatccagctttctattcccactagctgtactggcccaaacattgtacttaatgctcctatgtacatggtcctcagtgtaggactttattacaaaaaattttgcatccttgtattcagtgacaaaatcagggcgattatacagttcactatcaaccagaggaacatttttctcatttttgtcatctattgaagagttctctgtgtcttgtttctttggttttgtagcacgtggcccacggttttgctcattcaggaactcaagagcaccattctgaataccaaatggcatgctccctttctgttgattggcgcttaagtcaaaagtaccaaatctgcgaccagaactccaacttggagtagtgcctccaaacttaccaccttgttggcgtggcttataggatccaggggcatacattgacccatgatgcattccaaaagccagcggtgtgttcccttgaccaaacaaaccaggagtgctgcttggttgggtggatgctctgtcaaaagacccgaatggttgatgataacctggtgttggcgagtagagaaggccgtcaggaaggaagtactcctgctgcagcataggatctccttgagacattccagtggcggaattagagtatcccatgctaggagaggctggtggctggtagtaaggacttgagaagggaaagtgcaatgggaggtatggctggccatctccaacgccaggagaataagctccatacatcatttgagggttgtttgcatatccaggagataacatgattgactggttgtcgttgtaaattccaggtgatacagaatggagtccttccatattgacataatgggggtattcttcccattggcccaaatggttcaggtatcctccagaatagattgtttgtggctgaggtgcgtacacattgggttggtagaaaggttgttctccacctttacccaaaaaactagccttctcctgtgcaccctttggtgattttgaggagctagcaccctggggaacactagtagtcattttctcatttgtactagaaagaatctgctctttagcagcactcttggatgcgttgttctcacctacaatttctgattgtggtggaatcatgcaatcggcggaagcagccgggcggacggcggcgcctcgccggatggagatcggcgcaggcggcgggcgaactcgcgcgaggagacggagtttgggggggaggcgacgccgaggggaacgcggacgcgtggg

SEQ ID NO: 49880 - DNA, 198 bp, Oryza sativa
  Clone ID: PAT_MRT4530_52421C.1
tatgagtgtgcgtgtgtgtaccgcggtgcagtagagtgtagcgtagcgtgtgccgtatagatgtagcgtattcgtgtggaccgcgtggatggatgtacgagtattggagagagggtgagagtctgtagccggtagtgtgtatttctgtggcaggttctgaacctgatcaatgaaatatggtgttgtgaattaattata

SEQ ID NO: 49881 - DNA, 966 bp, Oryza sativa
  Clone ID: PAT_MRT4530_52422C.1
atggggagagcgccgtgctgcgacaaggcgagcgtgaagaaggggccatggtcaccggaggaggacgcgaagctcaaatcctacatcgagcagaacggcaccggcggcaactggatcgccctgccccagaagatcggtttgaaaaggtgcggcaagagctgccgcctccggtggctgaactacctccggccgaacatcaagcacggcgggttctcggaggaggaagacaggatcatcctcagcctctacatcagcataggaagcaggtggtcgataatagcagcgcagctgccggggcggacggacaatgacatcaagaactattggaacacgaggctcaagaagaagctctttggcaagcagtcgcgcaaggatcagaggcagcagcagcacctggcgcgccaggcggcagcagctgccagcgacttgcagatcaaacaagaagcgagcaggggtgcaaacgaagccgatggcttggctgccggtgccaattacacttggcatcaccaccacgccatggccgtgcctgtgcacccgatgtcggcaccaatggtggtggaaggaggccgtgtgggagacgatgtcgatgagtcgatccggaagcttctgttcaagctcggagggaacccattcgcggcctcgccggcaccgccatgcatacctccaccaccaatgtacgaggaagccccaagcttcgtgccaccattggcgcacggcgtgccgctcaacgaaggcggcatgcagtgctccagcgtgctgccggcgctggagctggacgagaacttccacttcaaccatgtcaagctggacgggctcgagtgcctcttcgggatgggagatcaccaaaacatgagatggaatgaggtgagcccgttggtttgccctaataacgctgtggcgtccagctcccaagggatgcagcagtactgcctagttgaagaaccagctgacctcgggatgcagtag

SEQ ID NO: 49882 - DNA, 122 bp, Oryza sativa
  Clone ID: PAT_MRT4530_52423C.1
aaaacacctgttgggattgcataaaaaaggaaggcagcccatttgggctaaaaccctcgcccggacccaagttctccgcctttaagaagttcaacttatgcgtacggccggatttaaaccaa

SEQ ID NO: 49883 - DNA, 285 bp, Oryza sativa
  Clone ID: PAT_MRT4530_52424C.1
atgagcacctccctagttgaagaggaggggagtgctcagggtcagcagcggccactctccttcgttgttgcgtcgtccgcaaggagaggggacagtggggcctcctggtcactcaagctccattacaccggcaacagaatgacgcccttccttgcgtccgatggccatggcaccccaatcccctcagagagaggagagggagggacaaaagagggggaggaaccgctggtgccctcccagctcccgactcgctaccgccctcctagaagacaaaactgccgctag

SEQ ID NO: 49884 - DNA, 508 bp, Oryza sativa
  Clone ID: PAT_MRT4530_52425C.1
gaagagaggaatgccgggccggcgcactaaggaccctaccttaatgccaacgcggctggtgctaaggttagcggggaaagtttctttcttgtcctacaaggactagtatctccccatgggtataaatatgtacacctggggtcattgttatagatctctccacaatcaatacaatttggcgcatcgccacctttttatgttttctactttttattatccggcggaacatggaacctgacgcggggctgcatctgttttcgatctccggcgagagggaaagtccaatgttccaccagcctaggcaattgtatcgtctacgtcggcgtcgttcaaggctgcatcagtacattcgacctcttggattgctctgatttggatgatatatttgcctgcctatttatcatatgtcttagttaatctagttttagtatctcaatttaggtctatcggttgtctctcgctttagggtttctgtcggtatcggctaaattgttttactatattagat

SEQ ID NO: 49885 - DNA, 345 bp, Oryza sativa
  Clone ID: PAT_MRT4530_52426C.1
atggggctctctgcctgcaactgcaaggcgtcgttgctgctcgccgtcctcctcgccgccacgctcctccggcgtggtctcggcgcagcgccgccgttccacccggccggcggtggagaccacgccaggcggctgatcggcgatggcgcggcggcgcgcccgctgctgcatggttcagccgccgccgccaacggcgcctctgcgccgggcaatgccggtgcgggctccgtgttgcgccgccgcccggtggcgcgccgcgtgttgctgcgcggggttaacggggaggcgtccaagtctaagccgtcgtgcggctccaactacgagcctccttgccgcccagattga

SEQ ID NO: 49886 - DNA, 726 bp, Oryza sativa
  Clone ID: PAT_MRT4530_52427C.1
ccggccgggatctcatcccaatcccccaaatccacccgagcattcgaagcttgtagaagaagccctagcctctcctcctcatcaccgatggcccgcaccaagcagacggcgaggaagtccaccggcggcaaggcgccgaggaagcagctggcgacgaaggcggcgcgcaagtcggccccggccaccggcggcgtgaagaagccccaccgcttccgccccggcaccgtcgcgctccgggagatccgcaagtaccagaagagcaccgagctgctgatccgcaagctgccgttccagcgcctggtgcgggagatcgcgcaggacttcaagaccgacctccgcttccagagctccgccgtcgccgcgctgcaggaggcggccgaggcctacctcgtcgggctcttcgaggacaccaacctctgcgccatccacgccaagcgcgtcaccatcatgcccaaggacatccagctcgcccgccgcatccgtggcgagagggcctaggcgtgatctgctcgagaggctgtgataccctggtagttctagtggtggttcctgtgtctagtctgcacatgtagagatttgatggggttccttggttggtgtttgatctcagatctgtcatggcctagttggggtgttgcgtatgtaatttatctgtcttactcttatgtgatcccatggtgttggaatgaaatggaagtgaagaattctacttatcccctttttttc

SEQ ID NO: 49887 - DNA, 148 bp, Oryza sativa
  Clone ID: PAT_MRT4530_52428C.1
ccagcattcaaaacggccccaaattagtactactagcaccatttaatctactaccacagcattgcattgtctccctgatcaaagcaagcaaatttcaaccaatccatccatgggatatcaaatagggttttaccaaactaagcatcca

SEQ ID NO: 49888 - DNA, 622 bp, Oryza sativa
  Clone ID: PAT_MRT4530_52429C.1
actccgccgccgccgacttcgccgcgaaatttctcaaatccaaagctccgccgcgtcaagctctcctctcctctcctcctcgatggcccgcacgaagcagacggcgcgcaagtccaccggcgggaaggcgccgaggaagcagctggcgaccaaggcggcgcgcaagtcggcgccggccaccggcggcgtgaagaagccgcaccgcttcaggccgggcaccgtcgcgctccgtgagatccgcaagtaccagaagagcacggagctgctcatccgcaagctccccttccagcgcctcgtccgcgagatcgcccaggacttcaagaccgacctccgcttccagagctccgccgtcgccgcgctgcaggaggccgcggaggcgtacctcgtcgggctcttcgaggacactaacctgtgcgccatccacgccaagcgcgtcaccatcatgcccaaggacatccagctcgcccgccgcatccgcggtgagcgcgcctgattaatttattagtcgcttcatctgtgatagctctagtaccagaattgcttagtagtagtgatgtaatggcttgttgctgttgctgtcaattgttgctctgattataaatgggaaatctttctgatgttc

SEQ ID NO: 49889 - DNA, 1353 bp, Oryza sativa
  Clone ID: PAT_MRT4530_5242C.1
ttactcagctgcagtggaaattgtgtggctgtctaatggtacgccatttgggtttctcatcttgtcattggaagtaagatcaatggtcagatagtcatgtccagtgaattctctaaaatttgctgctctctccagttccttcacttcttcaataaccatctccagccgaactaccatttctaccaacaatgaagcaaacgcagcgaatggaagtgcttctgagaactcaaggcttgtcatggctatcttacttagtgttggccttaatgtgccccgctcattccgttctgatggttggtctgcttttgtattcctcctttctaatagggatgtgccatcagtcttgaatgatggtagagtagttcttgtggctgtatgcttgctagaatttaattccatcagcacatgactatttgcacatgcatgtttggagccgagaaagagccgtggctgtgatcttatagccgagtttagatcctgtagtgcttcatgaagatgatcagacagcacatcaggggcacaacgatgatgatctcttatgcttactgcaagctcttgtaaaaccttgaccacttctcgtgcaactctagtacatgggtttcggaatagtgacctgacggatggtggagtctgaatctcagattctagacatccatgaagtgctgcgacagtatatgcaaagtgcctaagaacagatccaatcttcacatacttttgccatggataactgtaacattgcattgaatgtcttggctcccagcttgcatagtgtgctagggtttcatcacttgattttgagtcaaggactgctctataaccaatgtgaatggaagctcttgatgcctgcttatcaagaattttatcatccttgtcttgatcttggaaatactcagtaacacaagcttcaattgatcttgctaatccttcaaatttgcgtactgtagaactgtggaggtcttctccagaccagtttggcaatacaaaaagactcatgaataggcatattgcacaacctatcgcaatagtacttaagcgatctcgtgctaaaggcaccacatcctcttgacggaagcttgatactgcagtaaattcaagcacaacaacaacggtcatcacagcccacattgcattctttcccactcccttgaacaacggttcaagtatgtacaggagtgagaccagtgtgagtgctgtcccaaccttgagagcatgaatagcccttcttggatcttctcttcctataccccatgcatgtgctccccatgaaaaaggaatcctgctaattttcttcacttgctgatgaagaatcgacgagctattcttgttattgctgggatctggagcacaagccat

SEQ ID NO: 49890 - DNA, 117 bp, Oryza sativa
  Clone ID: PAT_MRT4530_52430C.1
atggcgccaaaaatgcttgttgtatttcttaatgacattactagaaatataatttcagcaaaggcgcagaaatacttctggtatattatggttacagagttcatccgtggaaagtaa

SEQ ID NO: 49891 - DNA, 707 bp, Oryza sativa
  Clone ID: PAT_MRT4530_52431C.1
ccggccgggacctcactccaatcccccaattcccaaatcctccaagctctcgcgcttccgattccaagcagcagcagccagtccagttcccaaatggcccgcacgaagcagacggcgaggaagtccaccggcggcaaggcgccgaggaagcagctggcgacgaaggcggcgcgcaagtcggccccggcgaccggcggcgtgaagaagccccaccgcttcaggccgggaaccgtcgcgctccgggagatccgcaagtaccagaagagcacggagctgctcatccgcaagctgccgttccagcggctggtgcgggagatcgcgcaggacttcaagaccgacctccgcttccagagctccgccgtcgccgcgctgcaggaggccgccgaggcctacctcgtcgggctcttcgaggacaccaacctctgcgccatccacgccaagcgcgtcaccatcatgcccaaggacatccagctcgcccgccgcatccgtggcgagagggcgtagaatgcctccgttgccagatctggagttgtagagttagatcaggtgttaccagttttattttaacctgtgttccttatcgtagtggtgttcttgtgttatgcaccgtctgatgttaccatctcattatcatcagcaatggaaaatgttgttatccgtgtctccaaaaaaaaaaaaaaaaaagcggccaaaaaaaaaaagcggcc

SEQ ID NO: 49892 - DNA, 960 bp, Oryza sativa
  Clone ID: PAT_MRT4530_52432C.1
tcaaatccaaagaaatcactcgccgccgccgcctcgccttctccgccgcgccaagctctcctctcctcctcctcgcagacccgcacgaagcagacggcgtgcaagtcagggactcgaggaagcagctggcgaccaaggcaacgtgcaagtcagctccggccaccggcggcgtgaagaagccgcaccgcttcaggccaggcaccgtcgcgctccgtgagatccgcaagtaccagaagagcacggagctgctcatccgcaagctccccttccagcgcctcgtccgcgagatcgcccaggacttcaagaccgacctccgcttccagagctccgccgtcgccgcgctgcaggaggccgccgaggcgtacctcgtcgggctgttcgaggacaccaacctgtgcgccatccacgccaagcgcgtcaccatcatgcccaaggacgcggcgcgcaagtcggccccggccaccggcggcgtgaagaagccccaccgcttcaggcccggcaccgtcgcgctccgtgagatccgcaagtaccagaagagcacggagctgctcatccgcaagctccccttccagcgcctcgtccgcgagatcgcccaggacttcaagaccgacctccgcttccagagctccgccgtcgccgcgctgcaggaggccgccgaggcgtacctcgtcgggctgttcgaggacaccaacctgtgtgccatccacgccaagcgcgtcaccatcatgcccaaggacatccagctcgcgcgccggatccgcggcgagcgcgcttaggcgatccgccctcctttggttcttgcttggttcgtagggacttgtcatgttctaccagttcttgttaattattagatccttgccttgtcatgtcgtagtctttgattcttagttgcaatgtaaccgctggttattctgaaattgcaaccgaagtaatctgttttatccccaattttctgtcccc

SEQ ID NO: 49893 - DNA, 2202 bp, Oryza sativa
  Clone ID: PAT_MRT4530_52433C.1
gccttcgttgccgtggactggtgtctccgcctacacggctggcctattacgccgtcgttgttgcgcgtctacgtattcatcggccggcttgcctccgtcgccgccgactggtgtcttcgcctatacggttggttggtcacactaccgttcatgggcgtccacgtcttccccgccggcctgcctccattgccgccgactggtgcctccgcctacacggctggcctgttatgccgttgttgttaggcgtctacgacttcaccgtcggcctgcctccgttgccgccgactggtgcctccgcctacacggctggcctcttatgccgccgttgttgggcgtctacgacttcaccgccaaccgcctaggttgcttccacggctggtgttttcatcgccattgatggacgactttgttcctagatcgactacttctgctgtcaccgagggaatacgacaaagctaagtcatctattatatttatatcagatactactcatcctatatgtttgttctgcaggatccaaatccagatatgcataaaagggattcatggctttaagcttatctcttacgctctaggaatggatcagtcagaacatcaccgccggtttgctttcgccgccaccgactggtgtcaccgcctgcacagctggcgtctacatcttcaccgatcggccgcctcgtccgccgccgactggtgtttccgcctgcacggctggcctattatgccgccgttgttgggcgtctacgtcttcaccgaccagccgcctcgtccgccgccgactattgtttccgcctgcacggctgacctattatgccgccgttgttgggcgtctacgtcttcaccgaccggccgcctcgtccgccgccgactggtgtttccgcctgcacggctgacctattatgccgccgttgttgggcgtctacgtcttcaccgaccggccgccttgtccgccgccgactgttatttccgcctgcacggctgacctattatgccgccgttgttgggcgtctacatcttcaccgaccggccgcctcgtccgccgccgactggtgtttccgcctacacggttggcctattatgccgccgttgttgggcatctacgtcttcaccgacgggccgcctcgtccgccgccgactgttgtttccgcctgcacggctgacctattatgccgccgttgttgggcgtctacgtcttcaccgaccggccgcctcgtccaccgccgactgttgtttccgcctgcacggctgacctattatgccaccgttgttgggcgtctacgtcttcaccgaccggccgcctcgtccaccgccgactgttgtttccacctgcacttcaccgaccggccgcctcgtccgccaccgactggtgtttccgcctgcacggctggcctattatgccgccattgttgggcgtctacgtcttcactgaccagccgcctcgtccgccgccgactggtgtttccgcctgcacggctgacctattatgccgccgttgttgggcgtctacgtcttcaccgaccggccgcctcgtccgacgccaactgttgtttccgcctgcacggctgacctattatgccgccgttgttgggcgtctacgtcttcaccgaccggccgcctcatccgccgccgactggtgtcaccgcctgcacggctggcctgttatgacgccaactgatgctatcttcttcacggctggctacatcgccgtcaccgctaataggcgtcagcatcttcaacacaagctgcctacgtctgctgccgactgctaccactactgatggacatcatcgtcttccgtcgccaactggttatgccgccaccgactggtgcttttatcttcacaattgcgcatcttcactaccggtttgcttctattgccgccgactcatgttcacttcatcacggctatgcaactttgtcaccatggtggagcaatttcatttttattatcttcggcatcggcaaactctattgcctctacttcgcaagctttgctacttcaccaaccatgacgactacaagagtttcgacaccttagcatacgtcaacaagtataatgccatgttattttactacaacaagtggtgttccaatattcaagatttctactcggacatcttctatgcgtatattcactcaagcaatgactactcaacgacaagaagctacagttctcgactctatgttcagttgtttctcaac

SEQ ID NO: 49894 - DNA, 956 bp, Oryza sativa
  Clone ID: PAT_MRT4530_52434C.1
tggtaccggtgcgggatccggggcggagacccacgcgtgcggtaatcttcaggccagagcgcgagcgagaagaccggaggcctgctgctacgttcttggggagggcccgcacgaagcagacggctcggaagtcgaccggcgggaaggcgccgaggaagcagctggcgacgaaggcggcgcggaagtcggcgccggccaccggcggcgtgaagaagccgcaccggttccggccgggcaccgtcgcgctccgggagatccgcaagtaccagaagagcacggagctgctgatccgcaagctccccttccagcggctcgtccgggagatcgcgcaggacttcaagacggacctccggttccagagctccgccgtcgccgcgctccaggaggccgccgaggcctacctcgtcgggctcttcgaggacaccaacctctgcgccatccacgccaagcgcgtcaccatcatgcccaaggacatccagctcgcccgccgcatccgcggtgagcgcgcttaaaattagttcaataatctgatcgcttcatcgttctcagctacctcttcctagtagaaccaggatgtactagtagtagcttgttgcaatgaactgtttatctgattgattatcaatggaaaaatgatgttcaaatcgggctattcatttatgtaaaaaaaaaagtcgggaatgtatctacattaacacggttgcgttgcgtagccccaaaccgatctggggggatcaacgacgacgacgtgacgtggtcaccttgttgattcccctctcgcttccgcgttttagatctcgttttcattagcagctttgtaatagggtttggtcggttaattagtgtaaaaacagggttcggttaaagactcgaaatcaaatgttattcccgttctttggaagcaaaacagtgttgaagactattaatattcgtttactatatggagatttgttcgt

SEQ ID NO: 49895 - DNA, 1816 bp, Oryza sativa
  Clone ID: PAT_MRT4530_52435C.1
atgatatatcactccacaaacatgccggattggtgccttcgttgccgtggactggtgtctccgcctacacggctggcctattacgccgtcgttgttgcgcgtctacgtattcatcggccggcttgcctccgtcgccgccgactggtgtcttcgcctatacggttggttggtcacactaccgttcatgggcgtccacgtcttccccgccggcctgcctccattgccgccgactggtgcctccgcctacacggctggcctgttatgccgttgttgttaggcgtctacgacttcaccgtcggcctgcctccgttgccgccgactggtgcctccgcctacacggctggcctcttatgccgccgttgttgggcgtctacgacttcaccgccaaccgcctaggttgcttccacggctggtgttttcggattcatggctttaagcttatctcttacgctctaggaatggatcagtcagaacatcaccgccggtttgctttcgccgccaccgactggtgtcaccgcctgcacagctggcgtctacatcttcaccgatcggccgcctcgtccgccgccgactggtgtttccgcctgcacggctggcctattatgccgccgttgttgggcgtctacgtcttcaccgaccagccgcctcgtccgccgccgactattgtttccgcctgcacggctgacctattatgccgccgttgttgggcgtctacgtcttcaccgaccggccgcctcgtccgccgccgactggtgtttccgcctgcacggctgacctattatgccgccgttgttgggcgtctacgtcttcaccgaccggccgcctcgtccgccgccgactgttgtttccgcctgcacggctgacctattatgccaccgttgttgggcgtctacgtcttcaccgaccggccgcctcgtccaccgccgactgttgtttccacctgcacttcaccgaccggccgcctcgtccgccaccgactggtgtttccgcctgcacggctggcctattatgccgccattgttgggcgtctacgtcttcactgaccagccgcctcgtccgccgccgactggtgtttccgcctgcacggctgacctattatgccgccgttgttgggcgtctacgtcttcaccgaccggccgcctcgtccgacgccaactgttgtttccgcctgcacggctgacctattatgccgccgttgttgggcgtctacgtcttcaccgaccggccgcctcatccgccgccgactggtgtcaccgcctgcacggctggcctgttatgacgccaactgatgctatcttcttcacggctggctacatcgccgtcaccgctaataggcgtcagcatcttcaacacaagctgcctacgtctgctgccgactgctaccactactgatggacatcatcgtcttccgtcgccaactggttatgccgccaccgactggtgcttttatcttcacaattgcgcatcttcactaccggtttgcttctattgccgccgactcatgttcacttcatcacggctatgcaactttgtcaccatggtggagcaatttcatttttattatcttcggcatcggcaaactctattgcctctacttcgcaagctttgctacttcaccaaccatgacgactacaagagtttcgacaccttagcatacgtcaacaagtataatgccatgttattttactacaacaagtggtgttccaatattcaagatttctactcggacatcttctatgcgtatattcactcaagcaatgactactcaacgacaagaagctacagttctcgactctatgttcagttgtttctcaac

SEQ ID NO: 49896 - DNA, 571 bp, Oryza sativa
  unsure (1)..(571): unsure at all n locations
  Clone ID: PAT_MRT4530_52436C.1
acatataaatagtgcaagccattgaataaaaaattcgaaggaacacacgccattagtcttttacatgtcaactgaattacaattaaaacatgttgcactagcatacattgttttgcaaacatgcatagctaaataaaaaaaaaaaaaagctaactcatatataaatcgtataaaccacgggataaaaatacagtaccttcataattttattgaaattagtatgctcaaataagctgagcaacacaaataatcttttgtgtaagtgctctaaactatattatattaccatgtaatcaaccttagatagtatttaatgcacttttaatataccatggatagatattcaagcgcgcattcataatacaccacgacttcaaaaataaaaatgcatgcgaaattgatatttaaccatgtgcatcttttgntaagtgcatagatgttaaggattntttctctatggtacgccatggaattatagaattcctcgcagaaaattatgcatcatcataagttcaccactaaggtcagccnctcagaggtcagccagtcatcatcagtcggtttcaaacag

SEQ ID NO: 49897 - DNA, 243 bp, Oryza sativa
  Clone ID: PAT_MRT4530_52437C.1
ccgccgccgctctccatcccgccgtcggttgccgctggtcttcatcccgcttcagccgccgccggtgtccatcccgtcctcagccgccgacggtctccatcccgtttcagccgccgccgctctccttcccgctctccatcccgcccagttgccggcgctcgccatctctccttcctcggttgggattcaccagttgcgggagagggcgaggtcgagggcaacagcccggacactaagaagcag

SEQ ID NO: 49898 - DNA, 1239 bp, Oryza sativa
  Clone ID: PAT_MRT4530_52438C.1
atggagttcacagatggaaggagtcctactcggtcagaactgggtcgtcattgtgtcgtgttcggtctggcctctccaagtcctacttggagacagttgacctgcggtataaaagggaccccctgggaggacctaaggcatcgaatctcagagccaacacacccaccacagcttacgaagccggagctttggcttcacgatcatccccagttcttgttgagtccgctgtatattggaggtgactcatatagtggtatcattgtacctacacttgcgctagcgatcgatgaaagcaatgattcaggagataagccaattttgaatctcatggggtatgttgctggcaatccagtgaccgatagccaatttgatgaagatggtaaaattccatgtctccatggcatgggacttatatccaatgaactttatgagcatgctaaagaaacctgcagagggaaatacagtgccccagggaatgctcggtgtgagcagtctatccaagctatacgcaattgcacaaaggacatcaacatgctacatgttcttgagccattatgtgaagaagtctggagccccaggatccataacacatcagcgacagatggaatgagtaggctcatgctggagtctgctcgtgctgctgatgatgacattattgaattcaattttccttggatagcacttgacctaagaaagtctaatttggcttatttactgcagaaagcttcctatgtggttttaaaaatatgggcaaatgataaaactgtaagggagagtcttggtgtgcacaagggaacagttggaaagtggacaagatgcaattacgatatagattacattaaagatgtgtatagtacagtggagtatcatttgacgctaatgagagaaggataccgatcattgatatacagcggtgatcacgattgtggaattcctttcactagtacacaagcatggattagatttctcaacctttctgtagttgatgattggcgaccatggtatgttgctggacaagttgccggtacaactcagacactcacaacgcacgcaaaccctacccctataagtatcttcgaagactgggccagtaaaattggagaaattgacgaagtcaccataggcgtttcgctatcgctgggtacgtcgcctcccactgggagcgaacccaggacctcaggtgctactgaggttcttgtaaccactaggctacagacccttttgcatatcatgcattaa

SEQ ID NO: 49899 - DNA, 528 bp, Oryza sativa
  Clone ID: PAT_MRT4530_52439C.1
ggaagcacaaaaatcaccccccggttaattaaaagattatattcccctcccaacaaaaatcaaaatcagggaaacctgggggatcccaccctacttggaaacaacaaaacacccatacaagccggggatcttggtgggcaacaaagggggaaaaaagggaaaacccctaaaaggaaaaagggggggggggaaagcaaaggccttcacagttttttacccccaaaaaacaaatgttgttgagggagggggggccaaggaaaaaaagaccccggccccccgctggatggggtctggggggacccaaacacgggcttttgggtttcccaatggaagaccccccttccaaaggggatcgggggggggcccgactccgggcccagggggttcacggaggaaacggaaagttcccgccccgggaacaacgggaaaaccccctggaacttccccgcaagggagggacccgccatttgggccaatgtggacccaggggagctgccccgagagcttttgggggggccggggatcaaa

SEQ ID NO: 49900 - DNA, 661 bp, Oryza sativa
  Clone ID: PAT_MRT4530_5243C.1
cggccgcccttttttttttttttttttttgttttttttttatgaatagaacttattacatttttatctaatgacaaaaaataaattacagacttgacttattactgactagatctttcgaaattaggtagtgggtgccagctcctagctaatactgggtgatactgccatgcatttaccactatgttcctatttggaaggggtgaaaatgcaactacgggcggggattgctcctgcattactttcagggagaacaaaatacacggcccatcctatcttaccgaagattcatttgcttaccactctaacagggtgaatgggacactggaatctcttttcctcgttgaaaaatattaatgtaacatcggctgccattgaggctacctttcaaactctgaaattgatctatgcccatgacccgtgcattacaacctccttgcttaggaatgctctgtcctgtttcatttttagttaatgagtacgaagttatcgtcctggggagctcataggaaccttaaattgtttcttttattttctcgacatcctacagcgaatctgaagatcttaatcttttatgtgaatgccccatggattgaaattgggtacttggccagcttctgtccagatgtgccgaactttcctgtaataaaactttaccatta

SEQ ID NO: 49901 - DNA, 3455 bp, Oryza sativa
  Clone ID: PAT_MRT4530_52440C.1
ttttttttttttttttttttttttttatttactcagatattcctgtatactgctgctaatggcatttcttggattaatgggaaaaattacacctaagtacagagttgctgctgctgatgatttcttggctaatcaacagattatgggagggtaattaactaattactgctcgctagtttttactaagcttttcaaaaatttcagacggagtagtcggtgacggcggcgaaggagcagctcgacaccggcgatgccggcgtcgcggtgacggtggtgggcaatgacggcggctgcgtgggctgcggtggcttggcgtcgtcgccggcggcggacggcgcggggcgccggatctccttgagcagcgcgacgacgtccttcatggcggggcggtcgtcggcgcggcgcgccacgcagagcgcggccacggacatcgcctgccgcatctcgtgcacgtcggcgtcggcgccggcgccggcgccggcggcgcccctgagccgcgcgtcgaggagctccgccgcgtcgcgcttcgcctgcaggtggtcccgcacccactgcaccaggtgggccccgcctggcagcgtggggtccagcgggtgccgccccgtcagcatctccagcatcaccacgccgaagctgtacacgtcgctcttctccgtgatccgctgcatcgacgcgtactctggtgccatgtagccgtacgatccggcgatgcgcggcggcgccggcatggcggagtcgagcttggagaggacgcgggcgaggccgaagtcggcgaggtacggctcgtaggcggcgccgaggagcacgttcatggccttgatgtcgccgtggaggatggccgggacgcagtcgtggtggaggtacgccacggcgtgggcgacgccgagcgcgacgtcgtagcgcgcgccccactcggagtcggaggcgggcgcgccgcccttgccggcggcggcgccgccgccgtggaggaggccgctcaggttgccgttggggaggtagccgtagaacagcagcctggcgccgccgttcgccgcccagccgaggaggcgcacgatgttgcggtggcggatggagcccagcgcggcgatctcgctccggaacgcggcggtggtcgtctcgtccgtcgaccacatcttcttgacggcgaaggtgtagccgttgggggtgtccaccttgtacaccacaccggagctcccggtcccgatcacgttcgccgacgtcagcccgcgcagcacgtcgtccatggagatgtcgagcttctggtacagcgtcacctcccacgcgccctcgccgtggacgaccctgccgccgccaccggcgccgccgccacggcgcatgcgggcgagcaggtacgtggcggcgaccaggagcgccgcgctgaccgcggcgaggatggacatggccaccttcagcgacgagatggccccgcgccgggaggactcgtcggagccgtccccgacgatgaggtggcggttgccggcgaggtcgctgaggggaagcctctggaagaacggggtgtccgggagctcgccggagaaggcattgtaggagatgttcagcgtgacgagattctgcagcgccgccagcgagtcgaggccaccagagagctcgttgtgcgacaggtcgaggctgccgagcttttcaagtccggcgaactgcgacggtatctcgccggagagccggttgcagctgaggttaagcgaaatctccaacgacgggagcgtcccgatctccggcgggatgacgccggagaacgcattgtcgccgaggtcaagcaactggagcttctggcaagaaccgatctccggcggtatcccgccggcgagccggttcttccccaagtaaagcttcgtcaactccggcatcaacccgatgctggagctcaacgcgccggcgagctggttgtcggagacgtcgatgagctggaggctacgcggcagcgtctccggcagcgagccggagagagcattggagtggaggtcaaggaactcgaggctgctgcacccggagatcgccgatggcacggcgccgacgaggtggttgtcgctgatgtcgaggaagttgaggctcttcaggccgccgatctccgccgggatcgtgccggagaggcggttgacgctgagccggagacggtagaggttgccgcagccgccgatctccggcgggatgggcccggacagctcgttgctgatcagcagcagcttcgtcaagttctgcagggcgaacagctgcttcgggatcacgccggtgaggttgttgtacgagaggtcgacggcctggaggctcgggcactcggcgaggctcgccggaacgccgccggtgagacgattcctccacgcgtagaacaaggtgaggttgcgcagccgcgggaagtcgacggcgatcgcgccggtgagctggttgttgtcgacctcgacgtcggtgagcgacgtgcagttggagagctccggcgggatggcgccggtgagctggttcgtgctgagctggagctgctggagattggggaggtcgccgagggtggccgggatgctgccggtgagggagttgagcgagaggtcgatgagggtgagctgcctgcaccggccgagctccggtgggatggcgccgacgagctggttctgccataggagcagcgtctggagcttggcgaggcggccgagctgcggcgggatggggccggagagggagttctggtagaggtagaggctggtgagctcggtgcagttgccgatggaggccgggatgcggcctgagaggagggtggtgtagatggcgatggtctggatgcggctgagctgcccgatcgtgtccggcaagctgccggacatgccggtctgcagccgcttcaggttgccgatgctcgccgggatcgcgccgctcagctcgttgtcgtagagcgtcaggtaggcgagcgcggtgaggttgccgatgtcgtcggggatggcgccgcggagcgagttggagttgagggacagcgactcgagcttggacagccggcagagctcgggcgggatcgcgccggtgagctggttcttgctgacgtcaagcgtggcgagctcgccgtattcgccgagctccggtgggatctcgccggtgaggttggtgcccgagagcaccagcgtcctcagcgatctcgccagcggcagcaggctcgccgccgggagcgggccctgcaggtcgaccgacgtgacggtgacccccacgacgtcgcccgtgcgcgcgtcgcacgacacgccgagccaccggcacggcgtcgcgtccgacgcccgccacgagtccagcgcgccgcccgacggccgcagcgacgccttccatcggagcagcgcctgcccctgctcgctcacgccgtggcacggcgacaccagcagcagcgcgacggcgacggcgacggacgcgagcagaagcgcgtgcctcgctgctgctgctgctgctgcgacgggcggcggcggcggcat

SEQ ID NO: 49902 - DNA, 183 bp, Oryza sativa
  Clone ID: PAT_MRT4530_52441C.1
cagagaatacgcccccttaagaattcttctctgattgcattgtcgattttgctttttaaaggaggcgtgcataaagctgtaagattagcggatgtgtatgtgttagtaagggcttaactgtactttggaccactcaatcgactgtaatttgtcactgtactatacgatgatgaatgtctatta

SEQ ID NO: 49903 - DNA, 3165 bp, Oryza sativa
  Clone ID: PAT_MRT4530_52442C.1
cttagggtctctttgtttaggcttagttttttaagtcagcttttggcttatataatttatccgtgccacggcgtgagcgagcaggggcaggcgctgctccgatgaagagcgtcgctgcggccgtcggacggcgcgctggactcgtggcgggcgtcggacgcgacgccgtgccggtggctcggcgtgtcgtgcgacgcgcgcacgggcgacgtcgtgggggtcaccgtcacgtcggtcgacctgcagggcccgctcccggcggcgagcctgctgccgctggcgagatcgctgaggacgctggtgctctcgggcaccaacctcaccggcgagatcccaccggagctcggcgaatacggcgagctcgccacgcttgacgtcagcaagaaccagctcaccggcgcgatcccgcccgagctctgccggctgtccaagctcgagtcgctgtccctcaactccaactcgctccgcggcgccatccccgacgacatcggcaacctcaccgcgctcgcctacctgacgctctacgacaacgagctgagcggcgcgatcccggcgagcatcggcaacctgaagcggctgcaggtgctccgcgccggcgggaaccaggggctgaagggcccgctcccgccggagatcggcggctgcgccaacctcaccatgctcggcctcgccgagaccggcatgtccggcagcttgccggacacgatcgggcagctcagccgcatccagaccatcgccatctacaccaccctcctctcaggccgcatcccggcctccatcggcaactgcaccgagctcaccagcctctacctctaccagaactccctctccggccccatcccgccgcagctcggccgcctcgccaagctccagacgctgctcctatggcagaaccagctcgtcggcgccatcccaccggagctcggccggtgcaggcagctcaccctcatcgacctctcgctcaactccctcaccggcagcatcccggccaccctcggcgacctccccaatctccagcagctccagctcagcacgaaccagctcaccggcgccatcccgccggagctctccaactgcacgtcgctcaccgacgtcgaggtcgacaacaaccagctcaccggcgcgatcgccgtcgacttcccgcggctgcgcaacctcaccttgttctacgcgtggaggaatcgtctcaccggcggcgttccggcgagcctcgccgagtgcccgagcctccaggccgtcgacctctcgtacaacaacctcaccggcgtgatcccgaagcagctgttcgccctgcagaacttgacgaagctgctgctgatcagcaacgagctgtccgggcccatcccgccggagatcggcggctgcggcaacctctaccgtctccggctcagcgtcaaccgcctctccggcacgatcccggcggagatcggcggcctgaagagcctcaacttcctcgacatcagcgacaaccacctcgtcggcgccgtgccatcggcgatctccgggtgcagcagcctcgagttccttgacctccactccaatgctctctccggctcgctgccggagacgctgccgcgtagcctccagctcatcgacgtctccgacaaccagctcgccggcgcgttgagctccagcatcgggttgatgccggagttgacgaagctttacttggggaagaaccggctcgccggcgggataccgccggagatcggttcttgccagaagctccagttgcttgacctcggcgacaatgcgttctccggcgtcatcccgccggagatcgggacgctcccgtcgttggagatttcgcttaacctcagctgcaaccggctctccggcgagataccgtcgcagttcgccggacttgaaaagctcggcagcctcgacctgtcgcacaacgagctctctggtggcctcgactcgctggcggcgctgcagaatctcgtcacgctgaacatctcctacaatgccttctccggcgagctcccggacaccccgttcttccagaggcttcccctcagcgacctcgccggcaaccgccacctcatcgtcggggacggctccgacgagtcctcccggcgcggggccatctcgtcgctgaaggtggccatgtccatcctcgccgcggtcagcgcggcgctcctggtcgccgccacgtacctgctcgcccgcatgcgccgtggcggcggcgccggtggcggcggcagggtcgtccacggcgagggcgcgtgggaggtgacgctgtaccagaagctcgacatctccatggacgacgtgctgcgcgggctgacgtcggcgaacgtgatcgggaccgggagctccggtgtggtgtacaaggtggacacccccaacggctacaccttcgccgtcaagaagatgtggtcgacggacgagacgaccaccgccgcgttccggagcgagatcgccgcgctgggctccatccgccaccgcaacatcgtgcgcctcctcggctgggcggcgaacggcggcgccaggctgctgttctacggctacctccccaacggcaacctgagcggcctcctccacggcggcggcgccgccgccggcaagggcggcgcgcccgcctccgactccgagtggggcgcgcgctacgacgtcgcgctcggcgtcgcccacgccgtggcgtacctccaccacgactgcgtcccggccatcctccacggcgacatcaaggccatgaacgtgctcctcggcgccgcctacgagccgtacctcgccgacttcggcctcgcccgcgtcctctccaagctcgactccgccatgccggcgccgccgcgcatcgccggatcgtacggctacatggcaccagagtacgcgtcgatgcagcggatcacggagaagagcgacgtgtacagcttcggcgtggtgatgctggagatgctgacggggcggcacccgctggaccccacgctgccaggcggggcccacctggtgcagtgggtgcgggaccacctgcaggcgaagcgcgacgcggcggagctcctcgacgcgcggctcaggggcgccgccggcgccggcgccggcgccgacgccgacgtgcacgagatgcggcaggcgatgtccgtggccgcgctctgcgtggcgcgccgcgccgacgaccgccccgccatgaaggacgtcgtcgcgctgctcaaggagatccgg

SEQ ID NO: 49904 - DNA, 1737 bp, Oryza sativa
  Clone ID: PAT_MRT4530_52443C.1
agactagcaagcaactgctccatcttctttccctttcatccctccaaattgccaatctaatcaaacacttaagcctatatccactaccggccggccgttaccaccacccctccactacccacttcccccacgacgccgacgccgacgaggcagccaaccaaccgccggcggcggggacgacccggcccgcgatcgcgacgccgagcattgcggagccgatctgcggcggcggcgggtgtggggggctcgaggagccgctggtcgggaagaggaggaggaggaagaacggccgccctgacacaatggcagatgtcttaggatgttacactataaagtcccatggaaccaaagtggcgagacttcacatgtacgactggataatacttctactccttgctgttatagatggactgttgaacataattgaaccttttcaccgtttcgtcgggagggacatgatgactgacttgagatatccattgaagggcaatactgttcccttctgggctgttccgctcattggaattgtattgccttgtgccatctttggtggaatttacttcaaaaagaagaatttctatgatttgcaccatggcatactggggatcctatactctgtgcttataactgcggtaatcacagatgcaattaaggatggtgtgggtcgtccacgcccagattttttctggcgctgtttcccagatggaaaggatagaagagtgtcatcaaagaaggtcacaagagctttccaagcgggcactcttcatgagcttacgatcgctttgaggcctcaattgggcgtgggcagggacttcttaatgcagaagctagtttggtgcaatggtggttgggagccagccggcaatgtagataactatgcaaggtcttttgctggtctaggcttccttgcatggtacttagctgggaagatcacagtttttgatcgtagaggtcatgttgcaaagctatgcatagtatttctgcctcttcttactgctgcacttgtggctgtttctcgagtggatgactactggcatcactggcaggatgtatttgcaggctctctgataggtcttacagtcgcatcattttgttatctgcaattcttcccatatccttatgacgcagacgctttctggcctcatgcatacaccttccagctagcggaggcctcgcgcaacaataacaccgcaaactcctacagcgtgagaccgaccgggttcgagactgtcaatgtcccagaagggcatggtgggattgctctgagagacaccaacctagaggccggcaggagaccgtgaaatctgagacctggactggagaaaatctaccaaataccatgacaatatcctgactttacgagttcgaattttgtccactcgacagacgatatggtaggctgtgttcatatatgtattacagttgtatctagatctgctgtttcatcacttctgaattggtctcttggcttccatggtttttgttttctgctaatgggatggctagccccagaagcattggctgtaaacaatctagtagacgctctaaaattacattgtacattaactctgcttattttgggtttggtcaagatagggttgtggtcataattgttatgcttatgtatgctctctctgcattacagattctgagaaacggtgtaatgaaatttggacttcctcgatgtgatgaacgtgagaataacccaattacattgatatatgttgattttgttat

SEQ ID NO: 49905 - DNA, 964 bp, Oryza sativa
  Clone ID: PAT_MRT4530_52444C.1
ctacccacttcccccacgacgccgacgccgacgaggcagccaaccaaccgccggcggcggggacgacccggcccgcgatcgcgacgccgagcattgcggagccgatctgcggcggcggcgggtgtggggggctcgaggagccgctggtcgggaagaggaggaggaggaagaacggccgccctgacacaatggcagatgtcttaggatgttacactataaagtcccatggaaccaaagtggcgagacttcacatgtacgactggataatacttctactccttgctgttatagatggactgttgaacataattgaaccttttcaccgtttcgtcgggagggacatgatgactgacttgagatatccattgaagggcaatactgttcccttctgggctgttccgctcattggaattgtattgccttgtgccatctttggtggaatttacttcaaaaagaagaatttctatgatttgcaccatggcatactggggatcctatactctgtgcttataactgcggtaatcacagatgcaattaaggatggtgtgggtcgtccacgcccagattttttctggcgctgtttcccagatggaaaggatgtttatgataatgtcactactggtgtcatatgccatggagagaagagtgtcatcaaagaaggtcacaagagctttccaagcgggcactcttcatggtcttttgctggtctaggcttccttgcatggtacttagctgggaagatcacagtttttgatcgtagaggtcatgttgcaaagctatgcatagtatttctgcctcttcttactgctgcacttgtggctgtttctcgagtggatgactactggcattactggcaggatgtatttgcaggctctctgataggtcttacagtcgcatcatttgtatctgcatttctcacaactatctcatgagctttttgcttatgggccctttgcaaacacct

SEQ ID NO: 49906 - DNA, 525 bp, Oryza sativa
  Clone ID: PAT_MRT4530_52445C.1
ctccacgcgtccgccttcggccgggctgacgctctctctctctctctcttctctctttgggggtggttcttggtgcagagccgatctgcggcggcggcgggtgtggggggctcgaggagccgctggtcgggaagaggaggaggaggaagaacggccgccctgacacaatggcagatgtcttaggatgttacactataaagtcccatggaaccaaagtggcgagacttcacatgtacgactggataatacttctactccttgctgttatagatggactgttgaacataattgaaccttttcaccgtttcgtcgggagggacatgatgactgacttgagatatccattgaagggcaatactgttcccttctgggctgttccgctcattggaattgtattgccttgtgccatctttggtggaatttacttcaaaaagaagaatttctatgatttgcaccatggcatactggggatcctatactctgtgcttatacctgcggaagctacagatgcattaaggatggtgt

SEQ ID NO: 49907 - DNA, 317 bp, Oryza sativa
  Clone ID: PAT_MRT4530_52446C.1
cccactcgtacgccatgagaactcaccacccaacctccttcatcctcctccacgtcaccgggggggtgtccttagatcacattaacaatggttaactctttttttattcttgttaacaatgaaattgttaacggcactatccactttgtccaaaagggagatggtcccaccactttttcttgaattgtctcttatcataaaccttttctccattgattccatattcattcacttcattacaccaccaatttttgctttttaacttttcctcacttcatttcatattctataagatcatttatcaccattttatttat

SEQ ID NO: 49908 - DNA, 412 bp, Oryza sativa
  Clone ID: PAT_MRT4530_52447C.1
atggcggtggttggtggtggcaacatcacagcgatggatccacccatcgcagagcaaactcgatctctcgacaatgaaccaagttcggatccacaccacctcctcttggttggcttgggcttcggaggcaattcgcctccacggacctcagtgagtgggctcatgctctctccctagccttctgttcgaggcgccgccccatcaaatcgatagccggcagtgccggattgaggagaggccagtaggcatcgagctcatcgttgtcgctgccgaggagctcgttcctgcacggagctggtggatccgcgtcgacctcttcgctgagggagtcgggcggatggcatgcagcggtgagcatctaaagcccaagcatgctcggaagaggggaagaaatgaagaggaaggcaagtag

SEQ ID NO: 49909 - DNA, 156 bp, Oryza sativa
  Clone ID: PAT_MRT4530_52448C.1
atgcagctgcagcagctagctcctgacaagaaaagcctagcatgtagcaagacaagccaagtaggagcaattcagctcaaatcatttgagaagatcatatctgtgattgtcctcatgaaacatggggtgatactccttgaatggtccaaggagtag

SEQ ID NO: 49910 - DNA, 379 bp, Oryza sativa
  Clone ID: PAT_MRT4530_52449C.1
atgtctggaagcacgggagaacgttcttttgctgatattattaccagtattcgatactgggttattcatagcattactataccttccctattcattgcgggttggttatttgtcagtacgggtttagcttatgacgtgtttggaagtcctcggccaaacgagtatttcacagaaagccgacaaggaattccgttaataaccgaccgttttgattctttagaacaactcgatgaatttagtagatccttttaggaggccctcaatgaccatagatcgaacctatcctatttttacagtgcgatggctggctgttcacggactagctgtacctactgtttttttcttgggatcaatatcagcaatgcagttcatccaacga

SEQ ID NO: 49911 - DNA, 230 bp, Oryza sativa
  Clone ID: PAT_MRT4530_5244C.1
agagacacgcgtaccaccgtttcccattcctagggaaacaagaaaagggaaagaagcacggggcatatcacagggaactccactcccagagagaacaactggaaaaaaaaaactgggaacacctggtcgaatttttccttttctgatttggtaagggacgcggtctagggcctctcgccaggggttccacgggagaacgggaagccctagggcctgaaggagacgcgctt

SEQ ID NO: 49912 - DNA, 499 bp, Oryza sativa
  Clone ID: PAT_MRT4530_52450C.1
ttcgacaaacctggagctccaccgcggtggcggacgctctataactactggatcccccgggctgcacgaattcggcaccaggaattcacacaatttaatgttcattttgtgtattagtatgttattatgaccaattttatcaatatactatacgaacctatgctcaatgttacggtgcatatactatatactatataattactactacgtgatattatacaagctaattattacgattttgggtgtacacctgtacaaaaaaaacccatgttattttgaatacacagcttctaaatcctagtccgccactttaccgcatagatgtttcatgcctcacccagatccaaacacaacctgcccgatgcccgccgcaccttgcctgaccccggccactcgttcgaccccatcaagggctgaccttgaaaggctcttcctccaacaagtccttccccgaaacctcggcttctgccttctccttctacgaaatcccgctcccgtc

SEQ ID NO: 49913 - DNA, 570 bp, Oryza sativa
  Clone ID: PAT_MRT4530_52451C.1
atggctagggtgccggccgaaggcggcggccatggccgaactcaccggcgcacggtgcggaccggagcaacggcggaggcggtggagaggtgtgtgacggtgctagggcggtggagggcacgggagcgggcgaatgcaaagcgaaaaagagagagaggagggaacgggggtgctttatattggctgacaagggccgatcgtggccggggtggccacgatttggccggcagagtggggagaggtgggattgagagagaggcgggattcgaaaatcaaatcccggccatctcgtgcgcgggcgcgggcgagggcgagggggagtgggtgcgggaggcgcgggcgcatgcgcaggcgtggccgacgtggcccggtggaggcggggtgtggacgcggtggcggttgcgggcgcggtggcggtggctggaggttggggaaggacccgacaggatcaaaactcatgctagaatgatgcactggcacacagaagaacgtaaacaagacaagatgctgagacatcgtgctgatgggtcacaggggcaaaacatcgacataacatttcaatacttctga

SEQ ID NO: 49914 - DNA, 972 bp, Oryza sativa
  Clone ID: PAT_MRT4530_52452C.1
atggagtcgtcgtcgtcggcggcggcggccgtcgacggagaggacggagggggcagcaagcgcagctggtacgcggtgggggagcgggcggtgctggtgccgtacctgcgggagcacgtgccgcggtaccacgggtggatgaaggatccggcgcttctggaggccaccgcgtcggagcccctctccctcgaccaggagttcgacgtccaccgctcctggaccctcgacccgctcaagcatacgttcatagtgctggacaaggacctgatcgagggagggttcgcggttggcgatccacacactgaagcgatggttggtgatgtaaacatctatatgaatgatcctgatgatttgcaacttgcagagatagagattatgattgctgaacacaagagtaccttttgttacagccgcggaaagggacttggtcaagaagcaatattaatcatgatggcatttgcagtagagaaatatggaattcacactttcagagcaaaaattaacgaatcaaatacagcatccttaaagctgttcagaaaattgggcttcaaggatgcttcgtatagttcagtgtttaaggaggtgacactggaggcacccgcaactgcactaccattggtttctcctctgaccataggaaactggtgacatctgagtatctgactaaatttccgaagcagttattggtgttcctcaactgggaaacaggaaactaactgcgttccatgctaaactgactactgtattatctgcccaacaatttgcttgggattagaataaacttgtgtaggcttctcgactgcaacgtgatgctgaacggtttgaacttttgatggtgtgatgttgtatatgtagggagctacccgtgatgtttttcaagagagattttcaaccacaaggtgtggaacaggttgcagtaatccctagaaagtttatgagggcgatgcattgcccaaaaaaaaaaaaaaaaaa

SEQ ID NO: 49915 - DNA, 720 bp, Oryza sativa
  Clone ID: PAT_MRT4530_52453C.1
gcctccagcccacggcgcctccccgacaacaccaacggcccaccatctccacgcatatacggagaaaccaagcaaaaccgcggaacaggaggagagtccgtgaattccgaggcactcacagaggagggtcggggcgcggccggcctcagggaggcggcggggcgggggcaacggccgccggacctgcgcttccgggtcaccccccgcggccggtcggagacggcggcgccgtcgccggaggaggaggaggtggaggcggaggaggatcggcgcttgctggtgaccccggccatgtcggtgggacgggcggcggaggtcgaggtggagggaggaagaggaggaattggaggaggaggaggaggaggaggcgaggacgctgcggcggcggaggcggctagggttgggggccgcgctccctggtcttttataggagggaggacgggcggagacgcggagacgggggcgcggcgcgccaagtggcgtgcgagctctgaggcgggtgcaggtgggcaggaggagccaacgcccgtcggggcgaggccgaggcgcggccaaccgcgcgggcgcaaggtggcacgcgacgggtgggaggcgagggctggctgctcctgccatctctcctccccccgcatcgggattccctgcgggcgccgcgccgaatggctctccctctctctctctctctctctctctcgtctcgactcttcccgtttcgagttt

SEQ ID NO: 49916 - DNA, 921 bp, Oryza sativa
  Clone ID: PAT_MRT4530_52454C.1
atggcgttcgccccgcgcctcctcctaccttcccggtgccccccgccggcctcctcccccgcgcgccacggcggccgcaccgcgcctgagctgtccggtcccaccccgcgcgtggtggtggtcacctccggcaagggcggcgtgggtaagaccaccaccacggccaatctcgccgcctccctcgcacgcctctccctctccgccgtcgccgtcgacgccgacgcgggcctgcgcaatctggacctcctcctcggcctcgagaaccgcgtccacctcaccgccgccgacgtgctcgctggggactgccgcctcgaccaggccctcgtccgccaccgcgcgctccatgacctgcagctgctctgcctctccaagccccgctccaagctgcccctcgccttcggctccaagaccctcacctgggtcgctgacgcgcttcgccgcgccgccaacccacccgctttcatcctcatcgactgccctgcaggtgttgatgcagggtttgtcactgctattgcccctgcagaagaggccgtgcttgttactacccctgacattacggctctccgtgatgctgaccgtgttgcagggctattggagtgtgacggcatcaaagacattaagattattgtcaaccgagtacgcccagacctggtgaagggagaggatatgatgtcagcacttgatgttcaagaaatgcttggcttgcctttgctaggtgttgtgccagaggacgcggaggtgatccggagtacaaatagaggtgtgccgttggttctgaacgacccacccacaccagctggtcttgctctggagcaggcgacttggcggttggtggaaagagatgcaatgacagcagttatggtagaggagcaggagaggcccaagaagaaagctgggttcttttcattctttggtgggtaa

SEQ ID NO: 49917 - DNA, 270 bp, Oryza sativa
  Clone ID: PAT_MRT4530_52455C.1
tgaatagttttggtcccacatccaaattctttccgagtcaacgggaatcgaccgaacaagttgacgtacataatctgtcctggtgctgcgtcaccgtatttgtgtctttgggctgtttcggcacggttgataaccagaggagacgtggtgctgcgattgcagggctcagtagcgtgttcgttcagaagccggatcgatttgtgtcgcgactcctcccaaatcgactgtttatcaatacctatcataagattgggacctaacatccctcat

SEQ ID NO: 49918 - DNA, 1471 bp, Oryza sativa
  Clone ID: PAT_MRT4530_52456C.1
atgaccgcggacgggctcacggtggactcgatcgcggggaaggggtggacgatcctccccgaggccgagagcgactggcgcagccacgccgccgccgtcgcgcagtccgtcaagctcatcaagaagcggctcaagtggggatggatacttgagagatcaaggcagttgtctgtggtgttggagaggccggacctctgggatgatccagttttcgctgggaaggttagccgtgaacatggtgagctcatgggcaagattaaatcagtgaaccaattcgagcaggagttgatggagcacattgacatgttgaggcttgcaagagaagaggacgataatgaacttgagacgaattatcctctaaagctattgctcctccatgcatttttggttcaggcaggagctggaggtactgagagcatggattgggctgcaatggttatgaacatgtacagctcatgggcccaacgacgaggatacacagtcagtattatagaagaaatgcctggtgaaatagcaggaatcaagagggcaactatcaaagtggatggtgaatatgcatttggatatgctaaagccgaagtaggtgttcatagattggtacggatttctccatttgacagtggaaagaggcggcacacttcctttgctgctgtggctgttgtacctattcttggtgatggttctacccgataccagataaaagattcagatcttcggatagagcgtttccgctctggtggtcctggtggccaacatgccaactgcacagaaagtgctgttagaattgtgcacattccaactggtataactgcaacttgtcaaaatgaaagatcacagcatatgaataaggcatcagcaatggcagtgctccagtctcggctggaccagcttgagattgcccgccaagcacagatgaatgcagaccacacgcaatcactctctgaaatcagctggggaaaccaaataagatcttatgtactccatccatatcgtatggtcaaagatctccggacaaactacgaagtatccgaccctgattcagtcctcaatggggacctagatgatttcatcttgaactttttgtcaacgtcactggatgaagctgattgaagtgcctgtgcctgaagtccctgaagacaaaccatgcttaaatttagcctcagcctcaatgatcaatcattcgatccactgagatacagtccaagagatggtaagagggcagcttcattctttccaatactgacaaatatgacatctcaaatggtgaaagaccaaggtgtgcaacaatttttcaagtgcaaatatcagagctagaacgagcttatattagctttctagttagaaaaatggaaatataatgaacttttgtttcattgttagcccatagttcctttttgtattactggtgctggtgctatttgtgaatggcaatagtagtctcctaaatatagtcgtttctaaaaaaaaaaaa

SEQ ID NO: 49919 - DNA, 1998 bp, Oryza sativa
  Clone ID: PAT_MRT4530_52457C.1
atggcgccgcacattcacattgcaggcagtccacctccagagtacaaggtagatgatttaaaagttttctggttacttcctgggaggggattagctaatgggctaagaagggtgaaggctgacgtgcacacaaatagtatggctgctttggcacctcgattcaggaccctaaggttgtatgttcataataatgtcatcaccgaatttgctgagatggattcactcggaaaacatgagttaaatgcaaatatcaactttagaaaggctcacatttcagaggactaccaagttgacaatataagtgataatgatgatgagggtgctgagtttactgacagtgattatgaaatagataaaggtgatgatgatttgtttgagaagtgggtggacaaggatgtcgttgataagctagtttcaccaaagggcaaacaattgtcaagtgctgcagtggaagcactaagggatgctataaatgaatacagtgtcaagaacagagtggctatcaagatgccttataatgacaaagatagaataagggctcattgtgatgaaacctgcctatggaagttaaatgcttcacatgatagccgatcaaaatgtttcatgatcaagacttatatcggcgaacacagatgcaacaagaagtgggagctaaagacattcactgccaactatattgctaacaagtatgtggaaacttttagggcagatgataagatgactataaggaattttgcaagaacagtgcaaaaagactttaacctgacaccatctagaagtaagcttgctagagctagaagaatagcactcaagaagatatatggggatgagatagctcaatacaatcaattatgggactacgctgctgagttgagaaggtctaacccagggagctgttttttcttgaacttgtcaaatggacgattcaatacactatatgtatcattagatgcttgcaagagaggattcaaaatcggttgtaagccactaatttgcttagatggttgccacatcaagacaaagtttgggggacatttgctcacagctgttggaattgatccaaatgattgcattttccctattgccatggctgtagtggaagtggaatcaaggagcacatggacatggtttcttcagaccctaaaggatgatttacatatagttaacacaactccatatacaatcatgactgataggcaaaagggattgataccggctgttggggatgtgttcaatgatgctgaacaccggttttgtgtgagacacctctaccagaatttccatgtgttatataagggggaaaccttgaagaatcaactctgggcaattgcaagatcaagcaatgtaattgagtggaacaaaaacatggagaaaatgaaagctttaaacgtgcaagcacatgagtacctagaagaaatcccaccaaatacgtggtacattcttcatgcaagggaactgccaatattgagcatgattgagaaaataaagacccaaatcatgactagagtgtacatgaagcaaaaggaggttgaggagaaatggagtggaaatatatgcccaaagataaaacagaaactagagaaactagagaagaatgccgagttagccaatacatgctacacactccctgctgggaaggacgctggcaactcacaggaataccatgtagtcatgccatatcatgctttaggaatgaaaggatacaacctgaggacatggaataattgtgaattacttggtacagctaaaaagatgagaccaaaaaggaagaggagtgtacaagtaatgcaagatgacaaagatgtttacataaatgagacctcgttttcaattgttccagaagaattagtacaagagcgccaacatagcacttcagtgttgactactttattagaacagaaatacactaccacagccaagagcgacaacatctacacacgtgggcagagcaaggatgaagagaagcaacacaagatcaacaacggccagatcatctag

SEQ ID NO: 49920 - DNA, 3003 bp, Oryza sativa
  Clone ID: PAT_MRT4530_52458C.1
gcggtaagttgcagtttatgggtgtgacagctaatggggagctagtatgaacctggtatatgcttatgtattcagaccatctacatttttaattatttaatcgaatgagcttctagacatgtattgaaatgctctggggttgctaaccaatatatatgggattctgatttaatgcatgggaaactaagttgagtgcctacatgtgcactgcttggttccttttaaaactataattatgtgcataactacagatttatgatttaactaaactgtgggttgtttcaaaatcccaccaaatacgtggtgtagagcattctttagtgattttccgaagtgtgatatattgttgaataatagttgtgaagttttcaataagtgagatatatttttcctaattggtacatgtgtgctttccaattagcattatcaatagtattaacatttcctctttcaatctgtatggcgccgcacattcgcgttgcaggcagtccacctccagagtacagtccaaaggatggcttgttctctttagagattattcatggtggtttctttcaaggtgaaggttctgacaggggctatattagtggcaatttggattactttgatggatgtgaggtagatgcatggtcaatgctctggattgaagatatattgaaacaacttggacatgcagaggtagatgatttaaaagttttctggttacttcctgggaggggattggctaatgggctaagaagggtgaaaattgacgtgcacacaaatagtatggctactttggcacctcgattcaggaccctgaggttgtatgttcataataatgttatcaccgaatttgctgagatggattcactcggaaaacatgagttaaatgcaaatatcaactttaaaaaggctcacatttcagaggactaccaagttgacaatataagtgataatgatgatgagggtgctgagtttactaacagtgattatgaaatagataaaggtgatgatgatttgtttgagaagtgggtggacaaggatgtcgttgataagctagtttcaccaaagggcaaacaattgtcaagtgctggtgaggaagatgaaaaatgccatctatctagtgaggaaggtttggatccttgtgatacttctagtcatgatgaagaggcgcaactaaaattcaagagtttcatgcctaaggacatgacaaatccacagttctttgttggcatggtattcccaacagtggaagcactaagggatgctataaatgatataaatgaacacagtgtcaagaacagagtggctatcaagatgccttataatgacaaagatagaataagggctcattgtgatgaaacctgcccatcgaagttaaatgcttcacatgatacccgatcaaaatgtttcatgatcaagacttatatcggcgaacacagatgcaacaagaagtgggagctaaagacattcactgccaactatattgctaacaagtatgtggaaacttttagggcagatgataagatgactataaggaattttgcaagaacagtgcaaaaagactttaacctgacaccatctagaagtaagcttgctagagctagaagaatagcactcaagaagatatatggggatgagatagctcaatacaatcaattatgggactacgctgctgagttgagaaggtctaacccagggagctgttttttcttgtacttgtcaaatggacgattcaatacactatatgtatcattagatgcttgcaagagaggattcaaaatcggttgtaggccactaatttgcttagatggttgccacatcaagacaaagtttgggggacatttgctcacagctgttggaattgatccaagtaattgcattttccctattgccatggctgtagtggaagtggaatcaaggagcacatggacatggtttcttcagaccctaaaggatgatttacatatagttaacacaactccatatacaatcatgactgataggcaaaagggattgataccggctgttggggatgtgttcaatgatgctgaacaccggttttgtgtgagacacctctaccagaatttccatgtgctatataagggggaaacctcgaagaatcaactctgggcaattgcaagatcaagcaatgtccagttcttccccaaaccggcagtcctccttgctactctccctgtcctcctcctagccgagctgatggtggtgctctacgtcaccattttcaggttgattggctacaaatcttgggaatggttggcaaatgaggtgaaggtggagaggggttgtgttgctcgatgtgttcactggttgaaggaggtgttaggaatgctgcccatacttctccctgttgattttcactattattatggagtgtacatgaagcaaaaggaggttgaggagaaatggagtggaaatatatgcccaaagataaaacagaaactagagaagactgccgagttagccaatacatgctacacactgcctgctgggaagggtattttccaagtcaccgacagagatcaccagttcatagttgatatcaatgtgaagtgttgtgattgcagacgctggcaactcacaggaataccatgtagtcatgccatatcatgctttaggaatgaaaggatacaacctgaggacatggtatctccatgctactcattagagtcatttcgtgctgcatacaaatataacatagtgccttcaagggatcaatctaaatgggaaaaaatgaatggtgtaaatgtccaacctcctaaatatgaaaagaaagtagggagaccaaagaaaactaggaggaagcaatccattgaattggagggtggtacaaaattgtccaagcatggcgtggttattcattgtagttattgtgatggggctggacacaataggaataattgtgaattacttggtacaactaaaaagatgagaccaaaaaggaagaggagtgtacaagtaatgcaagatgacaaagatgtttacatgaatgaggtatag

SEQ ID NO: 49921 - DNA, 462 bp, Oryza sativa
  Clone ID: PAT_MRT4530_52459C.1
gtcccccagctcatcctggccgtccgatcaataatactgagcccagctgcccaagacctcgaatcgcgcccttctcttgtcttgtgaatctgtgagaaccccgcatccatggcggcggcggcggcggcctcctcgggctggctccggcgagcggcggggacagtcccgcgcattccatgcggactcgtgaccgcactcgtcccgacccctcctccacccgctgctgcggtggtgtccgaggcccccgcgctcgcgctcccttcccacgccgccgtcgccatggagctcatggctgttcccaagaagaaggtttcaaagtataagaagggcctgaggaatgggccaaaagccctgaagcctgttcctgtaattgtccgctgcaagtgctgcggtcgggtgaagctgccacacttctactgttgcagcggcgaaagagggaaccctggatctgagagctcgtaa

SEQ ID NO: 49922 - DNA, 395 bp, Oryza sativa
  Clone ID: PAT_MRT4530_5245C.1
acgccgccaaatatcgacatcagagataagcctagacagaactaatatgatgcctgcggaggccgacaagagggatctagcgccatctctgatctcgatgagttcgtactcgaggaggaagactaccctgtcgtcgacttcataccgatgaataaagagcaacaccggcttcggccaacaggagtagggctattacctgtcagataaggggcccggatctatataaaatccttgtctccatctcttttacctcaatctcgcgtataccctggtgccgacgatctccataccatgcaaataccgtagtcgagacctcaaaagtcgacacctgcctagccacgctgcctagccattctcggccatcttatcggcctcggccgatctgggccgtcagg

SEQ ID NO: 49923 - DNA, 483 bp, Oryza sativa
  Clone ID: PAT_MRT4530_52460C.1
atgagtgctaagtgtaaatcaatgacacgaacggtggctaccaggagagaaccaagaagaagaggggaaggccaaaaacggtgaagataaactaattctatcagacaaccatccgataaaagggattagaaacgaggaggctgctgcacatcagctgtgtttatgaacaggatacacctgaaaaattactaggctaacagccgggctgacatgctaaacctgggcaccaagacagaagctcacagggcaaacacactaacacacacatgcacaaccacagtcagccaccaaccaagccgagttgtctggaccaaacacacccatggtgtagcacaacaccaccaatgtcaaggggagagacacaacctgtgccattggacgcagcgccacacccaagctggtgatcccgaccgcgcatttaaagaatttggagcccaaccggaccaaactctgtaagacgcaccagccacgaaaaaccttgac

SEQ ID NO: 49924 - DNA, 1005 bp, Oryza sativa
  Clone ID: PAT_MRT4530_52461C.1
atggcggcggcgcacggtggcggcgacggcggcggcgcacggcgactgcgacggcggcgggaaacgcggcacggccaaggcgcggcgcggcgcggcggcgtcgtggcggcgtcgcagcggctctatgcgacgacgcggcggcgtggaggcggcggcgtggtggagtgggtagaggagaggagaaattccgagcgtgactgtgactcagaattggtggtgcaacaaggtgccggagtttacaagtgctttgatgggtcactaaatagacatattgctagaggtgagaattttagaggaaatggtctagctcaacaagcgtctggctataatgtaaagaaaggagtgtttctgatattggaaaagccggtgcttggttgtaaatcattggacgaaattggcaaagtttcagaccaggggcggctaattaatggacaagccgagtcgagtaataagacattgttgaaattagtcaaaaagaagattgaggaacacccaaagaagtggcatgaggtgctttctgaggcattatgggcacataggatatctaaacatggtgctactaaagtcactccttttatgtttgtttatggacaagaagctattttgccggttgaggtaaatcttggctctcttcggtatatcaagcaaggcgatttgtcggttgaagactacaagaccttgatgggagttaatcttgacgacgtcatcgacaagcgtttgaaggctttggaagaaatagaaaaagaaaagaagagggtggctaaggcgtacaacaaaagggtaaaagcaaagttgtttcaagtgggagacttggtttggaagacaattttgcctttgggttctcgatctaaggagttcggtaagtggtctcctagttgggaaggtccttatcgagtatgcgggatagttcgaggaaatgtgtattttttggagacacttcaaggagagcattttcagagagcaatcaatgggaaatacttctcgagtgtttggcaagatgcttag

SEQ ID NO: 49925 - DNA, 707 bp, Oryza sativa
  unsure (1)..(707): unsure at all n locations
  Clone ID: PAT_MRT4530_52462C.1
cacgcttacgtcagctcggaattcggctcgagctcgagccgaatcggctcgaggcagnagcgtttccgcatctcttacagcganagcgccgccccgcaccggggcgatagcggacgcgacggccgctccttcaatcctccccgcagcagaggtcattgtcgcggcaaggggccgctccgctccggcgcgatacttagatttgcattagcatcaaatgaatgcgtacaggagtgatttacatattgcatatttaacctacttttctgtgtattcaactaataatcattgtcacatttcattgcaggaattttgggccagggttggtagtcctagcaggactgtctacagcataagcttttgtccgaagccttttcgtgttaattttggttggttgttgattaaattgtcctggctccatatgtatctcatgaaattttctgatgatttttttctgctcgctaatatcatccgttcttgaccttgttatagattatttttttccgggtttgttcttttacattgttgtcttgcttgcttaacaatttgcacgtgtaatgagttgttgagtttctggtttaggtgtttaacatgttaacatagataagctggggcaataaggggctgtacaggattcaagctttgaatctgatatgttccctcagcaactttaggtagtgaatatgagcgtctggaattatatccagcga

SEQ ID NO: 49926 - DNA, 1020 bp, Oryza sativa
  Clone ID: PAT_MRT4530_52463C.1
atggcgcgcgccgtcgtcctgctcctgctggcggtggcggcgttgagctgcactagtgcggcggcgtcggggccgagctgccacgccgacgacagcgccgctctgctggccgtgaaggcggccttcaacaacgcctccttcgagtactggacgcccgaattcccctgctgcgactggtacggcgtcgactgcggcgacgactacctcccctccgacgaccgcgtcatcaacctcgccatcacacgcgacgacaacatcaccggcaccatccccggcgacgccatcgccggcctcacccgcctccggtacatcaccttcttcaaggtcccaggcatcacgggccccatccccgccgcgctcgccaacatctccggcctcagggtgctcaccatctcccacaccgccgtctccggccccatcccgtccttcatcggcgacaagttcaccgacctcggaatcctcgatctctccttcaactcgctcaccggcgccatcccggcgagcctcgccaagcccccgaagctgaactccatcgacctcagccgcaaccgcctcaccgggagcatcccgcggctgctgctgagcaaggccgggcagcaagcgttcctgacgatgtcccacaacaacctgacggggaggatcccggcggagttcggcgccgtcaacttcgtgcagatcgacctgtcgcgcaaccagctcaccggcgacgcgtcgatgctgttcgggtcggggaagaaggagctcgtcagcgcgtacctgtcgcgcaacgcgctgagcttcaacatgtcgcagctgcagctgccggaagagctgaatttcctggacgtgagccacaactccatctacggcagcatcccggcgcagatggccaacatgacggacatgcagctgctcaacgtcagctacaacaggctctgcggcgtggtgcccaccggcggcaacatgcccagcttcgatgcctactgcttccagcacaacaagtgcctctgcggcgcgccgctttctcactgcacccattga

SEQ ID NO: 49927 - DNA, 1585 bp, Oryza sativa
  Clone ID: PAT_MRT4530_52464C.1
ctaacacttgagctcctcatagaacacatccttgaacttggcaaggctctcggggtccatggccacgacgacgtcgagccggccgtcgccgtcgtctcggcctggcacgaggtagacgaggccgctgaactggaggcacgcacgccccatgaacgccggccgcccccagccgaagtcggcgtcgtagagcggcagcccctgccagctgatcacccacaggtcactctccggcatcacccactcccccttgcggagccccgccgcgccgccgctcgccgccgccgccgtctgctccaggtggtccagcagcgaccggacgtagccgtcgtcgagccgcgcggtggcggcggacaccttctccgcgacggcgccgagcggcccggcggcgacgatgtcgctcaccttggacaccgccgacgcgcggaagatggcgttgccgaggtagccgcgcgggagcggcgggtgcaggcgggtgcgcgcgtcggcggtcatgtacagcctcgtcgccgcctccgttccggcgacggcgagcccgcgcgccttgcacgcgcaccgccacacgtgcgcgaccaccgccgtaaaagtggacagcctcttgccggcgccggcgccggcgcccttgagcgcgttgagctggttcttggacatggggaggatggccgagtcgaacggcagctttgaaccgccgccgcggcgacgggagtactcggcgtggtcgaagcgcacggcgggaggggagcgcgcgcggaggagcgtgcggtcgagccacggccgctgcaccgccgccgccgccgcctcgccgtcgccggcgacgtccctcgcaatggcggcccacgtgttgacgaagtccagcgccgcgaggccgtccgccgccgtgtgatggatcgccgcgcccaggcacacccctccacacctaaagaacgtcacctggaacatggccaagatgctggcagcggcgacatcggccgccgggacaagcatccgccggagctcgtccgacggggcgaggtcgcccaggtcgtcaatggtggcgccactccgcgccgtgacgaagagcacgccctcgccggtgcagctgatctccggcctgccggcgctgtcctgagcgaggcggccggcgagggggtagaaggggacgagcaccttggacagggcggccttgaggacgtccggcgagaaaaacgccgcgtcggagtcggagccagttcgccggtagacgtagacggtgggggtgtggctcctggccaccagaaggtcgaggttggagagccatatcctgtgctccggtgtcgcctcgccggccgtcaccatggaggactcgaccatctccactgccatggatgcgagaagatgcttttctctactactccactttacctgtcatgtgttttgcaaaatgcgaaatgcaagaacatgcaggcctgtttggttgctatcctgagagaaattggcctgacctgagataagcctggatattgcacgtagttgtttggttgctaccctgatgcacatcctctctcgcctggcctgatattttccggcgtgggattagcactgagtcaggccaccaaaaatcctgcagccc

SEQ ID NO: 49928 - DNA, 414 bp, Oryza sativa
  Clone ID: PAT_MRT4530_52465C.1
tgaggagcgcctctgggggagcttgcgttaaaccgctaaaagcaaaggatcgcgcattttttttaaccagtgctaccccgattaaataaaacaacatggcagtgttgctcagcagccgatagcgcagtcccagccaaataattcggggttccctaggataggtcatcaggcaaaaagcggcgctcgccaccacttccagggccacataaagactcataaaatccggacaaagaaaaggggaattaaggctagcgtggagaatgatcagtcgggcataacataaggctgagcggccggaattccagcaatagaccaacaccgcccatgtgaccatggcattgctccataagtactaagaggaccgggcatacagtggagaaacaacgcccaaactgactgagaaacaccaacact

SEQ ID NO: 49929 - DNA, 867 bp, Oryza sativa
  Clone ID: PAT_MRT4530_52466C.1
atgctggcctcgacggtgctcaggaatggatgtccaagaatgatgctggcctcgacggtgctcaggaatggacatccaagaatgaaagttcagcttgtcaaggacgtccttaggcatgatgttgacactggctccaaggtcgtagaggacctggtcgaagtgttgtgtcccaatcgagcatcccatgttggagaccatcttctcaatcagctcgactactcctctgaccgtattggagaaaaaggcccctccagcagcattgtccaaatggtcgcgggacgcagcaagttgaaaccagacatacactaccctattttcacacgaaaagtgaaaaaaaccaagtgggaggggaagcggcgaggtggcgggaggggaagcggcgtggcagcggtgccctcccctctgccagatctggcgggaggggaggtagaggcaacggcccggcggcagctcggtagcggtggtctgacggcccgggaggtggtgccgtcctctccatctaatgatggcggcggcggtggagacgtaccaatgcagtcaatccagatggtaaagttgactaccacagcaaaagttttcacaaatgaagtggacatcaaggagggggaaggaggcgtcgcgcgctctcctcggccctcgcagacggatctggcgccgccggtgccaggggctgccagatctgaagtgtccgagctgtgccacatactcggtaggttcacgcccgccctcccgaacagacgtaagacgaagggagaggggatccggccaaagccggacgatgaggggcgcgggggatggtgctcatcacctgacaagggcaagagaggtggcggtgcttcttcgttacgtcggggcgaggaggcgtag

SEQ ID NO: 49930 - DNA, 277 bp, Oryza sativa
  Clone ID: PAT_MRT4530_52467C.1
ggcgaattcgagctcggtacccgtcgccgcggcgcagcccggcgaggccgtgaacgtcagcgagcggatcacggcgctcatctccgactcggcggtgcgcaccatcatgggcgacaggttcgagaagcgggacgaattcctggagggtctcgccgagggggacaggatcactccgggttcagcctcggcgacctgttcccgttcgtcgaggctggccagcttcgtcggcggcacgacgcggcgggcggaggcgaaccaccgcaagaattcgggctga

SEQ ID NO: 49931 - DNA, 869 bp, Oryza sativa
  Clone ID: PAT_MRT4530_52468C.1
aataataatcaaaaacacctttgattttacagatggcatgcctcttgtctcacggcacttgaggaagctagatttatctagtctagaattaaaggagtgtttccttaacttctcgagctgccctgcattgaaatggctatctttctctgatcattgctgctttgattctgtaaagaagatcgtgttccaatcaatagaatatctttgcttctacttctgccagttcagtgagtatcaccacactcacatttatgcaccaagcctcgttggactccatcttgaaggtttctagggcaggacaccttttctggaaagcatgccatcattagttgcagcaattgttacacctcaccagaattgtgatgatcgttgtagtaatacttactctggttattgtgaggatgaaaactgtcatggttgtcatggtatgctaggtgagactggcaatgatagtgccaatgtgtgctcctgggaggattatcaaaagctaagagtttgaagttggtagctggacctgaaatgcgaattttcagaagtggtttaagatggtgccctttgtttagcaagttgaagactttgatacccaatgagtggtgtgttgccactgatttgtggcctctagcttgtattctcaaacaatgtccagttctaaataagctcactcttcgaaattccaagaaagctaaatgtatgatagaaacataatgcattggtgaaatcagctgcaatatctgaacacctcaagttgtgaaaatcgtctgtaaagaagctgatgatggggtttacaaaattgtgaagtgctttagtacatggaagttattatcaaaaggaggaatcagtcgccaaaacgtaaactattgaacctcttc

SEQ ID NO: 49932 - DNA, 1701 bp, Oryza sativa
  Clone ID: PAT_MRT4530_52469C.1
cgtcccccgcgcgcctccattccgcgcgcggggccggcctcgtcggccgcgcggggggggggttgctgctgctgctgctgctgggcggcggcagaagctagtggcggtgggtgtgggatgcccaccgcgacgccgacccgctctcgcctcctcttccccgcgttgcggccgcggccggtggtggttaaagcggacgggggaagcctcgccgccgccggtgactgactggctgactgaccgactgcgccgccgcggtgcggtgggaccacgcgcgacgccatggacgccgcctcccgccccgccgtcgtcatcgacaacggcaccgggtacacgaagatggggttcgccgggaacgtggagccctgcttcatcacccccaccgtcgtcgccgtcaacgacaccttcgccggccagaccagggccaacaccaccaaggggaactggatggcgcagcacagcgccggcgtcatggccgatctcgacttcttcatcggggaggacgccctggcccgctcccgctccagcaacacctacaacctcagctatccaattcacaatggccaggttgagaattgggacaccatggagaggttctggcagcagtgcattttcaattacctgcggtgtgatccggaggatcactattttctgctcaccgagagccccctgactcctcccgagacccgcgagtacaccggggagatcatgtttgagactttcaatgtgcctggtctgtacatagcgtgccagccggttcttgccctcgcagcaggatacaccaccacaaagtgtgaaatgacaggtgttgtagtcgatgtgggtgatggggctacccacattgttcctgttgctgatggttatgttataggaagcagcatcagatcaattccaattacaggcaaggatgttacccagtttattcagcaactcttaaagatgtcactgatcttacattactgtggatctatgcctttgagagtccaaatgtccatcataactgcacaaggaaatcaaagattcatgaaaataacagccacaaataatgaaagggataaaatgcatgaaatagaggaaagaggtgagcacattccaccagaagaatcttttgatgtggcaaggagagtgaaagaaatgtactgctatacatgttcagatattgtgaaggaatttaataagcatgacagagagcccaataagtacataaagcactggagtggcatcaaaccaaaaactggtgccaaatacacctgcgacattggatatgaacgcttcctagggcctgagattttcttccaccctgagatttacaacaatgacttcaccactcctttgcatgtagttattgacaagtgcatccaatcatccccaattgacacaagaagggctctttataagaatattgtcttgtccgggggatcaactatgtttaaggatttccacaggaggctgcagcgggacctaaaaaagatagtggatgcacgagtccttgcatctaatgctcgacttggtggagatgcaaaggcccaacctatagaagtaaatgtagttagccatcctattcaaagatatgctgtctggtttggtggttctgtgcttgcctctaccgctgaattctacgaggcttgccacacaaaagcagagtatgaagagtatggcgcaagcatctgccggacgaatcctgttttcaaagggatgtactaa

SEQ ID NO: 49933 - DNA, 549 bp, Oryza sativa
  Clone ID: PAT_MRT4530_5246C.1
ctttatttttttttttttcttttttttttttcctgaacgaggacgcaactgttaatgctaaatctgctgtgcctgacactgcatactcactcgccggacagaaatatcatactcctactgccaaaaagaaaaaaggaaaagaggatcaccatcttcattgtaacgagcctcactatataatatgatccaaagtgtcattcatgaccaaataaatattttcgcctattacattggcatccattcattcacacacaaaaagaagaaaaacacaatggctgaccccaagtttccttctcctgaaactgtgaacataacattggtgtgccttctcctccccttgttctcaccaaccacaagatccatcccttctgctgcatcgacgaccgacgaccgaacctatatcgccgatgagagggccgcacttctcgccataaaggccaccttcttcaacccgaacagccgccgtacatcatggaagggcgaggattgtctcatctgaaggggagctacgtgcaccaacacaaccggccatgtcatcaagctgacact

SEQ ID NO: 49934 - DNA, 1941 bp, Oryza sativa
  Clone ID: PAT_MRT4530_52470C.1
atggcgggcggtggatccgacagcgccgtcctcgaggggcaacgacgagctcaaagaggatgggaagctagagttttggccgaaattgtttttgtggaacttttatttgttttctccaaaatcattttcgcagcggttggcataggtgaccacgtgaacatcatgctcaacatctccaagtgcatcagctccttcaggtctagtggcgccatctataagcaatgtgctctttgcgctaacctgtgcggtgggccggtggcgcattctcttgaacacctggtggccctcgtggtgtggtggtggaagaagagggcgatgacgaagcagacggacaggacgggacatcccagtagcgatccattgattgccgactgcaatatctgcttgaaaagtgcaacatctggaaccttggataccatctcaccttcctctccgcccccctcatcctcacccccttacaacctcatgccccattccggcgaggtccaagtggtggcggttatcacggattgggatgtgcgggaccgcctgaggtgggggagaaggacagcgaggggtggaagtctcgccgcagctggtggcggcgccgccgcaggccctccagggcggcatgcgcttcagccttcaggcagggcgtgcaccatgcaggagagggagatcgttccgagctcgccaggaggatggccgggagagatccccgcccttgtgcagacgctgccgcctctgacccgccgctgcacatcttcaatcgccggccgggtcgccgggaaagcagccggaggcgggacatggccgcggccccgtctggccacggcgctgctccagctgaagcggtcgttcaccgtgaacaccgcgtcggccaccgccttccggtcatggcgcgctggcaccgactgctgccactgggcgggcgtccgctgcgacgacgacgacaacgacgccgccgcgagcgggagcaccggccgccgcgccacttccctcgatctcggcggccgcggcctgcagagcggcggccttgacgctgccgtcttcagcctcacgtcgctggggtatctcaacctcggcggcaacgacttcaacgcgtcacggctcccggccgtcgggttcgagcggctcaccgagctgacccatctcaacatctccccacccagcttcacaggccagataccggcaggagtctgccagtctgcttccccttatcgcgccgccaccactcctcatcccgtccctcgcgcgattccccgccaccaccccaccgcacctttgcccgcctcgccgactggccggaaagagtcaacggcgccggcgaggacccctgagaagagagcacacggctacggcgaacgtgacgcgctctgcctccgcctccaccaccgaccgcccgaactcgccgcctccatcgccgagaagggaaggggaaaaattgccggcttccccgacgacctctgcctcgccggcccgcatggcgtgttttgtgacgacgacgacgatgatggcaacgcgtcccatgttgtcagcatctcgctcggctacgtctctgacttctctgccaacccgagctgcgcgggcgccctccgcctccgtcaccgccacactcctcacgacctcgtgctcgtcaataaccccacgctctccggccgcctcgccatctccaccgctagcctcccgctcctccgccgaacgcggaggcggagggcggagctgggaggcgagtggcggggcggtcagaccggccacatagtggcggagttgcccggtgacctctccgagaagattgtggaggaggcccggcaccggtttgtgagtggtttggagttcaccaccttcggagtgaaggaagaactaccccgagtgatcgaggcttggatagtcctctccgtgggtcggctcccgccttgcccaccccttgacgaagggggcgtgcggtggcttcgtggttga

SEQ ID NO: 49935 - DNA, 222 bp, Oryza sativa
  Clone ID: PAT_MRT4530_52471C.1
atgacgatgaccacgacgccgccagctcccctcaaccgcgacgacgacgacgacgactgccgccaacacgacgactaccgggaccacgacgcgacgacgtcgccaatgcttgtggggacggcagcggacggaggaggagagccatcattggccggagggagaggctggcggtggcgggtgaatctaccgcttgtgaatatatcgtccgcctggaaaaattga

SEQ ID NO: 49936 - DNA, 378 bp, Oryza sativa
  Clone ID: PAT_MRT4530_52472C.1
atgcagcggaaaatgtttctcaaggaaaagagggcctccgcgtcgctctcgcgcgggcggcttgggggcgaaaccctagccacccgcgccgccacccctgcccaccctcgccacctcgccgccgccggagctcgccgccggaaagccgcgctgccagccgggaaggcggcggcggggccaagagaaccggcaaagctcttcctcggcgcgggaggacggagcggcgcgcgacggtggggggctccggcggccggcgacggcaagggcgcggcggatccggcgaggggacacggcgatgcgcagacggcggtggaggatggccatgggagggaggtgatggcgacggtggcgatggagcggcgcgtcgtcttcggctag

SEQ ID NO: 49937 - DNA, 834 bp, Oryza sativa
  Clone ID: PAT_MRT4530_52473C.1
ttatacgttgatcagagggagaggaatgaacaagccgatgttcctattgttcacgtcctggaggggcctcgcattcttctcattaccattaaccacagctgccttgagaagtgcaagctgagacagcgacacagtatgcaccttcctgacaatggtccagataactccctcggtgcaaggtggtgtggttaaggagcccatgtagcggtaatacacgatatcatgctctttggccacgtttggatccaccccaccattgacaatcttctccttatctttttggtctgcaacttcaataatatatggctccaacttgtgcaggaactcatcctgggcgccgatggcgtagaggatgccgacgacggcggtctggttctgggtgttgagatgcaccatgtgcagctccatgtcgtacctccggccatcgacggcgtgctccgacggcgcgtgccagtgcacctgccggagccggtacgccgtgccgttaatcaccagcccgccggcggcggcggcgtcatcgccgccgtcgaacctgaccatgatgtcgtggccacggttgacgacggtggcgttggcgtttcggtaggtgtagttgaggtcgccgaggccgggggccagggtgaggtcgaggaggccgaggttgatcggcgactgcatctcgccgctgctgcaggtggcccattccggcttcaggctgccccagttctccggccccctcggtgtgccggggatgtagccgaactgatcgtcttcctcggctccggcggccggcgccaggagcaggagggtgacgacggcggtgacgacgacgacgaggaggcgtgcgcgatgcat

SEQ ID NO: 49938 - DNA, 428 bp, Oryza sativa
  Clone ID: PAT_MRT4530_52474C.1
gaatggcccccccgccgccgccgtcgtcgttccagctatagctttccccgccggcggtggcgatcgatcgatcctctcctcgtcggttgattagggtcaagaattcttccctctcccagcttggttgaatttcttggtttgatcaaggggaggaattaattgagaggtgaattagttcgccggagtttgtttctctctctctctcctcttctctgagctgagagggggaggagagaatcaagtgacgagttatagtatggcgaggagcggcggcggcaatggtgggggagaaggtggcggcggcggcggcaatggcggtggcggggagggttgaagaaggggcggtggacacagcgggaggacaagcggctgggtgggccacgttcggcgcaaaccgaggggaacactgacgccgtcggcgggaggac

SEQ ID NO: 49939 - DNA, 222 bp, Oryza sativa
  Clone ID: PAT_MRT4530_52475C.1
cccacgcgtgcgcaggaccggatggattaaaaattcaagcttgttgtaactagtcatcatgactaaaaatgaccatgcttgttgctatgagtatgagcagagcaacaaccgcccgtgggttaaatacggtttggcccatccatgggcctaaaactccatttctctctcaaaagacttttttctggaaataaattaaatcctagaattttactattacgaatg

SEQ ID NO: 49940 - DNA, 773 bp, Oryza sativa
  Clone ID: PAT_MRT4530_52476C.1
gggtcttactgaaactagaatgtttaacattgctttgttggctaaatggttggttaaggttgaatctcctgatggtagtctctgttttgagctattaagaaagaaatacttgtgttctgggggagtctttcagtgctctactgaaggtgcttctcagttttggtctgggattcttaatacaagaaaatgaatgatgcttggttctgaattgaatagaagattggtgatggttcccatatttggttctggctagatgtttggtatgggtcttgccctctgaaaacaagttttcatgagatttttgagatatgcaaccaacaatcaatcacaattctgagctgaaacagataggtataggtggtttatcttttaggagaacttttggccctctggaacttgaccaatggcagcaggttaggacaatcctagaagagctagagttgactgactctcctgatattttgaaatggggtttgacagctagtaagagatttactaccaactctttatacagagctatggcttttagatgggtgaaagatgagatgctacaactaatctggaaatctccctgtcccataaaaattaaacatttcctttggttggcaagtagagataggatccaatcttgtgaacaattgaaaaagaaaggttgggatggttcagaactttgtatgctatgcaatactattgaatctaccaatcacattggggatcctctagagtcgacctgcaggcatgcaagcttaagtacttctatagtgtcacctaaa

SEQ ID NO: 49941 - DNA, 2871 bp, Oryza sativa
  Clone ID: PAT_MRT4530_52477C.1
atggctggcggcgacgtccctgctcgtctccggaatcatcgcacggtggccgaggcaatgactgatagaagatggatccaggacatccagttcggcgttggagctatcgggcattcggagtgcttaccgatcaatgaacactcgttcctctcatggttgtgcgactgtcgcaagaggatggtcaaggaacatcgccggggtttcgacaccatcgcgacgttggttgcatggacgatctggaaggaaagaaacaatcgagtcttcaaccagaagagcagatcttgggcggaggttgtaagggttatgacgggtgaagcggagctgtggcggctagctagagctgcaatccctgctttggtagctcatatgatgcggcatgtctttgaccaaaatggtatcaaaggagcaattgctgcagtggcaaagttgcccgacaatgcagttcaagctgatgttgttagtactctgaagaggaaacttgatctcttcagtctagacattttcttaagctttctgcctgttcttgcggggttactgaccagcaaggctgaaaggcatgccattgtttctttggaattgttgttggatcttataaagatctttggaccagttattcgttcaacattgtcagctcattcagcagttggagttgatattcaggctgagcagaggcggggtggtcaatcagcacaacttgcccaagaactgaacctgtctttgcatgacttggtgccgctgccgccgccaccacccacgtcggcgccatggccgctgcctaggagctctgtcgccggcctctccagcgcccctgcgttatccctcttcccccgtcgacgtcccacaccgccgcctcccacgtcggcgtccaagtccgcccctctaggtcgacggcggaggggggcagggggcacggggggaggaggaggaggaggaggaggaggaggaggaggggtccgggtggtggttgggggccttgtcgtcccgccggcgacgagtgtccacgagctgctcgagtgccccgtctgcaccaactccatgtacccgcccatccaccagggttacggcttacgcctcgccgcctcctccccgggaaagcagattctagggctcactcttcccctcccagaaagcgaagatctacagcttgtctccccgtcggccgccgccggcccgccggatttccgtggtcgcggggcggaggggaacagtacaagaccatgtcttcaaggagaggaggtggtggccgccgtggtcgtggccgtggccgtgggagaagctgtggagcagttgaagttgcgacatcacaaacctttaaaatttcatgagagataccgtccttatttgagggatgctggccttcttgggctctcacaaatttgccagaagatgcctcaattggacaaggcattgatcactgcccttgttgagcgttggagaccagaaactcatagtttccacttggcttctggggagatggcagttacactacaagatgtagcaatgttgttagctcttcctatcgatggccgtccagtttgttctaccactgatcatgattatgcgcagatggtcattgattgtctaggtcatgatccaagaggaccatcaatgcctggaaaatcttttctgcactacaaatggctgaagaagcatttctatgaattaccagaaggagcagatgatcagactgtggagaggcatgttcgagcatatatcctgagccttttatgtggggtgctatttccagatggaacaggacggatgagtctgatatatcttccattgattgctgatctttctcgtgttgggacatacagctggggatctgcagtgctggccttcctataccgttctctttgttctgttgcttcctcccacaatatcaagaatattggtggttcattgcttctcttgcagctttggagctgggagcgctcccatgttggcagaccattggtccggtctcccctgtgcccagagacagacattccacaggatgtgccacctgttggctttcgttgggcgctgcatcgtattagtcgacgtggcagagaacatgagaactgggaagagacacatcatgagtacattcaggaatgggaagcccgccggcagcgcatatttccagagtcagagcagtatgacccatcgtcttatgaggagtacctgcattggtactcaggagttacacggcggtatcttgtaccatcaatcagtgatgatgtggaagcaggaccttcattacagcctgatgattccattgatcttcagtatcaagccaaggctcctatgatccgcaaagcagttgataaactgcatggtatggtaaagaaggccaagatggccatgacatccacagctgatacaaccacacaagccttggtctttgagtttctgcatggctttcaggatgttctccatgaccttggcgagatcaaggaaaatggtggttccgctactagtccacatgttgaatcagctgccgctcaagacatgcctctacttttgctagaagctgaacagaacattgttgatgccgatcaagaagctcagcatcaggaagaggaagagcttcacatggtggatgatgcaacaatgaccctcgagcctatggatgaggaggataatggtttcaacaatgtcatctgcccatgtccttcactggagttggaggaacacagtcactcagctacaccagccatcgatgacacgtcagctcaggcgctgttggagaattgtgaagtagcagaggcagtcaatgaaaatgtcgatccagccacccaagttactggctcatctaccccagaacagggcacggatgtcatagtagatgctgaacaagaaaacccagccacaacagaggacaactaa

SEQ ID NO: 49942 - DNA, 255 bp, Oryza sativa
  Clone ID: PAT_MRT4530_52478C.1
atgcatgcaaacatgaacaacggcaaaggggaagagagtgggagagacggggcggttgctgttgccaagcacgatggctctttggatccgctactaccgaggacggtcgccgagcaatgcagtctcctcccccttcgaccaaaagatctggtagagcgagagagcgtgagcaagatttgggagagggaagggagggggagtggacgagcagtggtaggagaggacccttcatcgtgccgctgccgttgcacctag

SEQ ID NO: 49943 - DNA, 327 bp, Oryza sativa
  Clone ID: PAT_MRT4530_52479C.1
atggagatccggcgggagggaagaccagtgcttgctcccgccgagcgtgttctcgactgcgcctcctccttcccacctcaaagaaatcagttcgatttaatctaccacagccgtgcgccgccgccgctccggtggtcgtcgtcgctcgggaaggccaccggtgggttcgccaagtcgtcgcggttcgccgcgtcgtccgctacccgaaggtgccctccgtttgcgccgtcgcgccgtcgttcgccggcgagcgtgcgtggccgagccgccgccggtggtgacatcatcgccgacgtcatcgtcgatgtccgctatagcccacggtag

SEQ ID NO: 49944 - DNA, 892 bp, Oryza sativa
  Clone ID: PAT_MRT4530_5247C.1
gggccccggcgccacatttggaccaccggaattattaggggaaatgaatgggtaaaaaaaatacagtttccagttccccaaccaaaaatcaaacatttttgtaagttaacacatacatgtttaagttaaacagcaaaatcatacatggattccacttccagttgtaacaaaacaaacatggtgtgaagtgtgcaatccgtcatgatattccgcaggtaattcttcgagtgaccgtcagctaaagctagctcccaagtcccagtccacctcctcttgcggctggccgctttggcttgactttcaaatcagcagaagcagattcgatttgcggaggtgcacttcagtatccacctttttgctttggggggcatccttttcaccaggcatgggaagtttgaaacgctcactccgtcttttgagcctctcaacagtgtctagatgtcgatcacgctcttcggcgttcttctcagatgtttggccattatcgccaccgctcttgagttctgaattgccagctgcagctgcttcagatttacctaactcatcagcagtaggagcttgaacatctgatttgatggaagaaaatgttggtgcattttcattatcgatactactatagtctatctctttgtggctcgtccaccgctccaacttagagcgaccccttcttgaatcctcatggttttcatcatctgacatgggatcttcttccgcttgtttcacaaatgattcacgttgtggattctggccctttttggaggacacagtatgatccctactattttcttgctcgctcactcctttcacatcgaccttcccaccacgatgactttcatggtctcggacgcgtgggcggacgcgtggacgaacgcgtgggcgaacgcgtgggcga

SEQ ID NO: 49945 - DNA, 601 bp, Oryza sativa
  Clone ID: PAT_MRT4530_52480C.1
tgagcacgaccatcaaaaccatgtgctcacaacccaccattatcaagttttatatgacgcaataaagaattatttttgaaaaggaaaaatgatttattgcgtcagcggctcgggtttacggtggaccgggtgcacggggacggtctacggaacggacgggcgagatcgcctcggtctaccgtgggctatagcggacatcgacgatgacgtcggcgatgatgtcaccaccggcggcggctcggccacgcacgctcgccggcgaacgacggcgcgacggcgcaaacggagggcaccttcgggtagcggacgacgcggcgaaccttaccgaggcacaaatggcggcggactgcaaccggacggcgacggcgacgaggtcgaagcagcggagacgatcgggtcgacgacgacggcggtgctccggcgatcttcggcggaagcggaggggtggaccaagaccgcgacgacttggcgaacccaccggtggccttcccgagcgacgacgaccaccggagcggcggcggcgcacggctggacttgcggcggcgacggcggcgcgcggcttgacgcggaggtggcgagctaaggcgagggtggcgctacg

SEQ ID NO: 49946 - DNA, 890 bp, Oryza sativa
  Clone ID: PAT_MRT4530_52481C.1
agattccgccgcgaaatcatccacccatggccgtcgacggcgagatgcctgccttggagtcccagttcaatcagtgcgccatcacggcggaggaggaggcggcggcgttgcccgattcgacggagccgccctgcaccaacgtcgccagccaagacgaggaatcgggttccgccgccggcgagtccgaatccgaatccgactccgacgatctcgacgaggtgatcgccgacatcctggaggggggtgacgacggcggctctgccgactactacacggggcctctactaccggagggcacgatgctgctgacgaagacgttggtcgacaagatcctggcgctgcggcggaggaggttccccatgccgccagccacgggcggcgagcgattgtggtgggtgtcgccggagttccgcgaggagttaattgccgccgagctcgcggcggcggcggtgttcgacgcgtcgcaggacaagttcgtggagtgccaggccatgatcgcggagaagcgccacccagagcacgggtacgccgtcgtcgaggaaaccagcgaggtgatgaccaccatttgcagggcgttcttcggcagatacaacgagagcgacgacgatgacgacgatgatctcttgtgtgactgcgttgatgcgaacgaatgtaaatgcggtggtgatgattgggcgaacgaattcattgatgaggaagatgatgattgcagtgaggatgtggatgaggaggaggaggagaaggatgaaagttgctgtcaaaggatgatatatcgtttgagatgataaaatattttccttctttgtttcggttctatgagttctagggaggattagaggcatatattttctcttatgttagttgactgtccaaaaaaaaaaaaaaaaaaa

SEQ ID NO: 49947 - DNA, 662 bp, Oryza sativa
  Clone ID: PAT_MRT4530_52482C.1
ccggccggggccggacgcgtggggtttagcgcatcgatctgcttaattagctgaaccttggattaaccattatttcgacgggccaaaaaccaagaaggcatagaaatccatctctatttcagcccaatataccatatggatatggatcgccacggagccctgaccaagctggggttcggagcactaacattcaactccgcgcttgcaatataccgatcgcggggagacccagccacggtcgcgttcgtggccggcgcgtacgcggccatcgttctgctcttctatttcctcctccggtttgagcgacgacgggatgacagggggaggaccaaggtcgtggtttgggtgctgacgaccctactgaccgcgatgtttgcagcgagggtggctccgcttatgccgccgctcgtcgccttcgttgtctgggtcatggcggctgggacgtcggttgctggattctgggctttttttctcaacctctgagatccaagagcgcactgtagatttgtttacggcacggcctttcttattgttagtggcttgcttatttaagttgcttgtaaccaaaataaatatagactttaggtgggaaaaataaaagaatcatcttgtacttttttgcgggccacaattatagccccccaacttgacgcgtcaccacc

SEQ ID NO: 49948 - DNA, 2178 bp, Oryza sativa
  Clone ID: PAT_MRT4530_52483C.1
atggagcagtggaatgccatagaatcgatatttgagaacaatggtagaggcagcagggtaatcgtgacgacggccatcctctcggtcgccaacagttgcacggcctacaagtccggagccaacggcggatgctgcatccgtcgccatggctgcgtctacaagatgcagactctcggagaagcgcacgccaaggagctcgccctcggcggcggcagcgatcagcgaccgccggagctggagcacggctcggcgacgcttatggcgaagtgcgacggcctcccgctcgccctcgtcagcgtcgccaaccacctgcggtgcctgggcaatctcacggggcggcactgcgccgacctcttcgcgaggctccgccgggttctgatggacagctacgcgggcctccctgactacgccgccaggacctgcctgctgtacctggccgtcttccccaacgacggccgccgcctcaagaggagcgtgctcgtccggcggtggctggccgaagggtacgcgcgcggcggcgaggacgtgcttggcaacagcaccgacgtggacgtcgccgacggccacttcaggtcgttcgtcgaccagagcatcatcgtcgcccaccctgccgacgacgacgacgacgacgaccaccgcacgaggaggtgcaggactcacggcatcgtgcacgagttcgtcctgcacaagtccatcgccgagagcttcatcttctcctcccgtgctcctccgaggcgcaagagatgcaccactgctctgagcgacgatcacctcgctgacatctgcaagctctggaacctaagatacctaagcatagggatgagcagcaatgtcaccatgctgccagacaatatccgaaggctgaaactcttggagacgatccatctcagcaagaccaaggtgacaatgctgccactacaagtcgtcggcctgccatgcctagctcacctggtcggaaagttcaagcttctcctcccagatcaacgtgggaagaagacggtggtgatcagcaacgagctcgagaagctcgcgaagaagagcaacctccagacgctcgccggcttcgtcgccgacgagagccagcaagcgtttccgcagctgatgaggcacatgaggaagctgatcaaggtcaagatatggtgcgagttcggaggagaagaatccgacagtgtctcgacgacggcgacggatcacctcgccgacgctatcaggagctacatcgaggcacccaaggttgaagagaccgacgcacgctcgctgtcaatcgacatggagcaatgctcgaagcagctgatcaggtcatgtcatggagagagtaagctcctgcactccctgaagcctccatgccgcagctacctcacctcgctgaagcttcatggcgacctgttccggctgcacgggctcatctccatgctcaagaacctctacgagctctgcctctcgtcgacgacgacgaccctgaccagggatctcgtatcagccatcggcggattgcctcttcttcttcgcctcaagctggtggcgaatcacatcgagcatttcgccataggagccggggagttcagaagcttgcaacacctgctcctcgtggtgcatcgtcagaatcccatcctgctgccaaagatcgaggagggagcactgcctcagctcgtctctctcgagctgctctgcaagcatctgcgcggcctctccgggatccagatcagacacctccagcgtctcaaggaggtcgcactcgattctcgagtgagcgagggcacgaagcgagagtgggaggcagaggccaggaggcatccgaacaggcccagcatcttgctcctgaagaacagttacagtactgtcctgcctgacgacactgacagattggatgatcagatggacggggagcttgctcgggagaaatctgcacctgatgatgatgctggcaaccaggagcagattgcggaggtggaatcagaaagcagtgcatttcaattggcgaattccactatgaataattcagtcgctggaaaggaatcaacagctgatgatgctgatgaagaaggattgggaagcactaatgcagtgcccatggagcagataaattctactggctccatcaatgagaccgaggtctccaatagagggaaattcacaatgtcatattttgaggactgctgtccctaccatgaggactag

SEQ ID NO: 49949 - DNA, 1692 bp, Oryza sativa
  Clone ID: PAT_MRT4530_52484C.1
atgtccttgccacgcctcgccgccttctactggccgcgcctccgcgccgccgaccgggacgacgtcagagccgccgggatgggccacggcctggacccggaggggatcacgatcaccccgctcatggacatggtgctcggcttcctctaccagtccatccccaggccgcccgtctccgcctccgcctccctctccgccgccgccgccaccggcgacggcggtggcgacgaccgcatcagcctcctccccgacgacatcctccgcgccgtcgtctcccgcctccccgccaaggacggcgcgcgcaccgccgtgctctcctcccgctggcgccgcctctggcgctccaccccgctcgtcctcgtcgacacccacctcctcccgcggcgggggggaggccgccccgcgcgcgcgggcgccgcctcgcgcgccgtcgccgacgccgtctcccgcgtcctggaggcgcacccggggcccttccccttcgtcagcctctcctgcagcttcatcggcgacgacgcgcagcgcggcgtggcggcgcggtggctcgacctcctcgccgccaagggcgtcgagcacctcgtcttcgtcaaccgcccctgcccgctccccggcgtgaccctccccgccgcgctcttcaactgctcctcactccgccgcctctacatcggctcatgggagctccccgacaccgcctccatccctctccctcgcgccgccgccgccgccgccttccccaacctgcgggagctcgtcctcgggtgcgtggtcatggttgacggcgacctcccctttctgctcgccgcgagccctgctctggagaccctcgccgtgttcgggatcctcaacacgctgcgggcgcgcctctccagcggcagcctacggtgcgcgcagttctgcttgtcgttcatggaggaagtggccgtgctggatgctccgcacctcgagcggctattcctctggagaaacatcaagaacaccagggtcaagattggccatgctcctcagcttcgtatgcttggttacctgcagccaggagtgcaccaactggagatcggtaacaccatcatcaaggcaagaacaattgtgaggccaggcaccactgtcccgagcgtcaatatgctggccttgcacctgcatttcggagttcggaatgaagtgaaaatgctgcccagcttcctcagatgctttcccaacgttgagacgctgtgtatcgaggtggagtcaaatcctcctttccctgcacttgttgtttcttccatcatcattactgcattgcatcagatcgttgcctctgtgcttcatagtgcattactatctgaagaagcacctggacgcactagcaacattgatgtcaacttctggcaggaggccggccccattgaatgtgtccagtcacaccttaagatgatgatcttacgggagttccaaggggaggaaagcgagctttccttcctcaagttcgtcggcgagaatgctcgagtgctggagaagatggtgattgtgatgaaacttggaaggtactctgcaccggaagaggtggcagccaaagtgatggatctgcaatctgctaaatgggcaagggaaggcaacaaactggggttcttgatcagtagacttcgtgcagggggtagcgcttggagcctccgagatggaactgatctgtcatgtgatgatccttttatgtgcctctga

SEQ ID NO: 49950 - DNA, 1152 bp, Oryza sativa
  Clone ID: PAT_MRT4530_52485C.1
atgtctactttatggtatctaattgttcttgacgacatcagcatggagcagtggaatgccatagaatcgatatttgagaacaatggtagaggcagcagggtaatcgtgacgacggccatcctctcggtcgccaacagttgcacggcctacaagtccggagccaacggcggatgctgcatccgtcgccatggctgcgtctacaagatgcagactctcggagaagcgcacgccaaggagctcgccctcggcggcggcagcgatcagcgaccgccggagctggagcacggctcggcgacgcttatggcgaagtgcgacggcctcccgctcgccctcgtcagcgtcgccaaccacctgcggtgcctgggcaatctcacggggcggcactgcgccgacctgtgccacctcctcggctccctcctgctcgacgagcgcaacgtcccgaggctcgccgggacggccgccgccgccgacagcttcgcgaggctccgccgggttctgatggacagctacgcgggcctccctgactacgccgccaggacctgcctgctgtacctggccgtcttccccaacgacggccgccgcctcaagaggagcgtgctcgtccggcggtggctggccgaagggtacgcgcgcggcggcgaggacgtgcttggcaacagcaccgacgtggacgtcgccgacggccacttcaggtcgttcgtcgaccagagcatcatcgtcgcccaccctgccgacgacgacgacgacgacgaccaccgcacgaggaggtgcaggactcacggcatcgtgcacgagttcgtcctgcacaagtccatcgccgagagcttcatcttctcctcccgtgctcctccgaggcgcaagagagtccgccacctctccatccaaggcggcggcgggaacaccacgacggcggcgctgagcacgacggacctgtcttgcgtccgctcgctgaccgtcttcggagatggcggcgacgccgtctccaacctccgaaagtgcaagctcctcagagtccttgacctcgagcagtgcaccactgctctgagcgacgatcacctcgctgacatctgcaagctctggaacctaagatacctaagcatagggatgagcagcaatgtcaccatgctgccagatgatgaactacttgcatag

SEQ ID NO: 49951 - DNA, 439 bp, Oryza sativa
  Clone ID: PAT_MRT4530_52486C.1
tcgagcaatccacatcaaagcttacaccgattatgcattggacatgaaccttaataaaaaatcacattacgaccggatcaacaagatcattccaccatgagaatttgcaataaagctttgcggtgccaatgggaaagcatcttgcatggcagcatacatggtctggaattctattgtcagctccatcatgaatcttgttgggacatagaattactatgacgataggaaggaatgctacaggaaactctgctatgatttctcaagctaggagaacttgattggagattgagcagacatagtagcaattggaggtgacgatcttgaatgtgtcatatgcaccactactgcagatcaagcaacgctgacagactggatgagaaacttggtatttggcataccagctctacttgcagatagtatcaatgtgcatatatgtgct

SEQ ID NO: 49952 - DNA, 370 bp, Oryza sativa
  Clone ID: PAT_MRT4530_52487C.1
tcggtcattccagagcaagaagctgagcttctacttctttcgtatgggaaacatgggcaccaccgggtccaggcttcttaagaacttctttggttgggtgggccttcccggcggcggccggaaacccaacgttttcgtggggccgggcaacggaggagccatttggaaattcatttggggtggggtcgtccaattcccccttcgaacttaacggcattaaggtcaagcccattaaggggttcattgggtcttccgagatgacccggggggtcctgaacgacatggacaacttaccccaccacgaactcgtcgtcgtcggggccgggttcgggggggttttctgggcgtacgaacttttcaagggaccctt

SEQ ID NO: 49953 - DNA, 258 bp, Oryza sativa
  Clone ID: PAT_MRT4530_52488C.1
ttgagatagaggaaatagtatgatcatgtactccttgaattttgggaccgagtcagtttgccaaaggggtaacattccttagtgccagcgatgcaacctctgtgctttttgggacaattttttggcaagtcttgccagcgattggattgatgtttttgcacgatactattttgtaaggattggagttggtactgcgcctcttacgctcttaacagaagacttgccccctctgtggctccgtataaaaaaaaaaaaaaa

SEQ ID NO: 49954 - DNA, 121 bp, Oryza sativa
  Clone ID: PAT_MRT4530_52489C.1
ctccaggacatgtggagctggaacccacaaattggtcagcccacaattgctgaggccggcccaacatatcggcacagttcacgggaatctggctcaggcccagatcgtcgttactgggctg

SEQ ID NO: 49955 - DNA, 1946 bp, Oryza sativa
  Clone ID: PAT_MRT4530_5248C.1
aagccatgctacctgctgtgaagctctctcctggccctgtggccttcgctggcaccaatctacgaccactctaccttgcaccactagatggcccaagagctgctgggcaaaaggctcagaggcagccacttgagttcaggtgtgctgcttccgcagccgatgacaaggagtctaagaccgaggtggtgcccgtccgctcggaagctgcccagaagctgaagatctccatctatttcgcgacatggtgggcgcttaatgtgatctttaacatctacaacaagaaggttctcaatgctttcccatacccctggctcacttctacgctctcccttgcctgcggctctgcgatgatgcttgtctcatgggccactcgccttgttgaggcccccaagactgacctagatttctggaaagttcttttcccggttgctgtggctcatacaattgggcatgttgctgcgacagtgagattcatgggtgccatgatatcaaaccttgcatttgttttccgcaacatcttctcaaagaggggcatgaaggggaaatctgtcagtggcatgaattactatgcctgcctgtcgataatgtcccttgtcatactcacaccattcgctatcgctatggagggccctcaaatgtgggctgctggttggcaaaaggctcttgcggaagttggtcccaatgttgtctggtgggttgctgcacagagcgttttctaccacttatacaaccaggtgtcttacatgtctctggatgagatttctccattgacatttagcattggcaatacgatgaagcgtatatctgtgattgtttcgtcaatcattatcttccacacacctgtccgccctgtcaatgcactaggagctgccattgccatccttggcacattcctgcaaagcagtgagttcaaaaagatggtaatgttcagggccatggatgaagaagggatccagatgaagaatgtctctgccaaaccagtagcaagcactgaggccaattttgcttgtgcaacttatcttacattgccaagaactcgggaagcaaagcgtagagcgatcgagctcgccatgtacgccatgacgccgcgctgccatctcccgccgccgtgccgcgcggcctccacgacgccggcgacgtcgacggcgctgagcacgccgccgccgtcacgcgccggcccggacgagctgcgctccacgtgggcgcaccgcgcgtggacgcttgccggctcggccgccgtgctctcctccctctccacctccgccaccctcgctgccgccgacgccgacgccaacggcgcggcggccgccttcgccgcgccgctcgccgccgcgctggccgcctactccctcgccgacctcgccacgggcgtctaccactggctcgtcgacaactacggcgacgccgacaccccggtgctcggcccccagatcgccgcgttccagggccaccaccgccacccctccaccatcacgcggcgggagccgtgcaacaacctgcacgccctggcgcgcgccgtcgcgctcgccctcccgcccgccggcgccgccctcgccgccgcgggcgcgcccgcgtccgcgcacgccttcgccgccgtgttcgcggcgtgcgtggtgctgagccagcagttccacgcgtgggcgcacggcaacccgcgacggctgccccccggcgtcggggcgatgcagcgcgccggcgtgctcgtgtcgcgcgcccagcacggcgcgcaccaccgcgcgccgtacgacaacaactactgcatcgtcagcggaatgtggaacgcgacgctggacaggcaccgcgtgttcgaggcgatggagatggtcgtcttcctccgcaccggcgtccgcccgcgctcgtgggacgagccggacgccgcctggacggaggactacgacgacaccgccgccgtcgccggcggtgacacttcgttggatacacagtga

SEQ ID NO: 49956 - DNA, 101 bp, Oryza sativa
  Clone ID: PAT_MRT4530_52490C.1
atggtccagctaaaccattcagtgcagctgcaaaagaaagataaggatctgacagagcacttccaacctgtaattgaatatcacaagtatgggatgaagag

SEQ ID NO: 49957 - DNA, 404 bp, Oryza sativa
  Clone ID: PAT_MRT4530_52491C.1
ggggaaagcgagatgttttcttcctcaattttcatgacaaagttttacaagaaaattcagaggctgtgcttatgtggacaggcccaccggacaccaaatttacaactttgatcttatagtctatatatcacactggcacccttaattataccctactaatccacttattggtctggagacatggattaaattaccaaggggaaaaaaaaagaaaattaaaccagcaaaaaaaaaaaaaggcccagaggaagctaagctagccacaccaagctcctccaatggcgccacacgcgtttgaacttttaacaccattacctgcaaaccattcttgccgtacccccccccggtcgcctggcccgccgtcagtacaaggggcaggtgagccggggcgtggcgacggcgga

SEQ ID NO: 49958 - DNA, 2193 bp, Oryza sativa
  Clone ID: PAT_MRT4530_52492C.1
atggaggcggcggacctggtgaagaaaatacgggagctggaggagggccaggccgagctcaagcgggagatatccaggatcgtgccggagcgcggctatgcgcggcggccgcctactctgtccgcgcagcataggcgcaccgagctcccgcatgcggaggcggcggcaccgttgtctctgatcctgcagcgcatatttctatttttacttcaacccaggaaccggtacgcggagcatctgtacggctattctgttcctgaagcagttggtcagaatgcccttgaattaattgttcatcctagtgactatggtgcagcaaacgacatcatacagaatatattcatggggaagtgttggagagggaaatttccagttaaacacaagtcaggggagcgtttcaacatcgtcgccagtaacacgcctttgtatgatgatgatggtagcttggtaggcctcatctgtctctcaactgatacgcggacattggaggagatacttggccattcaacctcagggaaagtgtatccgagttcagcaaagccgcgcgttcaactcaatgggtccaaaagtggtttgctaaacaaagtttcttgtgactcccagcaacctcttcaatctgctatcacctccaggataacaaatttggctaccagggttacaaatagagttcgctctcgggtcaagacgggtcagaattgcgatgatcagttcggtggtgcctgtgagagccattattctgaacatgatgccagagaagagcagacatctagtgaaggaagcaccccaagtggggatgttcttcatggggcctttgttagtgaagacaattactctgggaagtcaagcaaaacaaacagtgatgactcaggagaaggaaaactggggcttcacaaaattcttagctcaacagcagaggcactgtgggccaacaggggaattccatggccttggagaggtcatggaaatgatgatgctgggaagaatcgaacgaacttgccacagttccatgaaattcaagagaatggacagagccataaggaagttccagagccaatcatactaccagactgccaagatactgaatttgtccaggaagtcaaatatgaggtttcaggttcctggtggtctttcaatgccagcacaagtagtatgagcagtactggaagcactaatagcagtgctatcgagagagcagatcgtgaagcagactgcctggattttgaaattctgtgggaagacctggcaattggagaacaagttggtcaaggttcttgtggaacagtgtatcatgctctgtggtatggttcggatgtggcagttaaagtattctccaaatatgaatactcagaagacatgatactcaccttcaggcaagaggtagcattgatgaagaaactacgccaccccaatgtgatactcttcatgggtgcagttgcgtctctccaacgactttgcattgttacggagtttctgccacgagggagtttgtttcgcttacttcaaaagaatgctggcaagctggatccaagacggcgagttcacatggctatagacattgcaagaggcatgaattatctccacaattccagcccacctattgtccatcgtgatttaaaatcatcaaaccttttggtcgataagaactggactgttaaggttgcggactttggtctttcacgtctcaaactcgaaacatttctgacaacaaaaactggaaaaggaacaccacaatggatggctccagaggtattacgtaatgaaccttcaaatgaaaactacggagttatcctatgggaaattgctactcagaagataccatgggataatctcaatacaatgcaggttgttggagcagtggggttcatggaccacaggttggacattccaagcgatgttgatcctcattgggcgtcgatgatcgagagttgctgggacaggtgcacatactatatatattttttcgacatttcaacatactacttctttgcaaattccgaagaaacaactgttctcaatgtaaaacaactgatcctagtattcaacaaacctatcctttctgcgagcagtgacccgcagcgtcgcccttcgttccaagaactgctagatcagctccgagatctgcagaagcaatacaacttgcaggctcaactgcagcgaactgcagctgccaagatgagtgttgacgattgctaa

SEQ ID NO: 49959 - DNA, 477 bp, Oryza sativa
  Clone ID: PAT_MRT4530_52493C.1
tgctggacattggaggagatacttggccattcaacctttgggaaagtgtatctgagttcagcaaagccgcgcgttcaactcaatgggtccaaaagtggtttgctaaacaaagtttcttgtgactcccagcaacctcttcaatctgctatcacctccaggataacaaatttggtaagtcatacctctgagcaaacaaaagaattgactataatagaaagtctcttctggtatttcttcatgatttattttgtagtgtatactttgatttttagagtaacaaacacaggctaccagggttacaaatagagttcgctctcgggtcaagacgggtcagaattgcgatgatcagttcggtggtgcctgtgagagccattattctgaacatgatgccagagaagagcagacatctagtgaaggaagcaccccaagtggggatgttctttatggggccttttgtagcgaagacaattactctgg

SEQ ID NO: 49960 - DNA, 402 bp, Oryza sativa
  Clone ID: PAT_MRT4530_52494C.1
atgacggcggatccgctggcgtcgggtgccggatctgccctccccaccgccaccgccgccgctggcccaagtggaggaggaataaggactaaaggagcaccggaggcagattcggtgggcgtccctcgacccgccgcctccgtcaccacaacgaagaaggggatgaaggtggcggcggagtggatggaatttgggctagggcttggaggaagaggtccctgcgacctggacaggggtggcatcgacggccggcggccatatttgggtttgccggtggcgaacgctgatggacggtgcggatgccgcagttctgtacccgggagcctggcggccacgctcctgcaccccttctcgcctccgcggctctgcccacgataccgtgccaacgcggaccgcctctag

SEQ ID NO: 49961 - DNA, 474 bp, Oryza sativa
  Clone ID: PAT_MRT4530_52495C.1
atgggaggctctgagaaggacgatggtgtgccacgtttcgcctcgctgcttgctgtggagtgtggaaagaaggatccatcgacaagagcaactcctgaagtgtttgcagcgaccagaaaccaagatcaccaatattcgcaaaggaatgcgggaattgttaagggagtctaccacaaggctccaccattgttccaccgagtcgtagtcactccatttgctcatttggaggaaattaagacagacatatcaaatctatcaaatgacaacaaaattatagtctatagtacatatgaacgggaggcatttggaattgcttgcaagatgatgagattgagcctagttctgcccaagaatgtgatgcggcatgctattgctagctggaaaatactcgatgaaactaataatgttcataggtatatatcaaacatattagagattatatcaaagtttgtgccgttaaatagtctggtatag

SEQ ID NO: 49962 - DNA, 655 bp, Oryza sativa
  Clone ID: PAT_MRT4530_52496C.1
aaaaatatcttccgcccttgcacccctcccccccatcccgctcacgagttcctcacttcctcctccgcccgcgtcgcccctcctctcctctccctcccggctcccggctaccgccgccgccgccccgaggtgagagaacctttccttccgctctccggcattcgtttcgatcagaacgaacgggggatttgcctcgtcggaatccgtgggggatctcgcgcggccgacgggccggggttgcggttttggatgctgcttctagcggtagcatcgtaggtttctggatgcgttgtggattaggggggtaaggattttggctggtctcgctttgcttgcctgcgtctttgcgggtgtgatttccgtatgatacggttgatgcttgatagatcgtgcgcgcgtggtgaaggcctctgttgctaccgtggttatctagttctcgatcgtattggtacatggggggcctctttgattctggacgctagtttttccacatgggtatatgctctatgctcttgttcggtgcagtgcacacggggggacaccccgggaaaccctagcgactcttgccccggcggcggcggcggcggccgcaaaggggaaaatgatctacgacgtgagctcccttctcttccggtccttcctcagcagaaggggg

SEQ ID NO: 49963 - DNA, 1432 bp, Oryza sativa
  Clone ID: PAT_MRT4530_52497C.1
ggccagggtgacacaactgaacaagttggaggacctaaacaagccaatttgtcggacagtaacagatgccgtccacgtgctggatgcgattgttggctacgacagccgtgacgcaaaagccacacgggcagcatcaaagtacatcccaccgggtggatataggcagtttttgaagcctgatggattaaaaggcaagagaataggcatcccaaatggatttttcaacttcccaaatgggacagtgcaacagattgtttaccagcaacttctcgacacagtgaggaaacaaggagcggttgtgattgagaacctagacatagcaaacttggctgttatacaagatgtccttaacaatggggaacagattgtgttagcagcagagttcaagtcaagccttaacacttatctgtcagacttatcctactccccagttcgttcacttgcagatataattgctttcaacaacgcacatccgattgaggagaggctaaagaattttgggcagctcatcttcctggtagctgagaatactactggcatcggtgcactcgagggagctgtgatccgtcaactaaacgagctttcagctgacggactggagaagctgatgcaggatgagcagcttgatgcaattatcactcccaatgacctagtttccactgttctcgccattggcggcatgccggcaatcaccgtaccagctggatacggtaagatgggagtccccttcggaatttgctttggtggattgaagggctatgagccgaggctaattgagatggcttatgcatttgagcaagctaccaaggtcagaaaggcccctaatgaaaacttagtggattgtgaaaaaaatattggagggagaggtatccctccaaacattgtctccggactcagccacatatatggcctgggagagagaggaaacctgaagcagacttctagagcccctgctcaaaacttggcggcgattcgggaccaagcccgctgccgcccgcccaccgccacctaccgcctcctatctcctcccctcccgccagatccagcggaggagagggcgccgctgcctgctgaatcccgtcccgccgtctcctcgtgcgctgccgtcacccaccacctcctcgtgcgccgctcgccggcttccttgctcactccgcctgctcgccagcttcctcgctctgctgcccgctcgcgcggtgagatagatggatggatgtggccgaggggaaatgctttcagatggatggatggatggatggatacagcaagagggaagagaaagagagagagaggagagagagaaatgctttcagatggatggatggatggatggatggatacagcaagagggaagagaaagagagagaggagagaggaggaaagggaggaggaaaagatgaggacagggtttacgaggaggaggagaggataa

SEQ ID NO: 49964 - DNA, 690 bp, Oryza sativa
  Clone ID: PAT_MRT4530_52498C.1
atgaagctcatgggacgcacagatgtgcatagcggttatgtcttcgttgctgcagtaactagagatggcgaagcaggcggaggagctacgagtctaatacggtgtgctctacttcaactggcaacaacaatagcagcaagcaggcaacagcggcggtgtcggtgcagcaactcccaatggcattgcacgcctaggaggacgccagccggctgtgtatgggggaggagctctccggtcgcggtctcgaagtcgaaactcccactggccgctggcttccaccgcccagtatgcgcgagagagaacgagaaaagagaaagagcaatggacaatggtggtagataccatttagtggttcgcagttcatcatcttcagaatgtgatggactaatggcattgtcgatgcctcagtgtagtgacagatccagccgtcaatctttctatgcagagtctcatccttaccattataatttcctaacttttgcttgtttatcgggatcaaggaactacggaagttgctatcttccacaccatcaccatatgccccatctccaattcatcctccattcaccggcgggcagtccatggcgaagtcctatgcaattccaaatccaatatcaggatactgaggacctcctggtgctccaccactctgaagttacaaagtatgcatctggtggatcgctcacctga

SEQ ID NO: 49965 - DNA, 2067 bp, Oryza sativa
  Clone ID: PAT_MRT4530_52499C.1
atggcgaagtcaccctccttcggcaggcacccttcgtccagggtgtacagtcttcgccatggggctcgatcttttgccgtcctcgctccactgtctttgccatgtggcttcgccgacttctttggcgcagtattctttgccaccgtgaactcgaagacggtggtgaccccggccgggatgaagaagactgtgttcgggagcgtgaacttcaatgttcgcctcgagcgctccgatgtctggccggtgaacgccgccatgtcgaagtggcggcgcggggccatttcgccgaacaggaagcctaaggtcgccgtcgatggcgccatggaggcccggttcaccctactacgcaagatctgctctcgcctcagctgcggcgacttggtggaggagttctgcatgcttcgcatctttcccctctcccagtcatggaaagtcgagatcaaccaagacgaggaggtcgacggcttgccgaagctcgtcatgcctgcgggggcgaatgttttgactcttgcgcaggccgacactgaagcccgaaagatgatcggcgacgtgtcagtcactgagttcagccagctgctcacgcggcaggcggccggccgggtgaaccgggtttatgatggcgaactacctccccgggcgaacactcacaaggtcgatgacgatgcggggccttcgcgcaagcgaatgcgcgggcaggtgaaaaaggcccctcgtaagcgaagggcccccgactccgacgccgatgacgaggagaccgtcaaagaaaatgacggtgaagaggaggatgtgcgggagacagaggctgcgagcgaaaaggccgcgggcgaagttgccgacactcgcgccgagacgcccggctataccccaaccccgagccccgagctcgtcgagaccagggtggagtcgaactgctcccccctccgccaaaaggatgtggagggggcgaaggcggtggtcgcgatcgctgcggccaaggtggcgaaggggggttcgattaaaaagacctctaggaagaggctcgtcgatgtcggtcgcgtctttagtgacgacaagtcctcgaacgagacccctacttcgcccgccggtcggagcttgggtctttcgaccgctcctggcgtcaaggtcgatacgggcagagctggcggaagtgcagccggggcttcggcctcaaccgatcaggttgtgaagaccgcggctagggtattcggcagcccgggggtgagcaacctcgtttctccggctggcagctcgagtctgttcacagagctgaacaagtttgatgagggctgcactgccatcaagagtttggcggttcggatcctcgcggcccactgttcgaccgagcgaaccatgcgggctcgcctcgatggtttgaagaaccgtcttctgcagcagttcggctgcaagcatgttgccgagttccccaactttgcgaaaggggactgggaggtcagtgcacaggatgtttcgcccgttctgcgagcttggcataagctgttctggcagaaggacggccgctccatagctaaggcgcgcctgctcgagcaactggcgaaggcggaggcagcagatcagggcgaagagccggcagccggtgagggaggaggcgatgccgaagatcacccagagggtgttcaccaaaaattgtgtattcgggccccctttggcaattggcaaagtaaaaacgaaaagttcgtagcggtgaagggtttgccgaaggtgcggtgtccgtttcggccagtttaccacgagatgataatcaacggcaacagctacaaggttttgaaagttgccggctggatgcgggtgcaccccgggcgaaccctggaggactacgatagcgtccataccaaacgccgtgaggatatggttcgcttttggcgaaaccatcagaagaccgattgtcaggaagcaatcgcccggcgtcgttatagtctagtttgtgtttcgcccccttcccctcttagggttgtgtatgacattagtagcgatgacgaaccatgttcgtcgaaccattccttaggtggtggggattgcattgggggcgaacatgtaatttatttgtaa

SEQ ID NO: 49966 - DNA, 1885 bp, Oryza sativa
  Clone ID: PAT_MRT4530_5249C.1
ccggccgggctccccttgtgatctccgaattcccatatcagattccgagggcttggggctctcctacgatcccccgcctcctcctcctcctccatacggtatatctctcggcggcatctcgaaatcctcatccgtttctgttgttgtttccgcggcgagtttgaggggtgtgtgttcttggagaggaagaaccgttcgccggtttgattcagggtacaggaacttgctacagagtgattggtgggtggataagaagccatgctacctgctgtgaagctctctcctggccctgtggccttcgctggcaccaatctacggtccagatcagcttcggtttcatctgtctcaagtctcaaaccatccaaatttgtggtctcttcactcagaccactctaccttgcaccactagatggcccaagagctgctgggcaaaaggctcagaggcagccacttgagttcaggtgtgctgcttccgcagccgatgacaaggagtctaagaccgaggtggtgcccgtccgctcggaagctgcccagaagctgaagatctccatctatttcgcgacatggtgggcgcttaatgtgatctttaacatctacaacaagaaggttctcaatgctttcccatacccctggctcacttctacgctctcccttgcctgcggctctgcgatgatgcttgtctcatgggccactcgccttgttgaggcccccaagactgacctagatttctggaaagttcttttcccggttgctgtggctcatacaattgggcatgttgctgcgacagtgagtatgtcaaaagtagcagtgtcattcacacacattatcaaaagtgcagagcctgcattcagtgttttggtatcaaggttccttcttggggagacgtttccggttcctgtatatctttctcttcttccaatcattggtggatgtgctcttgctgctgtcacagagctgaactttaacatggttggattcatgggtgccatgatatcaaaccttgcatttgttttccgcaacatcttctcaaagaggggcatgaaggggaagtctgtcagtggcatgaattactatgcctgcctgtcgataatgtcccttgtcatactcacaccattcgctatcgctatggagggccctcaaatgtgggctgctggttggcaaaaggctcttgcggaagttggtcccaatgttgtctggtgggttgctgcacagagcgttttctaccacttatacaaccaggtgtcttacatgtctctggatgagatttctccattgacatttagcattggcaatacgatgaagcgtatatctgtgattgtttcgtcaatcattatcttccacacacctgtccgccctgtcaatgcactaggagctgccattgccatccttggcacattcctgtattctcaggcaaagcagtgagttcaaaaagatggtaatgttcagggccatggatgaagaagggatccagatgaagaatgtctctgccaaaccagtagcaagcactgaggccaattttgcttgtgcaacttatcttgtagatataggggggttaggttttgatatgaggtcataataataatggtctatgttgctcgtttcttgttccttgttagtgcaaactgaactccagaggctatgaactgtggtcgagtgtaatcttgaaataaaaacttgaatgggaatttgtcgatgtttcattctgggtgtgggaaggtaactaccatccaagtcccaggtttcaatggttgttactacctttcttactggcaaaagaaaggaggtcacaaatatgttgcaatttttcttgagcaacaaagatattgcaagttttcttgatcccttgaaaaaaagtgagcggggggggggggtgatggtatgtaca

SEQ ID NO: 49967 - DNA, 5751 bp, Oryza sativa
  Clone ID: PAT_MRT4530_524C.1
tccttcccaatttgattcaagcttgcctacaacgatcggccaggcaacagctctgtcggtcgaacttttttgttgtaagttgccgaagtgcctgtgtcatacttgcgcatgtgttcgagtgcttcgactcttaccccttccaagagttcgagcgacacctcacgccccccttcgtccccggagaacgtcacccttggtgagttagcccctagctttgttggggtcattgcttcatcgccaaaaagtagcatgaacgggctgaacttggttggtcttgtacgggtcgttcgaagggcccagagaacagacagcatttcctctggccatttgcccttcgctgccccctcgagccttttctttagtgcttctaggattttgccgtttgtgcgttcggccgccccgtttgattgtgggtgtgcgaccgatgcgaacctgatttccaggttaagcccttcgcacatttccctgaacttgtcagagtcgaactgcttgccgttgtaagtgatgaactcttttggcactccgaaacggcaaacaatgtttttccatacgaacttttgtactgctgtcgaagtgatcgctccgaggggctcggcctcaatccatcgagagaagtattcgacggccgccacaattgcgaacatgtacccgtttcgcgccaccgggaacggtccaatgatgtccagtccccatctggcgaaaggccagattggtgcaatgggctgcaactcatacttgggcgcggtttggcttcggccatgacgctggcaactttcgcatttcttgatttgctcaacgcagactttcaacacagtgggccagtaaactccttgtctaaacactttggaggcaactgttcttgcaacttggtgcgcgccacatagcccctggtgtatctccttcgccatttcctcgccttcggcgaaagagatgcagcgaagcaagggttgaagtaccccggagtgatagagctggcccgagaccatcttgtactttgtagctctgtgctgcaagcattttgcttctgcttcgtcttccggaagccatccggtttcaaggtgtttcacaaatggggtacgccagttgtatgggtcttcgcccagtttcacttggtcgattgtcgtgacctccaagatgtccgtgggcacacttggtgcatacaggacttcaaaaaagatgccaggagaatgtgggccgccacaagcagcagatttcgccaaggcgtctgcttccttgttctggcctctaggcaaatgttcgaccgttatgccggtgaagcattttttccatagaccgaacggcctccaaatacctcttcattccttcttcttttgcctcaaaggatttgtcaacatgtcctgcaacagtttggagtcggttcggattagtaagggccgaaccccagtgcttttgcctttcttaggcccggaagaatagcttcgtattctgttgcgttgttggtagtttcgaactgtagccttgcagcataccgaatcggcacaccattcggcgaagtgagtactactgcaatgcctgcccccctgtgcgaccacgaaccgtcggagtacatcacccaaggctattcgaccggctcgggtttgggggcgaatgctggtgtccactcggctacgaagtcaaccagcacctgagacttgacagcagtgcgggcgacaaaatacaagtcgaaaggggatagctctgccgcccacttgctgagccggccagtgacttccttgcctcggagtatttctcccaaagggtactgcgatggcactataactttgtgggcctgaaagtaatgcttgagtttgcgcgaagccatcaccagggcgtagacgagcttttctatttcaatgtaccttgtcttcgctccttgcaatgcttcggagacgaaatagaccggtttctggcctgaatctgtttcttggacgagggcagcactgactgccactatcgaagctgctaggtataatagcagttcgcttcctggtgctaggctgatcaaagctggcgggctttacaggtattgctttaactcgtcgaacgctgcttggcattcgggtgtccaattgaattttcccgtgctccggagggttttgaagaagggcaaacctctttcggctacaaggaaacccaacaacttgcctgcacgaacgccgaaaatgcacttctcaggattcagtttcatgcccgctgcgcgcaggttgtcgaaggtttcctgatggtcggacgcgtggtcgaaagccttgcggctttttaagacggtgtcgtcaatataagcttccacatttcgccccaactgcttgcaaaggaccttgtacaccaacttggcgaaggttgctccggcattactcaagccgaaaggcatcctaaggtgacaaaaggtgccaaatggagtgatgaaggctgttttggggatgtcggccgggttcatgtggatctggtgatagccggaatatgcatctagaaaactcaagagttcacagccagccgtcgaatccactagctggtctattcgtggcaaggggaaatcgtccttcggacatgccttgtttaagtctgtgaaatcgacacacatgcgccatttgccatttggcttccgcaccagcactggattcgccagccattctgggtggtcgatctcttgaatgaccccagctttgagtaatttttgaacttcggcttttgctgcctcttggcgatcagcggacatcttgcgcagcttctatttccttggcttggcatccggcttgactactatgtgatgcatgatgagattttgttgaaacacctcccacttcatcggggctccaggcgaagatatcaatgttcttcttgagtacctctaggattttcttggcttcttcttcgcccatgtcgccccagcgatacgagctttgtggggtcggcatcatcgatttgtatcttggctatcttgccgtgaggggcgggctttggcacgtgcttcgcccggtcatgcggttcggcctcaacattgtgcactgctctgttgattatggtcagatcaccttttgaggcagccgaaggctgaagccccttaaccacgatcactcctgttgggccgggcatcttgagcttgagataattgtggtgggaaatggcttcgaacttgttcagggttgcacggccgaagatggcattgtagttgtacgggatgtcgacaacgtcgaacaatacttgctctttgcatctgttttcccctgtgccgaaggctatcatcaactgtgcttggccaagaacttgaactgcttctccgccgaagcctcgaagtgatgctggtgctggggtaagggcttgggtagtcaaccccatcttggtgcgggaacattactccttcggcatattcaggcccaaaagagatttggtggttcagatacttcttgcggacgggcagtagatggttgcttgcttgctgagcgtcgaactccttgcggagggcgtgcacttcttcgacagccatcacatccttgcccgcacggtcggttctgaacttcctccaggtcatgggggcttgaccttgccttggcggttgtccttggattgccggctggggttggcgaacagcgaggggaggtggttcggcaacttaaactttgtgcttgggcttgagcagcggcgacggaagccatatcgtactcagcttgaatagcttgccgtcgcttggaatcgtcctcgccccttgcgaacctgtcaatgaagcgaagtaggtgctcaagcgtctgtggctccttgttggcgatttttcttgtgagttcgccctcgagcaggccagccgaagcagcgtttatgacagacgcctcggttatgtcttgaacttggcatcgggcctgcgagaagcgacgcatgtactcccttattgactcccccggcctctggcgaataccaagtaggtgctgctgcgttttcggctcttcataggtacctcgaaagttaaggacaaagacattgcacaattgctcccatgagtaaatgctataggctagcaaattgaaataccacgagcaggcgatgccgtccagagcgagatgtattacctttgccttggtattttcgtcgccatgagccgcttcgatcgcggactcgtaaatggagaggaattcttttgggttagttttctcctgagtagcgtgggacgggtgggaacttgaattggggtgggattggacgggtcttgattcccccactcagcggtagcccctttttgccccccgcccttttcacgacaccttgctgtgggtacggcgtggcgaagggcgaaatcacggcttgcgcgtgaggttgggccatggcattcggctgcctagctccaattggttacgcttgctgagccgccatggatgggtcaaaaattggctgcgaccatgtcatggcgacctgggttggtgcgtggcttgctccgaagcctggcgttggtgcttgcggccaaacggttggcgcctgagcagcattgataaagtcgaactgcggtccttgactctacagcgaagcccccattcttggctgatttgatggcaaacaactgggcgcaccttgacttgtattcccctccgggcgagccgatggggttgtacttgaaatgtggggttggttgagctgctgaaggagcttggaactgcgcctgcagggccgaagccccttctgccattgcttgcggcacttggccaagtggttgagggtgtacttgggcagcgaccggttgaggttgcagttgcacgtgaggggccggatgcgctgctgcagtcgacggctgcccgacgaagtacattggcgcctgcgcgacttgtggcggaaggggctgggtcgtcacttgtggataaacctgaggtggaacatagcctaccgaatactggaggattggggccgaagtgatcttggtccgcctcgccgcctcgtatgcttactgttactcttgcatctggcgaagcatgtcctggagacgtgtcatgttctgtcgcatggcttccatgtcggcttcggtttgtgtttcggggtcatggttgacggcctgcacggcggcgagtgcggttggggccgctgccggctgcgatggagcgtcttgtggcaccaacaattggcttgtcgaaaggatctccgccctggtctggagtgcccttgccgccgcagcagccttcgtcatgtcggccgcgttcggcacctgcacagaggtggtaggggccgaaggcggtagtgatagcacaggtgcggaagcagatggcgctcctccatcttcggcaacgggcaccgaaggctctgctccctcttcggcggccatgtccgccccggcgtcgctttcctttcgcctcgtaaccttttccttcacgaccttcttcggtggcattcgctgtcagtggtttcgctcggaggtccccacggtcggcgccagctgttgtcgaaacgacaagtgcagactggtcctggactccgaattgcacccgacgtcgacttggtttgggcctccaccttgacttggacgtcctcgatgatcctccatggctctaagtccttctccaagtgtccccttatcccctccattgttcctaatcacaacataatcattaggtagcaatctattttcgaattcatacaaagaagaacataggaacgagctcacctctaaatttaattgtcgcgcacgagctcttgttatcggtccttgaatgaccgttggaggattgttgtgtgtatccgaattagtgatgtccgcatcatctcacatattcttaacactaa

SEQ ID NO: 49968 - DNA, 387 bp, Oryza sativa
  Clone ID: PAT_MRT4530_52500C.1
atggcgagcgcgtcggaggacgatgcaggctcggagcggggctgcgggagctacagcccgagcgcggacgtcagcgagtcggagacatccagtgactgctccgcgccaacgaccaccaccaccacccgccgcttcgcctcctcctccgccgccgcctcccgcggcgtcgcctcctcctcctcctccttgctcctcccgacccctctcctcctcctcctccgccactgccgttgtccgtcgctcgtcgccgtcgtcgcctcgaccccgcacccgcgtgcggcgtgcccgcgtgctgccgccgtcgcgtcgcctccttgcgccccgccccgccgcgccgtgcatgccgccaacctcgccgccgcctcccatccccgtccgcgtgcgtaa

SEQ ID NO: 49969 - DNA, 370 bp, Oryza sativa
  Clone ID: PAT_MRT4530_52501C.1
tgatacactactaccgggcgacatggagccgaagtctaggactgacggcatgaccagagactgccctggtgcactttatgatccatgcagatgtccttaatgctatccaacatccaccaagccacttgccaggttcactacaccagcaactagagttcccaccagctgagcggggttctagcggacgcccgggcaagtctgctcaagatctgggggagcagtggtcttattaatggatgtgcttcaattcaaatagtctcgcactagccatcattccctttgcttttgttgattgcttgggtggtccatcttcttattgttaatccgactcggtccttgaagtctaaaatatattctttaattataaatt

SEQ ID NO: 49970 - DNA, 364 bp, Oryza sativa
  Clone ID: PAT_MRT4530_52502C.1
ggactatatatgcatgtatatatatatccatatatgtacacattgactatagcgttaatatatattcaaggaacatatttgcacataaaatgttaagtgctttaaattatatatgggagtgagtagtatacgattcatggatagcctcacacacatatataagtatataggtatctataatgcatatatatatatatatagtcagatgtatacagatgtgaaggactaatgcttgtatacggctatgctgatctcatatgggtcgaggacaatattgtagaccttggcagcatacagacagtgtctgatgcgcttgccaacaatctcagctgggtagactacatgctccaagatacaatcatga

SEQ ID NO: 49971 - DNA, 414 bp, Oryza sativa
  Clone ID: PAT_MRT4530_52503C.1
ataatagccccgatagcacaagccattgagacgggttacctcttgttgagaaaactcgccgaaaataagaacaatacaattgccttaatcgagctctatctttaattggcaatgacaatcattccaatctaggcctataccgagcccaagttaaaccgtacgtatcggctgtatcggccatcgacctcatcaacttgatcaatatgaatctctgtttctaaccgatatggtgtccagccgatgcgtagtctaacttcaaatccaactcaattcaccaccaaatccgcttcgatcttcttccttcttttccaaatttgatgcaaaattccgttgttaatagcaatgcatgaggtgtgccatggtcacatcacaccaccttcagagtgaaggaagaactagggaccctagtgatcg

SEQ ID NO: 49972 - DNA, 753 bp, Oryza sativa
  Clone ID: PAT_MRT4530_52504C.1
atggaaaaaattgttgctgctagtgatgctcaagagaaggaggatgagcattgcttgtacgcgcaagaactcatgtttgcctacaaccgctccatggtcctgagagcggcggtccagcttggtcttctcgatgcgctcagcgcggccgctggaaacgcgctgaccgcggatgagcttgccgagaaaatccaggccacggacaaggccgaggtggccgtctcggtggatcggattctccggtacctcgcatccttcgatgtggtgaggtgctccaccgagacaagccccgacggcgcacttctccggcgctacatgccagcgccggtgtgccggtggctcaccagaaacaacggcgagggatcgctggctcccttcactgtgttcgttgtcgacgaggaccacctattgccctggcaacatatagcggcagcggtgactagtggcgggccggcgccgttcgagagggcacacgggttgctctacttcgagtacatggggaagaaccagcggctgggcgcgctgttcgaccacgccatggcgcagcattcagtgattctggtcagcaagatgctcgaacgcttccaaggattcgacggcgtccagcagctcgtcgatgtcggtgggggtgacggatccaccctggggatgatcacctcgcggtacaagcacattaggggcatcaactatgacctgcctcatgtcatctctcaggccccatctcttccagagaccactattgatgcatctaactaa

SEQ ID NO: 49973 - DNA, 560 bp, Oryza sativa
  unsure (1)..(560): unsure at all n locations
  Clone ID: PAT_MRT4530_52505C.1
ccaacgcgctttcctcgcgtcatcggctcaaatgggggagggggtcacttcgcggaaccgagagcccttcctcctgctaatgcgccgccatggccgtccgcgcgctgggtccacctnctcttcacgctctcgcagccacgcggcaggctcctcgctgccccccggctgccgccgcgccgccgacccatggctaccggcgtggagccgcggtgctctccggccgccggggaaggcatactttgagttcaatacaattgatgcatgctgttagaggtggcaatcttcaagtggaaccaaacatgcttcattcccccaagccattgatgtccaccagacgtgggtgtgtggctagtcctactattgctaatgtggatgactgcactgaaggtgaaggtgcactggggtacacaatgacccaaatctgtgataagtttattgagttcttcatgtacaagaaaccacaaacaaaggactggagaaaagtattggtgtctagagaggagtgggaaagatacagaccatacttttacaagcactgtcaagcacgtatagatatggaa

SEQ ID NO: 49974 - DNA, 1899 bp, Oryza sativa
  Clone ID: PAT_MRT4530_52506C.1
atggccgcccgcgcgctgggtccacctcctcttcacgctctcgcagccacgcggcaggctcctcgctgccccccggctgccgccgcgccgccgacccatggctaccggcgtggagccgcggtgctctccggccgccggggaaggtctggtcctcgcctttttcctctccttgcttggtgccttggtggatatatcattctgaggtggcaatcttcaagtggaaccaaacatgcttcattcccccaagccattgatgtccaccagacgtggaagttgtcggctgtgccaaaagtcacaggcaagggttggtctgatggtacaaggtcgtgtctaggaatccccatagcatcaagagtgttggcagagaaggttaatcgagttgccaccgtctacgaggatgcgggcaaccttgatgtttcggatagtgggttcgaccactatgggataccatctaagagttgtcaccagaggtgtgtggctagtcctactattgctaatgtggatgactgcactgaaggtgaaggtgcactggggtacacaatgacccaaatctgtgataagtttattgagttcttcatgtacaagaaaccacaaacaaaggactggagaaaagtattggtgtttagagaggagtgggaaagatacagaccatacttttacaagcactgtcaagcacgtatagatatggaaaatgattcttcaatgaagcaaaagttggttgtacttgctagaaaagttaagaagattgacaatgagatagagaagcacatggaactcttcacacagctccgcgagaatcccacagatattaatgccattgtcgcaagaagacgaaaggatttcactggagggttcttccaacatcttaattttcttgttaatgcatataatggtcttgatgagagagatgcaattgccaggcttggggcgaagtgcctgtctgcaatccatgcatatgactgcacactggagcagttggaccttgattctgctcaatcaaagtttgatgacattctgaattcttcttccctggatgatgcatgtgacaagattaaaagcttagccaagactaaagaacttgattcgtccttaattcttctaataaacagagcgtgggctgctgcaaaagactctacaactatgaagaatgaggagcagagtgcaagtggagattgctttaaaggtcatgctgccaaggacaagaggaagactgaaagaacggtcgggggaagagggggagaagctgaggttaaagatataatgtgtcatatctatacaacaactaaggaaagtctcaagagcatctcgcctccagagatgaagcttctgaagtacctattgaatattgaagatcctgaagagcggtttggtgctcttgcaacagccttttctccagaagtcgagcatgaagccaaggatgaagatgctctgtacacaactcccaacgaactccacaaatggaccaaaatgatgcttgattcgtaccatctcaataaggaggagacggattttatggatgccagaaagatgagtgacccagtgatcatacagaggttaactttgcttaaagagacaatcgaagaagaatacatgaagaagtatatacatccagaggagcaagaatctgaggacgacgaagattcagaagagtgagcttgcaagtgtatttttatagttgtagtcttgatgcagagatgatatttttatagttgttgatgcagagacggtattttctagttgtagttactgcagattggtagtgccctgcctttttgcaaagatggacttgcttgttggacgaaagaaaatgccagtggtgcagtaattgtaaagtgtatcatgatcatcccaaagcctgcgtatcataaaattccctaagattggtggggttcctttttc

SEQ ID NO: 49975 - DNA, 528 bp, Oryza sativa
  Clone ID: PAT_MRT4530_52507C.1
tcgtgttatttgaaacgaagagagcagacaaataatgaactagtaaagcctgtgacttgggttctagtcattgatcgtgtacatgtaggtcttgtttagatcccaaaaaattttagccaaaacctcacatcaaatatttggacacatgcacccctaccagtgtgtggaggcattgcatacacgaaacatggaaaaggaatcaacttgagaggttagacctgctagctctactaggtctggatggtcatgcatttttttttgaaaaaaaccacgctgcaagctcgacagcctcaacctcaatggcaaccatgacaataatatgcatgacaatggtgtaggagaaaagacacgtcgataaccaaagggcgcggctgcgcatacaaaggcggagagaaggaacgatggtggctcaaaaagaaagagcgtctgtggcagtgtattgctgatccgtgggccaccagccaatcataaaagaaaatgttgagataaaagtattgctgatgcgtgggccaccaatcaatcgttaag

SEQ ID NO: 49976 - DNA, 609 bp, Oryza sativa
  Clone ID: PAT_MRT4530_52508C.1
atgagagcgctcaaggaccggtgccacgacggcggggaggcccgcatcggcgtcaacttggcggtggcggtgaggcgggaggaacgtgtcggcgtcagcgccgggagccgaagcggcaggaggcagggacaagcggtgcagcggcgtcggcgggcgagcgcggctgtggagaggcgatggcgggtgagcagcggttccggacgcgggcggagcggcagtggcggtgggctgctctcgacgcgccgccttgtgccgacgctcctcctgctcgcgcatgccgaggtggcctccgaccaggcgtggcgccacgactaccccaagctgtcgtcgtcccccaacgtcggtgaaccttgcagagcccctcccgtcactcgcgtcatctcgccaagagcggtcttgacatctcacccgccgccgctgcgtcgccccttctccgatccgccgcaggccaccgtcgcggcccgccaccctcctctctcccgcctcgcctaccggtctctgcacccgctgctttgcctcacccagaaagaaagaagaggagaaagagagagggtgatgatgtggatcaccctgacatgtgggttccacgctgactcagccgtcacgtag

SEQ ID NO: 49977 - DNA, 2934 bp, Oryza sativa
  Clone ID: PAT_MRT4530_52509C.1
ggaatgcattcttagagagatttggagaggctttagtgtaataatttatacgctgaacactaacttatctgttggacattattgccatattaccaccgatattcgggggacatcaagtgtcctgaatactgacaattgatgcagacgcatttgttcttctacctcggttgaagctctgaaatcgtgacctcattctctgaaacggggttactggacatcttgttactgctgatggccgcaacttctgaaccccggccaccgaaaaatgcatgtccaccagcagcatccaagcttgcgatgctgccagagccgaagaagaacgccggcttagaaggagtctgcagcgacgtggaattgctgctcaacattagcaccacagctgaaatgtccggcctgtcggctggattctcttggacacacagtagcccaatctgcacgcagctgaagacctcgttttcagggtatcggccacccaacgacgcgtccactgcgtcagctagggatcgtgtcctccatttctcccatacctgcacaatgatggagtctgacttggtggaagcatacatcccgttgctccttctaccggtcaccatctcaagaacaatgaccccaaaactgaacatatctgacttagtggagacatgcccgcagtaggcatactccggcgacatatacccaagggttccaacagggcgtcttgtaacatccttcgattgctctccaccaaaagccctggcaaggccaaaatctgagatcttggggatcatatcctcatctaataggacattgcttggcttcagatccctatctatgatcttctggctagactcttcatgcagatatagaaggcctcgagcaattccacaaatgatcataaacctttttctccaatccagttgttgtcgtttctcaggctcaaaaaggatggtatctaggcttctattaggcatgtattcatacacaagtagtttttcttcctgcaagcaaacacctagtaaccgcaccaaatttttgtgcttgagcttggcagctagcacgagttcatttttcaattcatggaacccctgtgaggaggtcttcgaaagccttttcactgctatttcttccccgtcttctagtatacccttaaaaacttctccgaaacctccttctcccagcttattttctgccgagaagttccttgttgcagctctcaacactgttaagttaagggtcggtgggtcaacatagtcattgtcctcctcattgccggtgttgttacctggtggtatcattgtcttcgttgtctttctcctgtagatgaaaacggcaataaagacagccactagtagtattgttccaatagaaactgtggtggcaacaatcacatttgtccccttctttcctgcatgattagttggagtgaaagccgacgggccgggagacggcggctgcgcatcgacggtgagatcgtagtaggtgtatatttcgacgcgtacgtagtagttgtagccgagcaccaccccaccctggtgtccccagcagcagctcggcagctgctgcaccgagtcgttcaagcaccggtcgcactccgccgccgtgcggtccctcatacactgcaccagcccgtacatcgtcccgttgtcggcgccggggtcgtacaccgcctctcccgcggcgaacatccgcgcagccgacgccgagccgtccgcggccgccgccgtggggcgggtcatcagcgcgtagtacgtcctctcgaaggcgaccttgtcggagacgttcttgtagtggtagaacacctggcggtaggtgccctcgtaggcggtggacgcgttggtgtcggcgtagctgaggaagcacttgtcgtaccagatggcggcgcggcgccggtcgttgcagtggccgttgatgtccagcacggcgctgcggaggaaggtggcgcagtcgtccggcgcggagtcgccgcggcacatgccgcggacgaacgcgcggtcgcggccttcgctgcgggacagcgaggcgaacgcggcggggccggcggaaggggggagcgcggcgaggagcgccagcacgttggcctggaacgtgctgttgatcgctgatgagggtggcccccggtgaagccgagggtggcggcgaggggcagtcgagcgaagtgaatggattcgtggtgtctttggacgtcgctccggtgaaaaggatcgccaccacctcgacgaggaggaagacgatgctgccgctccaacctcccccagccccctctcccttgaagtctactttacctcccccaaccagtctcccctcctcctcccttcgacaggtgggaccggcggccgcacttgtcatccccagcctccggcctcctatcccagccagccacacgtcgttgcccactccgcgtgcacgggaaccctccgccccactccactcatgttggtatttcttaacgatattactgtactgagctgtcaccatcagcggcctacctcgcttccgcagcatataaccccaaataatgatatccagtaatctaaacaccacacttaaattaccgaatactactctaatatcatcgtcatgacatagagtcatcgtaaatacaattattatacccacaccattgtatctcccaaataagcatccatccaaaccctgcatcgaacagagccacggtgggttcgaccgaaccatgggctgggctggcctggcccaaattcggcaggtgaccttgtccgagcttcccgagccctctcccactctccccgcaccgttctcatgcgccgctgcttgccagagcgctgcgaccgccgcttgccgccgccctagccacctccgctccactctgccagcaccgctggctctgccgctcagtgccacactccgagcaccgctccgcttctccaaaatccatcggctccgccacttccaccacactctcgtgccacggctcgccat

SEQ ID NO: 49978 - DNA, 248 bp, Oryza sativa
  Clone ID: PAT_MRT4530_5250C.1
ttgggggtattgagttcgcggttacaggctcatctctaacaaatatgatggaatcaactcgattacgaacaaggacacagactgtgttctccactaagaaaacaaatggcctataatcacgcacctataggctgcaaaagtacctagtgtacttcgcatattatgcttggccgaagaattatccatgcatgactgaccaataactatttatataccataggaaacactagatgcccaatttttttgat

SEQ ID NO: 49979 - DNA, 474 bp, Oryza sativa
  Clone ID: PAT_MRT4530_52510C.1
ccggccgctactctacctcccgccgccgccgccaccaccggcagatgcgtccgcttgaatgcatgacattttctaatgttagccaagtctgatctgtatggatctgtggactgagctatgacgctcatatagagctgaagatatacccacccaaggacttcaggttgattccagctgattccatgttattatgttcgtcactgaatatgcaagcgctactttcacaggcgcctgaaggctgccaatcttacctgcacaggtatcttcaggaacgcgtgcatgatggacattcatgctgacgctcgcgagaaaaggctgaccatcaacatcaagctgtactcacgggaaatcgccgatgctaatgtgcagttatccatgccaataggaacgggaaatctgtcatgagcataagcaccagagcatcggatcttggctggatcaaggtgatcattgagaacacactgatgagaaaaa

SEQ ID NO: 49980 - DNA, 154 bp, Oryza sativa
  Clone ID: PAT_MRT4530_52511C.1
atgagtttgcatgatgaggtgaaagctgttcacgccgtgtgcgtagccgagctcctggcgaccagcggcggcaaaaccctagccggcggcggcgctcgtgccggagcaggacgaagtggaagacggtgtggaggcgaccgctgggactcgcgag

SEQ ID NO: 49981 - DNA, 529 bp, Oryza sativa
  Clone ID: PAT_MRT4530_52512C.1
ggtcgccgccggttgccgtcgccggcgaccgcgcgtgccgctgccactcgccatgctgggccggccggttttgaagccgagccgagccaccagccgcgtccctcccgccttgtgcctctgcaagtggggccgacgtgccggcgccccctccctctctctcgaagtcactgacccgggggtcccgcatgtcggcgccgccccctccttgatgacgtcagccctgggatatattgcgcaataaataatttcagtagtattatggcctgtttgtattgtttgctttgtatgtcgcttagattccggctctcccaacgctccggtgtattttgaaatagtcgccgaggctcctccagcagcagagcaaggcaagtcatgcttatcacttgaacatattgaacctatgttgcaaatgctctaccgttttcccttaaatactgcattgttttaaattgttactatgggatatttacctactgttacagccatgctatttttgtacctcgctcctttgttagcttggggttgtaaa

SEQ ID NO: 49982 - DNA, 344 bp, Oryza sativa
  Clone ID: PAT_MRT4530_52513C.1
attattttttccaacgacaatatctatggggctcatcaaaacacaggggggattacatagaatattgaaatgaaatacacccaaaaccacccacatagcggaaaacaaaataagacaactaagaggaacacgagctctggcaacaacaaaggtcgggcaccacaccagggaggggaacaccacacctaccataccaaaaaaaacctgatcccgcacaaaaaaaggccagaaaaccaggacaaaaaaccaagcaaatcaaccccaagccctaagtaataaacccccaaaaaaaccctaacgattactcaccaaacaaaaccatgtgaatgtgacaaaagcgcaaa

SEQ ID NO: 49983 - DNA, 232 bp, Oryza sativa
  Clone ID: PAT_MRT4530_52514C.1
ccccgctcgcgcgcagactgtacgggccgcctccgcgggttctccgtctgtgtccaagacgagcgcatggtccgctacccacctccttctgagatttctgactttcatctaacctatacggcagaggaccgccaacttcggtccgtcttgctacacttaaccgaaacataacgatcctcgctcaagctctgcatttcttaaggactccgcatgccgctgcttcggctacatg

SEQ ID NO: 49984 - DNA, 1254 bp, Oryza sativa
  Clone ID: PAT_MRT4530_52515C.1
ccggcccggggagagagaccgcgtgaccatccgcggagttcgtcgtcgtcttcgccttcgtcttctccatccaccaccgcgctcggcgaggcgatccaccggcggcgaggagaggcgcgcgggagcggccggagatggcggagaacccgcagctgttcgggaacgggatgctggtgcccttctacggcgagatgttcgtcctcgcccgcgacggcgtcgagttccacgtcgacaagatcccctcagctcctggtggtcatgcgaaaacaaagggcacaatttacctgtcaaacataaggatggtctttgtcgccagcaagcctgttgggaacttctttgcttttgatatgcccctgttgtatgtgcatggtgagaaattcaatcagccaatatttcactgcaacaacatatcgggtttcgttgagccggttgtaccagagaaccagaacagggccctgtactcgacccacactttcaagatcttgttcaaggagggtggctgtggtacctttgttcctctcttcctaaacctggttgcatctgtgcgacgctacaatcagtttgaggcccagtctgccgcaagtatggcgccacgtgtggacccgctacaagctgttcagactcctgttgatgatatgatgcgtcatgcgtatgttgatccgaacgatcctacaaagattttccttcagcagcctgcgccagagtcacagctgaggaggagaaactaccacggacgggctgacaatgcgtactagtgttcttacctgattgcaaagaacccatatgttcgagcctatgaacatatggatttcggcctctagtcgcgtatcatgctattacgtgggtgtgaaatgaaagcttcatgttgcccagaaacctattgtatatcttttatgccatattcagttgcatatctcaataatggtgtacatattccgtagtcctctggacttggtgcaaaaaatggtttatttgatcccatggtgtatggaattatcattgctcgtgccagcttgtaaatcacagaaacaatacgattattgcttgtgttagggattcttttttctttggtcacaggggagactgaaaacagatgagtaatgttggtaagttaggttgggtgtttctgaattacttgcttttttttccttcctgactttcatgttccttgcaagactctgaagagcaatggcttctgtcaaggtgcaataaataaccaagctaaccttgttctgttaaaaaaaaaaaaaaaaa

SEQ ID NO: 49985 - DNA, 838 bp, Oryza sativa
  Clone ID: PAT_MRT4530_52516C.1
tccgtcgtcttggctcgcggcggcatcctaaaccctagctgcggcatggagacttctctgcggctgcgcggcggcgggtcacgtccgcagtcaaagtcacaggagggcctccgcatccacgccaaggagaagctccccatcgcctccaacgcgctcctccaggctcacggcgagatccacgccgccaccggcgccccgacctatctcgccctcctcttcaggaacttctatccccgtctctccgccaatctaggcctaggcctcgccatccacttccgcaacaaccaaccactaccactagcatgggacaacttctcctacaccctccgtgccagcaaggctatcatccccttcccctccaacgccttgctcgggatcaacctcaagggacgcctcctcgccgacaaatacttcaacccgaccgcccggactgctgccgtcgagttagcatggaccatacttgatctcaaaaggggtcaagatgtcaggctcaaacttggatatcaactcttgcacaagatgccttatttccaactcagggaaaacaattggacttttaatgcttatatggatggaaaatgggatgttaggtttgatctgtgatcaaaaggcaatgaatggaggtagggggattctgtggtgatcaactaggccctttcctgtattccttttttttgcatcaatccatcaactcttttaaactgtactgcttcactcatcagtaagcaatgttttacagaaacctgtagatactctattgctttcatatgtagaactacaaacttaataattgtagctcttcttattcatccccaaaaaaaaaaaaaaaaaagcggcc

SEQ ID NO: 49986 - DNA, 426 bp, Oryza sativa
  unsure (1)..(426): unsure at all n locations
  Clone ID: PAT_MRT4530_52517C.1
ctttccactactactactaccttttccttgagcggcngccgttccacgcccccgccctgccggccaacgagatcgatcgactatttgcgccgccgccgccgcctcctccttcccctggacacgtggcccgcccgagacgtcaaagaggaagaagacgaagaagcttcgctccgaccaggggtgggtgaggtgaggtgaggggtggtatctatngatcgagccagtctcatcgaggatggctagttagttaatttccgagggcgatgtcgacgacgtcttttcgtacggagccatgaaccgctgcacggacttctttatcttcataccgatgttctttttcagcacaagcgcacccaggacatgttctgactccaccaggcctacgaccgcgggtagcttatcgagtagctgctacttcccccaaaa

SEQ ID NO: 49987 - DNA, 1724 bp, Oryza sativa
  Clone ID: PAT_MRT4530_52518C.1
atgaggctgttgaaagcggatcagttgttcaggaaagtcattgacggcgggtggagaaagcaatctcgactgcttgggcttgacgttggtagtaagtatgttgggctggctgtttccgacgacaaaaataggatcgcattgcctctaagtgtattgagcaggacaaagacaaacatcagcttgatggcggatgatttcgtaactttggcattacaagtaaggcttcttgttggagagctctgtaaaactgggaaacttgatgatatgagttacacctattgggatgaaaattttacctcgaagtgtgtagaagcccttttacatcctctgaaactacatgacccagttgaaaccaaaacaatgacagataaatttgctgcggtttgcatactccagcgctacctagataatatgaacagagaattgagatctgcagataattctggaaaacaggttgtgcatatccgtggcctgcaatgctccgtgcaattgttgaatctgtttccagaactgatagcggagccgtactgtctaatcagggggagaagagctgatgaaggtgtatactggcacgttggagatggcttgaagctgcagtatctactataccaccaaacagtactacccgtctgcatccaacgtgcaaacttcggtttgtccaccaccgggacatgtacctcgtgtgacagcgacaccaccaagcgatcgatcgagagcacgcttgcgagcaacgcgtatagcagagaaggtgttcggtgcaacgtaaaaattgggtggcgaccaaggcgagcacgtggcgtcatggagcgagggcatgaggaggatgagtggggtggagcgaatcgtcacgcgaaggataccttcctatttcctaatgcatggatcgatcggtcgctcgaggccggctacgttagtctcgcctcgatcgatcggtacgggtacactcactggctcaccccactgcaaaaaagtcaggattcgacgcttcggccgattatcaccttgcgatcgatcgacaactcgggggttgtttcacgtgtacgtgttgagtccccgttcacgcgtggactagtcaggaacaggatacactacgtactacgtacactcagtggccttgacaatcagagacaatgtactaagccattcgatcacacctgcatgctgatcagcgagtcgatctacgactctctcgcccacgtgcaaattaataaggcgtcgctgtccagggtgccgggtgtcgacggcgacccgtggggacgagcggtcgtaccggagagagaccgtgccgcgcgctccgctccgcgcggagcgtggcgtggcgtgctgccgtccatgcacacggcgacgacgacgataggtgcatgcacgcacgcacgcacgcgagaggcgctaagctatagcccgctgctgcgaacatcgcgcgcgctcccgcggcggcggcgcggtggtattcggtcttcacgtcatggtcgatcgcgcgcccgacaccgccacgtgaacgatacgtcctgccgcgttccgtgtgtccatctctcgtacgtagcgccagcgtgcgcgtgcgtagcataggcggcggtagacggccggtagccgtgtgtctgggtccatcggacacgatcgatcacacgatatatgctactatagagaagctagatgcggacggtcgggctcggccatctttcgttttcacggggcgtcgttttgatcaggattcggttcggacc

SEQ ID NO: 49988 - DNA, 508 bp, Oryza sativa
  Clone ID: PAT_MRT4530_52519C.1
ttacgatatcatccatctcacccgtcgacaccgcctccgttcacagcttctattctcccagaaacggacaagagggggaggaggcgagcagaaggctcaaggagggagaccatgcgggtgatgagccatctcctcctccatggaggagagctcctgctgcttcatgcagcggcggctggtcaggctcagctgggtagcaaccaagactgatccgactgaagcggaggcgctgaacgcggagtacgcgaagctcgggcagcacgcgtcgttgacaacggcgacatggaacattagcggcgacccctgcaccggcgccgacacggacggaaccgctatccacgacaaccccaacttcaacccggccatcaagtgcgactgcacctttcagaacaacaccgtctgccggatcaccaagctgtaggtgtcgccgtccctctcttggcgcgcgcgcgccaggtgttcgacgaatagcctgcctgagctccgaggcgcccgatgcgctaaatgg

SEQ ID NO: 49989 - DNA, 1304 bp, Oryza sativa
  Clone ID: PAT_MRT4530_5251C.1
cgaccgtgccccccacgccctcctctactgaaatctctagctcacatctctacatacaagtgaccagtgagagtaattaggtgccatccattgcgggcaatcaaagccagctggtaataccagcagctatttagactgctgtattgctcccactgggcatggcgggcgacgacgtagccgaccgccaggttctcctcggagtccggggtgaacgacgccgatctcaactgcggcgaggtcgtcgtcaggcggcgcagcgtcaaacttcgtcgtctcccacctcgtcgtcatggtcgcgcacgtggggcagattcggccacctccagagccgggcagcgggtagacgcgttgtgcggtcctcgccttgtgccgcggcccacgtctcccggcggcgactgcgaccggcggcgtcgctccaagcctgccaaaggcaggattgtctccaactgcaactacacatcagactccagaatatggtacgaatactgcttcatgcggtactacaactacgacttcatcggggaagtggatacgagggaggatgcaagcgtgaccatgataaattggcagaacatggacaaccccaaggcattccagaaggcagcggggaaagctatgggaaaggcgacagcacaagctgttgcagtgggtaggagtgggctaggcagggcgaaggagcagtacacgccgtttgtgagtgtttacgcgttagcacagtgcacgcgagacctagcgccgccagcgtgcgcacggtgcctatcggagatagtgtccaagtttgacaaaacttgcaacagcgctcaaggatgccagattgattacagcagctgttgggcgcgctacgagatctaccccttctacttcccactcgaggcaggcagtcgtgccactatcgacatgtccaagtacaccaaggtcaccatgcactaaataaatctagcatatacataggctatgcgtacaatgcgataatgcatacatacatatatacgtcgtaccgtgtagcagtatatgcagatgtgagatcaatcccaataatagtatttatgtttatgtttaatatcaggaaaatgtatgcaacgaactaaatcatatgtaaaaggttatatatgaaaaaagttgtatcacccttatttaaaataaaaaaaaaagaatatatataaaaaattaataaaaaaaaataaagaaaatgatgtacaaaaaaaaaaaaaaaaaaaaaaaaaaaaaaaaaaaaaaaagggaatatttggtcgagttaatttgataaaaaaaaaaaaaagaaaaagaaaaaaaaaaaaaaaaaa

SEQ ID NO: 49990 - DNA, 2618 bp, Oryza sativa
  Clone ID: PAT_MRT4530_52520C.1
atagaaagtttaatggacttttagtatataatagatagatagatatcggaacacaaccaaccaggaccagtgggaccaccatggtttattatgccaagtgctctaagattataatgtggttgcaggccatcaagaacatcagatcctgtcgtctgttgcaccgcaccccaaattagcgtcaatcttctcaaatttcttttcaactgcaatttggcttgattaccttcttccgttgttgccacattctcaagattaaatattgtcagttcacctccaagctctgtcaaatcccctagctcactcagatcaaacccaatgtcttctttcttaacatggtactcttccaacctctgtaaatacttcattttaccaatcccaggaatattggaacaaagttcttttctagcaagaaagaggtgtaaattgaatagacgattcatgtcttttggcaaaatacatatactattccctagatccaaaaaatttaagtgatgaaatctacttattgcatttggtagagatagttctacgccataaggtattttcaactttagataccgaaggtggattagtttgaaaaagtcatgtgggaaagattcgggcgagtttgcatgcataaatagaacacgaagacttcttgtttcttttaacaaatctttgaaaaaggtcatgtttgcattgccttttccaaaaagcatcaaagtccgcaaatttactatgtctatttttgtcttgaatttttctaattctctctcaaaactttggtcatactcatcatattgtaaggtgatagatacatgtcgaatagattgtgggatgctatcagacctaaagttatatgaacttatgtcaatgcactcttgtgacgaaatatttcgtgctagatcatgtaataagtcgtgcattacataatatggcctactatcatcaccttccttcatgagaaaaccattacctactagttcgttcaaatactttaatcctacatggtcagctttattattttgatctccataagctatgatgcctaatgcttcccaaaaataagtaatctctaaattaccaaaccggtagtcctcagggtaaagggaacaataagaaaaacactttttcagatggaaaggtaggtagtcatagcttatttgtagtgctggcattatgccatcaccatcttgctgatttttccactcatttctttcatgaacttccatccaactttcctgggaaaggttattcttcaataatcgaccaacggttttggctgctagtgggaaacccttaaatttcttggaaatttttcttgcaatatcaatcaattcatcttcataacacgcaggtttttcctgaccaaatatacattcttcaaagaatgtgaagaattcatcatcctctagaccttgcagttctattggcttggttgtttttaccatttgtgctatagatggaaaacgagtggtgacaataaccatacttcctttggcttctcctgttttcaatggagctagtaggctttcccattcaccctcactgctgcatctccacatatcatccaagacaagtaaaaatcttttagaatccaatttttctgcaatggatttttggagctgatccaagttggatgtttcatgtgctccgctactttcctcatttctattttgacatatgcacatcaagatttcttgggtgagcctaaccacatcaaaattagtagatacacaaacccaggtcttgttgccagagaagtgtgcctctgttcttttgtgattgtacaggtgttgggcaaaggttgtctttccgattccaccagggccaactatgggaagaactgatagtgtttcactacgtatggtgcacatgtcatcaagagtctggttaaagatgtcttcccgcccatataatttattctgtgtaattgttgagctggtgggaggtcgcttcagtgatagaacccttctttcttcaggttgggtaattttgagcaaattggatacatggctacataagtcatatatgccctcgattaccgacttgatttttttggacatgtctactcgattgaatgtcaacttgccaacatagtcagattcatcactacgggacttggctgtgtgatgtggataattggcatcctctggtacagaagaagaagaagaagaagaaaagcatgaaaggcagttaccgatggtgtgacgaagagcatggcggccatggaggacttggccacggatgccatcgtctaccacgggggtggcctcatgggtgccgtcgatctggtcctggatgatgaagtactggagctcgtccagcacgtcctcagcctcatcagccttctttctgagttcctctagaagcccttgcaggccagggttgctcttgtccctcctctcccgggcatgatggagcagcccttgcataaacatgaggtccctcttgatctgctccatgttgaggccgagctcggtgctggctatgtaagccgccaccagctcgtcggacagctgtgtcaccaccttgtcgacgagccagctcgctgcgccgatggctgcctccatcgatctacccttctgctataggggcaatgttttctctcgtggtttaggattgcgagtatcacaagc

SEQ ID NO: 49991 - DNA, 1971 bp, Oryza sativa
  Clone ID: PAT_MRT4530_52521C.1
atggccgccaccgccatcgccaccctcctcggcccaccggaggcacgccgcccctccgctgcggtggccgccgcgccggcgacgaccacgggcgacgcgttcctcgacctgatggacgccaacttcaacaagccggcgccgaggaaggcgctcacggagaacctctcgccgacgttcgtgtcgtcgggggacgcctgcctcgacttcttcttccacgtcgtgcccgggacgccctccgccgccgtcgcgtcgctgctcgccgccgcgtggggcgccgacccggcgaccgcgctccggctggtggccaacctgaggggcgtacgcggcaccggcaagtcggaccgcgaggggttctacgccgccgcgctctggctccacagccaccaccccgccaccctcgcgctcaacgccgcctccgtcgcggccttcggctacctcaaggacctccccgagctcctccaccgcatcgtcaatggtgggttgtccacgaggaagcccgggaagaaggcgcgcctcgccgccgctgatggcatcggcttcatcgcccgccgtggccgtggccgtggccgcggccgcggttgcttccgtggccgtggacgcggtttcgcccgcggctaccacaccagcagcaggaagcagtcgcgcggcgtcggttcggcggaggagcgcatcgcggccagcctggagcgcgacgggaggctagcggcgaaggcggcggtggagcggcggtgcaggcgggcggaggccgcggcgagggcggtggagaggtacagccgcgaccctacctaccgatccctgcacgatcgcacggccgatctcttcgccgacctcctccgcgacgacatgcgcaagctcgccgagggcaacgtccacgagttctcgctcgccgccaagtggtgcccgtcgctggacaagtcgtacgaccgctccaccctcctctgcgaggcgatcgcgcggcgcctcttccccaagggctcgttgccggagctcgccgcggacctccccgacgcgcattacgcctaccgcgcccgcgagcgcctccgcaaggcggcgctcgtgccgctccgccgcgcgctcaagctcccggaggtgtacatctcggcgcgcgcgtgggagtcggtggtgtacacgcgcgtcgcctccgtggcgatgaagaactacaaggacctcttcctcaagcacgacgccgaccgcttcaacgcctacctcgccgacgtcaagtccggcaagaagaagatctccgcgggcgcgctgctcccgcaccagatcatcagctccctcgacgacgacggcggcggcagcggcgtggccgacctccagtggcagcgcatggtcgacgacatgcgcgccctcggcaagctccgcaactgcgtggccgtgtgcgacgtgtccggcagcatgaccggcctccccatggacgtctgcgtcgcgctcggcctcctcgtttccgacctcagcgacgacccgtggcgcggccgcgtgatcaccttcagcgagagcccacagctccaccacatcgtcggcgaggcactctccgacaaggcgcggttcatccgcgaaatgaactggggcatgaacaccaacttccaggcggtgttcgacaagatcctcgaggtggccgcgggcgccgccctctcgccggacaagatggtgcgccgcgtggtggtgttcagcgacatggagttcgaccaggcgtcggcgcagccgtgggagacggactacgaggcgatcgtgcgcaagtacacggcggcggggtacggcgccgccgtgccggaggtggtgttctggaacctgcgggactccaaggccgtgccggtcacctccggccagaagggggtggcgctggtcagcggcttctccaagaacctcctcaagctgttcctcgacggcgacggcgtcgtctccccgcgcgccgtcatggaaaaggccatctccggcccggagtacgacaagctcgtcgtcttcgattga

SEQ ID NO: 49992 - DNA, 328 bp, Oryza sativa
  Clone ID: PAT_MRT4530_52522C.1
gcgggcacacgcggagtatttaaggtgacttgaggtcaaccttggtcaatggtgaggactgggactatgctcagggaggagcagaggtctagtgcggtcgggataccatgtgagaaggtgactagagtcaggattcttggaggtcaacttcggtcaacggtggggatcagacggtcaaggataccggatgacgaagttggatacgagatggcatacggtggatggacaccgtgtgggagagatcttcacaacgggcttcacgaggtgtgcgtgcaaccgtcggtgttcatgaaggataaaagatgtgctacagtacgtggaggtactg

SEQ ID NO: 49993 - DNA, 1206 bp, Oryza sativa
  Clone ID: PAT_MRT4530_52523C.1
atgccgccgcccgcccccgcccccgccacgctcgcctccctcagcgcgctcgtcacctcgctcgcgcgctcgggccgccccgcggacgcgctgcgcgccttccgcgacatgctcgcgcggggtgtgccgcccgaccacttcaccctcccacctgtcctccgctcctgcgcgctcaccggctcgtcgccgctcgccgcctccgcccacgcgctggccctcaagatcggggcccagggtaacctcttcgtggcgtccgcgctggtgctctgctactcgggcctgtccaacctccccgacgcccggaggctgttcgacggaatgcgcgagcgagacgccgtcctgtggacctccatgctgtccgcgtacgctcagggcgggcatcccgaggcggcgctgcggttcttccaggggatggtggcggccagggtgcagcttgacgcggtggtcatggtcagctcacttctcgcctgcggacagattgggtggcgccgccacgggaggagtgttcacgcatgctgcattcggaggctccctgggatgcctctgtcgcttgggaacgcgctcgtggacatgtacgttaagtgcggagaatttgcgttcgccgagagggtgttcgcagggatgcccaggcgggatgttatatcctggagtgcgcttattcttggccatggtctgaatgggcgttctgatgttgcattgaggctttttgatgaaatggctgctgagggagtgagaccgaactctgtcacttttcttggggcactgtcagcttgtgcgcattctggcatggttgtccaagcttatgcaatattcgaggggatgaaacggcatggcgtgaaacctgagctcaaacactactcttgcatggctgatgcgctaggaagggatggccgtgttgttgctgcagttaagctcatagaggaaatgcctttcgagcctgatgaggccatgcttggaggtgtattagcagcctgccgagtgcatggggaaatggaagctgctgaacgaatttcaaagaagttgatgggcatgtcaccttcaaagagtggttacttcatgagcttggcaaacatatattcagatgctgggaggtatagtgatgcagagagaataagaggcttcatgaaggaagtaaaagttgacaagcttcctggatatagttcagttgaatttgatgttaatgtctctgaaccaagatctggatga

SEQ ID NO: 49994 - DNA, 642 bp, Oryza sativa
  Clone ID: PAT_MRT4530_52524C.1
atgagctcgatgctgcggggcgccgccgcgtgggtggtcggacgggcccgagctcgacgcctcgccaggagcgaaagaacgagtaaccgaagagacacgagggagattgagggagtaagcatgcgctgtgattcgtgcggaacaggtgtcgtgcagagcaacaaagtccttcggatgaggttttgtgacatgttgagcgtgtttagcataactagctctccaataggttcaggaatgcttccatggaatgcatccacggggtggatgcaccggcggacgaagggtctcaaaccggccatcctcgtggcgagcggtggtcacggtcgcatctacctgcgcgccaagggcaaagtggtactcgccgccgtcacacgccctgtgtccggcgccccgacgccgctcgccgtccgtcctcgccgaccccatttgcctgccactttttttctcacctcgtcggcgtctcatcccacttcgacaactctgccaattcccaccacacctaaattccagcacccactccaccaactgtaccgtgcaccggatttccccaatcccgccgctacgtgtatctctccggcgagaaaatgtgacccgtcggagctagaaggcggcgacatggagctcgatcagggcaagtctcag

SEQ ID NO: 49995 - DNA, 294 bp, Oryza sativa
  unsure (1)..(294): unsure at all n locations
  Clone ID: PAT_MRT4530_52525C.1
ggacgtgccagacgactagcagaagccgagcgaccnnctcctcgntccatatcttccggncgagttcttggtcnatctctnccctcctccacctcctcctcacaggttcttggtgtagcttgccactttcaccagcaaagtttcatgtctgatctcgacattcagntcccaactgtcttcgatccctttgctgaggccaatgatggagactntggtgnggctgcaggatcaaaggactacgttcatcntacgcattcagcagcgtaatgnccgtaagagcctgaccactgtcca

SEQ ID NO: 49996 - DNA, 992 bp, Oryza sativa
  Clone ID: PAT_MRT4530_52526C.1
gataaggaaacaacgatgcccaatgagatcatgagatctagatatgtggatcggacagtaagtggctcccgttggtgaagtacgttgaatccctcgttcccaatacgcgtagagttcagcttgcacgtgaagtatcaccggatagtcctcaagagtatgcttggttgtcttatgcatagaacaccaagatctcagtcttagggtggtcatccttgtcggctttgatctttcacatggggggtaaatttcagccgcctgaggattcctcccgggtgttggggccgtcgatgttccgttctccacctgagtgggaggaattatcggcggggtgtcgtttctctcaatcattgccgtatctatctcgttcccgatgataattgggccagccgagattggcgtaacggtatagactggaaagtcaatggacctgacttgagtccacaccagcggtgtcgaggtagaagctccttgatcgacgctggtgatggcactactgtcgggaagtgttgaagtcatactggtagatccttgagcaccaagtccctctacctggcacgccactgtcgacgagggatactcgcggatcggatgagttgagtattgaggtacgttggaacgacgatgggatcgtagtcgatgagcttgacgagatctcctggcgacttggctccgcgtactccggcatcgtaaactatgatgggtgtgttggcggtgaaattcgatgccttacactcctccctgggggtctctttaataccgtggatcatgttgaccccctaagaaagatctaagaatatttgatctgataatctgattcgtagagatattttccataacttaggacggattcctaacggcgtacatatataaagacgatccgtgtacgtgaaagtataccttatcggtatattccataagtcgtaggatagaaggtataccttatccataaccctgacaataatggcccaagtcccgtgtgcaccatgcaacca

SEQ ID NO: 49997 - DNA, 533 bp, Oryza sativa
  Clone ID: PAT_MRT4530_52527C.1
cacgaggccctcctccagttccccacatctctctctctctctttctctctctaacccctctccgtagcatagtactaccatctctctctttctctctcctcaactagaattagcattgctgctctgctcatctatctccaatcccaaaacatttctcaattcagctcagagaattctcctcctcctgttgctgctctgtgcctctgctctggggcttgacttcttcttgccacacagcagtacagctacagaagcagagtcttttcaatccctcatcttttccaaggtgttcttggagttgaaccttttttgcctttggagaatccccaaggttgctgctgagctttgtgttgcagtttgaagtgaagttggaacacctttcccaaaattttcattttttggggtgcctttttcaccttcttgtcaatcttattacaaggcatcagaaagtttcagaggaaaggaaatttttcccagttgttttcattgcttttggagagtttggcagccttgagattttaggggtttaggcg

SEQ ID NO: 49998 - DNA, 329 bp, Oryza sativa
  Clone ID: PAT_MRT4530_52528C.1
accacgcgtacgattacgcttgcgatatctaaacggcgccgggtctaatcgcaacctccaagctttccgaagacaatgtctgcatatagatcagttccaaaacgtgtgatatcatcgtagcagatcgataaggttgatcacttttcctgggctcgcactaccggcagctctacccggacggaccaattggaaggccgttagcaccaacccatgcatgcgcatctgagcataagctgtgcgagcctgacaaaggctcgcacaatatatggaaagaatagtgtgaagaactgtgactacgattaggacgaactctcggggaggacgaacat

SEQ ID NO: 49999 - DNA, 546 bp, Oryza sativa
  Clone ID: PAT_MRT4530_52529C.1
atggccgcatccggggagtggggagcggcggcggtggcggcggtgccggtggggacgagggtggtgccagccgaggagtgcaacgccgcggtggcgtcacttgccgagtgccatgcaccgcccgccggtgtccgtggcctcgttgagtctggcgccaccgccatgccaccgctcttcctccctccaggctacggtcacgagcgctcgccgtcacctccgccgccgcgaccaatggccttcgccatcccgactgtggacccctccctcccgtgctcggccaccgtcccggtcgtccgcgtcgctgcatgctcgtgcggcttctttcatctcactagccacggtgacccgcacgacaccgtcgcctcctccgtcgccgccatgcgggcgttccacgagcagcccatcgcctcccgctcgctgtgttactcgctagcacccgtaggaggcgtcacctactccaccatccccatccaacagccgccgccgctgctgtcgaaggccgtcggtcgcagcggtggaggtggcggcgagcgcgcacggccgtag

SEQ ID NO: 50000 - DNA, 189 bp, Oryza sativa
  Clone ID: PAT_MRT4530_5252C.1
atggcagatcctgcggcggcggcgtcgactcccaagggcggtagtgggcggctcgccgacaaggaagacgagcggtggcggcagctcggtgacaaggaggaggagtggcggtggcatggcgatgaggaggaggggcggctcgtcaacgaagatgaggagtggcccttcttcacatccaactcgggatag

SEQ ID NO: 50001 - DNA, 883 bp, Oryza sativa
  Clone ID: PAT_MRT4530_52530C.1
cacgtgaacctggaacgcgctcccctactcctgcttccaagaggcgacttcttacgatatccggctctccgactccgcctactccggctcggagcacacgctaaccgtagccgtaaccataccaatcctcctacaccgatgggagccgacacctcgacggtcgggggccgatgcgccttatacccgccgagcccgccggaagacggagccgaggccccgactccccccgacgtggcggacgccggggggggggtactttgctcaagtgaaatttctgttaagaacctggcaacagggcggcgctattgctttttttttttggttcccaatcaaatcgatgctttttttccactccgtagtgaattcatagctacctttattcccttcttttaggtttgtaagatgtatcccttgttgagaaaacaaacagggatatctgtggcgaaaaagcgaaaacctatgaaaatcggaactaaaagttttctaaattattgaaaaaattactagaaatatgtgtaagcatggactacattcccttcaaatctctttgtctaaactcaactttatttggaaggaaaagaagacaaaattttggtgaatagtaggaagctgggtttgaacttgagatttggtggaaatgtagttcacacctatacttatctctagtaaattttccatgaatttagaaaaaaaattcagtttcggttttcatttattcaatggttttcattggatattcctccaaaaatgtaaactagaaaccactatcctggtggaagccttggagtagtttacaattttttttatctcatatacaaaaggtgatatcggataaccatagaaattttgaatatcaaacttttgtttgtgataatattccttt

SEQ ID NO: 50002 - DNA, 102 bp, Oryza sativa
  Clone ID: PAT_MRT4530_52531C.1
cggtaccattgtttacttaggttccctgccaaactctaaatgccagctgatcaaagactaaacaccaatcgataactccgactctactaccgactaacttaa

SEQ ID NO: 50003 - DNA, 279 bp, Oryza sativa
  Clone ID: PAT_MRT4530_52532C.1
atggacatcgaggagggggaaggaggcatcgcccactctcctcggccctcggagagtggatccggccaaagccagacgacgaggggcgcggccgcgcggggatggtgctcctcacctgacaagggcaagagaggtgtcggcgcttcttccttacgtcggggcgacgaggcgcggggaggtggccgacgctgctccctggcgttagggcgaggaggtgcggcgaaggtggatgctcccttgagtcagcgagcggaggccgtcgtgggcgagatccagtga

SEQ ID NO: 50004 - DNA, 404 bp, Oryza sativa
  Clone ID: PAT_MRT4530_52533C.1
ctgagtttccccatctctcgctgactcccctcctccacgtgtagacgtcgacgacgagttatatacgtacgcacgcgcgcacgctcgctcgctcgctgccaccgccttccttcgttgccaccatctccttcgccgccgggcaccatcgccggcggaggccgggttcatgctgtcctgaaggagaggaaagctcctcggtgaatagtagggcaccaaaaaaacttctctccaagcctcccgggggttggttacccaaatttatcatcaacttcctgaaatctgaagaaaaaaaaaaatcgggtttaccaccaccctggggtgccctggcgtgggcttcaagcaaaaaaaaccgggaatcacaagaaaatggggcctggaaaaacccgggcgataccccggaaaaa

SEQ ID NO: 50005 - DNA, 222 bp, Oryza sativa
  Clone ID: PAT_MRT4530_52534C.1
atgtccaacgccggcgagcgcgagccggtgggacccgaccagttaaacatcagtgtcactgtctgtggggccgacaagagtgtgatagcaaatgttaagagaaatgttctgaaggcggaaacaattgacccggacaagattgaacacactggttcagacatcttagaccgggcaaatcatttttgtatacgtctgatgatgaatgactcgctggcgatttag

SEQ ID NO: 50006 - DNA, 511 bp, Oryza sativa
  Clone ID: PAT_MRT4530_52535C.1
aggaattcggcacgaggattagccttagtgattgcacttatcattgacggtcctgcggtaatcaagaataaaatagcctatcagtagttggcacggggaatcttcgaaaggaaatcaaaaacaaaaaacaaagaaaagatgacaaaacgagaccaaacgcgggatcaacatcaccacagtccagtcaaattcaaatccaacctgtcagcgaacgcagccactgacatcgcgggccccacatataaccagcgggcggggggtcaccgcttttgaaccgtcagcgttgccgcattcgcaccgtctccgccttcatggcctgtttatttcccgcactaaaatttttcatcccacatgaagtatttaaatatagactaaaaagtaactaattatacagattacgactaatttataagacgaatctttttaagtctaattgtttcatgatttaacaatgtggtggtataataagcatttgttaataatggattaattagacttaataaatccatct

SEQ ID NO: 50007 - DNA, 298 bp, Oryza sativa
  Clone ID: PAT_MRT4530_52536C.1
aggcatatgtaacatgatggtcttgttcatcctctttttttcttttccaaaacaacagatcaaatgaatgttgctaaaggaagaagaaggcgtaaaaagaatttcaaaaggaaaaataagttaagcaagaaaaggcccagattgataccccaacctatctatttaccaccaccaccaccaccaccttgggggcttgagcctttatcagttcatcaagctctcatgctggggggaacctggcgagcgcctcctggaatgtctttttgaacctggccatgtccattttgaagttctgctt

SEQ ID NO: 50008 - DNA, 312 bp, Oryza sativa
  Clone ID: PAT_MRT4530_52537C.1
atgaggggtggcaatttccccattgggggtggggccttgacgagtacctgccccaatgggactggggtcgggtggaagttctcgcccacgaatgttggcggtatagaattggcatttaataactgccaacagcaacttcagccggcggtgctcaagtcctcccgcgaggacgtgactcaacggcagttgtcgccgtcccctccatcaccgctcctagccgccgtcagcggcccgcctttgccgcccctagccaacgccatcccagctaccgtcgcctctagccggcgctacgtcgtcgtcatccgtagctag

SEQ ID NO: 50009 - DNA, 1134 bp, Oryza sativa
  Clone ID: PAT_MRT4530_52538C.1
atgcgtcggctagaggaaagctacgctacaagcctagccgttgcccacgctggcttgtggtaagtacgatcggctcggggagggaggaagggcgccgacaagcgggccccaccggtcagcggctcggggagggcggtccacggcggattgggtccacggaccggggaggagcggcgcgccacgcggcggccgaaccgatggccccgatctacccttgcggcgggagctcgcggccggtgcgcgcgggcacggcgcaaaccggcccggcgaccatggcgcgcgacggcgcggcgcacatgcggcagcggcgcacatgcggcagcggcgcaagacggcggccgacggcgaccgaccggcggcggagagcggcggctagaggtgaagcggcagctacgcggctaagcggcggcgcgacggctaaacggtgcgggagagagagaaagaggaggagaggcctcaccgacaacggtcgacgacggcgggcgacggaggacgatggcgacggcgggacgagctccggaacctccagcgcacgacggggatggggcttcggcggcgaatctctacggaggaggggtggacgaggtggacctcggccgcgcgagagctcgggagagggaggcgaaatggggaaaaagcgagagggagcgacgggggagcttaaatagggagagagagggccggacgtggccggaagaggcgggaatcgccggccgacgtgggggagtgggggagtagagagagcgggatttcgaaaatcgaatcccggccatctcgggcgcgggtgcgagcgggagagagaggggagtgggcgaggggaacgcggcgcacgcgcgggcgtggtcgacgtggcccggaggaggcggaggcgtggacgcggcggcggtttcgggcgcggcggttgctggcgcggcgtcggccggaggtgggggaaggacccgacaggtgggcccaacctgtcggcgaccccgggagaggagggcggcgggcggcctggctgggcctcggcctgcagctggcccagcagggagggggggaaggaagggaaaaaatgggccgacggcccatttgaaaaaaaagaggaaaaagagaggaaaaagaaaaagaaaaaggaaaaaggattttccctggaat

SEQ ID NO: 50010 - DNA, 486 bp, Oryza sativa
  Clone ID: PAT_MRT4530_52539C.1
atggtgacggcgggacgagctccggaacctccagcgcacgacggggatggggctccggcggcgaatctctatggaggaggggtggacgaggtggacctcggccgcgcgaacccaacggcggtgacggcgcggtgcggcggcggggagagagagggccggacgtggccgggagaggcgggaatcgccggccgacgtgggggagtgggggaggcgagagaggcgggattcgaaaatcgaatcccggccatctcgggcgcgggcgcgagcgggagagagaggggagtgggcgcggggaacgcggcgcacgcgcgggcgtggtcgacgtggcccggaggaggcggaggcgtggacgcggcggcggtttcgggcgcggcggttgctggcgcggcgtcggccggaggtgggggaaggacccgacaggtcctcctggatatcaatgtgttccgaatcagcctgttcttcaggtacccttatgcacttctttaa

SEQ ID NO: 50011 - DNA, 189 bp, Oryza sativa
  Clone ID: PAT_MRT4530_5253C.1
atggagaggcactgccggtgggggaggggcgtggagaggcgccaccggtggggaaggggcaactcgcggtgggaggaggagcgtcgttgtgaggttcctagccctagagaccctgaacttgttgagcgtcttattcttgatttgctagatccagaactcaaacgacatgctccttccgagctacgcaag

SEQ ID NO: 50012 - DNA, 397 bp, Oryza sativa
  Clone ID: PAT_MRT4530_52540C.1
gacttatgtttgcggaactcctcacgcaaagcgacccgaggcggcaagagcaacctaagctcgggcgagcatggcgaaggacgaggagaacgatagcggcggagaccatcaccatttaggtggacaaagtctacacggatccacaacctgaaggccaagatccagcacaaggaggtggattcccccggaccaggaccgtctcatcatcgccgagatgatcgctcacagcgacggtcgctccccagcagactacaacatccagatggaatacaccctccaccttgagcttaggctcacgggaggcatccagatcttcgacaagaccctcactgtcaagatcatgacacctgaggtcgagttcacggacacgatcgactacgtgaacgccaggatccac

SEQ ID NO: 50013 - DNA, 949 bp, Oryza sativa
  Clone ID: PAT_MRT4530_52541C.1
gtacaaaagaaaaagaagattctcactattacgaaaaacaagaaggatgaaaagcttagaggtcattaatagggctttattttcgccgtttgttgagttgtcccgtttcgcgtgtagtttcggagcccgaagacccgcagtgcgaggatttcgaggatcaaaatttctgcaccctcgtcaccaaggataaaacccaatgtgaactaatgtgaaggaaagtcgagatatagaacttcattagagcgtaaatagtccttggagggaagtctcataatcaggacacttctgaattggtcacactggtatgaaagagtttcatctatcatgtcaagttaaatcagggaaatcttgtaaatcgcgtcttggaaaaactaaagatttgcagtcggagtggtccaaaaacaaatttcctttgtatgcttatgctgctgcttttatgttcctagtcatgcaagaatatgataaaagatcacatggtattgacttcctcaatcgggactttgttgtccgaggtaaattgatatacatgctcggtgtctgtatgaagtgcatggcaatgcatccggaagcatcagctgttgccccaggtcttcttgatatgatcagatctagagctgtttgacaacatcctgaagcatatgtcagaaggtctgtgttgtttgcagcttcttgcatattgatagcgctgcacctgttgtatgtctcatcagctcttatagaaggaaatcaggacattctacatacacatatgggttcttcatgttgcagaagctgatcctgatacagaatgcacatatatgggtatgtgctgcctgcggctccattctgagatggcccttcagacatcacgagcactggaatcggcggatcacagcaaagccagcggaagcaggtctctctaccttctaagcttgataatatcatcataccattttgcgaacatgatgtg

SEQ ID NO: 50014 - DNA, 1908 bp, Oryza sativa
  Clone ID: PAT_MRT4530_52542C.1
atgggctgtcggcccttttttttttcccttccttcccccctccctgctgggccggccgcaggccgaggcccatccaggccgtcccgcctccctcctctctcggggtcgccgacaggtggggcccacctgtcgggcccgtctccctcctccagccgacgccgcgccagcaaccgccgcgcccgaaaccgccgccgcgtccacgcctccgcctcctccgggccacgtcgaccacgcccgtgcgtgcgccgcgttccccgcgcccactcccctctctctcccgctcgcgcccgcgcccgagatggccgggattcgattttcgaatcccgcctctctcacctcccccactcctccacgttggccggcgattcccacctctcccggccacgtccggccctctctctccctatttaagctcccccgtcgctccctctcgctttttccccatttcgcctccctctcccgacctccccatcgctcccgcgccgtgcgcccatccgccgccgccgtttccgctactccggtcgcctctagccgccgctacacccgccgccgcaccgcgccgtctccgccgttgggttcgcgcggccgaggtccacctcgtccacccctcctccgtagagattcgccgccgctctccgccgccggtcggtcgccgtcggccgccgtcttgcgccgctgccgcatgtgcgccgctgccgcatgtgcgccgcgccgtcgcgcgccatggtcgccgggccggtttgcgccgtgcccgcgcgcaccggccgcgagctcccggcgccgtccgatctgggtagatcggggccatcggttcggccgccgcgtggcgcgccgctcctccccggtccgtggacccgatccgccgtggaccgccctccccgagccgctgaccggtggggcccgcttgtcgggggcccttcctccctccccgagccgctgaccggtggggcccgcatgtcggcgccgcgccccgccttgatgacgtcagccccgatccgccgtggaccgccctccccgagccgctgaccggtggggcccgcttgtcggcgcccttcctccctccccgagccgctgaccggtggggcccgcatgtcggcgccgcgccccgccttgatgacgtcagtcgcctcgccccgtcccgtcggaatgatgagagcttcctggctctcgtccctagccggagccggcgtgctaactcctggagttggtatgtcagtcccggggagtggcgacgtcggcgggcgagccggaggcaggcgaagcggcggctccgggcgcggaaagagcagaggggcaggggacgcggcgggcgagtggaaaaggagtgccagagccgccgctcgcccgctgccgctgcactcgcccgttgagatcatcaagctctgctccgagttcctcaacgctgacaccgacacgacgtccaccacgttgtggtggatcatggccaagctggtcaagaacccgtccatccagtcaaatatccacgacaagatcacggcgaagaccggtgacgaaaaggtcgaggtctccgaggagaacgtccacggtatgccgtacctgagggcagtggtcctggagggtctccggaagcacccaccggggcacttcgtgctgccgcagaaggcaatggaggacatggaggttggcggctacctcatccccaagggcgcaacggtgaacttcatggtggccgagatcagcagggatgagcaggagtgggcgaagccaatggagttcatcccgaagcggttcctccctgatggcgacagcgagggagtggacgtgacgggcagcaaggggatccgcatgatgccgttcggcgtcaagcggaggatctgcgtggggctcaacttcgccatgcaccacctggagtacttcgtggccaacatggtgagggagttcaagtag

SEQ ID NO: 50015 - DNA, 810 bp, Oryza sativa
  Clone ID: PAT_MRT4530_52543C.1
gaaggatcggccattcttgatcaatcagctagcagtacacaacatcacatgacagattagcagtaataaatgtaatggcgactgacaagcagtatgatgcaaagagattaccacacgaacacacagaattagcaaggcaatctgaatggtctcataattataaatcaagaaaatatgatatccggtggttcttcgaatctttgaggtattacaaaactgcaatcaaaacataaaattgcttgtgtttgtccgcgagtgattacgaggaggaggcgaagcgatcacctaggcgcggtcgcggcgggcgtaggggaggcgggcggcgccgtactgctgcggggcggaggtggaggcgtcggactggcgcactactccggggaggtcggccatgccgagggatgcgagcatgtcgagggtctccttgtcgacgcggatgtcgtcgacctcgagcgccgacctgtccgggacgaagtccatgcggcgctcgcgctcctcctcctggagcttgagggagatgccgcggacggggccgcgctggatgcggcgcatcaggtgggtgctgaagccggccaccttgttgcggaggcgcttcgacggcaggatcgacacctcctccagcaccttcttgttcgtgtggaagtccagggtcatccgcgagtagtacttctcgatcacctgccgagacgtcttcttcaccgtcttcgtgcgcacgcgccccatgccgggctcctcctcttcttctccggcgacggtagagcgggtgcttggagtgggggcggcggcggcggtggggagtgagattctctcttc

SEQ ID NO: 50016 - DNA, 908 bp, Oryza sativa
  Clone ID: PAT_MRT4530_52544C.1
atgggccgtcggcccattttttcccttccttccccccctccgtgctgggccggctgcaggccgaggcccagccaggccggccgcctccctcctctctccggggtcgccgacaggtggggcccacctgtcgggtccttcccccacctccagcgaccgccgcgcccacgaccgccgggcccgcaaccgccgccgcgtccacgcccccgcctcctccggtccacgtcggccacgtccgcgcgtgcgccgcgttctcccgcgcccactcctctctctctcccgctcgcgcccgcgcccgagatggccgggattcgattttcgaatcccgcctctctctcctccccctctcccccacgtcggtcggcgattcccaactctcccggccacgtccggccctctctctccctatttaagctcccccgtcgctccctctcgctttttccccttttcgcctccctctcccgagctccccatcgctcccgcgccgtgcgcccatccgccgccgcctttcccgctactccggccgcctctagccgccgctacactcgccgccgcaccgcgccgtcgccgccgttgggatcgcgcggccgaggtccacctcgtccacccctcctccgtagagattcgccgccgaagccccatccccgtcgtgcgctggaggttccggagctcgtcccgccgtcgccatcgtcctccgtcgcccgccgtcgtcgaccgttgtcggtgaggcctctcctcctctttctctctctcccgcaccgtttagccgtcgcgccgccgcttagccgcgtagctgccgcttcacctttagccgccgctctccgccgccggtcggtcgccgtcggccgccgtcttgcgccgctgccgcatgtgcgccgctgccgcatgtgcgccgcgccgtcgcgcgccat

SEQ ID NO: 50017 - DNA, 594 bp, Oryza sativa
  Clone ID: PAT_MRT4530_52545C.1
cccgagcactcgacaccgtcgccgccgccgcgacgacggcggagctccgatccgaggaggaggaggaagggtgggccacaggggaccgccggcgatgtcggccgcggcgtcgggggagcgagacgagctcgcggattcgctcgcggagctcttcaccaacgtctccctcatggtccgcggcgagctccaggggactaacagccagctttctctacttgagaaaatgaatcgacgtgtagcagaggaatacaataactatggagatgttgcatccggcctgcgggttttcgtagaacaactgaatgagaaaaaccaaagctttggtgagtatgtatcgcagattgatgcgatagaccagcaggtgaccgagtttgaggcagtggtgtccatgcttgataagcatgtttccctcttggaaaagaaagtaaagtccgcatataacattgctcctacccaatgaataatcgttcctctctgtatgtttcattttaatttttgtcatatgagcttatctaagcgaggtagaaaccaaacctgtggatgagaatttgatgcccgttatctctgatgtttccaacacatgtatagtagcat

SEQ ID NO: 50018 - DNA, 1065 bp, Oryza sativa
  Clone ID: PAT_MRT4530_52546C.1
atggtggctgtgccggtggtggccgacgatggaggcggagggcatggggcgaagggggaggagagtgtgagcgggagcgtcgcgggcatttcgccgagcatcctcatcatcgccgtcatcgtcgtggtgatgctcctcgcctccgtctccatccactacttcatccgccacctgtgccgccgctcgtcggcgtcggcggccgcgtcgtcctccgcgccggtgctccccgtcgtggtgcgccccgcgtcgtcggcggccgtgggggagcaggtggtggggaaggcgtcggcggagcgcgcggcggagatggagcggctcatctcgcggctgccgctgttcacgctggcgtcgtcgctggcggcgctccccaagtcgtcgcgcgactgcgccgtgtgccagagcgcgttccgcgacgacgacgagctccgcctcctcccggcgtgccgccacgcgttccactcccgctgcgtcgacccgtggctccgcgccaacccctcctgcccgccctgccgcgccgccaccgcgctcccgcacccgcccctcccggacctcctccgcgtcgagctcggcagcgtcagcagccgccgctccaaccccaactccgccgccgccgtcgccagcgcgccgcccgagggcgccgccgtccgcgcctacccgctccccccccgcccccactccgagtacctcgtcgaggaggagctcgaggtcgtcatcaagcaacccgccgccgccgctgcgccaagaaccggcgagccaagccagcatccgctgccggcggcgcaggcggagcgtgggcagccgtcgtcggtgaccccgacggcgtcgttcagctcggcgaggtcgcaggagcggtggagcaacaggtggagcagcagatggagcagccggtggagcagcgggcggtggagcagccggtacgacgccggcacggtgacggcggccgccacggcggagtggtggtgggacatggacggcggcgcggcgcccgccgcgcggcggcgcgaggtggaggagcagggcaacgcgttccacggcttcatgcgctggctcacaggggcatactag

SEQ ID NO: 50019 - DNA, 409 bp, Oryza sativa
  Clone ID: PAT_MRT4530_52547C.1
atgtttccggcaatcaagccagagtacaagcggcatcttatgactagacattgggctaccaagcgcaaacaataccatgatccctagctgcctcatgcctgaaggctcaagagacagctgctgacgactccgacacacactgggttgtacatgatcgaacatggagcgatgcaagctgcaacaataacctgtgaatagcaagttgtctggctacacacatcacacatgagagaggttacacgaccgcattcccatggtggctaggtggtacatgaaaccgagatgaactttctaggatgaacaatgtattgcaccaagagccttacccctcccaccccccatatatagagacaggccactttcaaaagggtcactgggggtgcatgctacatggtcgctgatgtagagg

SEQ ID NO: 50020 - DNA, 1613 bp, Oryza sativa
  Clone ID: PAT_MRT4530_52548C.1
tgacggcaagacaagaagcagtagcgagtccaaggcaaggcaaggcaggcgaaagcaaaacaagaaatggcgaagccgatatcgatcgaggtgtggaatccgagcggaaagtatcgcgtggtgagcaccaagtccatgcccggcacccgctggatccgcctcctcgccgacaacgactgccgcctcgagatctgcacggagacgaagaccatcctctctgtcgacgacatcctcgccctcattggcgatcgctgcgatggtgtcatcggccagctgacggaggagtggggagaggtgctgttctcggcgctgaagcgcgccggcggaacagccttcagcaacatggccgtcgggtacaacaacgtcgacgtggaggccgccaataggaacggcatcgccgtcggcaacacgcctggcgttctgacggagacgacggcggagctggccgcgtctctgtcgctggcggcggcgcggaggatcgtggaggcagatcagttcatgagggctggcctctacgacggatggctcccgcacctgttcgtggggaacttgctcaagggtcagactgtgggagtcatcggagctggtcgaatcggctcagcttacgcaagaatgatgatcgagggcttcaagatgaacttgatctactacgacctgtatcagtccacgcgccttgagaaattcgtcacagcttacgggcagttcctgaaagcaaacggagagcagcctgtgacatggaagagagccgccaccatggaggatgtcctcagggaggccgacgtgattagtctgcaccctgtgttggacaagaccacttaccatctgataaacccggaaaggctggccatcatgaagaaggaagcggttcttgtgaatgcaagtcgaggaccggtgattgatgaggtagcactggtggagcacctcaaggccaaccccatgttccgcgtcggtcttgatgtgtttgaggatgagccttacatgaagcccggcctcgctgacatgaagaatgccgtcgtcgtacctcacatcgcatctgcctccaagtggacgcgcgaaggaatggcaacacttgctgctctaaacgttcttggcaagatcaagggttatccggtttgggggaacccgaatctagtggagccattcctcaaggaggatgcaacgccgccagctgcttgccccagcattgttaatgccaaacaactcggcctgccatcgtcaaagctctaagaactggagctcggtccatcatattatatctgtcggttcaagatcatactccactacatcaagtctagatcgaggtgcatatgcttgctgttctagcggagcgggcaacaagctgtcagccagacttttgatatctaatttcacacataatatatatactagctagcttcaattccttgttattataccactagtacgactgtaattttgtgagtcttaaaacatgcgagctacatgtatgttattacacccgtactagctactactgtagattaattactgttacgaaatgaagataccctagctgcctgtttgggaaaaaaaaaaaaaaaaaaaaaaaaacaaaaaaaaaaacgaggaggcctcgtgccgaattcctgcagccc

SEQ ID NO: 50021 - DNA, 579 bp, Oryza sativa
  Clone ID: PAT_MRT4530_52549C.1
atgccagttgcttcccttgtcaccatcggaaaacagcgtcgccgcctcctttgcccgccgtcgtcctctaggagctcagggtcgccgcctccttcgcccgccatcggcctccaggaggtcgggcccggtggccttcaacatcgacgccgccgccacctcctgaccgccagtcaccagattcgactgccggtgccttctcccgcctcccggtcgctgacgccgtcgcctcccgaccgccggccttcaacactgacgccgtcaccgcctcctgaccgccgatcgccagatctggcccccgagaagccggatctggccgccggcgccttccctcgcctcccggccgccgacgccgccaagtctggcctccaggacgcggatccagccgccgacaccttcgccacctccgcaacctcttcctcgactgccggacaccgcctccttcgccgccaaccgctgaccaccagatccgacctccacgaggttgtgggatgcggatccagcatccgcagcctttccttgactgccggacgccgctgcctccgccaccgaccgccggccgccggatttgtttgtgcttga

SEQ ID NO: 50022 - DNA, 2184 bp, Oryza sativa
  Clone ID: PAT_MRT4530_5254C.1
atggccacggccgcgacgacgacgtcgtccacggcaaccaccaccaccaccacctgctcgtcaccgtcgtcgaccaccagccccatccacccggccgtcccgcaccggcggcgcctcaacgacatcgagcgcgtcgactacgcgcacggcgccgcggccgacgactgcgcggcctgcggcggcgtcgcgcccgacgccgccctcgcggacgacgacgagtgcggccacgggcaccccgtcgtcggggccgtcacgccctgcggcggcggcgggagggcggcgctgctgttggcgcggaggaagcgcgcgtgggtcgtcggggcgggcgggcaggcgtggatgaggggcgtcgtgctgtgcctgctcggcctcgtcgcggtcgtcgggttcttgggatcgcaccggcgaggcggaagcggcggcggtggcggtggcgcaggctctggcgccgttggcggcggcggcggcgacgacggcgggaggctcgtcaagaaggtggaggtggccgacgccgacgtgatggggtggacggaggagaacctgacggctctcacgcgccgcccgcccgacccgccgataagtgatatggttgcagtggcaaagatcatgaatgcatcactagtaattcccactctagatcatcagtcattctggactgatccaagtgatttcaaagatatattcaatgttgagcacttcaaggaaatattaaaggaagatattgtaatcgtggattcccttccaccaacttacaaaagggtgaaaccctatatgagagcacctacctcctggtccagggcttcctattacagagatttttcaaggatactaaggaagtacaaagtagtgaggtttactcacacagattcacgtatagtcaataatggtcttgctccttccctccaacgtctccgttgtcgtgcaaattacaaagcacttcaatataggaaggagatagaggagctcggtcgcaccctggtagatagactgagaaatggaatggatcattatattgcacttcatttaagatatgagaaagacatgctgtccttcactggttgcaatcacaacctgacagtacatgaggcagatgaactgacggacatgcgactcaaagtgagacactggaaggagaaggagatcaacagtgaggagaagcgactccaaggcggttgtcccatgactcctcgtgaagctgctgtcttcctcaaagctatggggtatccttccaccacaaagatatacattgtggctggtgaaatatacggcgcacatagcatggatgcattaaaacttgaatacccgaacatctacacacactacagtctagccacagcagatgaattagaacctcttgagttgtatcagaacaggctagctgctgtggattatatagtagctcttcagagtgatgtttttgtatatacatatgacggaaatatggccagagcggtgcagggtcacagaagatttgaaggattccggaaaactataaaccctgataggctgaagtttgtagagctcattgataagctggatgaaggttccatggactggaatgaattccaaagtgaagtgaagaagcatcatgaaaacagacttggaggtccatatgacagattacctggtgaaagtccaaggcaagaggaatacttctattcaaatcctatccctgggtgcctctgcagaaagtggcatctgcatctgcactatcctctaggaggaatcaatgaaaaccgtctaaggaaggtggcttcaccccatgagacgtttaccgaggcaggaggcagtgtcgaggcggaagtcgaagacggcggagaggaggcctcagacgcagaggaatcgggacgagcggaggtggtcgggggatgcgagtgtgccatgacgggcctgagcgagctcagcgagcagtcggaatccggcactgaccacggccacgacgcggcggcggggttcggacgaggcgaggaatacaaacctgccggaatcgggtaccccactcggccactccccggaagagtagcgggagagccggcggcgatccggcggcggcgcggggcgcttctccgacacacacggagaccggcagccggagaggcccttctccttccgaaagacacgggccgcgcgtcagccaaagtccagttccagcccaattaaacacacggagaccgcagccggaga

SEQ ID NO: 50023 - DNA, 640 bp, Oryza sativa
  Clone ID: PAT_MRT4530_52550C.1
ccccatgttccgcgtcggtcttattgtgtttgaggatgagccttacatgaagcccggcctcgctgacatgaagaataccgtcgtcgtacctcacatcgcatctgcctccaagtggacgcgcgaaggaatggcaacacttgctgctctaaacgttcttggcaagatcaagggttatccggtttgggggaacccgaatctagtggagccatttctcaaggaggatgcaacgccgccagctgcttgccccagcattgttaatgccaaacaactcggcctgccatcgtcaaagctctaagaactggagctcggtccatcatattatatctgtcggttcaagatcatactccactacatgaagtctagatcgaggtgcatatgcttgctgttctagcggagcgggcaacaagctgtcagccagacttttgatatctaatttcacacacacacacacacacacacacacacatatatatatatatatataatatactagctagcttcaattccttgttattataccactagtacgactgtaattttgtgagtcttaaaacatgcgagctacatgtatgttattacacccgtactagctactactgtagattaattaccgctacgaaatgaagataccctagctgcc

SEQ ID NO: 50024 - DNA, 1009 bp, Oryza sativa
  Clone ID: PAT_MRT4530_52551C.1
atgcgggcccgagccgccgaccacctcgaggcgctctccctggagatcgagcgcaagctgcaaaaggctctcaactccaattcgcaacgtcttcagctgctgcagcagttgtttgctgacatcgcattgaaggtggatgaccgcgctcgagatgtgattttaagcacgaacgatgatggtattgctccagtagatgagcgagaagatacccggttgtgcttctatgagattcttgctaaccattttgttaaatatctccttgaagaggttgctttagtcccagatcaactgagtaagatatcagtacaggctggtagaggtcttttcctcctcctctcgagatttatgctgttctatgatcaagatcacttgcttgcaagtttccttgagcattttcctacttttccaaattctttcttggttggtggccctgcagattactatgtaattgaactcactgatcagctccagaaactaaaagttgaacctgtgcttctgcattacctctcccgcttgaccatccttcaaggattggaattgaggatgagtacaagcactagactgaaggcttgcctttacagcttcacttctcctggaggtcctacctaccctacacgagcagtaaggcatgcagcctggaatacactggatctgctttttcctgttggccgatatccaaggcatgtgataagcctgttctttcggcttctctatccgtggtactggccttcctcttgctggaactttattatgacttgcgtcaagactgtctactactacatcctcaacctaattgtctcaagctgggagaacatgagacggcccaaccaccaaaggatgcatagggactgaagaaaccccccccaaatcaaaggctagcaatagcatcttgtgttgtttttgttttccttttcttttttgttttcaagggtagcctggtagctcttatgtttgttcaaataacatttgctgtataaatttgtctgttaaaaaaaaaaaaaaaaacaca

SEQ ID NO: 50025 - DNA, 1509 bp, Oryza sativa
  Clone ID: PAT_MRT4530_52552C.1
atgcgggcccgagccgccgaccacctcgaggcgctctccctggagatcgagcgcaagctgcagaaggctctcaactccaattcgcaacgtcttcagctgctgcagcagttgtttgctgacatcgcattgaaggtggatgaccgcgctcgagatgtgattttaagcacgaacgatgatggtattgctccagtagatgagcgagaagatacccggttgtgcttctatgagattcttgctaaccattttgttaaattattcgaagtccctcttgatgggaaggaagtatcactgagatacagctctgctcttgtccaaggagctactaatgttttttggattgacatccaaaccaatacaagacactttctctcattatataattatctccttgaagaggttgctttagtcccagatcaactgagtaagatatcagtacaggctggtagaggtcttttcctcctcctctcgagatttatgctgttctatgatcaagatcacttgcttgcaagtttccttgagcattttcctacttttccaaattctttcttggttggtggccctgcagattactatgtaattgaactcactgatcagctccagaaactaaaagttgaacctgtgcttctgcattacctctcccgcttgaccatccttcaaggattggaattgaggatgagtacaagcactagactgaaggcttgcctttacagcttcacttctcctggaggtcctacctaccctacacgagcagtaaggcatgcagcctggaatacactggatctgctttttcctgttggccgatatccaaggcatgtgataagcctgttctttcggcttctctatccgtggtactggccttcctcttgctggaactttattatgacttgcgtcaagactgtctactactacatcctcaacctaattgtctcaagctgggagaacatgagacggcccaaccaccaaaggatgcatagggactgaagaaatggcagccaaatcaaaggctagcaatagcatcttgtgttgtttttgttttccttttcttttttgttttcaagggtagcctggtagctcttatgtttgttcaaataacatttgctgtataaatttgtctgtttgttatgctgtttacacgggggatggagtgagaaaaaaaaaagtaatgcaagagaaaagaaagggaagcctgcaaatttcatcagacttttcagataggaaattacattgttcagatttagtatatgtcaataatcaatggccgagattttaggaagagtctccatagagtcccttttgcaatgcagtgcatggtctgttgaggtagttgagcagcaaatggctaatgtgcagtttgtcccttgtgttgtaatacaactaagggtccaggcaatgaattgcttaggacctctgcactgtagctgccatgagcaagagtgaactgtttatctgtagtctgtactgcccatcatataaaaaaaaaaaaaagaaaaaaaaaaaaaaggctaaaaa

SEQ ID NO: 50026 - DNA, 541 bp, Oryza sativa
  unsure (1)..(541): unsure at all n locations
  Clone ID: PAT_MRT4530_52553C.1
ccgccctttgttgttttttnnttttttttnnttttttttttttttatttttgttttatttttgttttttctttttttattttgtttataaactgtaaactgtacttaaacaaattgaaggtaaaacgggcccaagggaacttgaagaacaagcaggaaaaaagagaagaaaaaaagaaaaaaaaaaaaaaaaaaacaaaaaagggagaaaaaaaaagatggaaaagacaacccgcacaatgagcacaacccacagggaaaaaagggccaacaaaacaaccacacaaggaggaaaaaaaagggcaaaaaaaaagggagaaggaggaaaagaaccaaacgggagaccccaggggaaggaaacggaaaagggggagaaggaccccgccgggatggggaaggggagggggggtgatgacaggcaatgcacgaggaaggggaagagaagggaaagcaggcaaggggggccggccggggaagggccgccggggggggcccgggggaccagccgggccggtacgggggggccctggaggcggaccaaa

SEQ ID NO: 50027 - DNA, 456 bp, Oryza sativa
  Clone ID: PAT_MRT4530_52554C.1
attaatatatattattaggtaaaaaactttgttaaaaatctattacaagagaaaaaacaaaaaaagaagaggcaaaaacaaaaatatgatctttaaaaagaaaaaagacaaaaaggagggggaaaaggaaaaaggaccggggaaacgcaccagagggcgggggcgaccatgagagaaaagaaacaacaacacgcctctcgacaaccagagggaaggacaaaacgaaggaaaggacactcgccaccagggaggaccaacacgcgacgcaaaaaggaacaaccgaaggaaaaaccgcccccccgaaaggaaaaaccatgtcatacggaaaggccgaaatcgaaaaaacaactgcttaaagaaccgccccaagggaaaaaacgaatccccgaaccaaaagaccgaccggatgaaagaatggcccgcagccaaaaaaaaaagcctgaaagagaccccccc

SEQ ID NO: 50028 - DNA, 1131 bp, Oryza sativa
  Clone ID: PAT_MRT4530_52555C.1
atggaagtggaagcaaggatacacctcctgttgatcaagctagtcttctataggagtgcagaagagcgagaatcagcctctgttcatattaacttgctaccagttcgggagctatactttgatccgcggaagaagatggacgcattctcccatgtcccgccaggttttcgtttccaccctactgacgaggaactcgtggattactaccttaggaagaaggtagcactgaagaagatagacttggacgtcataaaagatattgatctgtacaaaattgagccttgggacctacaagaacaatgcaagattggaaacgaggagcagaacgagtggtacttcttcagccacaaggacaagaagtacccgacgggcacacgcaccaacagggcgaccactgccggcttttggaaggccaccgggagggacaagccgatctatgtcaagaactgccttgttgggatgaggaagacgttggttttctacaggggccgggctcccaacggacagaagtcggactggatcatgcacgagtatcgcttggagaccaacgaatacggagctccccaagaggaaggatgggtggtctgcagggtgttcaagaagcgagtcgcggcggtgcaaagggcggccggcgacggcggcgactcacctttctggttcaacgagcacgtcgcgttcatggcgccggcgccaggcctcgactcgccgtaccatggccaccgccagagccacccttgcaagctggaggtagagtatcaccaccacctccttcctcaggaggcggcgccgttcatgcacctcccaaggctggagagccccaagctaccggccgccgacatcattgtcgccaccgcagcgtcgtccgctctccagccgtgcggccacacgacggcgcagcagctgcagctgcagatcgagccggtctacgtgacggccgatgcgtcggcagcagattggagggatcttgacaagctggtggcgtctcagttcggccacggcgactcgactgcgaaggagcccagttactgcaatccggtgcaggtgtttcaggtcgaggggaagcaggaggatagcttggattacgtgtccacgtctgcctcctgcggaggggaggaggatttgtggaaatag

SEQ ID NO: 50029 - DNA, 159 bp, Oryza sativa
  Clone ID: PAT_MRT4530_52556C.1
gcatcagcagctaaaagtaagggaaagaagaaaagggtggcccgcctagcaaaaaaaggagggcatagtcggtctggagtcaaaaaatctctatattcatccgaggcacctacttaagcagcttcgataacctaatgatacccacgttaatgttttcgc

SEQ ID NO: 50030 - DNA, 447 bp, Oryza sativa
  Clone ID: PAT_MRT4530_52557C.1
ggaacaaaacaggacaacctttttattcaggccacaacatttaacacggggcacaggaggctaaagccccaaagccatacccaggggggggaccgaagcaggctaattaaaatctaaaacccctggggcagggaaaggccgaaaacgggaaaaaaacccctagggggggggccccaaagggaccaaccaaaatgggggctccgggcgaacccccaaaggccccccccctgggcccgaagttgggcacaaaatgccgggggcaccggcccccaaaacagggccggccccgcccacggggtaagaagcgtggggttgcccctcgaggggggaaccaccgccgcttccaccaggcgggggcccagggccaccatcaagtccacaagcagcagcgggggggaaacggggaacaccgggaacgttgagggggacaacttccccataataatt

SEQ ID NO: 50031 - DNA, 240 bp, Oryza sativa
  Clone ID: PAT_MRT4530_52558C.1
atgaggtaccagtcttcatccggccgttcattgaggggtacgatggggatgggagtatgcgcgagcgccgcggccgcaggagtcgtcgccgccgccgctgcaaggtccgccaccgcagtggccggcggtgcagctgcaagggccggtgccatacgcttcaaggttcgccgccgccgtggccggcggtgcagctgcaaggccggcgccatcctctgcgccatccgccgcagtggccagtaa

SEQ ID NO: 50032 - DNA, 157 bp, Oryza sativa
  Clone ID: PAT_MRT4530_52559C.1
ccccggccaggagctgtcgaacctgaaaatcatgatcaatatggtggggctgaccgtcttggcggacgattccgtcgaatggtcgctcctcacgacgctgtcgcggttgcgtatcgtgctgcccaatccgccattaattccaatcagcatcagctag

SEQ ID NO: 50033 - DNA, 2250 bp, Oryza sativa
  Clone ID: PAT_MRT4530_5255C.1
atggccacggccgcgacgacgacgtcgtccacggcaaccaccaccaccaccacctgctcgtcaccgtcgtcgaccaccagccccatccacccggccgtcccgcaccggcggcgcctcaacgacatcgagcgcgtcgactacgcgcacggcgccgcggccgacgactgcgcggcctgcggcggcgtcgcgcccgacgccgccctcgcggacgacgacgagtgcggccacgggcaccccgtcgtcggggccgtcacgccctgcggcggcggcgggagggcggcgctgctgttggcgcggaggaagcgcgcgtgggtcgtcggggcgggcgggcaggcgtggatgaggggcgtcgtgctgtgcctgctcggcctcgtcgcggtcgtcgggttcttgggatcgcaccggcgaggcggaagcggcggcggtggcggtggcgcaggctctggcgccgttggcggcggcggcggcgacgacggcgggaggctcgtcaagaaggtggaggtggccgacgccgacgtgatggggtggacggaggagaacctgacggctctcacgcgccgcccgcccgacccgccgttgggtgctcttattgcagggactaacaatgcaactgtcggttatctaattgttgatgcaaacggggggctaaatcagatgagaatgggtataagtgatatggttgcagtggcaaagatcatgaatgcatcactagtaattcccactctagatcatcagtcattctggactgatccaagtgatttcaaagatatattcaatgttgagcacttcaaggaaatattaaaggaagatattgtaatcgtggattcccttccaccaacttacaaaagggtgaaaccctatatgagagcacctacctcctggtccagggcttcctattacagagatttttcaaggatactaaggaagtacaaagtagtgaggtttactcacacagattcacgtatagtcaataatggtcttgctccttccctccaacgtctccgttgtcgtgcaaattacaaagcacttcaatataggaaggagatagaggagctcggtcgcaccctggtagatagactgagaaatggaatggatcattatattgcacttcatttaagatatgagaaagacatgctgtccttcactggttgcaatcacaacctgacagtacatgaggcagatgaactgacggacatgcgactcaaagtgagacactggaaggagaaggagatcaacagtgaggagaagcgactccaaggcggttgtcccatgactcctcgtgaagctgctgtcttcctcaaagctatggggtatccttccaccacaaagatatacattgtggctggtgaaatatacggcgcacatagcatggatgcattaaaacttgaatacccgaacatctacacacactacagtctagccacagcagatgaattagaacctcttgagttgtatcagaacaggctagctgctgtggattatatagtagctcttcagagtgatgtttttgtatatacatatgacggaaatatggccagagcggtgcagggtcacagaagatttgaaggattccggaaaactataaaccctgataggctgaagtttgtagagctcattgataagctggatgaaggttccatggactggaatgaattccaaagtgaagtgaagaagcatcatgaaaacagacttggaggtccatatgacagattacctggtgaaagtccaaggcaagaggaatacttctattcaaatcctatccctgggtgcctctgcagaaagtggcatctgcatctgcactatcctctaggaggaatcaatgaaaaccgtctaaggaaggtggcttcaccccatgagacgtttaccgaggcaggaggcagtgtcgaggcggaagtcgaagacggcggagaggaggcctcagacgcagaggaatcgggacgagcggaggtggtcgggggatgcgagtgtgccatgacgggcctgagcgagctcagcgagcagtcggaatccggcactgaccacggccacgacgcggcggcggggttcggacgaggcgaggaatacaaacctgccggaatcgggtaccccactcggccactccccggaagagtagcgggagagccggcggcgatccggcggcggcgcggggcgcttctccgacacacacggagaccggcagccggagaggcccttctccttccgaaagacacgggccgcgcgtcagccaaagtccagttccagcccaattaa

SEQ ID NO: 50034 - DNA, 402 bp, Oryza sativa
  Clone ID: PAT_MRT4530_52560C.1
atcaatctctatattacttaaaatacatactttttttctaaggaaacagaacaaggcaagacgtctggtcttccataacatcaatcctccttaccgcccctctattaccacctacatttacagtctttgcggtagctgccacatcaagtgcggttgtagcagcttcttcttctgcaatgacatgtccagcatgaatccccaatatgattatttattcaagttacttctgattgactacttataggttgtaaagtcttgcctccttcttaggttagcagatgatacatatacagaaagctacatcaatacaattgatttgtattacaaaataataactatagagttagatcgtaaaacaatcaatctttaaatatagtacacaccatgccaataaatatttca

SEQ ID NO: 50035 - DNA, 423 bp, Oryza sativa
  Clone ID: PAT_MRT4530_52561C.1
atggtttttgctatcccactaataattagccttttgcagattcttatccccgtagagtactgtgataccttcattctaatagtgttggaccaagatacgagaactctgtatgtattagacccgactcctattgatccaatttacgagaacaatccaaacgcaagatatgtgaaacaacttttatgcattgctgaatacttggcaaaagccatggctaaagtatgccctggatctaggtggaacgaggatatcaacctatggcggcaaatattcctttcaaatgttccaattcagagcagggaactatccggttatcttgtttcccttttcatgcgcacatgcagagatgaaggaatacaatttccaattttaaaggatggcttcagctatgaagtacggaagcatttttggcacaattattag

SEQ ID NO: 50036 - DNA, 2081 bp, Oryza sativa
  Clone ID: PAT_MRT4530_52562C.1
atgctcctcgtcgacggcgagcccgtctccgcctccgcctcccccaccttcggctcctcccgcggggtgcgcctacttggttgttggagggatttcttcccaccgatcaattcgtcgttataatgggaatttggatagctctaattattgcttaaaataacggtaatcatgtgtcatattttctgttcattagcgaatcaaaccctgtacaggactacaagaaaattccttcctttcagctgtgttaaaaaatggtacctcccaatcatgcaatagtttttttttttaaagtccttccagcgggagttcgccacggttgatccggcgcgcgtcgagttagtgggcacagatgaggtgactacatgcgtgggtgtagtaattcgcaacaacaagactggaatgacctccattagccacatggacttcccaaaaattgtggagggagggctcaaacagatgttagaattacttggtgatgacaatgcaccgtttgatgttgtacattctgctggaaggaagcacatcaaacaggaagggtattcctatccactatgttgcaggatacttgaggtgttgtataagtcccggcagcaattccatcttcgtacattttgtgtccttgggagcaataccacaactgattcatacgggaatacacggccaataatcggtggatttgtggtggagacctcatctggggctgttaatccagcaagctttgaaatgaattcaaggtgtccagatgaaatagttaggagaattcgtgtgagcgtttcttcttatgatccaaattggcaaggaaggctactagagacttatgatactcacagtgatgcttttgaaattgcacctgcctgctggatgccggattgggctgaaatggcatcatcacttaaccagctatcggactctgaggtcttgttgcagtgctccacctctccagctgccgagccaccacattttgtggaaaatgagagaaggatatggagatacttgattgaaaatccatattggcaagacacatttccgaaatacaagcctcgggtcttccataggaccagtgatggaagtacttctggctgtccttttggttcaagttgtcattttctccataacttccctggtggctaccaggctgctgcaaagatgaccagccatggtgggacagctgttgcagctcctcctggaagaatgcctttaggacctggtgctcctaatgggccacctacatccagcgtgaaaactcgcatgtgtaacaagtacaacactgcagaaggatgtaaatggggtagcaagtgtcattttgctcatggagagagggagcttggaaagccgatgctgctggacaactcaatgccacatccaatgggatcaatgccgtttgaggctccaccaatgcctggcccggacatcgttcctccctcaacctttggtgcctcagccacagcaaagatcagtgttgatgcatccctggctggcggtatcattgggaagggtggaaccaacacaaagcatatatcccggatgactggggccaagctagccatccgggataacgagtccaaccccaacctcaagaatatcgagcttgagggtacatttgaccagatcaaacatgctagtgctatggtcacggagctaatcgtccgcatcagtggtaatgcccctccagccaagaacccgggcagggggtcgcatgctggggggcctggaagcaacttcaagaccaagctgtgtgagaacttcaacaaaggctcctgcacgtttggagacaggtgtcatttcgcccatggtgaaagtgagctgcgcaagccgccggctgctgcttgatacatgcgtgtcgtggcttggactagacggccagcatacctgagctccaaatatgaaaacgattgcacacaaggtgaaaatgatatgtgcattgttgctgcttctgcagcatgagatattttgtcatgggaggaaactggatgtaatctgggaggaaatagataacagggaatttcggtgtcttagatttgtagaattaccttggagtttttccctcggcgcttcagtcaaattttgtaatgcttcgaatg

SEQ ID NO: 50037 - DNA, 331 bp, Oryza sativa
  Clone ID: PAT_MRT4530_52563C.1
ctaaaaaataattttcccaggggccggggaaaagggaaaaagaaaaaatcgggacccacaaaaaacgggggggcaccactaaaaaaaaaaacggaacaaactaccaccccaaatcccaagggacaggactcccgggggcccaccccaaggcaccaacggaggaaggccaaaacccggaaaaaaccccccccagggggggaggggaaaaaaaaaacggcaaccgggggagggcaggggaggacggacacaacaacccgtgggggagccggtccggccccggccggaagcccaacctccccagggggccggaacccgggatggccgggggggc

SEQ ID NO: 50038 - DNA, 1603 bp, Oryza sativa
  Clone ID: PAT_MRT4530_52564C.1
ggcgagggcgcgcgttccccgcaatggcggccacctagtccctaaggaatcctcgcgcttcttcttcttcttctcggatgcgagagcttgctgtgattgctggctagctagcttgccggaatggagggcttctcgagggacttgctgtgcggcatcggcaagggaggagacgggccccgcggcgaggtgaggccgcgcgtggacatggaggctgaggaggtggagctcaacctcgggctgtcgctcggcggccggttcgggctggacaggagaggggagaagctcgccaggtcgtcgtcggtcgcggccatcttggcggcgccgacggagccgtcggcgccgccgtccgggctcttcaggacgagctcgctgccgaccgtggccgccgcggaggcggcgaaaaagcagggtgtggatgaattgaactgtcgccgcccgagcggcggcgcggaggcggagcccgcggcggcgaggctgccggcgagcgggagcccgtcatcgggctcgtcggacggcgaagggcgcaggcttgaagtgaatatgacagacactctcatgagaacaagttcactccctgccggcatcgaggatgaatggaggaagcgaaaggaggctcagagtctgaagcgactcgaagtgaagaggaagagaattgagaggaggaactctctcacttccaacatttccaaagaggctgttgggcagatattagaggagatgaatgcaggagctgagaaagtagaaagttgcgatgatgttgctacaggcaataagaagacgggaggaaatgtgaaccatagcagtgatagaaaccgctgcactggacttcctccagtccaccgtgccacgtatactcaacaacgtggcagtctgtccggaataccaacaaagcatattccagctatgaaaggatctgctgatgccgaagagcacaacgttccatcggccgctactgagcaccgaaatggagcagccatagcaacaccgccattttcggcactggcggtgagggcagtagctcttgcttccaggggagagcagctgcgtgctacaggaagagttgcggcaagagccaagagcatgggagatgtggagaggatcatgatgcaggagatgccatgcgtgtgcaccaaggggctccccaatggcaagagggttgaaggcttcctgtacaagtacaggaaaggcgaggaggtgaggattgtctgtgtttgccatggcagcttcctgacccctgctgagtttgtgaagcacgccggaggtggagatgtcgcgaacccgcttcggcatatcgtcgtcaaccctatcccgccatccttatactgaacctctctgtcagctcactgctgctcttgcaagtgttactatagcttcagtcagcccttcaccttagcttcagaattcagttcagagtagaatctgattgtgagacttgtcttaatgttacaagtgtttattatgctaaggagacagcgggagatttgctcctgctgacataaaaagtggttaacatggctccattgatcattgttaaatggttcctgcagctgcttttgttcatgcaggttgtgccaaattcatcctagtgcaagtttctctggcc

SEQ ID NO: 50039 - DNA, 966 bp, Oryza sativa
  Clone ID: PAT_MRT4530_52565C.1
atggaggcacgggagaaagggagggcggcggcagggcgaggcggtgtccgcggatgcggcggcggagaggcggcggcagctacgacacggggcgaggaagtccgacggtcggccggcgacgcggcggcggagacacaggtgaaaggggagggcggcggtagggcgaggcggcttcggctgcgacgcagggcgaggaggtccgacggccggccggcgatgcggcggcggcgacacggcgtcggcgggcgagcggcggcgccatggccacagctaggcggcaaccgcagctggttcaagttgccgatgctgtcgtcgcagcaggcgtcgtatgtgagcgaggaccagcagcgcgaaagggagttcttcaagcctttgacaatggctgctgacagattcttgcacttcgcctcgctcgtttccgtggtggtcttggccgccggatcgagatcgccgggcggcgtggcggcgctgccgcgccgtggccagctggttgccggcggggacaacgacaagaacgagtgcgtgtacacgctgtacgacatggggaccgggtggatctggatggccggcacggacgcggcgatcggcgtggagctcgcggcggcggacggcagcggcttcgccgtcggggacctggagcggtggggcgggctcatgggcgccgggcacgactactacgagcgcgccaccgcagcgtcgccgcccgaccgtcggacttcctcgccccgtgtcgtagccgccgccgcctctccgccgccgcatccgcggacaccgcctcgccctgtcgccgccctccctttctcccgtgcctccatcgccgcgtcgccggttggccgtcggacctccttgcgccggcgacctcctccccaccgccggccggccctgcacagagtccagagaggagtgagagagagaggaggaaaggagaggaaggggagaggccggtctgctgatgtggcatcctga

SEQ ID NO: 50040 - DNA, 579 bp, Oryza sativa
  Clone ID: PAT_MRT4530_52566C.1
gtggatccccgggctgcagggctgtgagcggtcgactctggtggagccggccgttattgccgcaacctcgtgggctacaggacggttgtgcgtcgatttgaggagggagaggcggcaacagcaataaagaggggagaggcctgccggcggctgtatggtggagaagcgccgccgcagcccgcatcccctcctctcgcccctccctctccgacccgggcgattcgcaagccgccgccgccggagtgggctccaggaaccaccatcgtcgtgtcccctggtctcctcaatcctcctgtgcgccactcatgccggcgagatgagatcggatgccagcgagatgagattggcggcagtgggcaactccaagaagtcgagattgagggctctggctaccgccttcgataacatctggcctggtgctgcgcctgcctcggcatatctggcgatggtgtcgacctcagcgatgacatggattgcgctccgacatttgtggcggatcaagcacacatcaatggagccccacttctcctcccccaccagcaagggcagatggaggcggtgtgcgccggtggatgccat

SEQ ID NO: 50041 - DNA, 167 bp, Oryza sativa
  unsure (1)..(167): unsure at all n locations
  Clone ID: PAT_MRT4530_52567C.1
aatgacacaacattgtggctgancacagctggctgcatggtgatgcgtgcaatggctgtgcacgtgcatggtgctgttgatgagcaaggtgaaagcncggatggatggatggtgcaaatgcagtgcacagaaagcaacaagcacaacacaccaacgatacagtttag

SEQ ID NO: 50042 - DNA, 294 bp, Oryza sativa
  Clone ID: PAT_MRT4530_52568C.1
ctgtcagtgagagagagaagccgtcgatgggggaggaggcggcgaagcggcagcagcatccgcgatgatgtcggcgtccgttccgccgggcggagcccctggtcacggcggagcccgcggccaaggatttgcgccgtgtttttggtattcttttttcgttccaattttttttttcttgggggaatggagcaggcagcttgtgggagctagatagatcaaaggaccatgtatttctcaccgatctgttgcagggaatggagcttaaggagtttccgataaaaaaaaaaaaaaaaa

SEQ ID NO: 50043 - DNA, 425 bp, Oryza sativa
  unsure (1)..(425): unsure at all n locations
  Clone ID: PAT_MRT4530_52569C.1
tcggcctacaacactgtatcattcgctcncacagatatgctggatgtcgacattcaatatcaatgagagacttctgaaggcttcaaatgacatttacggtgcatctaacttcatataaaaaactgcttacaggcacctactgctcctgatcaatgattaccagcgtctatcagaacccataatgatctcccctgttcagggctagagatatcacatctatgcctatgaacagatatctgacatgatcgcatgaacatgccaatcaattactccgtgcgaatcaatcgatcgatcgactgaaatcaggcgaatccgtccttccacgcgacaccgtgataggcgccacggactgtcctcctattattcctgaacccacagtatccgagggagtagaccatgacgattaagactaggaatacgatgca

SEQ ID NO: 50044 - DNA, 216 bp, Oryza sativa
  Clone ID: PAT_MRT4530_5256C.1
cttgagcgagaggagaggaggaggaggaggaggctagatatggtggcaccgaacggtaaggcagggggaagggagccagagacgctagaggaggcagtgagagctggatggaaccaggagtgcgctgagcatgaccagtgcgtcttcttccaactggaaacgatagagaagactccttgtctcacaaagatcaaatctatattccgtggaccatta

SEQ ID NO: 50045 - DNA, 405 bp, Oryza sativa
  Clone ID: PAT_MRT4530_52570C.1
ctctgaggtgggctggcttctcctccccctctttaccttttcctcctcggttcggttccgtggttcgtctagggtttagtgggttgagatggcggcgccggatgtcgagtaccgctgcttcgtcggcggcctcgcctgggccaccgacgaccgctccctcgaggccgtcttctccacctacggagagatcctagactccatgatcatcaacgacagggagacgctcaggccacgggtgttggtcttcgccaccttctcctccgagcagtcgatgcgcgacgccatcgctttcatgaacgatggggcacctgcgtgtccgacgcagctcggttcgtgggggccacgcccggcggtcggcgctggccggccctcgttaccgcggggtccttgcgggcgctcgtgcgg

SEQ ID NO: 50046 - DNA, 1385 bp, Oryza sativa
  Clone ID: PAT_MRT4530_52571C.1
ccggccgggacaaaaccattcaagttcattagtactacaacaacatggcatccataaatcgccccatagttttcttcacagtttgcttgttcctcttgtgcaatggctctctagcccaggagctattatgccagagcactagtcaatggtagagttctcgtcgaggaagtccaagagaatgtacgttcgataggttgcaagcatttgagccattcgtgggtgtggcctcacgtgtggccaactgagctcttcgatgcccacccggccgggactgcctgagaagccgagaccactacaagcagcaactagcttagctagctagctactggtgatcaggcacgagctagccggccatggcgaggcgtcgccatgcttgctttcttctcctgctgcctctgctggtgctgcagcttcttcttgctgggggaagcttggttgatgatcttcctgctgcaactcatcaggtgccgaggttagtagggccacagcgcaagttacagcagcttccaaacccaaggccacagccgcaaccattgccccagccaaacccaaatccacagccacaaccactcccacagccacagccacagccacaaccacaaccacaacctctgcggtgttctcggggtgattccaaaagcactcatgcccaccgagatatcaggtgcaagtgttggagaagtgaaaattgtgtctgacatgcatgagaggaaagctgagatggcacgccaatccgatgccttcatcgctcttcctggagggtatggaacaatggaggagttgttagagatgataacttggtcacaacttggaattcatgacaaaccagttgggttgctgaatgtggacggttactatgatccgttgcttgcgctatttgataagggtgcggcagaaggatttattaaggccgattgcagacaaataattgtttcggcaccgactgcgcatgagctgctgagaaagatggagcaatacactcgttcacaccaggaggtagcgccacgtacaagctgggagatgtcagagcttggttatggaaagacaccagaggaatcgtagcataatctgctaatgtgacattgttcctgaaggagaattgcagctgctccttttatctcccattttggttaccttatcgtgttacctgtccagtcaacttcatccggtgaagaagatgcataagaaaatatgtacctaccctcggttttcctgtgggggaatgaacgcatggttatagtccgtataatatttcctgccttacataaattaagaggcatttgagcaacagaatccgtgtgttttctccttgcaaattctatgcaaaattcgattgggtcttgtaaatctgcagatgtaatgcaagggaacacttcttatatgct

SEQ ID NO: 50047 - DNA, 239 bp, Oryza sativa
  Clone ID: PAT_MRT4530_52572C.1
ccagcagcgagaggatcctcaactgcatcgcccacggcaggcgacatctaccggcgtcaccaccaggattcggcggtaccttccaccgccggaccaaggacgggcccgccctccaagtcgagctcctcaagcatttcaacgccggaatattgggcactggctccaatggccacacgctgtcgtcggagacggagcaggcggccatgctcgtgcgcataaacaccctcctccaaggctac

SEQ ID NO: 50048 - DNA, 312 bp, Oryza sativa
  Clone ID: PAT_MRT4530_52573C.1
atgcttgaggacctgcccaatgcggaagtcatcgctgtcatggccaagatgctctgggtggacgccaacgccatcatgaaatctgacctcacatttgctcttggtgacagtggcttcacaggatgtggcagctgggagacgctaatggcatcatcctaccacgcaccatggggagaagaggcaggatatgagcaagacgacgacgatgacctcaccgctaccgcaccgacggagacccctcagcagcagccacagccatcatcttgtgccgtcctgccaccagatctcgcgctgcctctgtggatcagatga

SEQ ID NO: 50049 - DNA, 185 bp, Oryza sativa
  Clone ID: PAT_MRT4530_52574C.1
atgttggttgatgtctggccaccgagccagaaaggagagcggaaccttaaccccgtgcacgagcgacgactcatgggagtgaagggcgaattcccatcgccgtcactgcatggtgatcttcatcaccgtcgcctcacaactactacaccgacgcatctaaggcaaccatatggcttcttcatccg

SEQ ID NO: 50050 - DNA, 1670 bp, Oryza sativa
  Clone ID: PAT_MRT4530_52575C.1
cacttgtccatctccccccatccatcccccactcctccggtactcgcaccgcaccgcaccgccgattgatttggagaggaaaccccctcctcttcctcctccacctacctctgctgcttcccagccagatccgcctcctcctcctcccctgctccctcccagatctcacactccatctcgcgagcgcgccgacgcgggacagctcgccaccccgcccagatccaccgtctcgccggagccggagagaccgagcggcgggcggcggggaggaggatggccgtggggaaggagggcggcggcggcgctggcggcgaggggggcatgtcggattcggtgatccggaaggtgctggtgtcgtacatgtacgtggcggtgtggatcttcctctccttcacggtcatcgtctacaacaagtacatcctcgaccccaagatgtacaactggcccttccccatctcgctcaccatggtgcacatggccttctgctcgtccctcgccatcgcgctcgtccgcctcctccgcgtcgtcgagctcccgtcgtcccccgccatgacgccgcagctctacacctcctcggtgctccccatcggcgcgctctactcgctctccctctggttctccaactccgcgtacatctacctctccgtctccttcatccagatgctcaaggcgctcatgcccgtcgccgtgtactccatcggcgtgctcttcaagaaggagaacttcaagtcctccggcccgctcaacatgctctccatctccttcggcgtcgccatcgccgcctacggcgaggcccgcttcgacgcccgcggcgtcgcgctccagctcgccgccgtagccttcgaggccactcgcctcgtcctcatccagatcctcctcacctccaaggggatctcgctcaaccccatcacctcgctctactacgtcgcgccgtgctgcctcgccttcctcgtcattccctgggccttcgtcgagctgcccaggctgcgcgccgtcggcacgttccagccagacttcttcatcttcggcaccaactccctgtgcgcctttgcgctcaacctggcagtcttcttgctcgtcggcaagacgtccgcgcttaccatgaacgtcgccggcgtcgtcaaggattggctgctcatcgccttctcctggtctgtgatccgggacacggtcacgccgatcaacctgttcggctacgggatcgcattcctcggtgtaggctactacaaccacgtcaagcttcaggcgctcaaggcgaaggaggcgcagaagaaggccgcacaggccgacgaggaggccggctcgctgctgcaggagcgtgactcgcacggcgaacgcaagagcgacaaccaggcctaaagcgtgggatctggtccaacagcacacgcaatttggttggttctaatgaattcatcaatgtgtgatcctctactagtttgatgcaaaatctgttcatttcttgtcttaatttgtggtaggaaggcaaataaatacaggaaaagtacgatctttgtgtcgggcatatgaaaatatgagtcaatttttgccacttgtagttactttgacagtatatgaaaattgtctacattgtggagtactgttagctgagtatgtatcatggaatactttacattttatctagtacggaacatggagttaatcagttttat

SEQ ID NO: 50051 - DNA, 2949 bp, Oryza sativa
  Clone ID: PAT_MRT4530_52576C.1
atggatgctgtgaatgttcttgcctcggcgacccagctggtgtccgcgatgctcaccgcggtcggcgcgctggagcaggcggctgccgacttcgccgaggctcccaggaggctccaggttcttgaggattttgtgtccgaccttgggctgttgatgcagcaatccaagcagaagcacgcgcacaagatgcacgcgccgcagctcgagcgtcagctccagagcctaggcaagctgatggaccagctccatgccaacatcacaaaggcgaggcgggtgttgaagaaaggcaaagggaagaagggcttggccagagttgtgtggagctcggtgacaggggaccctctgatgaagtatgttcagctgatcagggatgatctcaactggtggcttgagttacagaagctaacagagagtgtgggcaatgtcatagcgtctacagctaagagtacgccatccttggtgagagtcaagtcggagcatggctatccagtgtcaaagaagtgcagctatgtcagggagctgcttatcaatgatggtagtcatcgagttgtcctgattgtcgggtatctgattggttccatgactgtcaatgaggatgtgggcaaagatcttgaagatgtctgttacttgcttcagactgcattggtaggaaggagcatgctgatcctacttgatgatgtctgggagcaagacatagttgatcgcttcacaaacctatatgataatgattgccggtatcttgtgacaacgagggatgaggcaatttatgagattgcagaagctgaaaaggtggaaatatccaaagatgatatcaaagaaattggcaaggacattcttctctatcatagccttcttactgttgaagagctcccgcctgttgcgtacgacttgctggatcgttgcggccaccatccccttacagttgctgtcatgggtaaggctctcagaaaggagaccagagtcgaaaaatgggatagagcaatctccaacctttccacatatgcaacttgtgcacctggaccggtttcatatgtgaatgagaaagaagtggaaaccacattgaccatctttgggtcttttgagttcagcttagaagcaatgccagaaaattcaagaaggtttttcatggtgcttgcagctatctcatgggatgaacctgttccagaggcttgccttgaatccatgtggtcagcactcatgcaggacactttattccccctcgtggtctcgaaactagtagaaggctcactcattatcaaactggaagaccaatcgatgtatcatatgcatgacatggtttcgctttacctcgagagtaaaacagacaacgctgttcatactcttttgttcggttcatttcctgaatatgctgcattggtgtctccttggcttttcatttttggcaaagagagcgcaaaagagcgagctgaacagaagataagatcattattttctttgctagagttcatggagatagagattttactaggaagcaccacccaagctctcatggaatgcaaatccatatctgaatttgaggctagcaggcttcacttcagcaaaatacttagtcctcgaatagcggagttaatttctgtggggtcaacatctctcattgttactgtcaccaaatctattacagtaatctttttccaaggagattatgctaagcttgctcagtctcttgaaacagcaggttctgtggataaattaattcatgttcttcgtggctgtgaagattcttctactctagccaatgtttctactgttcttgccaagatatctgagcatgttgatgctacaactgctgatgaaattttggcaaccattcctatggaccaaattgcgaaattactctctcctgagaatgaagaatggcatgaaattgtgtttacaactctagcatctttgataaaggtgggaaagttaagggctgttgagacaatgatcgaatcaggaattgacaagaagcttcttgttcttctaggcagtggttctgagatctcacagcatcatgcgattatcatgctaaaaacattctgtgaacttggtgcgccacttcaggggtgcatgggacctggagcgttgactcatttgccttggcatgctcgtctcagtttggagagatttgttttatttgaccaaaatgtaactccatcaccaaagcctcaacaatcttttgagttgattcttcacaagatactgcacagagacaacaaagataacattgaggcgatccaaggtttattacctctcgctgagagggctaatgattcaagggtgcaagatctccttttgggaagcaatatgtccaatgggttggcactgctgctgcaacggagagacattgaaagcaaccaagtgaggtctcacactgcttttctggtgatgaaattagcctgcactggaggggaaccatatgtccataggttcttagaggctaacattgttcatgagctaattgacatgatgcagtgcaacatcaacgatctccaggattcagcatactatgcccttcaccagattatctttgcgaaggggggatcacttgtattacagagatttttacaagcaggaaccattgaaaaattggttaacttgcttgaccgcaagtcttcaaagacaaaggaactaacaatgcagcttctggtagacattgcggtggtcggaaccaaaccttgcatcgaaagaatgctctcgtcccaaatcatcgagaaatttgtggcactcgagaaagcaggtgggtctttcagtggagcggtatcaagatacgtgcaggggttgaacatgtgcaagaacgtccagtctgctgagagatcagtcatgaagcaacagattctgaggaaagtgagatcagagataagaggtcatgatctggaagcaagtctagttgcctctgtggaagcttgcatttctgaaaaaggagccagcagcaggaggaaaaagtag

SEQ ID NO: 50052 - DNA, 297 bp, Oryza sativa
  Clone ID: PAT_MRT4530_52577C.1
atggaagagggcgaggacgccggccaaaggtggtggccagggcggagctcaccggcgcgcggtgtgaacggggttcccgcggctgaaagcggcggcggaaaggcggacggcgtggccctcgggcttgcgaacccgatggcggtgtcggcgcggctcggcgcggtggctagcggctaccggagcggcggcggtggcagcggcggagaggagggcgaaggcgctagggcgatagaaggcacgagagagctcggcgaaatggagaaaaagagagaggggagagcggggatgcttaaatag

SEQ ID NO: 50053 - DNA, 487 bp, Oryza sativa
  Clone ID: PAT_MRT4530_52578C.1
gtaatcatacatgagataagatttatatgtaagctagcaatttgttgtgcacacataatttagcacaaaggcggaccaaattataggtataaattagctagtatggatgtatgattttctagctaaaacatcacctcattgttcctgagcccttgcaatataatgattgcacttgtaatgaacaaacattcatctagtgaacatacacatctccagattcctatcaaacaaaataaaacatatctctagactccacatatatagcatgtgctttttttggaatcccatgtcatcagctccaattgttttggttatctagatacctacaaacaaaggacttccagaaaagataaaccattaataatattgattggcaccatctgagaacaaaaagagaccataaataagagtgatagtatcaagaacacagaataacccataaggtacatattgaacttgatgatttctcaagcagcactgctagtga

SEQ ID NO: 50054 - DNA, 402 bp, Oryza sativa
  Clone ID: PAT_MRT4530_52579C.1
ttacctctcagctcgacaacctttggggaagacgacacttgcgagaacaaggattggcacgtcggtgctgggagaaaggcgacaaccgttggggaagatgtcgcttgcgagaacaaggccggattgccgcgtcggtgctgggagaaaggcatgagcaattgaggaagatgacgcttgcgagaataaggagaaaaagaggaagatgatggtagcagaggcaacatcgccctcgtcccttgatcctccaaatctgggtatcctcattgggcccttcttcatccctctctctttctcctggatgtggtcgagctcgaggtcgtggtcgttgctaccgtggatggcgtggacgtgttcgacctcgacgctcaccggctggttgatgcgtccacactcgcggaccat

SEQ ID NO: 50055 - DNA, 1320 bp, Oryza sativa
  Clone ID: PAT_MRT4530_5257C.1
atggagcaggtttcttcttcttctgttaccggtgaattactggagcaggaagctccaccttcgacccccggtctcgattggtcccagcttcccgcggacctgctcatccgcatctttggcacgctggagatcacagatatcttcagctctggcgtggtttgccgctcctggcatgccagctatctagaggctcgccgcctcggaatttgctccaataaccccgggccgtgccttgttttctcctctagcgaccgtgatcctagtgttgccaccctgcacagcctcaccacagggaaggactactatgttaccatgccggatcctcctttccgtacccgctatatagtcgggtcctcgcatggctggcttattacagccgacgagcggtccaatctgctccttgtcaatcctgcgactcaggctcagatcgccatgccgccaccggaaacaatagcgaatgtcaagatacgttgcaatggtgagggaatgctagatggttatgatctttttacaatggatatgtcatcacgagattttgatgatgaggcagagcccattgatctttcctgggaagaaggccgcttttacttctacatgagggttgtcctgtcagcagatccatccagtggaaactgcactgtaatgatcctgcatttgctacataatctcctttcctttgcaagggtgggtgccactcattggacctggatcaatgttaatgagctatgttggaactatcatgatgttttgtacaacgatgatgatagattgttctatgcaatccgaggcaatggtgatgttcatgctatcaatacaaatggaccctctccaatattaagggttgtcttagacgccaagaactcactcatcaattgtgccaagtacattgttctgtcagaatcaggtgatcttcttcaagtatggaggtattatcactatgttaataataacaaggagaggaggaccagggaattggttgtttataaggttgatcttgttgaacacaagcttgttgaacttaaggatattgaaggccatgcattgtttattggtttcaatagctccttcctacgagtagaagatttccccatgttgactccaaacagtgtctactgtacagatgatacagttcattatatttatcattcaaggtttggttttcgagaggtacactgtgccataattctgcagattgagcagtcacgaattgagcatatgctgatcgctaaagcaaagtcttgtgctgtgtcacttcttgatgaaagtttctctgtttatgctaaacggagctcgggggtttttcatgagattgagatttga

SEQ ID NO: 50056 - DNA, 130 bp, Oryza sativa
  Clone ID: PAT_MRT4530_52580C.1
gcacgaggcgtacacaagcatagagaagacggcgaagaaggtcacaacgccactacgatggatctcgaaggagctcttctcctcctcggtcgagaaggtggggggagccatgcgcatggccgttttctcc

SEQ ID NO: 50057 - DNA, 530 bp, Oryza sativa
  Clone ID: PAT_MRT4530_52581C.1
agatgcccttaattgtgatactgcatgaacagttccagcgtcttctctatttgtaagcaaatcgatccatgcgaccatgcgtgcaagtcagttggagcacgaatttacatgttacacccacaccctacacccatgcataataatacatcgtatatacgtacgtacatacatacccctctcgatcacacgcaccatcgatcgtacagagttgcgtacatacatacgtacacacatatacgcatacgcacgtacatacatacataattaaaaactcgtaattaattaaatacgttagttgatggcatctctaatggaacttgaggctggtgaggatgttttgttgtggacggggatcagcgaggttgatcaagccaggtttctgcacggggcccaaccccggtgaagaagcgcctggaacgggagaagccgaggaaggccagcatggcgagccctgccattcttgaatctccttgagcttgagcttcctttatcttccgccttgcttttggtcccgaagcccagcgggttga

SEQ ID NO: 50058 - DNA, 5778 bp, Oryza sativa
  Clone ID: PAT_MRT4530_52582C.1
atgctgcttgtctcctggatttggggcttctccggccgctgcctgctctgctgcctgtggcgctactgtttgccgtttgtgggggctattctgcgtgcgccgtgttgtcggacaggattcgcggccggcgctcttcttgttgcgccgccgtcggcgcccccctcgaaggggatgcggtgggtgctggatggcgcggtcgcggtttggcgctgtcgttgttggggcgctgccgacgcccgctggaaggtagcctgttgggctcggtggtggcggccgcggcggatggatgccgatggaaaggtcaaccgcgactacgatcctgatgactttgactgtttgtgcttcttgctgccctgcccgtttgatgttgatcgtgtggccgcgcttgctgatggttcatggcactgctcgctttcgtatagaaacttttttgcaaaaaacgcatcgtttagtagtttgaaaagcgtgcgcgtggaaaacgagggagatgggttgggaacatggggatgcaaacagtcagatatcgatttgctatcgctgacatgtggcccttaccgtcggcgttcgtctcatccacaatatgagctgtgtctatgtagggaaacacaactatgcatgcctactcttgtgcaccgatcggcgggagtggggctgtcagatggttctctcatggtgtatgatccagcctacttccttcatcgtggaagatgtgttaggatgtctgactttcaggtggggttgggtgccatggggtccatgtatactcctttcgtattgccgacagctttgtcctctgtggatactcttggtcagcttgtttctgttgcgttctttgctgattgggtgttcgttcatacaagggctaattgtcatattctgttgttgtctctgggcctacactggatcgcagtcttcttttccactgttccgtgcaagtctcggcaaataccagaccaccgtatggacagggttcagagagttcgcgcgagtcgagagaaacgagccgcgaacattttgttgcgctcatctgcgatgcgcatagaaagcgccataccgttgccagcccaacctccccagattcatcgagccaaaaagccacgttcgttgatggactttactccagagctatccaagctacatagacagcaccggtctttgctgcgttcaaagatgcctcctctccttgcaccacagaatgctttaaacagcagagcctccggtagttcatcaaggacagataaggaatacatccaatcattgaaagcatcatacccaggacggtcgtactatggccctccaacacatgagtgcccctactgtggtgcagtcttctggtttcaggagagaattaagactctatctgctgtgtcaaagaggaagaaagtttacaacctatgttgtaagggtggcaaaatacagctgcatgctttcaggccaccacctgaacctctcgctaccctattgaaatttgatggcgatgcacgatccaaaagatttctgaggcagattcgatcatacaattcaatgtttgctttcacttcaatgggagcgactattgataaatcgatcaatactggaaatgcgccttatgttttcaaaattaacggtgttgtgcaccacagaattggtactcttctaccatcgcatggtgcacgccctaagtttgcacagctttatatctatgatcctgagaatgaaacccaaaatcgactcaatatttttgaccgtgaccgtgatgacaacgataggccagaccctgaaatcattgctgccttatcacgcatgcttgatagcaacaatagacttgttcaaaatttcagatacgttagagaccttctttctcagcatggtgatgagaaaataactcttcgcttattaggctgtaatgctagagatgatgtccagtataaccttccaacaagtactgaaataactaccataatagttggtgactttgatgcgaaagaatacaaatttgatctgctcgtgcacgatagagaccacggaatgcgtcaagtttcttccttgcatccatcatacctatctttgcaatatcctttgctatttccctatggtgaatctggtttccatctaggcatcgaatatagtaattatgatgggactggtagaaaatatctcacgatgctggagtttcatagatatctaatgcattataggctaaatgaacctaatcctttcacatgctatggccgactgagtgaccaagctgttgttgatgttttttctactatcgaagctaatagactacagtttataatcgatcatcaaaaggaattacgtgctgaatctgtagaagaaattgtagatgtgatagatagaggtgttaccgatggagattcagttgggaaacgccaaatacttcctgctagctttactggaggcaggaggtatatggtcatgaattatcaggacgcaatggcaatctgtcgcgtctatggttcgccttacctatttgtgacattcacatgtaattctaagtggcaagaaatcgctgaagcaatccgatttgaacccggccagcagtcatctgatagagcagatgtaattgttcgcgtgtttaacatgaaagtcaatgatttcatcactgatattagagagggaaggacttttgggaaatttcttgcagttctgtacactgtcgagttccagaagcgcgagctgccacatatacactgcttggtttggcttgcagcatcaactgctgacatctcagcatctgtgatagatggcttcatctctgctgagattcctgacattgaaaccgatcgactaggatatgaattgtattggctttacatgactgatgacatccataacaggctaaagaaagcactagataatccacaatgcatcattccacatgagcacttgctcaatctcctcctgcgtgaacttacaactgtttttgcaaacagtggcggtaatataaaagattttgacttgccagtacctacatctaccgcacacatgcccgacagtaatagattaatcgatgaagagcttgcagctgatccacttatgatgtccatgcatgctgactctctgatagcgcagctaaatgatgaccaaagaaagatctttcacgctatagtctcctcagtgactgcaaaccagcctagctgttattttgtaagcggtcatggtggaactggcaagacatttctatggaatgctatcattgcaaaacttagatcacagaacagagttgtgcttgctgttgcctcatcaggagtagcatcactgctgcttccaagaggaactatgttagctaacctcctcattgaaactgcgcttattatatgggatgaagctccaatgacacataggcgctgttttgaagcattagatcgcacactccgtgacattctctctgaaacttctccagcgaattcgatcataccttttgggggaatgcctgttgttttaggtggtgacttccgacagatattacctgttgtccctaaaggttcacgtgccgctgttgtaaacgcatcaattacaaattcaactctatggaaacatgtcacgctattaaacttgaatataaatatgaggttgctcaatcctaccctttcacagaacaaaaaggatgaaatgcatgaatttagtcagtgggttttgtctgttgggaacggaacattgcctatgactgcgagggaggatgatgctcagcccacgtggataacaattcctgatgatcttctcattatgaccaacgacgataaaattgcagctattgtgaccgaggtataccccaactttcttacatcatatagagacccaacataccttgcttcatgtgcaattgtttgccctaccaatgcagtagttgatgagttaaatgattatgttgttggtttagttccaggaaattcaacaacgtacttaagctgcgatacaatatcaaaatgctctgagcaaataccggactttgacatgttatacccacttgaattccttaattctattaacgcaacaaactttcctacacacaaacttgtcttgaaagaaggtgttgtcgttatgctcctccgaaacctgaaccagtcagctggcctctgcaatggaacaaggctgttagttactagcttaggtcagagaatcttgcagtgtatcatactgactggatcaaacatcggtgaaactgtttacataccgagaatcacattaagcacatcaaaactgaaatggccttttacactgcaaagaaggcaatttccagttcgggtttgttatgcaatgactatcaacaaaagccagggacaaaccctcgaccagggcagcagcatacatgttcagatttatccatctgtgatgaataggtttaagtctgtcctacatgaaggaaaggtttactacattgactccttctctgtcaaatatgcaaacaggacatacagaccagtcaccaatcttttaatgatcttatttaccaaatggacaactttagaagaatgcattgatgttcttggtgactaccctggcataacattttcattgacaccttttcaagatatcccatctcttatcgacaaaaatactttctacattgatgtcatgggtgtgataactaagattagtgacacagctactgtgcgccctagatcaagcaacactaatagcttgaaacgaacaattcaaatctgtgaagcaagtcatcctgccaagctcacagtatctaagctgaagaactttttggccacttataaaaacagcaattcaacactccatatcacgctctggggaaagacagctgctgccttcaatgcagaagaagtgcataaggctgggcagacaaggcctcaggttgctgtctttgttgggacacttgttagaaactatacaggcatagggctaaccttaactggaagttcaccatgcaaatggtatattggtcttgacatggttgaagcgcttgagctaaaacaaaggacctccaaaccatatggttcaacatatagatgtacaagctgctcatatgtaggcataccagtgccaagaacagcacagcgtgtcatacgtaaacctgttgagactcttattgaccaaaatccaccaaacaaggaatttattccagacgaaatcacagccctcatcaaccagagctttgtctggaatatcagcttcacacaggatgctttcatgaagaaccaagaatccttgcaagtaaacagcgttgtttcatcggctggtccaatacagctgatgctgtctaactcaccaccaccttcagagcaaacgttggctattatcccagcaagctcaagcagctctgtagagggagcatcagcagaaagcaaaaaaagcactgaatcaaagataaaggccagggcaaaggaaactctgttagcgctacatactctagtgacaccagtgaggcatattgttaggcctcgatcagagcagacaccaactagcaagcttaatgtgccatcatcagggaagaaaagctatgttttgtcagtctctccaataccagtccataccacgcagatttcatctgacaataaggcaacaactgaggcagagggcaaagcaaaagctccacagccagcatcctctgttgaactgtcccctccagatgtcgagcataaggcaaaggcagcacaccagctcctacgagattttccatctacagacccatcattacttgctaaagacatccagaagaaaagagacaggcctgcaacatcagctccagccgctaagaagctgttcagagacaacgctcccagcaaaattgagaaaaggcagtga

SEQ ID NO: 50059 - DNA, 267 bp, Oryza sativa
  Clone ID: PAT_MRT4530_52583C.1
tcaacccgactagcaagcgcaccgactaccaggcgtaatgttcaggcggaggccgaaggagagtggctgctgggccttccttctgccacctacctcaacggcagcttgccaggcgataacgggttcgacccgttgggtctggccgaagacccggagaacctgcggtggttccagcaggcggagctgttgaacgggcggcgggcgatgctgggggtgggcgggatgctgctgtctgaggtgctgacgaaaatccggttgatcgacgcg

SEQ ID NO: 50060 - DNA, 502 bp, Oryza sativa
  unsure (1)..(502): unsure at all n locations
  Clone ID: PAT_MRT4530_52584C.1
cggcgangatcaccggcggcgggcaggccacgcgacccgcggagatggtaagcgagcctgaatccctcaacacttctcttggaggcgtactactgtagctccctctcctgttgggtggaagggcgcgggtacggatcgggatctgggtgaggaaagggtctcgcctttatcgtcgagttgaggaaaaattttggtacaaagagatgctggctttcgcggatccgtgcggttgatgtgttgctttcgccagatctggtggttttttcgggtattctgttgatgtttgattgctggggttacagaatttggtgagatttgtagtcgagataggcagtttttttttctttttgtgaatcagtcttaaattggagtagtgattagcacatattttctttccattctccaattgatccttcctttgtgaaaaatagagcagtagttagttctgattgtttctgacagacataattaatacttaaaatttaaaatttataagcttcta

SEQ ID NO: 50061 - DNA, 972 bp, Oryza sativa
  Clone ID: PAT_MRT4530_52585C.1
atgcgcattgctatcaactcctggtcgacgatcttgctccgttacatccctgaagatgtgctgttcaaaatcctctcatggctgccatccaaatctctcatccgattcaggtcggtgtgcaaggcttggcacgccacgatatccagctcccgtttcgtcaatgctcatctcgagtgctccaagcagaggccatcactgctcgtgatccctggctctttcgagatgaagaagaacggtgagaatattgccttcctgatgagcctgtataaataccaggatcctaatataatgcatctgcaggattttcctcgaggtatccgtaaatggattcgaccggtgcactgcgatggtttgctcctcatttctaccaggaagcacaagatgatgatctgcaatccatcgacaagagagattgtttccctgccagaagggagccatagcctatgtggcggcatggggctcggatttgggtttgatcctcacagcaacaagtacaaggtggctagagctttctaccaaagggattatccgacaacaagacaggtctgcaagtttgaagtgcttactctgggcactgatgcatggaggcaaactgaagatccaccatacccaattgacaggttaactccagttcatgtgaaaggagccatctactggaagattacacctgatcttgttatgaatcactttgtagaaatacctcctttggttgttttccatagaagaaagctgctgctggcatccaacaaggtctaccggtatgacatcgaaacatgtttgcagaaatggaggctcattctgcaatctgcagcagcaccagcagcagctctcgtcacagcccttcttgctgttgctacacttatgagctgcaactttaaagactcagcagatggagaagttataagagcagaccttgcattgcctacctggagcaatgatgctcaagtaggaggtggtcgtcgtgattcctag

SEQ ID NO: 50062 - DNA, 253 bp, Oryza sativa
  Clone ID: PAT_MRT4530_52586C.1
ggaggaggagccagttcttcgtctccgccgatcgctcaagaaggcggttgaggaggagaggttcgaggtattggacatccatagcaattgtttccttaccatatttgcttgtttcagttgatacatttccatacaagaatcttgtgaattgtagtctaaaaaatgaatcctgtatattgtgatatccccattaggcattagctaagttgtattgtgatgactgtcccaatccatcctctctaactatgtttgt

SEQ ID NO: 50063 - DNA, 162 bp, Oryza sativa
  Clone ID: PAT_MRT4530_52587C.1
atggcggcgggcgccacgacgaggctgcaccgctggctccgcgtgcgcgcgcgcctgccagccgtggctggtcgaggcgaccgggcagccgtggctggtcgtggcggcgcccgcggccgagcgaccgcatgggataatagatccaaccacccggaaaaatga

SEQ ID NO: 50064 - DNA, 639 bp, Oryza sativa
  Clone ID: PAT_MRT4530_52588C.1
atggaggtcgagcgcgtggcggcggcggcgggtggtgttcacggcttgcagcgcgcgcccggtgcgatgggtggcgggacgtcgtcgctgctctccgcggcggtgcaggagatgctgatggtgcagaagagcaataaggccatcaagaagccgccgcgggcgacgccgcgcctcccgcccgtcaccggcgagcgccgcggcggaagcggcggaagcgtggacaggggggaggccacggcgccagcgccgaagcgcgcggcgcgggcgtggcagccgccggcgaagagggtcgccaggagcatgctgaggcggggcgcgccaccgtcgccggaggagaagaggaaggtcctgacctgctgctgcgcgcgcctcccgccggggctacgctgcgcgctgcaccagtgcgctcccggccaatcgtggatgcggtcgcattgcggcggcggcggcgccattgccgccaccagcgaggccgtggcgccccgggcgtgcgggcgcggcgggtggctgttcagcgagtacgcccggtggcgcaggagcgtgtggatgccgagccggttctacctagagcgcatcgacgggcaaccccgtccgccgcccggcgagctcgacgctggccgccggccgccggcgagctaa

SEQ ID NO: 50065 - DNA, 1791 bp, Oryza sativa
  Clone ID: PAT_MRT4530_52589C.1
ggatccccgggctgcaggaattcggcacgaggtaaaccccacgccacccaccaccccggccgggagacccacgttccttccaagttccaaccaaccacgacgacgacaccagtccacccccagtcgcctcccgcttccctccgccgccttccgccgcgatccccatcccgcagctgccgtaaacatgcttcatcattcgaatagccggcaccaaaggaacagaggatcaagagtcaaaacattactccaggctaccttacttctaggtgttgttgtctggcttatgtaccaggtgaaacattcctatgataagaaaaatgagtacttggaagatgctgagaaccagcttgcccatgatgatagaagcatgttccaggggaggaaagaaaggggaggtagttatggtgatggcattctggaaaagggtggggagaaccctgatgtagtaagcaaaccagacgaagagaacattggagaaactgtgtttgagaaagacaatactgactctcatgatgatgatataagaaacactgacagatcaaaagctggtgaagggcatggcagtagtgcagatgggaatacagaagctaatagtaatgatgaggatggaacgaccaatcactcagaaggagagaagagtgacgctgagtccaattcatctgacgctgagagtaaaggtgaagaccattcaactggagatgatatgccccaaagcaatactgtcctagaggaaagcagtgcagagacgaacagaatgccccatgaagaagttgcacatggtgatgaatctactaatgaagatcagtccaatgtgaaaagtgacggatctaatgaagaggaagctgagaaaaaagaggcagtggattctcaaaatgcttctgaatctctgtccgatgatgcgaagggtggaacagatgatgagcattccagtggaactcttcctgatgaaacaggtaatctaccatcagggcagaatgagaactcacaaagtgatgcgacttccaccacatctgatgcttctagcgaggctgttcacattgagactggatctgagaatgaagatgcagcaaaatcatctgggactgcatctggtgatgatgacaagggctcagccaatgaggcatctgattcaaacgaaacaaaatctgatgaaggcaatgtggcagcagaagtttctaatgaccaggctgcaaacacggaggcagggaactcccaagaagcgtctgctgcagaagctgcaaatggctcttcagaagagaccaagcctgtggagaaccagaatgatgggaatacagagtcgtctaacaatggtgagcaggtggatatcaagatggaaaccagtgcttccaccaatgccgagcagaaggaatctcaagtcggcgatggcagctctgggtcgaacggctcaaatgacagtggcgctaaacagactggcacgactgaaacccagtgatacaacaaccaattggacatgaacattgtttattatacggatttatccctgaaaatttagacgggctactgcccatagaattttcaggttgaggttacgatcgtttagctcatagcaaatgtatggttggtgccaatagtgccctctatgtgatccggtgctcagaaagacaatcgactatcgaatgtattttcttcttgactcgtgtggctttggccgagacactcaaaccctgcatagtgatctattcatgaattcagtataatatacgcggaagttcatgtgaaaaaaaaaaaaaaaaaaaaaaaaaaaaaaaaaaaaaaaaaaaaaaaaaaaaa

SEQ ID NO: 50066 - DNA, 2865 bp, Oryza sativa
  Clone ID: PAT_MRT4530_5258C.1
atggagatcatcggcatcaagtgctctggtgctatcctgatctccttgatacgcctctcgaaacagtacgccgcctacttcttcaaagcccgcaagcgtgtgcgcgctctcgaagctgccaccgagcgtttaagagagaggctcagcgatgttgagactaggggtgtaaacgttgagaccaagttggacagccctatgcgaaaaggtatgcagcggaggaatgaagttgaaggatggctgaagcgcgctgagcatgtatgtgtggagactgaaaaaatccaggcaaagtatggtaagaggaccaagtgcatggggagcctgtccccttgtatctgtgtaaactactacatgatagccaagagtgcagcagcaaactgtcaggctgcagagaagatatacagtgagggcatgtttgaagaatatggtgtcatggtgccacaggcttcctctgaagtgcccataactgacgtaagcctaactggtacagatcggtatcgcagcctcgctgtcaagttcatcagggatgaggctgtaagcaaggttgggttatggggccctggaggtgtgggaaagacacatctgctccatcagatcaacaacttgtttcacaaaaaccctgcttttgatgttgttattcgagttactgcttccaaaggttgctctgttgcaaaggttcaagacgcaattgttggggaacagatgctggtgaagaaggatgacacagaatctcaggcagttatcatatatgaatttctcaaaagtaaaaattttcttatattattggatgatttgtgggaacatgttgatcttgataaggttgggattccaaacgaagttatctcaattggcaattacaaacaaaaattgttgctaacaacacgctctgaaagtgtttgtggccaaatgggtgtcaagaatgggcaaaggattaaaatagattgcctggatgaaacagatgcatggcatcttttcaaggaaaatgttggtactgaaattattgaaaatcacccccttgtacttaaactggcaaaagatgttgcaaatgaactcgctggactgccgttagctcttattgtagttggcagggccatgtctaccaagaggcatccaagagaatggcagaattgcatcgactttcttcagcaatcacgccttaatgagattgaagggccagtttgcaatgaagaaagtgtgtttgctcgactgaaactcagttatgaatatctaagtgatactaatttgaaagattgtttcacatcatgcgccttatggcctgatgattatctgttagatagaaacaaactatctgagtactggatgggactgggtctagtagaggaggaggatattcatagatgttacaacgcaggatatgcacgaattcgtgagttggtagacaagtgccttttggaggaaactgatgatgacaggcttgtaaaaatgcacgatgtgatacgtgacatggcactttggattgttggtgacgaaggaagagagaagaataaatgggttgtacaaacagtatcacattggtgtaatgcggagcggatattatcagtgggcactgaaatggcacaactgcctgccatttctgaggaccagaccaagcttactgtgctgatactccagaataatgatttacatggaagttcagtgagtagcttatgtttttttatatctcttcaatatctagacctctcaaggaactggctcaaaaccattcccagtgaagtgtgcaaacttgtgaacttatattacctgaatttatcagataataaaatcaaagacttgcctcaagagcttggactcctttttaagttgcagtacttgcttctcaggtcaaatcctatcagagagattcccgaagttattctgtcaaagctctccagactgcaggttgcagatttttgctcgttgcagttggaacaacctgcttcttttgaaccaccatttggtgctcttgaatgcatgacagacttgaaagctcttggaattactgtaggcaagataaaatacttgaatatgctctgcaaaaccagcttacctgtcagatccctctgtgtaatcattaaatcaaagtctctagacgaatggaaaaggtttgcattttcagacagtttgttcggaaatgatctgatacagaggaatctgttggagttatacatctacacacatgaggaacaaattgtatttgaaagcaacaggccacatcgaagttctaatcttgagaagctctacatatgtggccattacttcacagatgtattatgggaaggagttgaaagccaggatctctttcagaacctgagacgattggaccttatatcatgcattagcttgacaaacatatcgtgggttcaacattttccttatctggaagacctgatagtatataattgcgaaaaactacagcaaataattggaagcacttctaacaatgataatctgccaaatacagatgaaaaagaaagaatatctctttcgcagccttgcctaaaaaggtttactttaatttatttaaagagtttgactactatctgcgactcatcctttcactttccttcattggagtgcttgcaaatcttgggttgtccccagctgacaacactgcctttcacaaccgtcccatgtaatatgaaggttattcattgtgaggaagaattgttggagcacttgcagtgggacaatgctaatatcaagcactccttccagcctttcttcaaagtgatttccatgaacaacaattctgcaccacagaacttccttgatggcttatacgctgagtggatctaccatcggtttgaggatgacgaactggaagaaattaaagctcgatggaacaaagatcgagggcttgatagttga

SEQ ID NO: 50067 - DNA, 657 bp, Oryza sativa
  Clone ID: PAT_MRT4530_52590C.1
atgtgggattgggtccacctatcagccactgctactgtagatgcagtactaaggcctttcacagtgcaacaccgtggaccggtgctccagctcgacacgtcggattcgagcttgtgtggcgtcagggtccgctccccagcagaggagctcgctcccacgaagggatgcgcgattccactttgccccgtcctcctgcttctgctcctccttctcgcggcggcggcggcggcggcagtggctgtcacacgagtaggtggtagccggtgctgcgcggctcctccgcggggtctggaggcatgggaggagcaagcggcgtgggtggcgcggctcctccgaaggccgttgtcgaagaagagagcgccacctcgccagtgcaagcaccccaacccgccggggacgccacccgccaccgaccgcgccgaccaaagccgccacggcatgggaggcacggcggcatgggaggagaggagaaagatgcacgacggcggaccgggaggaggagcggcagttgaggcggagtgggaggaggcgaggcgcgagctcgcgaccgggaggaggagagttcgagagaagctaaggcccacggggatcacctgctacagcaccaaaccagagcaatgtggatacaacatgttcgtctcgtcgaaatggggctga

SEQ ID NO: 50068 - DNA, 1719 bp, Oryza sativa
  Clone ID: PAT_MRT4530_52591C.1
atggccgccggcgagcagcagccgcagcagcagcagatctccgcctcctctacatcctccgggaggctcgtcacgcctttctggaaagagaagtacgagagggatgcgaggagtggcagacagctctctgatcttcagttcttcaaggatcgacactacttggataaagaatggggaaagtactttgaggttggatgtggagctggaaatacaatatttccattgatttctacataccctgatatatttgttcacgcatgtgatttttctccccgagctgttgacttggttaagaaacataaggactacagacctgaccgagtaaatgcatttgcatgcgatattacatcagagcaactaactgagaatgtacaaccttcctctgttgatgttgtaacaatgatctttatgctttctgcagttgcacccgctaaaatgcctctagttcttcagaatgttagaactgttctgaaaaatggtggccgtgtgctttttcgggactatgcttttggcgaccttgcacaggaaagacttatgtctaaaggccaacaaataagtgagaatttctatgtcagaggggatggcacgcgagcatattacttttcaaatgagtacctgatggatttattctcaacatgtggatttactgttgaggagatttgtgtgcacaataaacaagtcgagaaccgctcacttgacttggtgatgaacaggaactggatccaagccacctttatccttggctcagctggtcttcaaggcccaaatggccagcacgattcccacacttgtgaagatgaaaaggataagttaactgctaatgcttctcaggagaagagcaccagtgaagaaattgacctttctgaggattttaacaatatgtttggaacttcacacaaccttgatgaggctcaggtccttcggatcaaagcaaaaggtcatgacttcgaaataaaaatgctcacaaaagaacaccagcacacctgcaaattaaccggtctaatgctttgggaatcagctcaattcatgtgcagtgttctagcagagaatccttccattcttgctggcaaaagagtgctggaactgggctgtggctcggctggcatctgctcaatggttgctgctacagttgctcagtttgttgtagctactgatggagacgcagaatctctcgatcttcttagagaaaatactgcctctaacttggagcctgatttgcttaaaaagattctgatcaggaagttattttggggcgacaaagatgatctgaaggcagtcagggagctttccagcgatggagcaggttttgattgcataataggaactgacgttacctacaatcctgacgctatatttcccctcttcaagactgctagggaactaatttctaataaggattcagatgcagcccttattctttgctacattcagcgccgagttgatgaggattctatcctttctaccgcaatggcccagggtttcaggcttgtggacaagtggataaatggaattcacgagagtaatggtatcattagctcttggttctgtggtaatgatgtttgcagttctttcaggaatgcaacgctttccatactgtattttcaggtgtgagactttgatgtttagctgaatttcatgcatttcattacttggtgatttcccaccattattgtaccagatgaatggacaagttttttttgtggcaattatattattgat

SEQ ID NO: 50069 - DNA, 438 bp, Oryza sativa
  Clone ID: PAT_MRT4530_52592C.1
atggacggagcggcatcggcgagcgggcggccgctggagttgcggacccagaggccagatccgcccctcgcttgcttcctcctcccaatagactgcgccatggccggcgccactgcgccgccgatcgtcaccgatgacctcttcgaccatgtgcggcaagcggggagttatagtgaacttattcctggaaatatcgagtgtccggcctgctttataccatcaggttacagaagtaggagaagtttagcagtaatgggcctctgtattgactggcgcaaatatttagatgaagtaaaggcccacgcattctgtgcacattatgacaactccttcggcctgagcataaaaactcttgggttgctccgtcaccgatctgctgccatcacagtagctcatagccagattgtcggtgacctcggcctgggccctcgggcgtag

SEQ ID NO: 50070 - DNA, 441 bp, Oryza sativa
  Clone ID: PAT_MRT4530_52593C.1
aaaaaaatagaaatatggaattaaaaaataaggaatattagaagtagagtatagagttcatattggaatttaaaaccaactaaaattcggaataaaaaggagcctccatgttcgctctcatggcctagaaattctcacattaatcagagaaaaagaaaaggcagagtctcagagaattcttgatgagcaacagcaatatgagctagtaaagttctgcaaggacgaggaacttgttcttctggcggatgaggtataccaagagaacatttatgttaccaacaagaagatcaactctttcaagaagatagcaagatccatgggatacaatggagacgatttacaattagtatcattgcattctgtttctaaaggtgaaattccatcatccgcctttctttcttcaagtacatttgaacttcttaccacatagatatttttttg

SEQ ID NO: 50071 - DNA, 477 bp, Oryza sativa
  Clone ID: PAT_MRT4530_52594C.1
atggacggagcggcatcggcgagcgggcggccgctggagttgcggacccagaggccagatccgcccctcgcttgcttcctcctcccaatagactgcgccatggccggcgccactgcgccgccgatcgtcaccgatgacctcttcgaccatgtgcggcaagcgggtgcgagagcggcggcgctggcggcggtggcttgtcgcgggagttatagtgaacttattcctggaaatatcgagtgtccggcctgctttataccatcaggttacagaagtaggagaagtttagcagtaatgggcctctgtattgactggcgcaaatatttagatgaagtaaaggcccacgcattctgtgcacattatgacaactccttcggcctgagcataaaaactcttgggttgctccgtcaccgatctgctgccatcacagtagctcatagccagattgtcggtgacctcggcctgggccctcgggcgtag

SEQ ID NO: 50072 - DNA, 591 bp, Oryza sativa
  Clone ID: PAT_MRT4530_52595C.1
atgcaacacattgctgaggctttagtgaatggtaaagaaatgcctttagggaaatatctactaggggccatataccaacttttgtaccaaatagcaaccaatttgctaaatggcaagtcgataggatgtggaggtccttggtggtttatccaactttggctcaacctctacgcggtccaaattgccaattggccagcccttgaagagtctgaattcctgactgattatgttaaagacgccaatgagacagttcaccggtgccccagtagtaatctgcaagcgcacggatataccattgtagcatttcacccggaagtattccaagacatatataaggatggcaatagggccccgagaacccagttggggacggggacggcgaaaagtcagccccgaggccggggacggggacggggagcggggctttttgaagtgtccggggacgggggcggggtagcactatccgttggggatggccccgttgccatccctacctgcaagatgtgttcacgatgtggccgaaggtttggatttgagaactactacggttgtaggaggtactgcaaaaggctcatgaaggaaattaattag

SEQ ID NO: 50073 - DNA, 464 bp, Oryza sativa
  unsure (1)..(464): unsure at all n locations
  Clone ID: PAT_MRT4530_52596C.1
tctagttcgcggggccatgcgacgcgacctggtactcggtgactagtcggagagctcgcgcacgccacctgggcccacccaggcccaggcccacctcgccgaggatcgccggagtagggggttgtcggtcagagcggctgataccaccatacggtcaagggttgcggcgagtgcgtaccaacgggatccaagagggccacgaggcgaacaagggatcatgcccaacgaagctgcggtacactcgaaacataccaagcatgctgcattgtgcgctgagagccaatctttcatctatagcgaagagctatctnttaggtcacagcggtaatatcctagtcaaccttattgggaaatggaaggaagctgagtactctggccattctgttcctgttggatggtcttgcttactatgcaactgctgcatcaagtttagctgatgttctcgtaaatccattcgatgcact

SEQ ID NO: 50074 - DNA, 439 bp, Oryza sativa
  Clone ID: PAT_MRT4530_52597C.1
cgcacagtgcccctccgcgccgccctctgttttgccgccgggaaaacctccgcctccgcctccgccgccggggagttcgcgatccgatggctggatcgggatcgctcctcccgccgcgctgaaggcgcgggctcggcgaggcgcatccgtcttagaagctgaacatcttcaagcaaagcagaacaccattagtactgacataagggaaaaaggtgcaaatagaagatgtctcaaggttaataaattttttagtaatattgcatttggaaaaaatattagattctattgacagttgctgaacatatctgtggctgttattgatttatttgttctgcacttatactaaatcaaagtactataccaaagaaaggatcaaaatttaattatcacttatgaaggatgtagtaggaccaaattaaaggtgacctcctttacttag

SEQ ID NO: 50075 - DNA, 379 bp, Oryza sativa
  Clone ID: PAT_MRT4530_52598C.1
gtttcctttttttttttttttttttttccttttttttttttttctttttttttattttttttttctttttttttctttttatggttttttgcttttttttatttttcttattctggttttttttttttttattttttatttttttacgccactgttggggggggggcgaggaagtgtttgggcgctaacatacgggcgtaccgttccgtccagcgtaccacccgcggcgaggagcacggagtcagataaggctatcgtacactagggctccaccagatggggggcggacgacaaccctggcgcttagtcggacctcctccatcttgctcgtcccggcgtaagcctccaccgctggcgtgtgggggtcccgcctcagcgg

SEQ ID NO: 50076 - DNA, 172 bp, Oryza sativa
  Clone ID: PAT_MRT4530_52599C.1
ggggaacaccaactgatgcttatctttgtttcagaaattctagacgcaaaactagcaccttgtaagaaacaagagggattacactttaaagatgagatgacagataagataatcacctaccaaaaacagtaaattgtgttgaacgcaaagacggcatcagatcaaacgcagc

SEQ ID NO: 50077 - DNA, 300 bp, Oryza sativa
  unsure (1)..(300): unsure at all n locations
  Clone ID: PAT_MRT4530_5259C.1
ttggctgcaggattcgcacnagtgaaaaaggntcgccaangaaaaactgctccgccaaggaagctgcccagcgggatgacctanaattataagctcctgttagtttcatttttccagtcagaattttgacgaaggaaactcnaaattagccncttgttacaaccggngctgttggtttnctgaattcttggggtttcatanctnctctgttcancgggaccatnttggggatactatggcaattnagttacaaccgttgcttcaaaaacctttntgttttancctnnncacngnccnaag

SEQ ID NO: 50078 - DNA, 1047 bp, Oryza sativa
  Clone ID: PAT_MRT4530_525C.1
atggcgaacaagggaggagagccggcagcaagagcagctgtgcgccatggtggaggccccgtcgcgttcaaggacgctgtcgacgtcgacgccacgccggtgcgccctccgacggagctcgccgccgccgtctccgccctgccggcgggcgtctcctacggccagccgatgcgctgctacggggggacctgggtgttcgagagctgggcgcagggcgtggtcgccatgcaccgcggcggcctcgtgccccgcgccggcgacgtcctcctcgccagcctccccaagtcggggacgacgtggctcaaggcactcgcgttcgccaccatggcgcgccgcgcgtgcccgccgccggcgagccccgaccacccgctccgccgcctcaacccgcacgactgcgtgcccctcctcgacaggctcttcgccgccggccgcgacgcgcttctcgacgagctgccgtcgccgaggctcatgtgcacgcacatgccgctctcgctgctgccgccggcggtggctgacggcaactccaacaccaagatcatctacatttgcagggaccagaaagatagattggtctccatctggcactttcggaaacgcaatgtgccagatctgttgctccaagaagtgtatgagtctatatgtgatggcactgggtttgctggtcctgtctgggatcacttgcttggttactggagggcaagcaaaatagatctaggccgagtgctcttcttgaaatatgaggaggtgcttcgagacccagtgaacaccgttagagagctcgcacaatttgtcgggcagccattctctgacacagaggaagaagctggcattgttgcggagatcgtcaagctatgtagcctagagagtctaaggagccagaaagccaacaaagaaggcatacaaggtgtgtacatcaagttctcgcacgactcgtattttaggaagggggtggaaggggactggaggaaccacatgactcctaagatgggcgaacatctggattcgattatgcgagaaaagtttgatggatcggggctcaccatatga

SEQ ID NO: 50079 - DNA, 3565 bp, Oryza sativa
  Clone ID: PAT_MRT4530_52600C.1
atgcgcggcggcttgcgccgcgggctgggcatcctcctcctcccgctctccagctcgcccagccgggcgccgcggccgccggtcccgctcgctgctctgctcgtctaccaccgccgcctcgatgtcttcgcccgccggtccttctgcagctccggcgggggctacgccgtggagcagttctccgacgacgagtacgaccacgagtacgaggatcaccggccgtcgtcgtcggtggcgaacatcgacgagtggaggtggaagctgagcatgctgcagcgcaacgcggaggagcaggagatcatctccagagaccggagggatcgccgggactacgaccagatcgccaacctcgccaagaggatgggcctctacagatgtcgaaacattgaaatttgtggtttggtgttttctctgtggaacggcagtgagatgtatgggaaggtcattgttgcgagcaaggtcccgctgccgaattacaggccggacctggacgacaagcggccacaaagagaggtggtgattccattaagcttacagaggagggttgaaggacttgtgcaggagcaccttgatcgtgcactcttgccggataaatgtggaactggaaatggttctgagatggctgagaaagctgagaatgtgaacctggatgagcagcaggattcccttctcgatcgatcggtcatggagaagatccttcagaggaagagcatacggatgcgcaattttcagagaagttggcaggaatcacctgaaggagttaagatgctagaattccggaaatcacttcctgcatacaaggaaaaggaaaggcttctagcagccattgcacgcaatcaggttatagtgatatctggagagacagggtgtggcaaaacaacccagttgcctcaatttgtattagagtcagagatagaatctggccgtggggccttttgtaatataatctgcacacaacctcggagaatttctgcaatggcagttgcagagagagtatccactgagagaggagagaatcttggtgaatcggttggctacaaagttcgattggagggaatcaaaggaaaagacacacatttgcttttctgcacaagtggtatattactacgacgattgctcagtgacagaaacctgaatggagtaactcatgtatttgttgatgaaatacatgaaagaggcatgaatgaagatttcttattgattgtcctaaaagacctattatcacgacgccgtgatttgaggttgatcttgatgagtgctactctaaatgcggaactgttctcaagttattttggaggagcaccaactatccatattcctggattcacatatccagtgagggcacattttctggaagatatattagagaggactggctataagttgacctcaagcaatcaacttgacgattatggacaagataaagtctggaaaactcagaggcaactattacctagaaaaaggaaaaatcaaatcacaacgcttgttgaggatgcccttaaaacttctagctttgagacctatggatcgaggacacgcgattctctgtcaaattggaatcctgattgcatagggtttaaccttatagaagctgttctttgccacatatgtcgtaaagagcggtctggtgcagttctagttttcatgaccggatgggatgatatcagttgcttgaaggatcaactaaaggcacaccctttgttgggcgaccctaacagagttttactgcttgcatgccatggttccatggctacagctgaacagaggttaatctttgagaagccacctcctaatgttcggaagatagtgcttgccactaacatggcagaagcaagtattacaataaatgatattgtttttgtcgtggattgtggaaaggcaaaggaaacgacatacgatgcactaaataacactccctgcttgcttccctcatggatttcaaaggcttctgctcgtcagaggaggggcagagctggtcgtgtgcaacctggagaatgctatcacctctaccctagatgtgtgtatgatgcatttgcagattaccagcttcctgagctccttagaactccattgaattcactatgtttgcagataaaaagtttgcaagttggcagcattggggagtttctatcagctgccttacagcccccggcaccactagctgtccaaaatgcagtggaattcctgaaaatgattggagcattagatgaaaatgagaacctaactgatctaggaagatacctttccatgcttcctgttgatccaaagttggggaagatgcttataatgggtgcagttttccgctgcattgatcctatacttaccgtggttgctggattgagtgcccgggatcctttcctgctgccacaggacaagagagatttggcaggaaccgccaaatcaagattctcagcaaaagattatagtgatcatatggccctagtccgggcttatgaaggatggaaggatgcagagagagaagggtctgcttatgaatactgctggagaaatttcctttctgctcaaacacttcaagccattcactctcttcggaagcaattcagctatatattaaaggatgctggtttggtagactctgatgcaaatacaaataatagtttgagccataatcaatcattggtccgtggtatcatatgttctggacttttcccaggcataacatcagttgtgcatagagaaaactctatgtcgttcaagaccatggatgatggccaagttcttctttatgctaattcagtgaatgctaagtaccagaccatcccttatccatggctggtctttggtgagaaggtgaaggctgggcacctgaagatgctcgatggttacatcgatttgtttatggatcctagcctgtgtgaatgctacttgcaacttaaagaagagcttgataaacttgtacagaagaagcttgaagaccccagcttcgacatccacaaggaaggaaagtacatcttatatgccgcacaagagctcgctgcaggcgacctatgcgaaggaaggtttgtgtttggccgcgagacgagcagagcaaggctcagcagcagcgacgacaccaaaggcaacattatcaaggacggaatgaaccccaagagcctgctccagaccctgctgatgagggccggccacacccctcccaagtacaagacaaagcacctcaagaccaacgagttcagggccatagtggagttcaaagggatgcagtttgccgggaaacccaagaggaacaagcagctcgccgagagggacgccgccattgaagcgctgggatggctgacacagacctcagggacaaagcttcaggatgatggcgatgattcccctcttgacctgacggataacatgctgaagttgctcagtagaccgaggcggcggtccagaaacaattccaggaaatgattttcctgtcaaggacatctagtacttaggttcataagaagcccatgatagttttgttatggtgccatttttttgttggcctattggttggatgcattcgagcttggtttcaccggattcatcgccccttttggaattttgctccgtg

SEQ ID NO: 50080 - DNA, 2055 bp, Oryza sativa
  Clone ID: PAT_MRT4530_52601C.1
atggccgccgcgctcgtcacctccttcccgcacgcgatccccaagccgcaccaccacctccacgccgcacaccacgcccacctcaccgctgccgccacgaggcccgaggcccccagcgcgtcgtcccccaacccggccaacgccaggctccgccgcctcatcgcccgcgacgacctcgccgaggccgcgcgcctcgtcgaccgcgccacctcccgcggggaggcccccgacgtgtacctgtgcaccaagctcatccgcaacctatgccgccggggccgcacctccgacgccgcgcgcgtcctccgcgcggccgagaggtccggcaccgccgtcgacgtcttcgcctacaacacgctcgtcgcggggtactgccggtacggccagctcgacgccgcgcgccggctcatcgcgtccatgcccgtcgcgcccgacgcgtacacgtacacgccgatcatccgggggctctgcgaccgtgggagggtcggcgaggcgctcagcctgctcgacgatatgctccaccggggctgccagcccagcgtggtgacctacacagttctcctggaggccgtatgcaagagtactgggttcgggcaggcaatggaggtcctcgatgagatgcgtgccaaggggtgcacgcccaacattgtcacctacaatgtcatcatcaacggaatgtgcagggagggccgcgtcgacgatgcgagggagttcttgaacaggttgtcctcgtatggcttccaacccgacactgtcagctacaccactgtgcttaagggtttgtgtgctgctaagcggtgggaggatgttgaggagctctttgctgagatgatggagaagaattgcatgccgaatgaggtaacattcgacatgttagtcagattcttttgtcgtggaggtatggtggagcgggcaatccaagttcttgagcaaatgtccggacatggatgcgcagccaacactaccttgtgtaacattgtcataaacactatctgtaaacaaggacgtgttgatgatgcctttcagttcttgaacaacatgggttcctatggatgcagtccagataccatcagctatacaactgtgctaaagggcttgtgtcgcgctgagcgatgggaggatgccaaagagctcttgaaagagatggtccggaagaattgtcccccaaatgaggtgacattcaatacattcatctgcatcttatgccaaaaaggattgatcgagcaagctactatgcttatcgaacaaatgtcagagcatggatgtgaagtgaatattgtcacatacaacgccctcgttaatggcttttgtgtgcaagggcgcgttgatagcgctcttgagttattttacagcatgccttgcaagcccaacaccattacatacactaccttgctaacaggtttgtgcaatgccgagcggttggatgctgctgcagaactcttagctgagatgctccagaaagattgcgcaccaaatgtagtgactttcaatgtacttgtgagtttcttctgtcaaaaaggattaatggatgaagcaattgaacttgtagaacagatgatggagcacggttgcacccctaacctgattacatacaatactttactcgatgggataaccaaggattgcaactcagaagaagctctggagctattgcatggtttggtcagcaatggggtatccccagatatagttacctattcttcaatcattggtgtcctctcaagagaagatagagtagaagaagcaatcaaaatgttccatattgtgcaagatttggggatgagacctaaagcagtgatatacaacaagatactacttgcactctgtaaaagatgtaatacagatggtgccattgattttttcgcttatatggtgtctaatggttgcatgcccaatgagttgacctacattacactcattgaaggccttgcaaatgaggatttcttgaaggagacaagagatttactgcgcgagttgtgctcaagaggtgttctaaataaaaacttgcttgaagagtggcgccctaagttttcgaatcaaaccgtgcatttaccttga

SEQ ID NO: 50081 - DNA, 375 bp, Oryza sativa
  Clone ID: PAT_MRT4530_52602C.1
ggagcctcacctggccctctcttcctgctgccggagccgcttcaggagcttggatttcgccgcaggttgaagacattttccccgtttaagaagtcaaggctcaaggtctaataacatattaccatggcagagggtgttgttggaattataattctgaagcttggtttagccttggcaacagacacaagtagggttggtagaaactggctctgccatgaggcttctgctcttgctagaatctttagtcagatccgtgatatgaaggaggagttggagagcatgcaatccttcctacaaggagccgagaggttcaaggatactgacaataccacggccaacttcatcaagaagatccgttgcattgctttcgagatt

SEQ ID NO: 50082 - DNA, 316 bp, Oryza sativa
  Clone ID: PAT_MRT4530_52603C.1
cgatgggcatgaagcggccaaagctctcctggaaagacaagtggtgcattctgaaggaggcaaccaggctgtatggggcttcttgggtcagagacattggccctgatatcagaccaaatgaccttctatgtgaagaacagcaaattgtgcctcttgtctttgccaaaaaggaaggaagaagggagttcttcatcatttgggtgtctgatattttttgcatgctgtcattagggatggcaatcgggcgtgacgggcacgggtagtgcctacccatacccatgcccgtgagattatttgtgcccgtgggtatacccat

SEQ ID NO: 50083 - DNA, 690 bp, Oryza sativa
  Clone ID: PAT_MRT4530_52604C.1
ccacgcgtccgatgctattggtagttagctacttggatgcctgatgagtgcatatatatatgtgtatgtaattgggaagctgagctgaggagaggagtaggagaggatagtacatacatgatgcccgcatctgcacgccctgatgtacaggtgcgcccactggtggtggtggtgtacctcatcttgtagatccaaccggctgcgtgatttcacggacacgccggccacgctatgggaggtgctatccgcgttgccgatcttaatcacaaccagcaccaaaacctgaaccacaatcagaagcccgactatgatgatagcaataacaacaacgattaccatgaagcagatgggcatggcggagatgatcaggaggaggctccggatgcggccgagccggaggggtcgaggtatttgttcaccgacgggcgcgccacgtacatgtactgtggagcacgagatcctgaatgctcacaacatggtgcgcgcccagtaccgactagcagcgctagaattggaccaacgctctgggcaaggacgcacatctgcggtatgacgggagacggttcgaatgactcatgatgcactaacaagactcaccttacgatcagaacgtgttacgcgacacccgctgggactggcgcgccacgcatgccgctgacagatgccgcgcttagtgctaccattaccact

SEQ ID NO: 50084 - DNA, 261 bp, Oryza sativa
  Clone ID: PAT_MRT4530_52605C.1
atgggtctcttcggacatcgacgtggaggtggtctgccggggaggagggcgtcgggcgggctggcagccgagagggagggcgccagggaggaggccgccgggcagggaggtggccgggaggagtgcggcgaggaaggagttggccagttggagaggacggcgctgatccaggcggtgcgcatgcggaagagaggatttagcggcggcgctagcagaagggccagggagaaggcccgtaggcctgggggcttgaggggataa

SEQ ID NO: 50085 - DNA, 158 bp, Oryza sativa
  Clone ID: PAT_MRT4530_52606C.1
cttggcgttgctctgcttgactaagagcaacttcaacccgagcctcatccctagatccccatcatccgttgcaggacgcagctccagtagatggatgtggcttggaagctccctccctctctccatgactaggaccttccgtggcgtcgtgcatagag

SEQ ID NO: 50086 - DNA, 442 bp, Oryza sativa
  Clone ID: PAT_MRT4530_52607C.1
aaaacccccaacccttttattcattccccccaaaaagaagggtccctggaagtttttttgcccttattaggcaagcagagcccacacccccggggggaggggaagtgctttgaacaaaacgcttatcaacatccaaagcttaaacaaacaaggggatcaatgcaaatcccgaaaaaaaaacacaggggaaaggccaaattttttttttggccccaacttctccgggttaccaccacgttttggggatttttttttaccctgttttatttgctaaggggtccacgatctccccgttgtcctttaaagccaagatcaatttcgggtgcgcccccgccgccggcgtttttttgatcgggccctcaatggggtttggccggccaagcccctttaacgccaggtggccccccttttgggcggaaattattatgggtccgaacggggg

SEQ ID NO: 50087 - DNA, 233 bp, Oryza sativa
  Clone ID: PAT_MRT4530_52608C.1
tgctgaatacttaagttagaagttaatgcacgtgattagtgaagattacatatggcatacgatggaagtattgtgtgcatatggtatgaagaatcgaatttgaaaagatttctaatttgaaatgattggagtttgtaaagtttgttttttatacaagaaagttttttaagtggattaagacttttattataattttggtttgtggctttaagctgcctaccttatgtataaat

SEQ ID NO: 50088 - DNA, 234 bp, Oryza sativa
  Clone ID: PAT_MRT4530_52609C.1
tcaggcggtgagcggcgtgctctgtcccgtcccatcataatgatgaggggcttcacagcctcttaccccggtcagagttggtccaaccactctgaactgaccgggttcccgttttctggtgtgaacgagaacccggaagtcctcatccattaaatgacgaatgacaagggcgccctgcatgatttgatgggccccgcgcagcaaccgacgtgcagatagcttctgaggcttcat

SEQ ID NO: 50089 - DNA, 228 bp, Oryza sativa
  Clone ID: PAT_MRT4530_5260C.1
atggcggcgggagctgaggcaacggggcgaggcgaccgcgatgcgaaagagcggcctgaggtggcggtcgaccaatggcaaggtgttggcgcggtggccatccgtcgaaggtgtgcaggtggtgctggtaccctttttgcaggcaacctcgacacgggagggtttaaatcatgtcctagcgcctcagggcgggcggcggagttactcctggtgccgcatcctttctag

SEQ ID NO: 50090 - DNA, 184 bp, Oryza sativa
  Clone ID: PAT_MRT4530_52610C.1
cccgctgcggcgccctctggcacttatgaggccatgcgacccccgcttctgcgctgcgcccttggatgtctggacaacaccagaagttgggttttcagctgtgcatacgcgcagcttttcgtggttttgatgcgctaagctgtgtggcaatcctgatcaggggcggcgtgcactggggctgcag

SEQ ID NO: 50091 - DNA, 707 bp, Oryza sativa
  Clone ID: PAT_MRT4530_52611C.1
gcggccgccctttttttttttttttttgttaccaaaaggaaaatgccacattccaaagagggccaaaatgataattgaaattcacaaaaaatgactcaaagcacctttccaagttttacaccatctgttcctgaaatgcatgctaccaagatgaaactgcaactacagtaactcatcaaataaccacgcctttttctatgtagaaaattaacagctacactgcaggaaccccatggaaaaaaagaatctagaactgccattacaaattagtcttgcacatgtttgtcaggcaatatatcctcagaattgaaacatcctagctaaaagtcgagagttcattagaagagtcaggcatcataggaagaacatccaatgtgataggcatcctgaggatctgaaccaacactagaagtctgatgatggtatgggcgctggacagggggtaaaagcagagccaaagacttgtccatcagcagaagccgtccgcatttactgcaaacttttgtaaatagagtctgatagctggcaatccaacgcagcaacagagaaagtgatttagttggttccacactgacaaagtattgcaatgctttatctgcatgctccgatacatgcttaaaaacatgatgcaccgataggcctcttgcatgtaggtaacttcctccctcagtaggagagaagaaagccacagcatcaggatcagtaga

SEQ ID NO: 50092 - DNA, 684 bp, Oryza sativa
  Clone ID: PAT_MRT4530_52612C.1
atggagaagcagcgctgcgatgagcggaggaatcgccggatcggagtggagatggagaagacgacgggggcaatccatgtgacgtggcaccccgtaggagaggcgcaccaacggagagcttggcagcggcgcaaggtgggcggcgagctcggcggcttcctgcggtctgtggcgacgagggtggcaatggacggcggcagcggcctcttcctagcgacgacggcgtcttcgagtcccttccacaggggcggaattagactcaccggcgaccacggggaggagcttgacggtggaggaaacgagctcgagctcgccggcgaccacggggaggaacttggcggtggaggggacgagctcgagctcgccggcgaccacggggaggagctggacggcggaggaaacgagctcgagctcgccggcgaccacggggaggaacttggcggtggaggggacgagctcgagctcgccggcgaggcggcgaccacggggaggaacttggctgcggaggggacgagctcgagcttgccggtgccgtcaggcacagggggaggggcggagagcggcgacggcgtgtgggacgagctcgagctcgccgacggcgtcgggcgtgggggcagggagagtcggagagcggcgggccagcggcgtcgggcgctggggttaggtggcggcgtcggtcgctag

SEQ ID NO: 50093 - DNA, 693 bp, Oryza sativa
  Clone ID: PAT_MRT4530_52613C.1
atggatgcagaggcaggcgggctggctggaggcggcacacgacgatggaggcgaaggcgggggcgggaggcggcacacgccgagatggaagcagaggcgggaggcggcgcacgccgatgcgatcaggcgagcacgaaggagatgagaagacggcgtgaattgaggaggatgggaatggtttggatagatgcggagctggagggacgactgactgaggtgcgggtgtggtttggaatgaaccgcgtctctgagatgggttaccgcgccccagaggaagagtaccgaccgaataaagatggggtgttattacaaatgcagctgcatccgtcgaaaaaagcatttcaacatacagtagtcgcagagaccattcacctctgggacttctggagccggttttcgcccacagttgcaaaaggttttggtcccccggagaaggacgaaggggtggcagccacaattgctggcttccacatcctgctggagctggtgcgctgcgtccatgccatcgatgtctgtcgcgtcagcggtgaacttccacaagattgcgagggagaaaactcccaacgggcgcgagctggatgcgtaactgccttcgtacatgttgcctcttttcaccacgaccaccatttcagatttttctctgaggaggagatctatgacatgctcgacagaggtggacgtaggaacacatag

SEQ ID NO: 50094 - DNA, 498 bp, Oryza sativa
  Clone ID: PAT_MRT4530_52614C.1
atggcgacagcggcggcggcggcggtggtggaggtgcgggatccggcgggcggcgagaggagcacggatccagcggcgggcggcgcggagtcccccgctgacgacgacgagggcgggagcggcgttctcggacgacgacgaggagcggcgcaggcggcaccgctggattcaagggcagaggagatggaggtggacgccgcatgcgtggaagaggccctaggcgcggtcttcgcggtaggggccgaaatccgtatcacgcagccacaggttctggtacacgccacaggggctgatgctgacggccacgttggaagaggtgatccagcggggaggggtcgtgctgccgttggaggagatagcagcgctgttccttcaagtggcgctggcactggtggagctgcccacggcgtggcggcggtcgcagctgctcctgccccagacgcaacggagaatgaagttgtggctactaaggcagcaaatgagaccgcggctaagtaa

SEQ ID NO: 50095 - DNA, 107 bp, Oryza sativa
  Clone ID: PAT_MRT4530_52615C.1
cgcggcgccttttgtgacggggaacgctggtgttgatctcggggagggggtgttgaatatgaaggggctgatggacgacggctcagacctctcgtcgaggggtgtct

SEQ ID NO: 50096 - DNA, 1225 bp, Oryza sativa
  Clone ID: PAT_MRT4530_52616C.1
gtgggccccacctgtcagcgacaaccaaagaaggagggacacaaaatggactagagggcccgaggcccaatggagagggaggaagcaggccgggaggagacaggatgggacgagcctgagggataggaaacgaacttgggccaaaaatggcccaaagacaaagaagaaaatatattatttaatgatttttaatcccgaacgaaaatcgaggtgtgacaagaggattggtagtattatgaatctgatgaaaagagaggatgcggaaaacgagaaggatgttggagatgcatcgtctgacgaggatattcccatggtttgcaacaaggatttttcttgcctgattatttcagatggccatcacatgccatgggagtataaggagaatgaggtcgtgcaaggtgctcggtatgctagattggaggatttgaaggaggcggtgaaacattttgttatttctttgcagggagagtttaggtttaggaatccaggcacctgtatcgaccttcagcactattcatcagctaagaatgatgagggcaatgcaagcattctgcagaaagcattcttctcttttgcagcttgcatcctagcatttgtgcaccgttgcctcatcctttgcattgatggcacattcttaaccggcaaatatagagaccaaattttgacaaccataggtgttgatagcaacaaccaattgttaccagctgcttttgcattcgttgagaaggcagttggtcatcttacaaatggtccaccacgaatgaagaggaggaaagcatcagaaatttctaaattttcagagtggattgagaaggaaccaaaggagaagtgggctttattgttcgataaggatggttcacgctacaatgtaatgactacaaacttggcagagctatacaactgggtcatgccagacacacgtgcgctcccatttattggcatcgttgagttcattttgcatggcacttgcaagtactttagggattggttgataacagctgggccttccatgttagacaatgggttgatatatgcccacaaagtaaaggagtacattgatgaggatataaagaaggctcggaatcatctaacaatgcctcatggtacgacgaagcatttgtatgatattcaatgtagggataaatcaaggcgtggtatcaactgtaagagagcgttgcaagagtgtgtcctgaaagctgatggaacatgttcgtgctcttgctaa

SEQ ID NO: 50097 - DNA, 216 bp, Oryza sativa
  Clone ID: PAT_MRT4530_52617C.1
atgcgaagtaaagggaagttatcttcccctctagccacgtggctctgcaagctggccccactctcacgcctcgcaagtcccgaaagcgacgggggaggcctcggggtggagcgtcaccccctcgggctctcccgctgcttcgccccaaggccctcgcccaactgccatgtggcgcagggagagagagaaaaggggacccaggctggacagccataa

SEQ ID NO: 50098 - DNA, 661 bp, Oryza sativa
  Clone ID: PAT_MRT4530_52618C.1
gcttgtaatcatcccatgtaatttggagagacacaaagagaacaatgcacgacaaaattaggataggaacaaaattggttttgtacattgagcataatcctagtagtaatgtacatgaatcagaagcagagcagcttatgtgtacatacaactcatgaatacatacacgcaaacgcaaatagcacatctttgctctactacctacttccccgttttgaacacgagaattttatcctttttccaagtgaattgaactgattttccatgaaaatcatccaaattcctccgttttgaaggctgcctctcgaatgttataatccaagaaggcaaaaggaatcaaagggctcctttcgactctgaatcggatgaacatttctcagaaggcgcagcagcagcaggagacaaggcggctccacgcggcggtggcggcggggcgacgcctcttcctgccggcggcggcggcggcggcgtggcgcggcggcgcggcggcgtccatggagctgagcatctcccacatgacgtgcacgtcgctgtactcgcacgtccgcacctcattccgcagcttccccaggccggtggttcgccggaggccgaggcgggcggagaggccgagccagacacgcttcaccggcaccgccgcccggccaagcaggcacgacat

SEQ ID NO: 50099 - DNA, 1485 bp, Oryza sativa
  Clone ID: PAT_MRT4530_52619C.1
atggcgggattaggaaagggggagagtagcggcggcggtggcggcggcggaggggagatggggttcaggttcaagccgagggaggcggaggccgtggagtactaccttctcccccggctgcagggccggccgcccgtgcccaaccccgccatcgtcgtggagaacgtctacgagttcgagccggagcggctcatcaatgagaagtgcaacggcggcgtcgccggcgagggcgaggaggggtggtacttcctgtcgccgagggatcgcaagtacaggaacgggaagcggccgtcgcggagcacggaggacaaggccgggcggtggaaggcgtcgacggggaagacggaggggaaggacccgatcacggagtgctatggctgggtcaagttctgcgtcaccagcctcgtctacttcaagggccccgtcaagacggagaagaagaccaagtggctgatgcgcgagttcaccatcccgcacttcgagaacaagctcgacaagaccgccgccgccggcggcagcagcaaccagcggcagctggatcagtacgtgttgtgcaggatttacacgtcgccgaagaaaggcgcagacgacggcgagcaagccgaagtcgtccgcggcggcggcggcggcggcgaggacatcgacgagtgggcggaagcctgcgctgtcttcgacttgggtcccgagacggcggagggcagcgacaatgcggatgcggcggcggcggagggagacatgcggtcggcgaaacaggcgggcaagaggcccgtggcggcggcggcggtggccgagcagccgtcgaagcggccgtggctgccaccatcaccgtcgacgccatgtgacggcgggccatcgcaagcgatgggcaaccgccaagtcccaatgcaggggctatcactcatgcacaacttcccgcctccgccgacgacgttctgcggccacgcgccatttcagcaaggattcccggtgcacaacaaccgcgcgcagatgcggtggccgacgatgcagcacaactgcatgccgtcgccggcgcacagcttccagccgcggccggtgcagcggcgaccggtgctcgtcggccaagcgccaccgcagcggcgaccggtgcatcacgtcggcggccacgcgccgatgcacatgcaccaggcgcagtggacgccggtgcacatcgcccaagcgccgatgcagcagctgccgtttgacgattgggtgttcgatccgttcgacgacccgccaccgccgatgcagcagctaccggtgatgatgaacaactaccagccgcaagcgccaatgcagctgccgccgatgatgaacaatgaccagccggcgatggtgcacggcggcgagctccaggcgccaatgcagctgctgccggcgacgacgcacggcggcgaggtccaggcgccaatgccgctgaacgtgtacgaggaggagcagaggccatcgcaagaagacgggggacaatgcacaaatgcagaaggatga

SEQ ID NO: 50100 - DNA, 239 bp, Oryza sativa
  Clone ID: PAT_MRT4530_5261C.1
acggcacgaggcctcgtgccgaatacggcacgaggatacctgcaacaacaactgcgcgtaacacataccacacgcccaagtacgccctccccctctaaactgagatttgaggcccaaactaatgttattagcaagtagctgatgctagccgctccttgctataaatacatgtgcttagctagttagcttttgcacagatcaacaccggcaaccgactaactctgtctgaaggaagctaa

SEQ ID NO: 50101 - DNA, 177 bp, Oryza sativa
  Clone ID: PAT_MRT4530_52620C.1
atgggtagagcaaaaccatgctcgaacccatgcccgtcgttgcccgcccaaaccctacccactaagggcccagacccaagctgccccacacctggctccacccctgcccactgggtcggtatccgcggatacccgtacccatgggcaattgccatccctaaactcaacaactcctaa

SEQ ID NO: 50102 - DNA, 390 bp, Oryza sativa
  Clone ID: PAT_MRT4530_52621C.1
aagacccaaagcatccaagtttttaaccgaaaggaaataaacgggttttaaacgactaacatagggcacatggggggcagaatttaacggcccatgcaacgggggccagggccgggggcaaaacttaacgaacgctaaaaaatttaaaaggcagccggaaaaacccccacttcaacggggctaattttttttggggggcagccttggccaccttggcaccggggggggcctttttttccacgttctgggggaccccaacagccaccggtggcctaatggcacgcacgggaaaacgaccaagggggggggccttaaagaagggccccacaaccagggggttggggggaatcattttaaccaaacccggttccccgtttttgaggaacttgg

SEQ ID NO: 50103 - DNA, 335 bp, Oryza sativa
  Clone ID: PAT_MRT4530_52622C.1
tttttgtttttttttttttttttttttttttttttttttttttttttggggggccaaccaaggggcacattggattattttggtggaactacatcataaccattattgggcattttatacaaagacaaatgctaatcaattgtcaagaccgggagcaggataccatcgtactacaatggaatcaatgatatatggccggcgcagggggggccctttcatgcccgtacgggtgcattggatatgccccggaacttttgggcccaaaccacgggtggttttacttgaggggaacgggggggctgagcgaaaagaacatggccccgtaaagggggaac

SEQ ID NO: 50104 - DNA, 371 bp, Oryza sativa
  Clone ID: PAT_MRT4530_52623C.1
atttattttttttttactctttttcaaacttttttattttcgtgcggatttacttatcgttcctttatgcttaccatcttttcttatatagagctttttagatcatggcggacacatggtcatacctggaaatgcgagacagggccatacggacacaaaactatacaataaaagagcccttaataaaaagtggaaaaactaaggcacaaaacgagtcccctaacaaaaattaattgcgttaaaatcactaaacaatttgcaaccgggaaacaaaaagtgaaaaccccaggagccaaaagggggacgcacccaaaaaaaaaggcctggcaccaaaccccacgattgaaaaacaaaaaaccagtgcgacaagc

SEQ ID NO: 50105 - DNA, 747 bp, Oryza sativa
  Clone ID: PAT_MRT4530_52624C.1
gtgggggaaatactttcttttgggatgatgtttgggtgggagatactgctttaaaaattcaattcccatatctgtacaatatttgtagagctcctagagctacgatcaaacaaatttgtacaaatggggagtggaatatcgaattaagaagatcattaagtgagcaagaccttgaagagtgggataatttgcatgagattctagagagggtgacgttaacagaagaagatgacaaaatgagctggggtctgactaaatcagggtggtacactactaagtcgctttataaagagatgatttttggaggggtaagagacagaagagcccaagaaattctaagtatcccagtgccgctgaaagttaagattttcctctggttaatgataaaagggcgcatacaaacagctgagcaattaaaaaaaatgaaatggcctggtgaggtggagtgcaaactttgtggggagttagaaggggttgatcatctaattttccaatgtccccctactaaatttttttggtgttgtgttagagatgcattaggctgggctaaagtgccgaacactagaacagagctgcttgacaagctgctttgcccaggcaatgctcgcaacaccccgttgttgtgccttgttgcggcgggaacctgggcaatttggctgtttaggaatgattgggtgtttaacaacaaacttatgtcagatgtacttcaattaccttataaagctgtttcatttttgaagcaatgga

SEQ ID NO: 50106 - DNA, 965 bp, Oryza sativa
  Clone ID: PAT_MRT4530_52625C.1
agagattagaaaagcttcatcaccctagaacaaatcgcaactaatggaatggtaaaacgggggtatacttgttttttttttttttttttttttcccatcaaaaattaataggcttatatgcatcttttttttttttttttttttttttagaagttcaacagagcatatcttcattcttaaaagcaaatagtagcacagtataaagcattctgcaaaactcagcacagtgatctgcgacgaataattttttgacaggaaccacacagaacaaaggtccagactaataatgctcagagcgagcaaacttctactcattagagtgacagggatatagaattggtagcgcaggcagatagattgaaaatcctagtaaccacccttgagatcattgaccacatcgtacgggatgggggtgacagtctccagtgttgcaccctcaaccatgaagccgggcttaggaccctgcggctgcctcttcgtgctgatgacctcaccacgagccttggcatctgccttgagctggtcgttcttgatcttcctcaggcggaactcctcagtgcacctggatggctgcacatgctccacacggacatggatcctcttcctgataatgcggttcccaacctgcttgttgatctcgacgccgatggcgcgcttggtgacgttccagacgcggccggtgcggccgtggtagaacttgtgcggcatccccttgtgcacggcgccgttcaccttgacgtcgacgtgctcgccgatcttgtaggtgcggaggtaggtggtgagcgggatgtaccccttcttcctgaacggccgcgcgaacaggtcgcgcgtccgcgcacgcagcccgtggcccgccggcatcctggcggctcctcctcctgcttcccttcgcgcggcggcggcggcggcggcgggtgaagaggtggggtgagcgtgtgtgcggcgctagggttcgccccggccgg

SEQ ID NO: 50107 - DNA, 837 bp, Oryza sativa
  Clone ID: PAT_MRT4530_52626C.1
ctcattttcttgtcttttattcttgttgattgcaggatcaaatcaactggcacgctcatgaacctaaaagcaagattttggacctgacgcggggctccatcggtgttcgatctccggcgaaggggtaagtccaatgttccgccggcccaggcaattgtctcatctacgtcggcgttgttcaaggctgcatcagtacattcgacctcttggattgctctggtttggatgatatatttgcctacctatttatcatgtctctgttaatctagtcttagcatatcaatttagctctatcagctgtctctcgctttagggtttctgccgttttatgtttttatatatgaaaaacatatctttaagagaaattttatggtacttaaaagaggatgctaaatgcaagttattcctttgatttgtatttcagcagcgccactcaatctatctcttttacgctcaggagcttgagacggccactcaatctatctcttttacgctcaggagcttgagacggtgaaccacatcctccttgactgcgtgttcgcttggcaggtcttggttccgttgttgtcgccttgtgattgggctgccctctctcctcctcgtggcaattggctccagaattggtggccatcttttaggacatgcttacctgatcatctctgtgccggcttcgactctctggccctcctggtttcttggcaactgtagaaggaacgaaactttagggttttcgactttactctctcttcggtctcagtggttctagagtccatcctcactgagggccatctatgatcgttagctggcgttgcttctttcgggtttttttagagggta

SEQ ID NO: 50108 - DNA, 194 bp, Oryza sativa
  Clone ID: PAT_MRT4530_52627C.1
cgcgcgcgtgcgcgtggcccctcgtgcgggcgccctcttttttttttttgggaaatttaatttaaagggttacccccagtattaagacatgatgcattctggacatagcataagtacgggtagtcatttgacatgcaccataaaagtgtaagtaacttacactaaactattggtaaagggaacatttacatatg

SEQ ID NO: 50109 - DNA, 585 bp, Oryza sativa
  Clone ID: PAT_MRT4530_52628C.1
aaaaaaaaatatggggcccaaaaaattagggggggcccaatggccataggctaattttttattttacataaaaacaaaggggttatatttggggccggcaaacaccaagggggcgttaaaaaaaaaaggggttacaaacagttttaacccgaacgggttgggggcaaccccaaaagggaaaattaagcctcatccccttgggggtcacaacggggacacaaaaaaggggtcccgggtcaccatcccttccaaaaaatttcatcatttgggggggggggaaaacccggccaggaaaaagggggaagcaattccttgggggggggggggggggggggcaacctggcgggaaaaaggttttttggggccaaaacggggcgaggaaaaaaaacatgtttttgttttgggggaaaaccccttttctatataaaaacgccccggcgtttttggggaagggcccccgggtttcccttccgaataatgggcgggaacccgggggaggctatccttccatcggtaaggggggcaacttcggaaaagaaggctttgagggcccggccataaaaaaaacctttctcccttaggggt

SEQ ID NO: 50110 - DNA, 1435 bp, Oryza sativa
  Clone ID: PAT_MRT4530_52629C.1
ggaattcggcacgagggtctattattgtttgttgctctcccctcccctcccccgtgcgtacgtctccgattaccaaccaggtcgcccgcctctcgtcgccgaccgggccggagctgctcgatctgctgcagtacgtccagcctgcagcaattcggccgcccgcccgttgagaggagagggagaggagatgatctcatctggccccatctgcaacgtccaggttcttacggctgagctccaatggcatgcgaatgcccattttgacgatgatcaactccaaaccgacatggaattggcccaccaaatcgccctcactcaatccacgcccaatcccctgctgctggacactcatcaagaatgtaacaatctgttcgctggtgatcctcatgctcaaggagcctcctcaagcatcgccggaagctcatcacttcagggaagtgttttggatgagcaagtatcttgcttgctccaagcgcaactccgaagcaatgttcaggaaatacaaggaggtgttatgaacttgttgagagcctgcctggaatcagaagctggttcatcgacaagtatgatatcaggacatgttgatcactatcagagtctttcatcagaagataaggggtggggatgtgggtggagaaatatccagatgctgagctctcatttgctgaagcaaaggccggaagcaagggaggctttatttggtggttctggatttgttcctgacatcccttcacttcagaggtggcttgagattgcttgggataagaaatttgatacccttggctcaagccattttcataacaaagtttatggcgccaagaagtggatagggaccacggaatgtgctgcccttctccgctcttttggtttgcgtgcaagggttgtagattttgatagcacggaatcatcaggtcctcacagtaagaacggaaaacatgcaccaaaaagagtacaagggccaatggacaagttcttgataaaaaatgtttctccaacatctacatcttctgaactttgtcgagaagatgctgaaaacatgagaggccaacaggttcttgttgactggatctggaactactttgctagcaggcattctgataactcggacagttcaaggcgtgtgcttgtgagtgataaaaccccattgtatttccaacatcaagggcattccagaaccatagttgggatccaaaagcaaaatggtcaacatgggaatcaagatcgatttacccttttgattttggaccctggccatagaacgtcagatttggagagggctcttcgaagcaagacaggatggcagcgtctagtgaaaagaggtgtccacactcttaggaagccacagtatcagttgtgctatgtggatcctggaattgctagttcagaagaaatggagcagctgacaactattgatagtatcctggtcaggttctag

SEQ ID NO: 50111 - DNA, 330 bp, Oryza sativa
  Clone ID: PAT_MRT4530_5262C.1
atggacccacggcggtgcgtgcgcggaggcgcggcgctgcggtggtctcagggattgcgggtcatcaacgacgcacgactccttccccgcgccggcaagctctccgacactggccgccgctcgccgccatcctctgcgcctctctcccgcatgttggtgagctccggcactgcgccgtcacttctcgtccactacgcgccggcctcctccttccttcgcgcgcgtgatgccgtcgcccgccctccacacgcccgcgagctccagcgccgctccctcactccccgcgcgtgttggcctcagtcttcctccacgcgcgccgtcactgggtag

SEQ ID NO: 50112 - DNA, 224 bp, Oryza sativa
  Clone ID: PAT_MRT4530_52630C.1
tttgaacatggatcaaagacaacctattcataaagcatacaagctttcccacaggaaactgcttcataaaactaacatatcatacggctctcgatggtccattttaaccagactacacgctattacacagatacacctttatcactagccggaacagaacactccgacaagactacagcgcactctgtcaggcttcacccaaactggcttgattacctgaccac

SEQ ID NO: 50113 - DNA, 906 bp, Oryza sativa
  Clone ID: PAT_MRT4530_52631C.1
atggatcagtacattaaccaaaattggtcagagatgaagccggccatcgtggtatcagccgtgttagtgcaagtggaatgcaaagcccctatcgataagtgcttgactgaggcaagtcaagccatcaacaaggccctcgaagcccttatggataagcgcttgactgaggcaagtcaggccaacaacaaggcccttgatgttgttgtggttgctgccccaccagcaaaaaagtctgaaattgaacatgccatgtggaagcagagaatgttcgcctttgctgctctcggaatggccgaaggagatgagaagaaacttgctacagcttcacttgcctacaagaatgttgctaatgctgtcctcacagccgcacctgctgagaagtttaaagtgatggaagaatccttcaaaggtttgccgccaccagcgcgcgccgcccgtgctcccgccgtcgcgcgccacatctcccggcaccggcctgctccggtccccgtctccctgtcgcccgcccccacgccacccgacgccgtcccaggccgcccgacggctgtctccccgtcgcctgcccgacgccaccccacgccggctgacaacgccatcgcgatatcagccgtgttagtgcaagtggaatgcgacgcccctgtcaatcaacgcttgactgaggcaagacaggccatcaacaaggcccacgatgcccctgtcgataagcgtgtgactgaggcaagtcaggacatcaacgaggccctcgacgctgtagtggctgctgccccaccagcaaaaaaggctgaaattgaagatgccacatggaagcatagaatccacaacaacatcgagggcctcgttgatggagacgagaagaaacttgctgcaacttcagttgccttaataaatgaggaatgggtctcatga

SEQ ID NO: 50114 - DNA, 333 bp, Oryza sativa
  Clone ID: PAT_MRT4530_52632C.1
atggcaaagacccgagacgggttgccaacaatggccggccaaatttcaaagggatttggggactatggaactgaggaggggattgatgtggaaggcgtgatttggggtgaagaaggaggtcaacttgtcgttgtcgaggtggtggtcgagcagagcggctgcaaagctgagccatggcaccgaggatgggaatgctgccgcgagcaaggagaaggactacacacctgcgatgtggcggtagagcagcaacctcgagtaggtggcggcgtcggctccctccttccttcttgggccagcggcgagctcgagcaggctagggccggaatgtcctag

SEQ ID NO: 50115 - DNA, 759 bp, Oryza sativa
  Clone ID: PAT_MRT4530_52633C.1
atgggcaagggcggcggctgcatcccgagcaagaggcaccgcgccgccgcggcggcggcagcgccagcgtcgcactcgcaccagcgcgagaggacctcgatcccggcgccggcggcggcgccgcggccggtgcgcatctacgtcgtgttctactccatgtacgggcacgtccggctcctggcgcggccggtggcgcgcggggtgggctccgtcccgggcgcgcgggcgatcctcttccgcgtcccggagacgctgccccccgccgtgctcgcgcggatggaggccgacgacggcggcggcggcggcgacggcgaggacgtcatccccgtcgtggaccccgacgggctccccgacgccgacgggttcctcttcggcttccctgccaggttcggcgccatgcctgcgcagatgcaggccttcttcgactccaccgtgccgctctgccgccaccagcgcctcgccggcaagccagccggcctcttcgtcagcaccggcacccaggccggcggccaagaaaccaccgcctggacggcgatcacgcagctggcgcaccacgggatgctgttcgtgccgatcgggtacaccttcggggaggggatgttggagatgggcgagctccgcggcgggtcgccgtacggcgcgggcgtcttctccggcgacggctccaggccgccgtccgagctcgagctggccctcgccgagcaccacggcaagtacatggccacacttgtcaagaaaatggtgcacggtgcctcgtga

SEQ ID NO: 50116 - DNA, 369 bp, Oryza sativa
  Clone ID: PAT_MRT4530_52634C.1
atggacggcgaccaaagatccgccgccacccatccttcctcctccttcggccttgcagccgcccgaaaggccaccggcaaagccgactggctccaaggactacgacgacggggcttcgtatttcccccgagggtgccattctggcaggtggttctgaggcgacccaagtggaagagggaagagggtgtggaggcgacaagcccggatatcggcatgaaggggcacgactggcggtgggaggctggcgaggtgcatggagaacgtgacacaaaggctcatggctggcaagcgcgacgtggaagcgacgaggtcggcgtggaggaggcgatgaggtcggcatggaggctggagtggtgtggagcgtgctaa

SEQ ID NO: 50117 - DNA, 138 bp, Oryza sativa
  Clone ID: PAT_MRT4530_52635C.1
atgaagtggagggagaagatctgtagtgttgttctcggcttctcgctaacatcagaggtgaagtcggagagacaaagggatgacagcgcattcacgatggaattattgacggtgcctgatatcgccattacgccctag

SEQ ID NO: 50118 - DNA, 378 bp, Oryza sativa
  Clone ID: PAT_MRT4530_52636C.1
atgtggatacacctagattctgggtcaagttattaccactaccaggttgtgtacattggtggcatagtaaggccagcaccatttgcagatgatggcataggtgatgagttccatgacggtaaactggccccaggatcagctgttgttgtgctagcaggagcgccatttgcagatgatggcataggtgatgagttccatgatggtaaactggccccaggatcagctgctgtgcttgcaggaggcgttccaaatgagcgaactgcaaaacagtacagtgaagcactcagtgagaataatatcatgcacacgaacatgagaacagcatctcttcttaagggctctatccctggccggagattacgccacgtggcgtcctag

SEQ ID NO: 50119 - DNA, 821 bp, Oryza sativa
  Clone ID: PAT_MRT4530_52637C.1
tcacaccaactccaatgcacgccacgccacgccacaattacaattatactccacactccggtaggcgaagccgattgagaaagcaccaaccacaccacactggtctctaccttcctttcttgctttctctcctgctgctggttgcgtctgccggtgccggcattgccattcgtcggcgtcattgatgtcggagggcgcagcagggacgacgaggttgccggagtggctggagacgctgctgtcgacgcgcttcttcctggcgtgcggggcgcacccggcgtcgccgcggaacgagtgcaacatgttctgcctcgactgcccttccccctccccgcccttctacggcgttcttcctacaacgacgtgggttccgggtcacggaggtggaggacgtcctcggcatctccggcgtccagacctacgtcatcaacagcgccaaggtcctcttcctcaacgagcgcccccagccacgcggcgccggcgccgccgccggcgaggccgccgcctccccctacaactgctagaagacgggtggtcgcggggccaccgtgcagcccggcgatgcgaccaatgacgatgccgccgccgccggcggcagcagcaagaacggcggcgcacggccgcaggggaggcggcgcaaggggattccccagcgcgccccgttcggttcgtgagtcatcgtcatcaacatcaccaggtaacgcaacgcaaagcaaagaaccaacaattaagaaagcaaaagcattcttggcgaggcaatgccgacaagggagcacgcgaaaagtaagcaacgcaaggcttcttctatctgctactcgcat

SEQ ID NO: 50120 - DNA, 661 bp, Oryza sativa
  Clone ID: PAT_MRT4530_52638C.1
ccggccggggattgagaaagcacctaccacaccacactagtctcttccttcctttcttgctttctctcctgactactcctgctgctggttgcgtctgccggtgccggcattgccattcgtcggcgtcattgatgtcgcggcgggagtcggagggcgcagcagggacgacgaggttgccggagtggctggagacgctgctgtcgacgcgcttcttcctggcgtgcggggcgcacccggcgtcgccgcggaacgagtgcaacatgttctgcctcgactgcccttccccctccccgcccttctgctactactgccgctcccaccgacaccaatcccaccgagtcatccaggtacggcgttcttcctacccgacgtggttcggggtcacggaggtggaggacgtcctcgacatctccggcgtccagacctaggtcatcaacagcgccaaggtcttcttcctcaacgagcgcccccagccacgcggcgccggagccgccgccggcaaggccgccgcctccccctacaactgccagatctgcgcacgcgccctcctcgaccccttccgcttctgctccctcggttgcaaggtactacggacgaagacgggtggtcgcggggccaccgtgcagcccggcgatgcgaccaatgacgatgccgccgccgc

SEQ ID NO: 50121 - DNA, 4362 bp, Oryza sativa
  Clone ID: PAT_MRT4530_52639C.1
gggggaggattagttttcttccttttcattcatgatgtcttccccaccgagtggtcccttgtcttatagaccttacagctaagcaacagcatgagctcgcaggcccaacaacccaacataactcatgtgagcgcgcaggcccatttcactctattcctggaacgctactgtagctgtccatcacgactactgtggcgcgtcgcactgaataccatcagctgtgacagtaccgcccgccaaagatgcagcttgtccccaagctggcgcagaagggaatcgtgtcttcaacacatcataatcctcccaggtggcatcatcagcagacagagatgaccacttgataagcacctgaacatgagctgcattccccttttttaccagacgcctgtccagaatcagttcaggccacacatcggcagcatccagtacaaccggtgtgggtagagaagtaaacactggagtgtgatctggcacatgagctttgagttgagacacatgaaacacaggatggaccgcactgccttcaggtaaagccagacgataagctgccgacccaactttctccaagatttgaaatggtccaaagaacttgaatgccagtttgggatatgggcgattcaccaccgaagactgagcataaggttgcaagcgaagaaagacatgatcaccaacagaaaaggaacgctcagatcgccctttatcagccttatgcttcatacgcaattgtgctcgttgtaactgttgctgtaaaaagacagacaactgattgcgttcagaaattaagtccaccacagaatgatgaactgaggacagcagcaccggcacttgactgatatgaggttccactccaaacaaagctttgtgaggggaacaacccaaagatgtatgaaaagatgtattataccagtactcagccaaatgcagccaactgttccatttggtgggagtagcttgaatcatgcacctcaaatacatctcgagacactgattcactctttcggtttgcccgtcggtttgaggatgatatgccgtactcatgttcaattgagtgttccatactttaaacaaatcaccccaaaaacgactagtgaacactttgtcatgatccgacacaattgactgtggtaagccatgggtcttaaacacaaatttatccactgtgaccgctacttgtgaagcagtataagggtgtctcaaaggaatgaaactagcaaatttagtgaaacgatccaccacaacaagtataacagtgtaaccatcagatttgggcaaaccttcaataaaatccatcgagatgtcgatccaagcttctttcggtactggtaaaggaactaacaacccaggcaatcgacaatgctcatgtttagcttgttggcagatttgacactgtttaacaaagttgaatactgcagttttcagaccaacccaagagaacaactttttgagccggtgataagtggccatagtgcccgagtgaccaccaattggagaggaatgaaaagcagtgattaacttagtctgcaaacccagattagctcctatccaaatgcgaccatgatgacgaatgagaccatcagtcaaagaataaccctgatcattaggagaatggactgccaattctaccaataacttctgagcctgagtatccacagcatacgagtttaacacttcctgcaaccaaatggggctagccactgacagagcagataagtgagactgaggaggcactcgagacaaagcatcagctaccacgttctccactcctttcttatactggaaagtatattgtaaccccatcaatttagtcattgccttttgctgtaaatcagtccccagaaccaggaactctttttcatatatagaaagcttctgattagccactcccaatgtcttgctataatatgcaataggatgattatgctgactgaggacagctcccactccaaacgcacaagcatcagtttccaaaataaaaggttgggagaaatcgggcaaagccagtacaggagttgaactcatagcaagtttcagcttctgaaaagcctgctgagcatcatcagaccactggaacgctttcttctgtagtaagacagttaaaggttttgccaggatactataatttttaacaaactttctataataccctgtaagccccaaaaaccctctgagttctgtcacattggcagggactggccaagccaacatagctgcagtcttagtaggatcagtactgactccttgatctgaaattatgtgtcccaaatactccaattgagaacaggcaaaagaacacttggaccttttggcatataacttgtgttgtctcagcagttcaaaaacttgtttcaagtgtgtgagatgagacggtaaatcaggactgtacactagaatatcatccataaacaccaaaacatacttcctgattaagggtgcaaacactgaattcatcacacattgaaaagtagaaggggcattggtcaacccaaacggcatcacatggaattgaaattgaccatggtgtgttttaaaagcagttttatattcatcatcctccaccatccatatttgatgatagccagctttcaagtcaagtttagagaagaaacgagtaccagcaagctcatcaagcaattcatcaacaataggcataggaaacttacttttcacagtaatagagttgagtttgcgataatccacacaaaaacgccacgtgccatccttctttttaaccaataaaacaggagaagcaaaagggctcatactgggagtgatcaacccagaatcaatcatgtccttgacctgactttcaatctcatctttttgcaaaggagaataccgataaggtttgctattcacaggagctgaaccagggaaaagagtaatagcgtgatcataaactctgtgaggtggtaaactgtgtggatcttgaaaaacatcagcaaactcatgcactaactgagaaacagcaggtggaactgaatcagcagaagggaagtcagctgtttccagcagtgcagctgcccatatatcacaccctttttgacacttaagaacctgagacaaagacatagcactcaactcagtttggggaggagaatcagggactccctgaagttcaacccaagtaccctgatacataaacttcaaagttttgttggcccaattgcaagacatatcaccccactgtgccaaccagtccatccccaaaatagcatcatgtccacccaaaggaacaactctcatatcataagtgaaagtacgcccttgaaaccaccaagtaaactgaggaaccataaactgacagtgtatacaatcaccattagctactttaaccagggagggagcaatgggctgcaactgcaatcccaagagttgagcaaagttatagtccaagaaactatgagaactgccagagtcgaccagtaagagcaacaccttattctggaccaaagctcggagtctgatagtgttcacatgactagcaccagacagggaattgagtgaaatatgacaattctcatcctggtcagagtcttcttcagcagtcactgcattcaaaagatcatccggaatcacttcagtaacttgcatagctttaatctgaccacccagcgcacactggtgctcaggagaatatttatccccacatttgaaacaaagaccattggctcttcgataatcccttaactgtcgagccttccatagttctgctcgttcaggcttaatagcaggagtatcagtaccaccctgaggcaactcccctttggtaggcaatggtttatacatcaatcgcttagattgcttagtactcaattcaagtagaacactctcttgcatcaatgccacagcagcagcttgctgaactgtggtaggcaactgaaccatcactgctcccactgatggatcaaatacacggatctgatagacaagagaatcaaattgatgcttatattcagccacagaacctgcctgtcttaaagtttgcagagcctgaatcttctcacgttgcgaggtgctctcaaactcacaaacaacagcatgtcgaaactgagaccaattagcaacttcctccacgagcttaaacgattgataccactgggcagcattccccgacatgtgaagaacagctgctgaaacttgaaatacaggaggaatctggtacatcggttctgaagccatggcttgcttgtgcagctgcgccgcctgcacttgctccttctgcaaagcggccacagcatccatggcgagatccaccttggtagcgacttgatcaattcggccgctctgcttggttaacttgtcgtccaaagcctccatacacagcgtgagggagtccagcttctcgagaagcttagcctccat

SEQ ID NO: 50122 - DNA, 291 bp, Oryza sativa
  Clone ID: PAT_MRT4530_5263C.1
atgaccttgtccctcatgatctccgcccccaccgccgtccggctttattgcccatctttgccaccctcctcttcatctcccggactagtggaagtagatcctttgaaagtatggttactggagtgtgatgaacatgaactgctgttgattgtttggactggtcagaccgggcaggtggtcttgatgcctcgggagagtattgccggtgatggatcgggagtcaacttgagagaagatgacacttggatgatcaggatatcatgcgagatgcttaggctaaaggtttcctag

SEQ ID NO: 50123 - DNA, 715 bp, Oryza sativa
  unsure (1)..(715): unsure at all n locations
  Clone ID: PAT_MRT4530_52640C.1
atgnatcccttacccgcatccttatgagccaatggacagttttaacgcaccaatggntatggtacttcaaggcattcaaagcatggntttttgaccgntgcgtccttatgccgncaaatgggttgatcagctgccatcagtactttggtctcttcgcactacacccagtcgggctacaggtcagtcgccgtttttcttagtttatggagcagaagcaatgttgccaagtgaagttgagtttgaatccttatggttccgcaatttcaaagaggagcgctacgaagatgatcgagtagatgtcctcaaccgactagaagaagcccgagaagcagcattgattcagtcggcttgatatttacaaggattgtgacgttatcacaatcgcaatgtcagatcacgcgcatttttagtcggagacatggttttgaggaggattcaatctacgcaagataagcataagttatctccattatgggaaggagcatttatcatctttgaagttactcggccaggttctaatcaactcaagtgtgaagatggttcagtcgttgaaaactcttggaatattgagcatctacgttgtttttatgcttaggcattacctttgtacattattttcctctttgactgccaacatcatgtttcttcttgagttaccagtcgggggctatcataataataatggagtgtgatttttatcaaaaaaaaaaaaaaa

SEQ ID NO: 50124 - DNA, 1073 bp, Oryza sativa
  Clone ID: PAT_MRT4530_52641C.1
gacgagggtcccctcccccgcgcgctgcacgcatcccctctcctctccccctcgccatcctcaaatcccgctcctctcctcctcctcctcttcctcctcccgctccccacccaccaccaccacctctcacctcgtcaccgatcaccgagcgcatttcgcatggaggcgctccggctgtcgggcccggcggcgccgcccttcgtccccgcggcgagggtggcggccgcgtggggcgcgcgtaggcggggggcgtcgaggtcgtcgtcgtccgtggtggcgaagatggaggggggcggaggcgggaagggggtgccgaccaccaactacgtggtgccgctcgacaaggccaccgggatgacgcgcccgctcgtcgagatcctccgggacctcaacaagcgcgtccccgacaagatcatcgaccccgacaccaacaccgtcccctggtaccatgccaatagaatgctgagcttttatgcaccaggttggtgtggagaagttcgcaatgttatttattctgacaatggaactgtaaccgtggtttatcgagtgattctgagaggaacagacggagaggcatacagagaggctactggcacggcaccagtgcacgagggccgtaacgacgatgctgttgcggctgcggaggaagcagcgttctgcaaagcctgcgcacggtttggtttcggcctctacctataccaccaggacgagatcccatagagatgaggatggctttgaggctcatttctgcagaggatctggtggtcacaaagtttgtaggaaaaccgcgatgaattttcgcaccttgctggtagcacaaggcgagcttttgctgatgcatatttacacaagaaaagctttaatttgttgctgcctcagtttgttaaatgtattgagtccatgtcgtccagcatagttttgtcagataggaaaagaaacattaaaatcgtgccgttgcatagttgctgtgtttatacccggtttttgtatttcgagggccacggatggatatttttgctggcatgataacgaagttgcttcgaccttcctgaagtttttgacttgtgcttgcg

SEQ ID NO: 50125 - DNA, 241 bp, Oryza sativa
  Clone ID: PAT_MRT4530_52642C.1
ataaaaaagaacatcccagggcatttgttatttaccacacatatgcttccaaacaaaaagaaaacactaattattttattaaccacaccacatacatgcacagctagctacagtaacctaactagtaaccatatctctccagccattatcaaacaccacactactcccttgggatttacacattgcaaaacccctttaggctttccaccgctcgctccaaatcccctcttcggcagccgcc

SEQ ID NO: 50126 - DNA, 229 bp, Oryza sativa
  unsure (1)..(229): unsure at all n locations
  Clone ID: PAT_MRT4530_52643C.1
gatgatctggatattcgtttaacattacttctgatctctacttcaatggccactgcaagntcttatttcctatatattctaaacactagatttattgggacgtcttgttcatactgcttgttgtctgcatntctctccttcactntattntccatcagagttaaggacctcggtttggaacgtgtccagaagtttgttggtcttcaatnatcagtagcaattattgttg

SEQ ID NO: 50127 - DNA, 112 bp, Oryza sativa
  Clone ID: PAT_MRT4530_52644C.1
gggacccaatgattaggggtcacttattcattatagtttttccatgctgctttaccacaggaaaaccttagagaccccttaaaaccagagcttaagggtccacaattacagg

SEQ ID NO: 50128 - DNA, 677 bp, Oryza sativa
  Clone ID: PAT_MRT4530_52645C.1
gtcccccggcaaaatcccccggcctagggtttccgcaaccgcctccgctgctacccacccaacctgcattgcgacagcgacgcggcgcggccatggcgacggcggcgaagggcggagagaagccggcgctgaggaagccggtgttcgtcaaggtggaccagctcaagccgggcacctgcggccacaccctcaccgtcaaggtcgtcagcgctaaccccgttcctgcccgtggccgtgccggagggggcggcccggccgtcggatctcgccccgcgcgcatcgccgagtgcctcgtcggcgacgagaccggggtcatcgtcttcaccgcccgcaacgagcaagtggacatgctgatgccaggaaatacagcaatcttgcggaatgcgagaatcgatatgttcaagggctcaatgaggcttgctgtcgacaagtggggacgtgtggaggttacagagcctgccagtttcgccgtgaaagaagacaataacctatcgcttgttgagtatgaattggttaacgtgccagagtgattgttccatcaaagtttctactgctagcataaaaagggaatgccaaacttgtagtgatttttgtttaaagatcgtaggaggggttatggggttttgttaagagttctcaatcaggggaattcatatagaatccttgggtgtgcaccc

SEQ ID NO: 50129 - DNA, 2727 bp, Oryza sativa
  Clone ID: PAT_MRT4530_52646C.1
atggagcccaatcccccgccgccgcccgccgccgccaccgcaacctaccgccgccgcggcaagcccaagcccaaacccaagcgcaaggcagccaagcccccctcgccgtccccgccgcccaagcgccaggcccgggacgaccccccgcacacggggccactcacccgccactcgccgctcaaccctgcgccggaggatgcaccgccccagctccacgccggggagcgcgacccgcctccgcgcgcctggatagagcccgcaaagcttccgccggtgagcgaggaagtccaggccgtcctgtcgcgcggagccggcgtccacgtcgtcccctccttcgcaggatggttttcatggaaggaaatccaccaaattgaaaagcaagcattgccttcgttttttgatgggatatctttacggaggacacctgagatatatttgggaattagaaattttattatgaagaaatttcattctaatcctcaaatgcatttggagttgaaggatttgtctgagttgtcagatggggagatggatgctcagttgaaagtcttggagttcttgtcacactggggtttgatcaatttccacccttttccaccagctgtacagggggtgagtgagctggttgagagcataacaaatgctgatacagaagagaaaatttctgtagtggataaattatttcagtttgaaacattgcagtcatatctcattcctgctcctaaccaagcagaggtgacagctccgattcacaccccgagcttgctttctgagcctactctaactgaagattcgattacccaagctgagtcttctgttgagtaccactgcaactcttgctcagttgattgctcaaggaagcgctaccattgcagaactcaggcagactttgacttgtgttgtgactgttatgacaaaggaaatttggatgcaggcatgtcacaaactgatttcatcattatggaatctgcagaaattccaggctttggtggtactagctggactgaccaggagaccttgcttcttttggaagctttagaaattttccaagcaaaatggggtgacattgccgagcatgttgctacaaaaagcaaagcacaatgcatgctacacttccttaaaatgccaattatggacccatttctgcatgatggagatgttaatgaaatatctcaggaaactgcagagcaggtctcagcagaacaaggtacttctcgtgtaactgagaaaatggaagtagaagacaaaacaaaagaaataaaaactaatgatagaaaaactgctgcaaaaccaaaattgaacttgacagaaacagaagtaaacctagacgacaatgttgttgcaaataatgataccaagagttcaggtgatatcaatgtggatgtatgtagcaatactggtgtatcaaatagatcttcagataccgaacctacaaagaaggaaacttctggggaaaacacatcaaacattgttaatgatgtcctgaaatatgcttttgaggctgttggtcacattccaaagatagagggcttgggttcatttactgaagcaggaaatcctgtcatggcactggtggcatttctatctggccttgtggatcatgacgatgttactacgttgtgctgtagttcactgaaagctatatctgatatgtctcctgctcttcaactggcaacaatgcattgttttattcttcaggatccaccaaatgacctcaaagatccaccgaatagagttgctattgcaaatctcactgattgggaaattggaacttgtagctttgcaaacacagattgtgggcaacaaaaagacaaggatgctacttcaaatccaagtgttactgacaatgatgacaatttaaaagaagagtctgctttatctgtggaagagccaaataccacatccacatcatcgaaaaacaccaggaaattatctaatgcgaaggaatctaaggatgaatctccccaagtggagcccaaacccagtagtgccaacgattgtgacaatccaatttctcaggtggcaaagagggcttctgataatataagaggacacagttccactgtgcttcctgtcagtctgaataatacaaatgaaccttgttccatatcttcccaagaggctagtgcaggaaacacaaaggatacaagtcatacagaacacatagaaggagataaaccaatttatgaggatccaccattagaaggaaaggtagagttgaacaagatcgaacatgaagtcactgacttatctgctgtacagcaacatgagtccatccaaacaagtttgaagaagggctacatacaagatcataacagtattaagaaaacagttgccgatgatgtctccgtacaaaggctacagcgggcagcagccagtgctatttcagcagctgctgtgaagtcgaaactccttgcaaagcatgaggaatatcaaatccagcgactagctgcacttgtgattgataaacagctccacaagatgcaagcgaaaatgtcagttttcactgaagcagataatttggtcctgcgagcgagagaacacaccgagagaactcggaagaagcttctgatggagaggagcgcgataatcgcttctcggatggcggcattgccacccagaccaaaccaccaacctgggatgcctgggagcagattgccggtaggaactatttttttcacagtggttctggttagattaggtaaaaataaatacggggcaaactaa

SEQ ID NO: 50130 - DNA, 166 bp, Oryza sativa
  Clone ID: PAT_MRT4530_52647C.1
gcaggcaccggacccgacacgcactggccgacccacgcggctccttacctcgcattatcctcattgggagaacatgttttaaattcacataatggggcgaaaagcccgcccgagcaaatgaattacgaaccaactgaatcagcaaacttttgccccacctcagccg

SEQ ID NO: 50131 - DNA, 807 bp, Oryza sativa
  Clone ID: PAT_MRT4530_52648C.1
taaagggcccgaaataccttgcttacgtatcattagaaagtgcattaacataaatacggcagtaagcagaggaagtacaaaggtatgtaaactataaaaacgagtcaaagtggattgacccacactagcacttccacgtaataactccactaaaggtgatcctattaccggaatcgcgtcaggcacacctgtcacaattttgactgcccaataaccaatttgatcccaaggtaaagaataaccagttacaccaaacgatgcagttaatacagctaaaaccacaccagtgacccaagttaattcgcggggttttttaaacccacctgtgagatacacacgaaatacgtgcaggatcatcattagaaccatcatacttgctgaccatcgatgaactgatcggattaaccaaccaaagttggcctcggtcattatgtattgaaccgaggaaaaagcctctgtaacggttgggcgatagtaaaaagtcatagcaaaaccggtagcaacttgtactagaaaacaagtaagtgtaattccccctaaacaataaaatatgttgacatgaggaggaacatatttactagttatatcatctgcaattgcctgaatctcaactgcaattgcctgaatctcaagacgttcctcaaaccaatcatatactttattgagataggtaactaacccgaacccccctccgagaaccgtatatgagaatttcatctcgtacggctcaaacagaaacacacaaattttcaacggatattagaaaaaaggttcaaaacttcatcagccactgggttgggaaagaaa

SEQ ID NO: 50132 - DNA, 234 bp, Oryza sativa
  unsure (1)..(234): unsure at all n locations
  Clone ID: PAT_MRT4530_52649C.1
gtcttgcaggatgaccaaagaatgggcttgtggcatgcgcagtggttggttgcttgcctggagaactttgcatgcagatgggggaaaaaaagctgatttgttatactgttgctctgccttgtatgcattggatggcctgcatgccctgctgtgcccctgaatgtggtnaaccccggatgactaccaatgctgctgtggtgcatggtcctatangttcncagcacgtaatgtggt

SEQ ID NO: 50133 - DNA, 122 bp, Oryza sativa
  Clone ID: PAT_MRT4530_5264C.1
cccagctccgttttattcattctattggggcggggtgtggaaaaattttttgttgtgcaactttgccaaacgtttgtacaagtgatacaatagtaataaggcgtgtatatctgggagcgagg

SEQ ID NO: 50134 - DNA, 197 bp, Oryza sativa
  Clone ID: PAT_MRT4530_52650C.1
gacaagaggaccaggggggaaagaccatgtaccccatgaatcaaagggcgcaaatgagaggaaaatgggatgcatctacaggggcctctccggcgcaagcaaaggaaagcaagtaacgccgtgctacgcattagattggatcgtcggtgttaggccatataacagtcgtagcaacatgcgcatcatgcatgtgacag

SEQ ID NO: 50135 - DNA, 264 bp, Oryza sativa
  Clone ID: PAT_MRT4530_52651C.1
cgggggtaaaccctacctttcaggaaaaatcgaggattgatttcccacttattatatcgtatgcaaatactaacacatgcgaaaattattaagctgaaaagtttccatacaaattcattcagacaaacaagggtgaaaaaccttttttttcccatttcccccttgaactttccgtaaataccaccattccaccaaactcccttttggtttttacgacgaataatttttttcaacccaggtagcttattaattaattcccggggg

SEQ ID NO: 50136 - DNA, 1627 bp, Oryza sativa
  Clone ID: PAT_MRT4530_52652C.1
gcttctttaagatcgccaccctcccaacctccccattgtgctactatatgcttattagtatcatcagttcatcaccaacctctctctcgtcttcttctccctcttcttcttcttcttcttcatcttctacctttgatagtttgattgaggtgttgttcctttgagtgcagcaagaagctgatgattttgatgatagcttaaggatcttgccaaactcttgtgttgggagtagttgcttgcagatcgagctgcaaaggtcccattttgcttctccatctgagcttggttaggttgcgtctgagtacacttctgaggcttctttggtcgttttggcctcgagctccgttcttaaactctgcctcgatcgatcgatctcatctcatctgcgctgttcttgttgctgttgctgttcaattttgagaagaaggtgccgatcgagttgagccgatcgggttcagtgaaattcacttgcgtttttgagagaattgtttgagttggtttcggttcttgagatgttcctgagatcgaaggtccaggagatgatcctgaggaggaggtccagatcgatgaacagcggcggcggcggcgtgcagcagagccacctctccggccagcacgcgagctcgacgacggtttcgtgcgacggcggcggcggcggcgccggcggcaagagcgccaccgcggcgtgtgcgttgttggggtctccgaggctgctgcactgtgcctcgctgccttccggcagccacgccaagaacggcggcggcggcggcggcggcggcggttcggagcccgagacgccgtactcgatgagcccgacgtccgtgatcgacgcggcggcggccttcgcgcccagcccggacgccggcggaagcaagcgccggccgtggtgcgactggggcgccggcacgcacggcctcgccgacgcgctcgactgcaccggcgacgacgacgacggccacagacagagcgtcctcgccgccgcgtcgcgggcggtcaagctgcaggcgcaaccgcagcagcagcatcccctgctcaggtcgtgctccctcgatcgccgcgtcgagttcggcgtcaagaacaagagctcgtggctgccgcttcgcgtcgccggcggcgaggcggcggcggcggcggcggagtcaccggcggagatgcagatggagccgtcatcggaggactacacctgcgtcatctcccgcgggccgaacccgaggacggtgcacatctacggcgaccgcgtcgtggagggcggcggcggcgccaccaccgccgtagcgctcgccggcgagagctcgccgcggccgatcaatttgccggcgccggcgcgtgaagcgagaggcttcttgagcttgtgatgcagtgatagatggtagcttgattaatgatgcttaggtaaagtttggtgtgaggacaattaaattaaatctgagtcttaatgctgtcattattattattagtatttttattgtattggttgtttgttcgatcttgatgatcagatggtcaagtagtagtagatgctttcttgatcggatcctcaaattttaaatagatgctttcttggtcagatgatcaatcgattcaaacagatgggtttgttcagtatacttcaactgcagcccgggga

SEQ ID NO: 50137 - DNA, 1080 bp, Oryza sativa
  Clone ID: PAT_MRT4530_52653C.1
agggttatactcatcatttactttctggtaaacaaaaaattgtaaatatccaggtggatacatatgtttttctcaggggaacaactaacgatgccatgaaaactttttcctcacactttcctccctctgaagataacaccccccggcccgatctgagcagttaatattgctaataaaaggatgcatgggccatggttccaatgttatacggaaacattaacataaactattgaaactgaatggtgagctatttctgcagtataaaattcacatttatatgtgcatagatgaatgaacagtacatacttgaaagcatgaatgttacctgtgaagcaattgcagagcagtaaattgagtgctttgcaaataaatttcttgttggtgacatctataaacgggaggcaccagggtgtcaatttagctttctagcgttcatgtcctacttataaaaatcatcccagcattgttgtttgcctgaattagctgtagaaaaaaatattattgaatggatacacaaattatctctagaaaaagtctgcactacaaaacatagaaacatgatgtagtatatcaattttaacatatagaatcaataaatcacactaatctgctctgcttgctgggcctcacagctcataacgacaacaaccgcacatttcttcggaattttgatcattgcaagcatgtcatatgctctctgtaaatgtaatgtgcatgggtgtcatatcgggttgctattcaaaattcatataaaaaaatttatactgcaccactgtgagtttatgacttacatatttatgctaactgtatccaaatgagattataatcattttcagcttacctctaatagtaatagaggcagcccaatttattgctccatatgcttcctttcttctgctaggaccgctacatgtactctcaattcttttgaagcactcattccttttgtcagcagtgagatatggaacatcatcatgtagaaactaaaatttaagttgactcaaattaaattttagtttctacatgatgatgttccatatctttttttggcggacgcgtgggtcgacccgggaattccgg

SEQ ID NO: 50138 - DNA, 258 bp, Oryza sativa
  Clone ID: PAT_MRT4530_52654C.1
atattaaattttttttttttttttttttttcttattttttattctttttttatatttttttttatttttatttttaatttctttactattaaaagcagaaaaaaaaattttctaaaaaaccaaccacccagttataaaccaacaactaacagtcttctcatcttaatccattccccagcataactcacacactaacacctttacaacttctcattctttaaacaaaaaccttccatacaaaacaaaattttttttttt

SEQ ID NO: 50139 - DNA, 321 bp, Oryza sativa
  Clone ID: PAT_MRT4530_52655C.1
atttatttggtgtcgtgctaaccgaggattttcgcgcaaagcaccttatatggaatcattgaaatgtcatatgaaaaatatccataccctcaggcatacaagatttaagcacgctgctggtgcatgttcacactgggacatacaaaacacctgccgaagactattgaacctaatgatgcctccttcatgacactgcttgagccactaactggagcactcctttcatttcggatctcaaggaaggctgttagttttcccctatctctataaacctcattcacaccgccgggtattggttcaggcggctaggccgtagaggaa

SEQ ID NO: 50140 - DNA, 136 bp, Oryza sativa
  Clone ID: PAT_MRT4530_52656C.1
ggcaacctatcagaaacagtaactttttggctagggagtataattctttacataactcatagttctatgttacacgcaaagagctgaaacgccaccacatttgggaaatctaacttgaggaaggaagggctaataa

SEQ ID NO: 50141 - DNA, 1055 bp, Oryza sativa
  unsure (1)..(1055): unsure at all n locations
  Clone ID: PAT_MRT4530_52657C.1
atggtttctccaccagtggagagaggggagagtggggcgaggtgggccggtggatggggaggcggcaaggacgggcggatcaagtgccacgcccgcccaagccgattccgtcctcccgccattgcatcctctggagtcttgtccttcgttggtatcatgctgcccttcactcgtgctccatttctggcccctccattgccttaccacaactggactacgggggttatagctagtggtcgtgccgccgagacggggggcaggggggaggacctcatcttctccagccaccaccgcctcccttcccaccggtggtggcagcgggaagacagcggctcggttgagcccggcggggagggcacgatttggtatgggaggagcagcggcgactccatccggcgatctggtgcgcggggagcggtggaggctacggcggcggcggcggcgagatcggtagcagtgatggtggagaggacggatccgatggcggtggttctcgtcaaccagttcaaggacgacgacagcagcggctgctgcaacgatggataggctctgggcggctcctccactctcctcccctctctcatatccagtggctcggggtggtggggcgtggccgacgcatccggcggcggagctcggcagaaagaggatggttctagctctccggtggtttaatattgaaacgtacagcccacccaccaccaccccagtcgtccccagctaagcgctcccttgcttgcctcagtagacgagctgccaactagtagcactccagcaagcagcgggtcagcggagtccggagggcgcacgtgcgccgcagcgaggtatcagcatggccaggcggcggctggctggctggccgggttcggcaagcggctaagcaggtgtttaagcgaggaaggatcgatgtccggcgccggacagagccgtggtcatcgccttggattacacattgattcggattggccagaggtcttgttgatcaatgactatgcggtgttcatggggtacctgtcgatggttgtcaccgngacggggttcctggtgctcacgtg

SEQ ID NO: 50142 - DNA, 1126 bp, Oryza sativa
  Clone ID: PAT_MRT4530_52658C.1
accccccccccccccccccccccccccccccccccccccccccccccccccttttttttttgggagagaactagtctcgagttttttttttttttttttgaaaaaaatattgagccatcatccaatataccagccataaatattcagttgaatgcagagcgacagattccagggattatttactgcaggagggggcagtttgcagggaccagttcttttaccttttttttaatcaaatttgtaggtcaatggcaaaaaaaatttctaatcaaaaaacggcacggtaatatgaatcactaaacgatcttgcgatcgaacaagcacgcagtgtttactgccctgtgctttttctaagacttcagagcagtatttttgcatatgggacaggtgttcttcacaaccagccattgcctgacgcatccaacatggaagtcatgtccacagtccagtgtcccgagatcatccccatcaacatactcttcctggcagatacagcatggctcttcttccacagatgcttccaacctccatgatgagaatttcctttgctttaggagcttcgtcacttcttcctcactgaggccagtgctaacattgcctattctttcttccagtgccaatagctcctcataagacatgttgtctatgtcaaggcgcatatccctgtgtctgtcatgaatgtcgactccaccatagaaaatggactcaaatcttacattttcccctctgtgaatcatttcaagcgcgttccggatctcaattaatcttcttccttccctgctcctagttgacaacggaacaccccaaacaccatcaccttgtcgttctaacagaaaaccggaccttaggcgtgggtgctgatggccacgaagagctccagataattcttgatgatgaggcccctggaccagtgaaccggtgtgacatctgtggaatgccaggaacgacattcattggatgctggtattgaaagttcaggctactgaccactggaattacctccggtggttcatcaaatgaactctgaaagggaggtggctgatgattcggcggactccagcttggggatggcgaggaggaggtccttggtgtccgccgccgcctgcatgacgccgtgcgcgtagta

SEQ ID NO: 50143 - DNA, 975 bp, Oryza sativa
  Clone ID: PAT_MRT4530_52659C.1
atgactaggtaccggtgggaatgtttattggctcacattctcaagaaaaggattatcattgctgatgattgggagaattcttacgggaagataaaaatcctctttcatgaattcattatggaagattatgatgatggcaagccgattttcatgggcgtatgtgatggccagtttatccagttattcaaggcagatggaactcccgaagagtttggccttgctaccctggcttatatactgtggaagaggaacattttgattgcagccagagtactgaaaggggtgctatgccctaacaataacgttgctgaaagtcttgcctgctctgcattgatgcaagattgcctcttgagggaggatgtggatcatctgtccatattaacagatagtggtgcagttcaccgtgcgataagtggagaacctgtttcggaacatggtcccaacagtgatgaatatgctctcttgaaattccttgcctccaagtttaaaacatgcacctcaactcagcagcctagggaggttatctttcctgtagatcagctgataagggaaatggaggaaagtactaatgtaagagacacattggagaaagttttggctaaatttgccccccactttggcggacaaccactatttagattgagccagaactcaagtgccaaagatatcatcaacagcttagctgccttgacatcccccgtcctaccccacaaagctcaagagaaatcatacattcatgttgatgaaaattttaaacttcaagcctatatacatattacaaatgatcttttccccttgaaggtggtattggtctttgatagctttgaaaaaaagccattgtcatttcagaatgaagtgaacaagttattacccagaggtacagttaagcttgttgaaggcgaatgcacaacctttactatatgtagggtatcttttttgggggtatgtgctaatgccatgttcttctcagattga

SEQ ID NO: 50144 - DNA, 195 bp, Oryza sativa
  Clone ID: PAT_MRT4530_5265C.1
atgcagaccacgcgctacaatatcggcgggcttaatttgaatatggtgacgagaaatgcaaccgtttctcatattgacctaaatgcccttgtcaacggcgacggccacagccacggcgacggcggcggcggcgacgacgagggccacggccacggccacggcgactacgtgtttcaggatgtctattttgtgtag

SEQ ID NO: 50145 - DNA, 293 bp, Oryza sativa
  unsure (1)..(293): unsure at all n locations
  Clone ID: PAT_MRT4530_52660C.1
ggacgtggaanntnnntnncntncnctncaatnccnggncgggcaaactttccccactctctctccctggcngcggtgcggaggtagggcacggagatccggaggcggcgtgaaggcctgtctcctctcccccctctctcccggcggccatggacgacaaggaggacggcgtgtggtggggcaganatgttggcgccggcggggggttggtcgacgaggaggacggcaacggaggaggcggcccganaagcaaacgccctcgccgttggggcccttgntgccgggccctttct

SEQ ID NO: 50146 - DNA, 194 bp, Oryza sativa
  unsure (1)..(194): unsure at all n locations
  Clone ID: PAT_MRT4530_52661C.1
ccagtttctacgatcgatatcatagaagttgagagaggacttactgagctgaggaagctgggaatcgagtctcagctgtgggaatcgacgaggagatctctcgacgatgactttgacaatcacgggagcccaaccggatcagaaatttancagaaacataataatggaacnaggcctagtncaattttnttttt

SEQ ID NO: 50147 - DNA, 1505 bp, Oryza sativa
  unsure (1)..(1505): unsure at all n locations
  Clone ID: PAT_MRT4530_52662C.1
acccagtcggcaggagaagaacaccatggcacaacgtgtccaagaagaagatgagcagatgatgagcaccgatgacttgatccaagctcagatcaagctctaccaccactgcttcgccttcatcaagtccacagcactttgggccgccatcgacctgcgcattgcggatgccatccaccgcaatggcggcgccgccaccttatccgacctcgcgctcaatgtcgggctgcacccgaccaagctctcccacctccggcggctcatgcgcgtgctcaccgtcactggcgtattcgctgtcgaagaccgcaatggtgaggccatgtacacactcacccgagtctctcgccttctcctcaacggcgatggggagggaacacatgccctgtcccatatggcgcgtgtgttagccaacccactcgccgtgatctctcatttcagcattcatgagtggttcaccaccgagaaggcaaccaccatgacacccttcgaggtggcgcatggttgcacgcggtgggagatgatagcgaacgatgccaaggatggcagcgtgttcaacgccggcatggttgaggacagccgtgtcgccatggatatcatcttgaaggagagctgtggcattttccagggcatcagctctcttattgatgttggtggtggccatggcgctgcagctgcagccatagcaacggcattcccaaacatcaagtgcactgtgctggatctgcctcatattgttgctgaggctcccgccactcatagcaacatccagtttgtaggtggtgaccttttcaagttcattccagcagccgatgttgttctacttaagtgtcttttgcactgttggcaagatgatgattgtgtcaagattctgcgactatgcaaagaggcaatcccggcaagagatgctgggggaaaggtgataattattgaggtggttgtcgggattggatccgaggaaattgttcctaaggagatgcaaattttgtttgatgttttcatgatgtacgtcgatggcatcgagcgagaggagcatgaatggaagaagattttcttagaggctggattcagtgactacaaaatcaccccagtgctaggtgcccgatcgatcatcgaggtttacccttgatgcttctgaaggtgtacatgtgcatctctccgtggaacctattctagttcagacaattgaactaaatacataacatgttggttataaacatgtttatgttagtcttttgatttcctttcgttcatgagtcagtagccttgaggcatgtgcatgttcacgttgaggccatcattttttgtttttctgttgtcatatgtgctatagtatattgtgcgttgtgggatggcacaactcatgcatgtcgtggcttaagtctcgggcatattggtagcctcgatttccatttttatattcatcacaataagaggaagagaaaccaaaagctgcaaggcagtttgcagcgccaaaaaaaaaaaaaaaaaaaaaaaaaaaanaaaaa

SEQ ID NO: 50148 - DNA, 333 bp, Oryza sativa
  Clone ID: PAT_MRT4530_52663C.1
atggcggcgctcgagttcaccacgacagcgactgcggcggcggctgcgggcgtggaccggacgctgtgctccggctgtgccgtctactgcttgctgctctgccaggagcggttcagcgggctgggcacgccggcgtggctgctgctgccctgctcgaccacctcgtcgccgttgttcgtcgagcgtccggtccgtggactcgaccaaaactcaaatgatagaacaaaaccatcagatagattaacaggtagaagcacagaatcatcagtctcagggcgcacggcgacctggcgtctctgccaatcacgtgaacctccagggagccacgcatga

SEQ ID NO: 50149 - DNA, 1341 bp, Oryza sativa
  Clone ID: PAT_MRT4530_52664C.1
caaaaccctccccaaaaccccggccggctcctccgcttccctctcctcccctcccctcgctccccaaaatttcccaaactccccgccgcccaacacaatggcgagctttaccgccggcggcggcggcgccaacaacaaccccaacaagtccctcgaggtgaatccggcgcccggggactcggtttccagcctcagcttcagtcccaaggcgaaccacctcgtcgccacatcatgggacaaccaggttcgttgctgggagatccagcctggaggccaatgccaagcgaaggcctcgatctcgcacgatcagccggtgctgtgctcggcatggaaggatgatgggactactgttttttcgggaggttgtgataaacagattaagatgtggccgctgctctccggtgggcagcccatggttttatcagggcatgaagcaccggtcaaagagcttgcctggataccacagatgaaccttcttgttagtgggagctgggacaagactctgaggtactgggatgttcgacaacctcagccagcacatgttcagcaactacctgagcgctgttatgctctctcacttagttatcctctcatggtggttggcactgctgatcgaaatgtaatagtcttcaatatgcagaatccacaggctgaattcaagaggattgtgtcacctttaaaactccagacaaggtgtcttgctgcatttcctgatcagcaagggtttctggttggatcgatagaaggacgagttggtgttcatcatgttgatgatggtcaacaagggaaaaactttacatttaaatgtcaccgtgatggcaatgacatatacgctgttaacgcattgaactttcaccctgtgcaccatacttttgccacttcgggctctgatggaggtttcaacttttgggacaaggacagtaagcaaaggcttaaggctttcaataagtgtccgtcacccatcacatgcagtacattcaatcaggatggctcaatatttgcttatgcggtatgctatgattggagcaagggtgccgagaagcacaatccttctactgcaaaaacaaatatctttctccatagtgtccaggaatctgaggtcaaaggaaagccccgtgttaataagaagtagacctgacaacaagaagttgaggattggttatcataatcataacatcatctcgctgatgataatttcctgcatgagtatcctccttccgaactctttatgccatctcttcgtctatgagacggtaacttgtaaacacatacttttctggtcgtcattgttgtgaattgcaatagtggacaaaaaaagttatatgcaatctttaatagaac

SEQ ID NO: 50150 - DNA, 1183 bp, Oryza sativa
  Clone ID: PAT_MRT4530_52665C.1
cctttgcagttctcactgcacaggtataaagaaaaggccacgcctttgccccggccgggatctcttcgtttcttcttcttcctccttcgacgagagcaagcaagaagccatggcggactacaaccgctacggctacggcggctacggctccaccccgtcagcgccacccgcctcctcctacggctacaccaccacgccctccgccccaccggcctcctcctcctcgtcctacggctacggacatggcggcggcggttacccgtcctccacctacccaccgccgccgccgtcgtcgtcgcaggcgtatcccatggggatggggggcttcctggtgttcccgccggggacgcacccggacgtggagcgcgccttcagggccgtggaccgcgacggcagcggctccatcgacgagcgggagctgcaggacgcgctctcctccgcctaccaccgcttcagcatccgcaccgtccgcctcctcctcttcctcttcaacaaacctgcctcccattccccctctcgcatgggtccagcagagttcgtgtcactgtggaattgccttgggcaatggcggggcattttcgacagatacgatagggacgggagtggaaaaattgagaaagatgagttgagagaagctctacgcagtcttggatatgcggttccaccttctgtccttgagcttcttatcgcgaactacaacaatggagtctccagccgtggcgcgttggactttgacaactttgtggagtgtggaatgattgttaagggtttaactgaaaaattcaaagagaaggatacacgctacagcggctcggcaactctttcatatgacgggttcttgtcaatggtcattcccttcattgtcccttgacttcttcgggtgtctcaagacccaaagagctttgaatttgtacagcttttcagctatgtttctgcttcctagttggatttgtttgtgcaaataggccttggtgattttattgactctgtgccgtactgtgtacttagtaccattttgttttccctatagcctatatcgactgttacctgtgattgcgtctcggttctgacatgctttgatcttagttatcctcaaatgtaattgccttttgatgctaacagataatatgggagagtaaactcagcatctatgttcagtcaaaaaaaaaaaaaaaaaaaaaaa

SEQ ID NO: 50151 - DNA, 1107 bp, Oryza sativa
  Clone ID: PAT_MRT4530_52666C.1
atggagcgcgggccggcgatggctccggcggcggggacggggtcggggccggggacggtggtggtggggtcggcagcggcgctggcggcgcaggaggagatgcggtggcggcagctggacagcggcgtcagcgcggtgtcgttcgggttcgtggccaccgccatcctcgtctccatgttcctcgccatggccatcctcgagcacttcctccgctccccggcccaccgcggccacgctgggatggggccgccgcccccgcacccgccgccgccgggagggatcctctctcgcctccgcctactcctcgatcgccgcgctgcaggaaagatggtagatccttctattcgaggccaatgttctgaaaaggcgttgtcgcgtttcgttgacattatcggcagttgtattcagcatgagccagagtttaggccctcaatgtctgaagttgtccaagatttaactcgcatggtgagtgatgcaacaaaggcttccatgtaggccgtccggtggacggtgacagctagccttggtggcaacccggtgtcctcgcgcgcagacaacaaagcggcgctgtcacgatggctgcacctgcaatcctcagatattcatcattcggctgggcgctcagagatcaaagcaaagttggcgattactttcttgatcattcctcggaagtgctcgtcaggtgatgcccgcattggaagatccttcatggatgttcgcatggtgaagagcaagtccctgcccatgattgcttctgccgccgtcttcttgctgctgctctccgccgcgctgccgctctcgcagtcttacacttatgagcaagatgtgtttgcaataaatggcttgtacactgcacttgggtcaccttcagtgcctggatggattacaaacggtggcgacccctgcaatgaaggctggcagggtgttgaatgcgtggtctcaaatattacctccatcactttagttgtgcatatttctgaatgtggtcttgcagcactgtcatcaagatcagtatcccagcatgagccagagtttaggccctcaatgtctgaagttgtccaagatttaactcgcatggtgagtgatgcaacaaaggcttccatgtag

SEQ ID NO: 50152 - DNA, 2319 bp, Oryza sativa
  Clone ID: PAT_MRT4530_52667C.1
atgcacgtcgtgatctgcccattgctcgccttcggccacctgcttccgtgcctcgacctcgcccagcgcctggcgtgtggccaccgcgtgtcgttcgtctcaacgccgcggaacatatcccgcctccctccggtgcgcccctcgctcgcgccgctcgtctccttcgtggcgttgccgctcccgcgcgtcgaggggctccccaacggcgccgagtctacccacaacgtccctcacgacaggccagacatggtcgagctccacctgagagcttttgacgggcttgccgcgcccttctcggagttcttgggcaccgcctgcgccgactgggtcatgccgacgtcgtccgcacctaggcaaacactaagttctaacatccacagaaactcgtcccgcccaggcaccccggcgcccagcggtcgcctcctttgcccaatcactcctcattcgaacacgctcgagcgcgctgcagagaagctcgtccgctcctcgcgccaaaacgcgcgagctcggtcccttctcgcctttacctcccctccccttccttatcgcgacgtttttcggtctctgcttggtctgcaaatgggccgaaagcagctgaacatcgcgcatgagacgaatgggaggaggacaggaacgcttccactgaacttgtgccgttggatgtggaagcaacggcgatgcggaaagctacgtccctctgacgtagaatttaatacgtcgcgcagtaatgaagcaatcagcccgatcggagcaagcttggtaaacctccaaagtatacaaagtccaaacccacgggcggtactgcccatcgcatcatcaggcgtccgggcggtattcatcggtcgcgcccgcacatcgacgcccacgccgccgcacgctaaacccgcccgctcggccgctccacgcgcgcaccggcccccttcttccgtcatggactccggctactcctcctcctacgccgccgccgccgggatgcacgtcgtgatctgcccgtggctcgccttcggccacctgctcccgtgcctcgacctcgcccagcgcctcgcgtcgcggggccaccgcgtgtcgttcgtctccacgccgcggaacatatcccgcctcccgccggtgcgccccgcgctcgcgccgctcgtcgccttcgtggcgctgccgctcccgcgcgtcgaggggctccccgacggcgccgagtccaccaacgacgtcccccacgacaggccggacatggtcgagctccaccggagggccttcgacgggctcgccgcgcccttctcggagttcttgggcaccgcgtgcgccgactgggtcatcgtcgacgtcttccaccactgggccgcagccgccgctctcgagcacaaggtgccatgtgcaatgatgttgttgggctctgcacatatgatcgcttccatagcagacagacggctcgagcgcgcggagacagagtcgcctgcggctgccgggcagggacgcccagcggcggcgccaacgttcgaggtggcgaggatgaagttgatacgaaccaaaggctcatcgggaatgtccctcgccgagcgcttctccttgacgctctcgaggagcagcctcgtcgtcgggcggagctgcgtggagttcgagccggagaccgtcccgctcctgtcgacgctccgcggtaagcctattaccttccttggccttatgccgccgttgcatgaaggccgccgcgaggacggcgaggatgccaccgtccgctggctcgacgcgcagccggccaagtccgtcgtgtacgtcgcgctaggcagcgaggtgccactgggagtggagaaggtccacgagctcgcgctcgggctggagctcgccgggacgcgcttcctctgggctcttaggaagcccactggcgtctccgacgccgacctcctccccgccggcttcgaggagcgcacgcgcggccgcggcgtcgtggcgacgagatgggttcctcagatgagcatactggcgcacgccgccgtgggcgcgttcctgacccactgcggctggaactcgaccatcgaggggctcatgttcggccacccgcttatcatgctgccgatcttcggcgaccagggaccgaacgcgcggctaatcgaggcgaagaacgccggattgcaggtggcaagaaacgacggcgatggatcgttcgaccgagaaggcgtcgcggcggcgattcgtgcagtcgcggtggaggaagaaagcagcaaagtgtttcaagccaaagccaagaagctgcaggagatcgtcgcggacatggcctgccatgagaggtacatcgacggattcattcagcaattgagatcttacaaggattga

SEQ ID NO: 50153 - DNA, 244 bp, Oryza sativa
  Clone ID: PAT_MRT4530_52668C.1
cccacgcgttcgttataaaccttagttgattccatcctcagctgcttaggctaaaaacagactgtgagaagatgtcttgccgctgcggatctagctgcagctgccgctcaaactgctcctgcggagatgactgtccctgacctgaaagagaagagcagccgcaccaatgccaccgatgagcttggtgtggcaccagagaagaacgcgcaccatggtggaggcgcgtcgcctctcgaggatccag

SEQ ID NO: 50154 - DNA, 925 bp, Oryza sativa
  Clone ID: PAT_MRT4530_52669C.1
atggcgggcaaggacgacgacgtgaaggtgctcggcctggtgatgagccccttcgcgatccgcgtatgcatcgcgctcaagttgaagggcgtgagctacgagtacatcgaggaggacctcgccaacaagagcgagctcctcctcagctccaacccggtgcacaagaagatccccgtcctcatccatggcggcaagcccgtctccgagtcgctcgtcatcgtgcagtacgtcgacgaggcctgggcgccctcccccacgtcgccctccatcctccccgccgacccctacgaccgcgccgtcgcccgcttctgggccgcctacgtcgacgacaagatggtccctggtatggttggcgttttgagggcggcgacggaggaggagagggcggcgaaggccgacgagacgctggcggcgatggcgcagctggagaaggcgttcgccgaggtggccgcgaagaacgggaagcccttcttcggcggcgacaccgtcgggtacgtcgacctcgcgctcggttgcaacctgcactttctcgaagcgatccgcaggttgcacggcgtggcgttggtcgacgccggcaagaccccgctcctggcggcgtgggcggagcggttcgtggaggtcgaggcggccaagggggtggtgccggacgcggacgacgccgtggagttcgccaggaaagtccaggctcgtgtagcagctgctgctgcttccaccgctgccaagtgagtggaaaatcgttttcgattggatcattgggtttcttgtaataaagaaaaaatcgtgttattacagtgccattttcaagtcatggttagtttatttgtggggttattaatgtgtaaagtctggacatgtatgcgtgttatgttctctggttcatcgatcataagcagctatacagacatacagtgctagtgctattgcc

SEQ ID NO: 50155 - DNA, 529 bp, Oryza sativa
  Clone ID: PAT_MRT4530_5266C.1
tgcacgaggaataatgctgggcttcgatggtggattttctgtcggttgtcggctacggggctgagtcgagccccgttgccatccccggggagggacgcgccgagtagagcagcttgcgaagtggttgcggccttgcggggagggacaccgagcagagcgttcttgcttgctggttgggcttgcaatctctggctatccgtgatctttgatccatgagattctgttgctattccttcacatggaggtttgtgttgtactttgggcgaattcggatggatgttggattaggcagggttttagagagcttgggttaagaatcctgcttactgatgcacaatagaattaaggtggggattagaatttgctaagctgaaggtttgagatcagggggccagcactgctccttggttagcttgttaatttgatgatgaactactagtgatcctgtagcatgcatctctgttttgctctgtatactcctgttagtgtgattgcaaggtggttttcttttgctactgggcagtgtact

SEQ ID NO: 50156 - DNA, 284 bp, Oryza sativa
  Clone ID: PAT_MRT4530_52670C.1
agcaattcagagagcaccggcgtcggctatgaatcctatcattaagccatcgccatttagaggttgggaaattgatatgatcggcatgattaatccaccatcgagtaaaggtattggtggcgaccgattattttaccaagtgggtaaggcaattcctttgaagaaggttgattctggggatgctatacaatttgttcaagagcatataatttatcgatttggtattcctcaaaccattacaactgatcagggttcaattttcgtgtccgatgagtttgttaagt

SEQ ID NO: 50157 - DNA, 399 bp, Oryza sativa
  unsure (1)..(399): unsure at all n locations
  Clone ID: PAT_MRT4530_52671C.1
ttttttttttttttttttttttttttttttttttttttttttttttttttttttttttactcctggacacgcaatgcgcggagcaaaaacatacaactctcttaccgacaccttttccttgtttcaaaagggcaacatcaccaaagctaaggtggtgggggaggaaaataaaacatacgggccatgagccagaggccttgctcaacacgccacggaagatgctccaataagacaagagccaagccgcagaggggggatgggtaagaaggaaaaaagaaaaaaaaagaaaaaaaaaaaanaaagaaaaaaagaaaaaaaagaaaaaaannnnnnnnaaaaaannnaaaaaaaaaaaaaannaaaaaaantaaataaaaaaaaaaaaaaanaaatntnnna

SEQ ID NO: 50158 - DNA, 1319 bp, Oryza sativa
  Clone ID: PAT_MRT4530_52672C.1
gatcccccgggctgcaggaattggcacgagggagagagagagagagagagatcgatacggttgcgagattgatcgatcgatcgatcgatcggatatatgccatgatgagagatgaagaggaggaggaaggggtggtgatcatcatccgggagtacgacccatcgagagaccgcgccggcacggaggccgtcgaccgggagtgcgacgtcggcccgaccggcggcatgtcgctccacgccgacctgctcggcgaccccgtcgcccgcattcgccactcccctgactacctcatgttggtagctgagacgacgtcgggcgccaccggcggacggatcatcgtcggcatcatcagaggcaccgtgaagtcggtcgccaccggcaagagctgcccgggcgcccccgccgtcgccagcgtcggctacattctcggactccgcgtcgcgccgagccacaggaggatggggttggcgctgcggatggtgcggcggatggaagcgtggttcgagcggatgggagccgagtacgcgtacatggccaccgacaagtccaacgaggcgtcgctgcggctgttcacggtgcggtgcggctactccaagttccggacgccgtcgctgctggtgcaccccgtgcacgcgcaccgccgccgcgtcccgcgccgcgcggccgtgttccgcctcggcgcccgcgacgccgagcggctgtacgacggcaggttcgcgcacgtcgagttcttccccgccgacatcggcgccgtgctggggaaccagctctccatcggcacgttcctcgccgtcatcgacgacgacgggaggtggcgccacggcgagtggcgcggggccgagcgcttcctggcgtccccgccggcgtcgtgggcgctggcgagcctctgggactgcgggggcgtgttccgcctcgagctgcgcggcgcgtcgcgccttcgccgcgccgcggcggccgcgacgcgcgcgctggaccgcgcggcgaggtggatgcgcgtcccgtccgtgccggacttcttccgcccgttctccgggtggttcgtgtacggcctcggcggcgacggccccgacgccgcggtggccgccgaggcgctgttcgcgacgttcgtcaacatggcgcgcggcagggcggccgccgtggccgtcgaggtggcggcctgcgacccgctccgccgccgcatcccgcactggcgccgcctctcgtgcaccgaggacctgtggtgcatgaagcggctgggccgcgtcggagaatcggacggctgggattgggccaggtcacctcctggcctctccatcttcgttgaccccagagaagtgtga

SEQ ID NO: 50159 - DNA, 786 bp, Oryza sativa
  Clone ID: PAT_MRT4530_52673C.1
atggccaacagagcaaaagatgagatgtatgcggttggatggtgtcatgctgatattgataatactacatgcaagagttgtgttaccgatgcactaaggaaagttaaggtgtttttctttatggtgaggactaagtgcctcttatatgcagaactagttaagggtgaaaatattattgaaggctctaatgatttaggaggtgaaaataaaaggattattgaaggctcaggtgattcagggtgtgaaaatgatacttgcaagacacaatgtacttctaccttggtttcatttgatgaaatcacatccaatgctcaaggcaagaagattgccctattcttggattatgatggcacactttcgccaatcgtaaataatcctgagatggcatttatgtcccctgagatgcgtgagaccgtgagggatgcagcgaagatttttccaactgcaatagtcaccgggagatcccgcagaaaggtgtttgaatttgtaaaactagtagaacgctactatgctgggtgtcacgggttggatatcatggttctggaagttcgacctgaagatgttgcagacaaaggtaaagtgatcaaatatcttatagggacacttgggctaaatgactctaatgttctcccaatttacattggagatgacgagacagatgaatatgcctttaaggtgctccgtgagcagaaaaatgggtatggtatcgatgcaatatttgtattggtaatcatcaatgtgccatcgaagttggtgtcattagatcaggggcggaacaggaagtag

SEQ ID NO: 50160 - DNA, 468 bp, Oryza sativa
  Clone ID: PAT_MRT4530_52674C.1
tatttcttctaatatgccaaggtcttaaggtatcaaagactgcagacacctgctatatgctatcgccactaagttaatttcaagctagttgaggattgattttgcaactgaatccaaactacatatcttggtctgaatccattcctcaattttcttcttggtccatctccacgctcgttctggcgttcctttgttggtcgatctcaagtttgcacctcagcatttcctcactcccacatattactggtgttctttcttggcagccaactcgatattttttcccttttttgtgggctgggcttgttaagtaacccaagagaattgttgtttcacttgcgtttttagatggatccctaggtttgttttctaatgagcccaaataacccccctgaggttgtactatgtttgaagcccaacagacaactaaaaaaaaaaaaaaaaaaaaactcgagactagttccctcgtgc

SEQ ID NO: 50161 - DNA, 739 bp, Oryza sativa
  Clone ID: PAT_MRT4530_52675C.1
cttcctcccccacctccgtctcgcgaaaccctcctcccctccccccatggcggagtcgcccgagaacgccgccccggccgcggctccggccccagcgcccgcgcccaccccggccccgccgccgccgccgtcatctccgcccaccaagtcggggatcccgccgcggtacgacctggacgccaagtgggacgcctgcctcgacatctccatccgccgcgtcgcctactccaccctgggtggcaccttcgcgggcctcctcctcttccgtagcccaactactcgctgggcatcagttgcgctcggagctggtgtggggataggagctgcgtacactgaatgttcatacttattcaatggtgctcctccaaagtggtcacccaaagtttcgaccgttccttctgctcattctgaaggggaagacaagtaaacgctgtttggttggatcggtccatcttgatggaggttttttggagtgttgttgaactagctatctcatcatcttgtctgatatcgccaattctggtctactctttaagtatcgcctcaaagttagcaagagcctgctgattttcctttacactatgcaaaactattccaattgtggtcggatgacccatgggccatggctgcgtactctcaaatgatggttttgtgactggcaaataatatgttcatcatgcgaacttgttgcagcgtgcacattagtatatactttgttactgtcccccctttttgatgg

SEQ ID NO: 50162 - DNA, 499 bp, Oryza sativa
  Clone ID: PAT_MRT4530_52676C.1
ctagtggatcccccgggctgcaggtttttttttttttttttttttttttttttttttttttatttttttgcagcaaatgcttctctagcaatgctctcttgagaggcacaacatggaaaatgtaacaatttgcttctacagttgtacataacttattaatttgctttgctactcaatcaaagacaaaaaaacacctaccaaatgttactaaatttacccattgttctgttcaagagtatctatgtcatcatctgaccttaaattatattcttgactgtttgacagtgcatagtctgttgtattccatactagtaaaaacaaatacctgcaactcacttttggagaagataatatgttattgactattatatcctaaagtataattacttatttggttctggccttctgggatttatctacatcagaacaagtcctgcatgatatactgtaccaatcctaactcgaaggtgcaatcttctactgtatcataggaggttac

SEQ ID NO: 50163 - DNA, 1853 bp, Oryza sativa
  Clone ID: PAT_MRT4530_52677C.1
acgtgaccgactcgacccccacccaagacacgccgccgcctacgcccccgaactccccatcgcctcgcccgcggattctcctcctcctcctcctcctcctccttcctcgccgccggcgacgcgccgccggctaccttttgacgctccgaccgtggtgccctttttctgtgggacccgggatcctagctcccctcctcccccgacgattcccggtcgcctcggcggctctcctcccgtcctagggttccggcgaggtcccccgcggctgcgccggcgagatgggtgagcgcaaggtgctgaacaagtactaccctccggacttcgacccgtcgaagatcccgcggcggcggcagcccaagaaccagcagatcaaggtgcgcatgatgctccccatgagcatccgctgcggcacctgcggcacctacatctacaagggcaccaagttcaactcgcgcaaggaggacgtcgaaggcgagaaatacctggggatacaaatatttaggttttacttcaagtgtacgaaatgttcagctgagataactttcaaaacggaccctcagaattctgattacacggtggaatctggggctagtcgcaattttgaaccttggcgtgaagaagatgaggtagcagacagagaaaagaggaaacgagatgaagaggagatgggtgatgcaatgagagcattggagaatagagcaatggattcaaagcaggacatggatatacttgctgctttagaagagatgcgatccatgaagtctagacatgctggagtcacagttgaccagatgcttgaaattttgaagcgctctgctcatgataagaactcccaagattatgtaaaacggatagaggatgatgatgacgatgatgaagatttggtgataccgggccagtcgagtagcacatcaaagatgaatggatcctcccagtcagtatcaaatgcaacagatgtcctgaccaagactagtggatctgataatgccaataaagaaggaaataagatctggccatctaagatgccaaaatttatagtcaagccaaagtctacccctacagatcctatcaagaaacagaagacggaaaccacggctggcccggatactggcaaagcgccagtcgcagaagaaaatagtgagcctgcgcagaacaatgtcctccaatccctctgccaaaactacgatagcgatgaaatgaaaatcgccgtgcgtacaaacgaggaaaggaaggaaatccagttgggtctccaatctcacgcacgcggccaccaccagaagactacgcacagccgccgccgccgggacgccaccacgctccccgaggctgatccatccatggaggaaaggcccgtctcccaccggagtagttgcacggtcaccgacgccgacgaggatgacctcccgacgcagtggaacaagtggcgccgcgcagccgccctgtctcggaggacccggcgcgcgccccgcgtcgccgtgccggccagcccgacctgcgcctgcggcggccgcatgcgcagggtccccaagcccaggcccatgcccaccgccgtggacgagcgcgccgacggtgcctgcggcggtctcgcccccgtgctgcctccggcggcggcggcggcgtggtatccgtatgatctcatgtgcacggagtgcgacggcgagaccggctggcgccggcggaagccggcgtgctgggcggcggattggaaagccgcgcggccgcggcagcgatggcggccatatccttccttcgccgacgtggccgctgccctcggcgatctgcggctcggcgccggcgacgacgatgatcattccggtgacgttgatatgatctcttgttcgtttcaaaaatag

SEQ ID NO: 50164 - DNA, 737 bp, Oryza sativa
  Clone ID: PAT_MRT4530_52678C.1
cgctcccatcccaggggcgacacggacggcgcctcattctcctccgcctcagtccttgcggccggccggcttaccctccctcctcctcccctttgccttgccgccgcctaagcggctcgtcggcaaagccagccggccgcaaggactgcggcggcggggccctctctctccccaacgaggaagccagcgcgctgggacaccggggctgctcggtagcggcggttcacggcgccggaggcggcggccggggggttggtgcggcggatccggcgacgccggaggtggatctgcctcccccggtggtggatctggcctccccgcgaccaggggctgagcgacggcggccagaggaggcgacggatgcgcgccgccgaggacggatgtggcgacggcggcaaaggcccgcgggggtgaggccaaatccggtcctcccacgggcgacggcagcaaaggtctagggtggcaacggcggtggcggaggtccacgggcagcgagatttgtactcaatggaccccccggcggcgtgctccctgccagctctgctggcaacggcggcagccctcagcctgctgcagctcttcatgagcttgtcagggtaagttggggccaacggcgggtagtggcgttgcgtcggcgacggaggaccttcgggggtggtgggggcggcggcgaccaagttgaggtggtggcccggaacgactgcagcacccgtcggcggccgcagccctaggggcat

SEQ ID NO: 50165 - DNA, 316 bp, Oryza sativa
  Clone ID: PAT_MRT4530_52679C.1
aataccaacttacgcaagccatgatgcctcagtgcccccttgtggccaccacttccagaatgatccaagaagcaatccacacagttatttgtgctggactcggcctcccactagatgatgaagatggcgatgcagatgccatacatggcaacatggcccctgtcaacttccactctcttcctgtggttgttgttgatccaacgcttggttacatgtactctagtaataaggtgttggcatactatcgtgtcccaaccctgagaaataagaacccttgaatagaatatcgatcattttcagacctgccccaaaaaaa

SEQ ID NO: 50166 - DNA, 113 bp, Oryza sativa
  Clone ID: PAT_MRT4530_5267C.1
atgcaagatgacaaacagaggcatccagttcattaacttgaaattaagttctctgaaccaaattgaatattgccactatcatgaggtacccaaaaagggccgtaatggcaccg

SEQ ID NO: 50167 - DNA, 998 bp, Oryza sativa
  Clone ID: PAT_MRT4530_52680C.1
gcacgaggccccactcctcctcgcccgcatccggaaccctagctaagcttcgatggcgatggcggcggcctggtccccggcgctcgcggcggttttgctggcggcggccgtggcgtcggcgtccaactcggagggggacgcgctgtacgcgctgcggcgcgcgctggcggacccccggggcgtgctccagagctgggacccgaccctcgtcaacccctgcacctggttccacgtcacctgcgaccgcgccggccgcgtcacccgcctagacttgggtaactcaaatttgtcaggccatcttgctcctgaactgggacaccttgagcatctccaatatctagagctgtacaaaaacaatattcagggcactatcccagctgagctcgggagtctgaagaaccttattagcttggatctgtataacaacaacattactggaaccataccgaaagaacttggcaagctgagttccttagtattcttgcggcttaatgacaacagtttaaacggtccaatcccgagggatctggcaaaaatatctagtctcaaagtgatagatgtctcgaacaatgatctttgcggcacgattcctactagcgggccttttgagcatatacccctgaacaactttgacaaaaatccaaggttggaggggcccgagttgcaagggcttgcaacatatgacacaaactgctgaacgtgccaatcagtccctgtcgctcgtgtgatatagatcaatagcaaattagctttatcggagtacctggtaaatgtgcaagcttggttgctttgcttgtacgagatactgcaagtaaagactaggctgcagctcaacccttgtagtgtagataatatttatcgcaagcctgaggccctcttgactgataatacctggtaatgtatggttgctttgatgaactaagtcttgatatttattgccagttttgatttagttgccctattataagggactggttcaaaaaaaaaaaaaaaaaaaa

SEQ ID NO: 50168 - DNA, 182 bp, Oryza sativa
  unsure (1)..(182): unsure at all n locations
  Clone ID: PAT_MRT4530_52681C.1
cgcanaacggncaccaccacaccacagagagcccgaggagccctactccccttctttcctcttcttcctttcccgcaagcaaagcgcacgccgcctttgcctaaaatctcttggattccgccgccgccgccggggcttcccacggtccttccttggccatggagggtaacagtcccaacctc

SEQ ID NO: 50169 - DNA, 1038 bp, Oryza sativa
  Clone ID: PAT_MRT4530_52682C.1
cgggctgcaggaattcggcacgagggcgagcaagcccccgacaccatgggtgacgtcaccgccgccgcggcgccgtcgacggacaagtcgaacaacctcttcatgcagatcgtcgtccacccggacggcaccatcacgcgccccttcgtccccgacgcgccgccctccgccaccggcccggtcctctcccgcgacgtgccgctcgacgcctccctcgccacgtcgctccgcctctacctccccaaccccgcctcgccgccgccgccgccgacgtccaagctccccgtcatcctctacttccacggcggcggcttcgtcctcttctccaccggcagcgtcttctaccacgcctcctgcgaggccatggccgccgccgtgccggccatcgtcgtctccctcgactaccgccttgcgcccgagcaccgcctccccgccgcctacgacgacgccgcctccgccgtgctctggctccgtgacgccgccgcgggggacccctggatcgcggcgcacggcgacctgtcgcggtgcttcgtcatggggagcagctccggcgggaacatggcgctcaacgccggcgtccgggcctgcaggggcctcgacctgggccccgccgccgtgcgcgggctggtgctgcaccagccgtacctcggcggcgtggcgcggacgccgtcggaggagaagtccggcgacgacgcggtgctgccgctggaggcgaacgacaagctctggagcctcgcgctgccggcgggcgccgaccaggaccacgagttcagcaacccggcgaagtcgatggcggcggcggcggcggcgttgaccgggctgcctcggtgcctggtcaccgggagcgacggcgacccgctgatcgacaggcagagggagctggtcgcgtggctgcgggggcacggcgtggaggtcgtcgcgaagacggacttcgccgggtcccacgcggcggagctgttcgtgaaggagacggccgacgagctcttcgcggcggtgtgcgcgttcgtgtccggcgccggcgacgtcgtccacagttga

SEQ ID NO: 50170 - DNA, 282 bp, Oryza sativa
  Clone ID: PAT_MRT4530_52683C.1
ggcaaggcggcgtccatggcgaccgtcgtcgtttcagtggcgtttgcactgatccatgtttgattaatttctgcatgggttaatttaagccgttcgatttggttgtgtccacgtgtccttaatcggctttatcattgttgtgttgcgaattttttacactattttaattgtattgtgtgtgtgttgagtgtgccatgaatttcttgatgtatttttcttaattggtcttgattgtgtattcattatgtcatattatttatgagaacatattgaggagagttc

SEQ ID NO: 50171 - DNA, 1266 bp, Oryza sativa
  Clone ID: PAT_MRT4530_52684C.1
atggaggacactcatctcctgacaccctacaagatgggccagctcaacctggcacacaggattgtacatgcaccggtatcaaggttcagatcatatgggagcatgccccagccacacaatctcctctactacgcgcagagggcgacgccgggcgccctcctcattgcagaggccagcgcagtctcctacgctgcgttgggacgatccaaggacgacgctgcgaacggtccaatccaccgccagcgtccaggtccccctggctttcttttcggcacgaacttaacagactataattcagctacagatggtgtcaaagcaactgaatcaggggtaaatgaccggaataacctgtcaaaatggtggttcatgtcacgcctaaacgagagcgggaatgctggtggtgctgaagaaagccactacacgcttccgtcgtccctagacgcgcctggactttggaaccaggagcaaatcgaggcctggcggccgatcgttgatgccgtgcacgccaagggcgcactcttcttctgccaaatctggcacaacggtcgcgtgttttcaacggataatccagtaacacctcaagtcagctattttggaaataccgatgacctggccccggcggcacctcaaaggctggaaacaggggagatagtccagatcgtcgaggacttccgtgtggccgctagaaatgccatcaaagctgtcttacgctttgacgaaggtttcgacggcgtggagatccatgcggccaacgggcacctgcttcaccagttcatgaaggctagcgtaaacgaccgcaccgacgagtacggcggcagcgtggagaaccgctgccgcatcaccgtggatgccatgtccgccgtcgcagaggagatcggcgccgaccgcgtcggcgtgcgcctctccccgttcgcggaccactgccgcgaggaaggcaccgacccggaggaggtcgcgctgcacctgatcggcgtcatgaacggcctcggcgtcctctactgccacgtgatcgagccgagaagggcgttccacggcacgttcattgtgaacggagggtacgaccgggaggaaggggacaaggcggtcggcgacggctacgccgacctggtgtcgtacgggagattgttcctggccaaccccgacctgccggagaggttcaggcagaaggcggctctgaacgcgtatgacaggagcaccttctacacgcctgatcctgtggtgggctacacggactacccgtttcttgagcagcctctagctgtttga

SEQ ID NO: 50172 - DNA, 176 bp, Oryza sativa
  Clone ID: PAT_MRT4530_52685C.1
cgccatatatgactgccgtgcagcgccggagtcgactagccccggcgcatcggccggacaatgcatcaccgaatgagacggatgccacgaaaaggctgctccgtgcggcggtggccgagcacttcctcgatgcggccaagctgaaccccaacgacggcgtcctcttccgcttctag

SEQ ID NO: 50173 - DNA, 1686 bp, Oryza sativa
  Clone ID: PAT_MRT4530_52686C.1
atgcgggaggaggagggccggccgggcggtggtggcggcggccgacggggacaacggggggaggagtacaggacggaggaagaggcgacgacggtggagcctcagaccgtcgtccccgtcgtcgcccagccgctgctgctcgccgcgccatcctcctccccccgcgtcgcctcctcttcctccccctccaccacaccagctcaacaagaagggctcctgccaaagtgccaaaccctcagcgcggaagacaatgcaatcatagtccatacatcgacgagccgcggcacaaggccgaagagcaagcctcgggagacagataagctcgacgcgcgagaaccagcactgcacgatctggagcgccacgagccgcgaccgcggcgcgtcgatcctcagcgcggcgtcgcgatcggcatcttttgcacccgcacagcgacagcgtccgcagactccggcagcattgcctcgatgatcaccacctacggcgacgacgacggctcggcggtgaagagggaacaggttgtgcagggtgaggctcgcgacgcggccgaacagctccggccgcgcgcggcgaggaacgacgtcaaccggcgcgccgacttggtcgatggtatcgacaccgaatcgatgatggagtacgtcaaggtccaagtgcgcgtcaccgatgcaccaaatctgtccttcctcacgatgacgctgggaggagacgaggaggagaaggccgtcttccccatcctccatgccatggacaggaatttacttgtgttcgacctcagctttcctgacaagatcgatggtgtctacctcatctacgatacaattggcaagaccctctccatgatcccggcgctatctagcctatctagccctgatgggatggcccataccactcaagttctcatcgcgcgccgtcatgctgctgttgatgatggttcctatgctctagcccttctgggcaagatgggggtggttgacaagccgggagagatgcctgtgatcagctggccagatgttatctaccaatggcggccatcatcgtcgatctcaccgtggaagctgatcaagaatgccaaccttccccaacagtggatggcggacaagagtgcgttctcagctgatatggccttctcctttgaggggcatgccttctgggtggatctgatacacggcgtcttgttctgctcttgcgctgacctgctctctgacgacgtcaaggatgtagactttgactccatcgatcttcctctagattgcctcaagttcaccccgcatagctggacaatggcagagcgtcaagcatatcgtaccgttggctgcactggaaactccatcaagttgatctctatgcacttcagcggatgcgtcaaacgtggtgcccccaaggtgaccgtatggcggctggaggtgtatgctaagatttgggtgaaggagcatgtcctaaatcttaagacattgtggacacaacctgcattcttggctgctaatttacccatggacatggcggccatctatgccccagttgttgtgccttccgacctcacaagctatatccctcctactgcagctgttgccttccctactgttgctcctactgtctccaccgccgccattgccactgttgtctccccacctaatgtccctgcctcccctgctagtaatgcctttgccttacctgataaagccccgtaa

SEQ ID NO: 50174 - DNA, 297 bp, Oryza sativa
  Clone ID: PAT_MRT4530_52687C.1
atggagaacgcgaccctgtcgaactgcggcagttcgacggacatcctgtcgaactgcggcaccctgtcgcctgccgccgggcatggccccaccggcctccggcccgccgccggccacggccccgccgcccgccacagcagccgccacctgccgccgggcgcggccccgctggccgccggcccgccggataggaaggggaggagggggaggaggaggaggggggagagaggaggaaggggaggagaccctaagttggtgtccgtcacggatgaccagaggcctgggcatggcccatag

SEQ ID NO: 50175 - DNA, 1422 bp, Oryza sativa
  Clone ID: PAT_MRT4530_52688C.1
cccaccactgcacgccgcagccggcgccaccggtggcgaactccgccgccgacgcccacctggcggcctcgtacccggccatccccttcccatcccacagcctcctcgccaccaccctcccatccccgccaccgcccaccacgtgcaccctgccgtcctccccggccgtcacccactcctccccaccgccgccgcagtcgaggccgcggacggggcccacgtggaacccggcgccggcagggacggacaccccggccgatccggcggcgtcgagggaggaggggaggaggtggagggaccccgaggaggtggccgcggcgaggacggagggggagcagcggagggaggcggcgcgggaggggagggggagggcggcgagcggggtgtcgacgccgccgtgttccagctcgacgatcatccagcacggcgaggcagcaaaggatgggcgccggcgacgcaggtgatggccggcggcggtggggaagagggggccgacagcgtggaagggggagagcttggcggcagggagagagagcctggtggcggcgcggttgcgcgcaggagccacgcgtaggaggagagaggctgcgcggtgcggcggcttggtagggcggccgggaggcggcgcagaggggaggaatcggggcggcgccgggcagaggagggagggagggaagggagtggcgccgggaggagaaggtcagggcgccgattggagggggcgccagcggcggcgtcggctccgcttgggcaatggccgagcgcatcggcgcggcgcggcgatcggcgcccgaggggaaaggggtggctacacggcggcgcacatctaggcgcaacaacggtttgggggcgggggaagcaattgcacgggggacggccggcgggcgcaagcggcgggggaggagcggcgtgcgggcgggcgctggcggcgggggaagcagcggcccgtgcggtgccgctccactgccttctccatcctcctcgagctcatcctctctcgcccatgcccctgccaccgctggcaaggagaacagctcgccgccgccggcgaggtcgaggacgaagtggaccgctgctggccgccctgagagagagaggaggaggaggaggaggaggaagggagcggcgatcctgctgctcgtcaccgtcaggttccccgccggcgtcatgcggcgggtcatgaagcggcggcgcaagagccgaggccgccgcagggggcggtggggctgcaggagggccgccccggacgagtcgctgtcggggagtgccaaggcgatgaccgcggccgcgtcaacgttcgatatgatggacgacaaggcggcgtcggcggcggagtgggggcgcggctaaactgacgcggccgaggcggcgtcggagctggagctcgagatgatgcgctcccggttctacagcagcggcttc

SEQ ID NO: 50176 - DNA, 144 bp, Oryza sativa
  Clone ID: PAT_MRT4530_52689C.1
atggggataagattagctgggatccgcgggtttaatagcgtcaaagacgatttggtgatcgcgcgcctcgatcgtccggttcacgaaggagacaaggccgtccgagcttgtgcagagctagtttttgcattgggcctccgctga

SEQ ID NO: 50177 - DNA, 1683 bp, Oryza sativa
  Clone ID: PAT_MRT4530_5268C.1
atggccgatgattcgttgctagataattttttggaggagcttcaagtaagaaaggatgatgtttcggacaccaggattgcgttcaacaaagacccattccttgatgatgctgtcttgtcaaatccaagcaccagtaatggcaacaagctgacgtccctcgttgtcctcaacttggtcagcctcgtccaccataacctccctggcatcctccccgtggccaaaaagaataaagcaaagcgcaattttgtcgacgtttgcgatcgcgactacggtatttggatgggtgggttcgaggaatggatggcgctggtgaggaaacgcaatgggagtgggacgccctcctcgtcgtctccgcagcagcccaggtctggtggatttgctgcccaatcttcagtcagttatgtacatggctcccctctgctagagaacacaatgccatttgattcacatgattctgctgaaaaaactgctgaagctttaggaagggtcttgatactggaccttgtactgagaaatgaagacaggttgcgatgccgcccccttggttggcggggaaattacgcaaatttacttgttgccgacaggaatgcttatgcaaacctcgattcattagatgatgtttatgattctgcaatcattcgttacaagccagagatcatcagaagccctcagaatcggaagccgagaagagcagtttcaataagtggcagtattggctcagatacatctgatctcatgttgccggacaatcctagtcagcctgagatttccagctttcacatcatagccattgattcagacggtgaattatgcaaagaaatagaacaatggaatgacatgctcaggacagaagttgtgaaattgtgtcaagacaacagttttaacacgggtttctttgaaggaatagataatagcattgcagttgatgcttatgaattgaaggttcgacttgagcacattcttgagaggatatcattgatttctgatgctgcaagcaccgagcgtccctctcagatcacggattatttgtatattggtggtgctctagctgctcggtcaacatatacacttaaacaccttggcataacccatgttttatgcttgtgcgcaaatgaaattgggcaagcagaatctcagcagcctgatcgtttcgactatcagaacttctcaattaacgatgatgaaaatgcagacatcagtgatgtcttccaagatgcttcagatttcattgattatgttcaacacctacatggcaaagtactcgtccattgttttgaaggaaaaagtcggagcgcaactgttgttcttgcttacctgatgctgagaaaaaaattcactcttctggaagcatggaacatgctaaagaaggtgcaccgacgagcgcacccgaacgacggcttcgccaaggtcttgttggatcttgacaagaaactgcatggtaaaatctccatggagtggcaccacaggaggcctgcaatgaaggtgtgccccatctgcggcaagaacgctgggctcagcagcagctcactgaagctccacctgcagaaggcgcaccggaagatatcgtcggggagcgtcgacaccgccatgagtctggagatccagaaggcggtggaggcgatcaaggctgggcgtggcggcggtgacagcccgacgcatagcgctgagaaggttacttcctga

SEQ ID NO: 50178 - DNA, 633 bp, Oryza sativa
  Clone ID: PAT_MRT4530_52690C.1
agcttcaccattctcgaaaggcgaacaccagtgttcatattttttctgcaggagtctaaaaagaggtttcgacaggaacatcggccgaaagggggagcctcaagccataccgtatagtttgcacggtctcggccgaaatgatcggacctaaccgagtgttggtatttcttatgactatagataaatccgaaagcgcatggaataccgctatagcacttcaccttcggatgaccccaaaaggatattgaactcagggaacgattactgggatgagattcagggctgtcaccacctgccgcctacctctaacaaatccgtgggttacacaacaaacaaagagaagtttctccgaacccggagcagagtgtaccgacagctccggtactcctccagaattcctcctagaaagctacactcgtcgagaaagaagttggagggagcgccaaacttccgggcacccctccagagcttatttagtacataaactttattctaatgcacaaaagatacaatagagcctcttgtaattcagctcaaagttgtgtgttggaaatgagagtgagctcctccttttataggctccaaatgaaggttacattgatgggaattgtcggaaatgccccacaacagcca

SEQ ID NO: 50179 - DNA, 469 bp, Oryza sativa
  Clone ID: PAT_MRT4530_52691C.1
tgttggtatttcttacgaccacagataaatccgcaagcgcatggaataccgctgtagcacttcaccttcgggtgacccccaaaaggatatcgaactcagggaacgattactaggatgggattcagggttgtcaccacctgccgcctacctctgccaaatccggtggatacacaacaaacaaggaagaagttctccgaacccggagcagagtataccgacagctccggtactcctcccgaattcctcctaggaagctacactcgtcgagggagaagtcggatgagcgccaaacttccgggcactcctccagagcttcccctcactctctaccttattctaatgtacaaaagatacaatagagcctcttataattcttgtatgtcttggaaatgagaaggtgacctccttatataggctccaaatgacggttaggggtatgggaaatgaccaaaacaccctgcaaacgcct

SEQ ID NO: 50180 - DNA, 514 bp, Oryza sativa
  Clone ID: PAT_MRT4530_52692C.1
atcaccgtttagaaatgcatagtgcgccagaaatgcttgttggtatttcttacgaccacagataaatccgcaagcgcacggaataccgctgtagcactttcaccttcggtgaccccaaaaagatatcgaactcagggaacgattattgggacgggattcaaagctatcaccacctgccgcctacctctgacaaatccgtggaatacacaataaacaaagaagaagttctccgaacctggagcagagtgtaccgacagctccggtactcctctagaattcctcctaagaagctacactcgtcgaggtagaaatcggatgagcgccaaacttccgggcactcctccagagcttccccttactctctaccttattctaatgtacaaaagatacaatagagcctcttgtaattcagctcaaagttgtgtctattggaatgtgagtgagctcctccttatataggctccaaatgacagttaggggcatgggaattgtctaaaacaacctgcaaccgcct

SEQ ID NO: 50181 - DNA, 456 bp, Oryza sativa
  Clone ID: PAT_MRT4530_52693C.1
atggtgctccaagaagaccgtgcggctggtgctgacgccgtcgcggaacgaggtggtgagcacgaagccagccgcgtcccggatgagcgaggtgaagccaaggagcgtgaggttgctcgcccacgagatgcggtgcacaacccatttcgatgccgcatggagctcgggcggaggcttcccaagacgatgatgcctccccctccttccttcctggacttcgactgggatgaggcagcaaaggacgagggcgtaggtagtggaggcggcgacccggcgggtgggaggcctctccgtccgctggtggaagaggcagcgacacaacgggtgggctccgacggatcaaagagtgtgcagggaattaaagagagagaggaggagaaggtgtgggccccacggatggcaagcgggctttggctagcaaagtttgtgagtaagggagtcagtttggccaactag

SEQ ID NO: 50182 - DNA, 490 bp, Oryza sativa
  Clone ID: PAT_MRT4530_52694C.1
cggccgacggcgggtgttggtatttcttacgtccacagataaatccgcaagagcacggaataccactgtagcacttaaccttcgggtgaccccaaaaggatatcgaactcagggaacgattactgggacggaatttaaggctgtcaccacctgccgcctatctctgacaaatccgtgggaagtacttactttatagaagaagttctccgaacctggagcagagtgtaccgacagctccggtactcctccggaattcctcctaagaagctacactcatcgaggtagaagtcggatgagcgccaaacttccgggcactcctcgagagcttcccctcactctctaccttattctaatgaacaaaagatacaatagagtctcttgtaattcagctcaaagttgtgtgttggaaatgagagtaggctcctccttttataggcaggtatgactgttacagcctatgcgaaataaccaagctaccccggaaccacca

SEQ ID NO: 50183 - DNA, 730 bp, Oryza sativa
  Clone ID: PAT_MRT4530_52695C.1
ttgtggactcagttaccaagtggaccccaccaaagacagtatctcagaatccgaagttttcttggacttgcgggctattaccgtcggttcattgaaaatttctccaagattgccaaaccaatgacttagttactgaataaagatgacaaatttaaatggtcagctgagtgcgacagcagcttcgaggagctcaagaagaagctagtatcagcaccggtcttaattctgcccgactagacgaaagattttcaagtttattgcgacgcgtcccaccacgggcttggatgtgttctgatgcaagagggcagagtggtcacttatgcctcgtggcagttgcgtccaaatgaaggaaactatccaactcatgacctagaattggcagcggtggttcacgctttgaaaatctggaggcattatctgattggcaaccactgtgaagtctatactgatcacaagagtttgaaatatatcttcacccagcctgacctgaatctccgacagcgaagatggttggagttaatcaaagattatgacatgggcattcactaccatccaggcaaagccaatgtggtggcagatgccttgagcaggaaaagctactgcaatgctttatgcaccgaaggcatgtgtaatgaattgcaacaggagcttgaacatctcaacttggggattgtagaacacgggtacgtgtcacgcccagaaatttaacccactattattgttattgtta

SEQ ID NO: 50184 - DNA, 482 bp, Oryza sativa
  Clone ID: PAT_MRT4530_52696C.1
atcattgttggtatttcttacgaccacagataaatccgcaagcgcacggaataccgctgtagcacttcaccttcgggtgacccctaaaggatatcgaactcagggaacgattactgggacggaattcagggctgtcaccacctgccgcttacctctgacaaatccgtgggatacacaacaaacaaagaagaagttctccgtacctggagcagagtataccgacagctccggtactcctctcgaattcctcctatgaagctatactcgtcgaggtagaagtcggatgagcgccaaacttccaggcactcctccagagcttcccctcactctctaccttattctagtgtacaaaagatacaatagagcctcttgtaattcagctcaaagttgtgtgtcttggaatgagagtgagctcctccttttataggcaggtatgacggttacagcctatgcgaaatgtccaaaatgccccggaaccgcca

SEQ ID NO: 50185 - DNA, 477 bp, Oryza sativa
  Clone ID: PAT_MRT4530_52697C.1
ttgtttgtatttcttatgataatagataaatctgcaagcgcacggaataccgttgtagcacttcaccttcgagtgaccccaaaagaatattgaactcagggaacgattactaggccgggattcagggctgtcaccacctgccgcctacctatgacaaatccgtgggatacacaacaaataaagaagatgttctccgaacccggagcagagtatacaaacagctccggtactcctccagaattcctcctaggaagctacactcgtcgagatagaagtcggatgagggccaaacttccgggcactcctccagagcttcccctcactctctacctaattctaatgtacaaaagatacaatagagcctcttataattcagctcaaagttgtgttttggaaatgagagtgaaatcctccttatataggctccaaatgacggttaggggcttgggaaatgaccaaaagaccctgcaaccgcct

SEQ ID NO: 50186 - DNA, 1134 bp, Oryza sativa
  Clone ID: PAT_MRT4530_52698C.1
gatccccgtcgtcgcatcaatcctctcgccgccaccgatccccgccgccggctcgccctcaacccgatccccatcgccgtcgtcgcatccgtcgtcgtccaggattcccgtcgatgcgatctgctccttgccgccaccgatccccgacgtgcctctaccctatcatacccctggccacagaccatactcaagagcaggcgacatgcgcggcgagaccacgtttatttctctttcccaatcccacctcccatatcccatttgccaaacacaccctttagctccctcctgcgcgtgcgccgcacgtgctcgagagagaggcatctctctttcctctcaagtgtgttctttaaattacatgggattgggttatatttatacccgagatacatgactagtccttgccggacacgactcttatctcgaacaaactctaagattcgggtaaatctttacaacagactcttgccgaaacatatctctgaagaaactatttcaaatatcataattaatagatacaattgcctatttcagagatgtaccactgtacccacaagacacaaccccacaacatgtcaccatgcacctcgataccactacggtacctcggaaaggagctgtgacagtacccctcgcataacacaaaccaaatgcttgttggtatttcttacgaccacagataaatccgcaagcacacggaataccgctgtagcacttcaccttcgggtgaccccaaaaggatatcgaactcagggaacaattactaggacgggattcagggctatcactatctgccacctgcctctgataaatccgtggggaacacaaatgcttactttatagaagaagttctccgaacccggagcaaagtgtactgacagctccggtactcctccagaattcctcctaagaagctacactcgtcgaggtagaagacggatgagcgccaaacttccgggcactcctccagagctttccctcactctctatcttattctaatatacaaaagatacgatagagcctcttgtaattcagctcaaatttgtgtgttagaaatgagagtgagctcctccttttataggctccaaatgatggttactgctatgggaaatgaccaaactaccccgcaaccgcca

SEQ ID NO: 50187 - DNA, 512 bp, Oryza sativa
  Clone ID: PAT_MRT4530_52699C.1
tccgtgttgtagctggctacaaatctgtagcccgctgttggtatttcttacgaccacagataaatccgcaagcgcacagaatatcgctgtagcacttcaccttcgggtgaccccaaaaggatatcgaactcagggaacgattactaggacgagattcagcgctgtcaccacctgccatctacctctgacaaatccgtgggatacataacaaacaaagaagaagttctccaaacccggagcagagtgtaccgacagctccggtactcctccagaattcctcctatgaagctacactcgtcgaggtagtagtcggatgagcaccaaacttccgggcactcctccagagcttcccctcactctctacattattctaatgtacaaaagatacaatagagcctcttgtaattcagctcaaagttatgtgtcttggaaatgagaaggtgacctccttatataggctccaaatgacggttaggggtatgggaaatgaccaaaacaccctacaaccgcct

SEQ ID NO: 50188 - DNA, 687 bp, Oryza sativa
  Clone ID: PAT_MRT4530_5269C.1
ggacagaaagaagaacattttcaagctgtcccaaggggagtatgtagcagtggaggtcgtggaaagcgcatacgtgcagtctcctctcgttacatcagtttgggtctatggaaacagctttgagtccttccttgttgctgtggttgtccctgagaagcaggccattgaggattgggctgcacaaaacaacaagactggtaacttggcagaattgtgcaacgatccgaaggcaagaatgtacatagaggatgagctaaacaaaactggcaaaagactagggttgagaggatttgagatgctaaaggcaattcacctagagacaacgccattcagcatagagaaggacctggtgactccaacttttaagctcaagagaccccagctgctcaaatattacaaggattgcattgatcagcggtacaaggatgccaaggtgggaaataaacagtgatggtaaaacagaaccaagtggttattgaatttcatgattattcaaaaggaatcatgtacatatcaataatcatgattcaaaagttaaaggcctatctttttaaaataaaaagttaaagcctatctgttgtgtctctagatgtaaaaactaatatacatatatatactattctgtcattcagggccaaaaaaaaaaaaaaaaaaaaaaaaaaaaaaaaaaaaggggggggggaaggt

SEQ ID NO: 50189 - DNA, 799 bp, Oryza sativa
  Clone ID: PAT_MRT4530_526C.1
attcctgcagccctgctgttcttgcatttggcgaagcatgtcttagagtcgtgtcatgtactgtcgcatggcttccatggcggcttcggtttgtgtctcggggtcagagttgacttgggcttgcacagcggcgagcgcagttggggctgctgccggctgcgacggagcggcttggggcaccagtagttggtttgtcgaaaggatctccgccctggtctggagtgccctcgccgccgcagccgccttcgccatgtcagccgcgttcggcacctgcacagaggtagcaggggccgaaggcggtagtgatggcgcaggtgcggaagcagatggcgctcctccatcttcggcgacaggcgccgaaggctctgctccctcttcggtggccatatccgccccggcgtcgctttcctttcgccttgtaaccttctcctttacaaccttcttcggtggcattcgctctcagtggtttcgctcggaggtccccacggtcggcgccagctgttgtcgaaacgacaaatggttacccttatgaaagggacttttacatgggtacatagtgtaatagaggttcatggactcctgatgggccgttaggcgatcgtcggcccaatggcccctaggcttgatgggccagaaaaggcttcttcggccctcatgggggcaagcttgctttggcgaagtcgtctcccttcggtatatactcttccccctgcatccttcgcccaagaggcctccggcttggcagagtacccgcacgatccttcgcctctcgccgtccttgttccatagtcttcgcccc

SEQ ID NO: 50190 - DNA, 484 bp, Oryza sativa
  Clone ID: PAT_MRT4530_52700C.1
aaatgcttgttggtatttcttacgaccacagataaatccgcaagcgcacggaatacagctatagcacttcaccttcgggtgactccaaaagaatatcgaactcagggaacgattactgggacggaattcagggctgtcaccacctgccgcctacctctgacaaatccgtgggatacacaacaaacaaacaagaagttctccgaatccggagcagagtgtaccgacagctacggtactccttccgaattcctcctagaaagctacactcgtcgaggtagaagtcggatgagcgccaaacttccgggcactcctccagagtttcccctcactctctaacttattctaatgtacaaaagatacaatagagcctcttgtaattcagctcaaagttgagtgtcttggcaatgagaaggtggcctccttatataggatccaaatgacggttaggggtatgggaaatgaccaaaacaccctgcaaccgcct

SEQ ID NO: 50191 - DNA, 2505 bp, Oryza sativa
  Clone ID: PAT_MRT4530_52701C.1
ttcaactacctcaccacagccatcttcctcctcctccttccggcgtgcgtagctgatgaccagcttgtccccggcaaacctctgtccattggctccaccgtcgtttcgaacggcggcgccttcgccttaggattcttctccccgaccaactccacctcgtccaatctctaccttggcatttggtacaacgacatctcgccgctcaccttggtctgggttgccaaccgaggaactccggtgaaggacggcggccatggcagctcttcctctgcaccgtcgctcaccctgtcaaactcctctggcctcgtcttggccgacggcgacggccgcgttctttggactacggacatcaccattattgcggcgaattctccggcggttgcagtgctgatgaacaccggcaacctcgtcgtccggtcgccgaacggcgccacgctgtggcagagcttcgaccacccgacggacacgtacctccccggcatgaagatagggatcaactacaggacgcgagtcggcgagcgcctcctctcctggaacgacggccccggcgatccatcgccggggagcttctcgttcggcggcgacccggacacgttcctccagctcttcatctggaaccagtcacgcccgtactggcgctccccggtttggacaggcaacccgatccccagccagctgatggtcaacggcaccaccgtgatctacctgtccgtcgtcgacgccgacgacgagatctacctctccttcggcatctccgaccgggcgccgcgcacgcggtacgtgctaacaaactccggcaagctccaagtcctctcatgggacggcggcgacggcgcgtcggagtggagcaagctcggcgagctgccgaaatacgagtgcgaacactacggctactgcgggccatacggttactgctactattcggaggtggctccgacatgcgagtgcctcgatgggtttgagccgaggagcaaggaggagtggagcaacggccgtttctcgcggggatgccggcgaacggaggagctgccctgcggcggcgacggtggcgacgccgtcttcttggagatgcaggggatgcagttgccggacaagttcgtgcgcgtcaggaacaagacgttccacgagtgcgcggcggagtgcgccggtgactgctcctgcacggcgtacgcgtatgccaacctgggtggtagcggcagcgcaaggaaggacgcgacgaggtgcttggtgtggctgggagagctgatcgacacacagaaaagaatatcatgtgcaagattctttaaaatgaaatattggtcgaaaatgaaatgaacagtgtgtctctgtgcaggtaaaaggaaacagagaaatgcagtgaaaattgcagtgccagtgttagtgattgtcacctgcatttccctttcatggttctgcatcttcagagaacacaagaaatcacaagttcagggagtactgacagctactgcccttgaacttgaagaagcaagcacaacccatgaccatgaatttccatttgtaaaatttgatgatattgtggctgcaacaaacaacttctccaaatcattcatggttggacagggcggttttggtaaagtttataaggggatgttacaaggttgtcaagaggttgctgtgaaaaggctaagtagagactctgatcaaggaatagtggagtttagaaatgaagtcactctgattgctaaactacaacaccgaaatttggttcgacttctcggttgctgcgttgagggacatgagaaattgttaatttacgagtacttgccaaataaaagcttggatgtcgccattttcaagagtgaaagaggtgtaacactagactggccagcaaggttcagaataatcaaaggtgttgctaggggccttgtttatctacatcatgattcaaggttgacgattattcatagagatctcaaaactagtaatgctttgctggactcggagatgaggcccaaaatagcagactttggtatggcacgcatatttggtgacaaccaacagaatgccaatactagaagagttgttggaacatatggctacatggctcctgaatatgcaatggagggaatgttttctgtcaagactgacatctatagcttcggtgtcttactcttggaggttatcagtggtgtgaaaataagcaatattgatcgcattatggactttcctaaccttatagtctatgcatggagcctttggatggaagggagggcaaaggagctggtagacctgaatatcaccgagagctgcactctggatgaggccttgctttgcattcatgtagggctcttgtgtgttcaggaaaatcctgatgacaggccactcatgtcttctgttgtgtccatcttggagaatggaagcaccacactgccaaccccaaatcaccctgcatattttgctccaaggaaaaatggggcagatcagagaagagacaatgtcttcaactctgggaatgagatgactcttacagttctggaggggaga

SEQ ID NO: 50192 - DNA, 137 bp, Oryza sativa
  Clone ID: PAT_MRT4530_52702C.1
atggatgcaagtgggatgatgcgatttgatttggaagtggcgaggaatggatgggaggttgatgcgctgagggtggggaaagtggcgaaggttttggcggggaagacaaatcaactcgacatgatgtcgtacaccaa

SEQ ID NO: 50193 - DNA, 369 bp, Oryza sativa
  Clone ID: PAT_MRT4530_52703C.1
tcaaactgactggcacgtccgccgatgggaattatcaggtcgccaatcgtcggactcagtgaggccccatggatgcaagccagaagcttggagcggccacgggccacgtgcatggtcgtggccacgacctggtgcttgtgtgcagcggcagcagcagcttctggccatcctacttcctcaggcgtcagcccagttaaaccatctggagcccatttatgcctttgaggaatgttgtccaagagtggaccaatctttctcatgtggaaaaagtacaccgaaggtccctcaattctctttgccggcttgccgcgggtgagtagcaaggaacgggcggcggcgagcgcggctgactggctgagcggcggccgg

SEQ ID NO: 50194 - DNA, 366 bp, Oryza sativa
  Clone ID: PAT_MRT4530_52704C.1
ctaggaaatgttgtgcattgcagcgagaggggattcctttgtacaagcagcaaacgtcatatgttctactaagttctaacacattttgggttcagttgattatctcacatacccacggtgcaagtacatacagcaccctgcaccctgatggttccacaaaggaaaaggaattacgaccttctcaaactctcacatatttgacagccagatgacatcgatcacagcagatgccgcaaggaagatgcaactgagaaaggcacacgcgatggaggccgctgacaagtcgcagaaacgtggcagtggcttgcaaaagttggggagcgccgtgtgccggatgccggtgcggttcagattcgcgactgccgc

SEQ ID NO: 50195 - DNA, 216 bp, Oryza sativa
  Clone ID: PAT_MRT4530_52705C.1
atggggatgtggtctgaagttgttgctattagtgctttggcggaggcgttggcgaaagtttggttccaggcggtgtcgatcagaactctgtcaaggctcaaggcgtgtggtcctcaaggcagtgagcagatcaaacacttcttgtctctcggagttggcatggggagcatagatgctgtgatcagtcctcctgaagaaccggtggaagactggtag

SEQ ID NO: 50196 - DNA, 225 bp, Oryza sativa
  unsure (1)..(225): unsure at all n locations
  Clone ID: PAT_MRT4530_52706C.1
ggccagggcaaaaatcgtttttctttcttggcttantacatatcagctcagctctgtacacgcaggcacacacaactcaagcaaccactctttgttgaaagcgaaagggagaccaacccaaacagaaaaaagaaaaaaaaacaaatctgtatatgtactcctctcttttttttcttttttctttttgaagtagttatatatactcaaaactcacccacgcgtccg

SEQ ID NO: 50197 - DNA, 2076 bp, Oryza sativa
  Clone ID: PAT_MRT4530_52707C.1
atggcaggaggactgatcacagcctggagaaatgcaaagttcaaagctgccctcacctgctccttccattccaccatcgatcaaacatccttcctaatcacaaacatctatgctccccatgccaactccgagagacaagaagtgtttgatctgctcactgccttgaggaccacacgccttgagccctggatgcgcatcggcgatttcaacatatacagattcccacatgagaagaacaatgacagcataaatacaagaggaatggaagagttcaacagttggattaatggtgaggggttgtttgacatagacatccctagtagaaagttcacttggtcaaacaagagaagatgcccgacttcggtaaaacttgacagagttctgatcgacaccgcctggaaccaaactttcgccaacgcctccgccaaagcactaatagcaacaacttcagaccacatccccatcctcgctgagttctcggacaactgttcaaaatcagacatttttcgtttagaaaattactggttgcagatgcctgatttcatcgcgatgacagaaacaaactggagcagaggaaccagacccctgacagcaatctccaagctcaaccacaaactcagacggcttcgagccagcacgaaagcctggaacagaaataagcgcagcattccaaccctcctgtcagccaacaaagacacattggaatacctagacaaaattgaggagtggcgtcaactgactgatttggaatactacctgagacagaggattcaaaaacactgcaatgagctaaatgatttcatcacgcaaaaatggaagagaagagctcgtatcagattctgcacactaggtgatgaaaacacaagattttatcacactctggcttcagtcacagcagcagctcacatcaaagacttcagacctatatccctactgcacagtgtcccaaaactgctcagcaaaaccttaaccaacaggctgcaaaaggaaatattaaagttgatcgaccctatgcagtcaggcttcatccgtggccggtcgatcacagagaacttcattctcgcctcagaactggtacagtcagctttgaagggcaagaaaccaatgatagtcctcaagctagattttcacaaggcctttgataccgtcagttgggacgcactgttccgaatcatggaagcaagaggtttcccggacaaaaggattggttggatcaaagcactattatgcacaggcaaagctcagatcaccaacaatggacaaaagggagaacagatacagtacaaaagagggttctactacaaaaacagcaaggtggtcaaagatctcagggcacataacacagctttaattttaaagctaggacataaggactgcacggtagattcacagtttacacaaaactcctggcatgtcaaattgcatcctaacctctcctaccaagcagaattagagctgcactcgcttatgcaaattctgcacaggcttagccccatccctgagattcctgacacaagagttcttttgcattctgtacccaagttctcaacctcaaatgcctaccaacttctgacttaccatggagccctttggaaaccggcagaatatgtctggatacacaccatcccacaaaactgtaagatcttcctttggttggctttcaaagacaggcttaacaccaaggcgaatatggtcagcaaatgctggagcgaagatccgcactgcccgctttgcccggcactagaatcagctgaccacatcatcctgagatgcaagaatgctaatagcctatgggaaaaaatgaacctcctgcacctggcaaaccattctgaatcgtcctcagctttcctgcaagcagtcgttgacagaaatcattcaaatagaggaattgaacctatctggtttgcagcttgcgcatacacgctgtggaaagcacgcaacaacatgatttttgagagacaaattgacaacttgcaattcatcattcaacaaatctcagacacactaaagctccggagcatgagagccaatgaagcaaccaaagaacgaattctctcctggtgtgcagggctgtag

SEQ ID NO: 50198 - DNA, 576 bp, Oryza sativa
  Clone ID: PAT_MRT4530_52708C.1
atggtgaggttcgacggcgacgccggcggggtggtggtcgacggcgagacgtacgcgctgcggcagatgcactggcactccccgagcgagcacgccgtcgacggccgccggtacgacctggagctgcacatgctgcaccagagcgagacacgcgacggccgctacgccgtcgtcgcccagctgttcgacatcggccaccgccgcgacgccaccctggacatggtgatcaccctctgttccacatcttctactatctacacgatttcggtgacctccgacacgatcggcctaaccgataaagtgaaccctgcacgagaaaagaacaccgccgtagaggaagactacgaaaaagtatacagttgtaacggaatagcaaatatataccaatctggtacctttaataccaaatatgatacaccgtataggtatgatgacatcagcatgatacgtgcggcgcgtgtcgcggcagcagatggagctcctctgcgagaagtcgtccacgatggtgacactggaaggcaaagtaacacgaactcatcgaagacggcttgtcaaattttcatgtttatagcataa

SEQ ID NO: 50199 - DNA, 538 bp, Oryza sativa
  Clone ID: PAT_MRT4530_52709C.1
ggccgccggcagcactgcgacccggggttcatccgtcgtcagacctgtttactactcttgtcgtccgggaccgatcgagttcatcagacaccatgtttcgtccggaaattctgcggttgagcgtggaaatgacgggtttgtcgaattccgcggactctgctccggcttcacccaacaatggaactgaaccgccgatgatgaggacgaacggcggggagcagatgggtggcaggtgaggcggcgcacattcgcatcgacgaaatcatccgacgtctcgacgccgcggagaaagaagcacaagcacaagtcgtggaggcaaggcgcgagatcttccgcgtcccggggaggcatcggctggccgacgaggacgcttaccagccgagcttgttctcggttgggccttaccaccgccacggcacggaggagatgggcaggaacgagctcaccaaggttcggttgatgaagctccaactcggcgccgacgccgatcaggcggcgtcgctgcagagagagtgcctgctgtccatggcgtcgctgg

SEQ ID NO: 50200 - DNA, 229 bp, Oryza sativa
  Clone ID: PAT_MRT4530_5270C.1
tttttccataggtaaaacaatgataatgtgagtagatacttatatcacgtgagttgcatctaatgagcgagtgtgcaaactgcaactttaggtgatgctcaacgaataattcgtcatggaccatgttgtatggatggctgagctaatagtctgccttatgaacagtgcgcaaaacacatgtaaaattttatggttcatcttatgcagaatgaaaacgtttgcatctttg

SEQ ID NO: 50201 - DNA, 138 bp, Oryza sativa
  Clone ID: PAT_MRT4530_52710C.1
atgagcgtcttcgtcattatcatcggctattacaccgctattgactggatcaccgacatcgtcatcttcatcaacatcctgtcaaacctctttatcatagcttactctactgctattgataggcaacttcgtcatcat

SEQ ID NO: 50202 - DNA, 1254 bp, Oryza sativa
  Clone ID: PAT_MRT4530_52711C.1
atgacgaccgtggcagtggaccaacggtcgccacgacgtcggatcgcactccccggatgccccgacaagtgcggcgacatcagcatcccttacccgttcggcaccaaagaaggctgctacttggacatcaacttcatcgtcctctgcaacctgtccaccacgccccccgccaccgccgctggaaccatcattctgaagggtaacggctactacttcggggaccaggaaaatccggtgggcgtccagaccaacaaatcctggtggaccgtggatctcatcgacatcgacgtgacgcggggcgaggtgcgggtggccgtgccggtcagctccgactgcagcactaacgagagctaccacgagctcagcatcttcacccaaagcctcaacttctcgacgacgttcctcttctccgcgacgaggaacgtgctgttgggcgtcggccagagcgtgagagcccggatcgacggcgtgatgagcggcacaaactactccgccgcctgcaactcgctgttcgacacgccggcgaaggcggagaacgggacgtgcatggggctcggctgctgcgaggcggagctcgcgccggagcttggcatgatcacggtctctatgtacaagcagagcaacagcatgtgggagacgttcccgtgcacctacgccatggtggtcgagaggtcgtggtacaacttctccctgcaggacctttacggatacgatgttctcgacaagaaatttcccggcggagtgccgcttgtgctcgacttcgccatcaggaatgaatcttgtccagcagaaggcaaaccgttgcccacggcttgccgtagtagcaacagcctctgcgtcaacacgaccaacggccagggatatgtctgcaagtgccaggaaggttacgagggcaacccgtatctaccagatggatgccaagcggacatcctaaacggcctcatgcgggcattttcgcaggaggtgcgcggcgtcggcgagcatcgggcagcgggcacgaaggtcacggagcagcagatcctgccaaggccgatccaccggcgctgggccacggcgatgtcttcttccatcctgacggctggaagtcacagggcggtggatccgtcggccatggatctggccggggctgatccacctgcgacgtgcgacggcgacagcagctcagcggggataaccgcatcatggcagatcaatggtgacgccggcttgaggaagaggcacagtgatgggctggtggctccagatcaacgatga

SEQ ID NO: 50203 - DNA, 1161 bp, Oryza sativa
  Clone ID: PAT_MRT4530_52712C.1
ccgctcgtgactccaatcaccaccacctcttctccattccactctcttttctctctctctcgtgcgtcgagccaccggaatcgtcgtcgccgtcggccatgtcggggcgcgtcaaggtgaggcaaggggctcggaaagggcggtcgccaagcgtcaccgtaaggtgctccgcgacaacatccaggggatcaccaaggcgacgcatccggagggtggcaaggaggggcggagtgaagcgcatctccgggctgatctacgaggagacccgcggcgtgctcaagatcttcgtctacaacgtcatatggtgactccgttgcctacacccagtacggccgacgaaagaccggccgggatcctcataaacacttcaagacctacactcctattcggttacatcttctcacaatggttaacttcaagaacctcgctgttgcggcgaccagcctccttggcctcgccaacgctgctcctactgccaaggttaactctgacgaagtcattcctggcaagtacattgtcaccctcaagtctgacatcgctgcctccaagattgagagccatctcaactgggtcggagatgtccacaagcgtggactaaacgagcgtgccgagaagggtgttgagcgcacctacaacggcaagtatggcttccacggctatgctggatcttttgataaggacaccatcaaggagatcaaggagaaccctgatgtcgcccttgtcgaagaggaccgcgtctggaccatcaactgggtcgacgagcctgagaaagagtctctctctaagcgtgccgagacaacccagagtagcgctacctggggactcggaacggtctctcaccgttccaagggatctaccagctacatctacgacaccaatgctggttcaggcacttatgcctacattgtcgacactggtatcatcaccagccacaacgaattcgagggtcgtgctcaggctgtctacactgccttcagcggccagaacgctgacaccaacggtcacggaactcacgttgctggcactattgccggaaagacatacggtgttgccaagaagccaccatccaagctgtcaagtcttccagggtagtcatccagcacctcatcatcctcgctggcttcactgggctgcaacgacatcatctccagggccgaacca

SEQ ID NO: 50204 - DNA, 1314 bp, Oryza sativa
  Clone ID: PAT_MRT4530_52713C.1
atgaatgaggtcttcgagcagttggattccttcaacctgatctggcgaaatgtggagaatctcgagaaggctacaaagaaattgattgctaaacgtgatgatgttgagaacaagattagtaacgatgagagaagcggcatgagaataaaaagtgaagcaagaagatggttggaggacgtcaataccaccatatctgaagaagcggatattaatcagaaatatgaaagcaggggaatgactttcggcggatgctccatgaattgctggtcaaactacaaaatcagcaagcgtgcatcgcagaagctccttgaagtgaaggagcattatatagctgatatgagtgtcgttggagatcaaccatcgccagaacctgttcaaaagatccctattccctgtgatcatgtaatggacaatgataacaatcttcgtgaagctctggactatatcaagaacgatccagttgggataattgggatatggggtgtaggtggagttggcaagacccatctcctgaacaagatcaacaattcatttcttggggactcttcctttcattctatcatctatgttattgcctctaaagagtgttctgtgcagaagatccaagctgagattgtcaagaaacttaacctacggaaagatgacgatgtaaaattccaagcccacatcatttctgaatttctcgacggaaaaaattttctgttattgttggatgacctctgggagaggattgatcttctggaagttggcataccaacactaggaattgaaaacaacctcaagaggaaggtggtcctcacaacaagatcacaggatgtatgtggtcaaatggaggtgaggaaacagataaaagttgcttgtttacgagatgaggaagcatggaaactatttctggagaaggtcgatgaagaaactctcccttccagttctctaattgaacttgcaaaacaagtagtgaaggaactcaagggcttgccattggctcttgtaactgtcggaagggcaatgctcaccgttctgtataccattgactgcgaccagctggaagatatctcgtgggcgctgcatttaccttttctggaagaactatgggtgcaaggttgtggcaagatgagacatgccattcggaacatatcaaagcaagagagctcaatgcaatcgattgatacattcccgcgcctcgtttctatgctatttgcaaataacgatgggttggttatatactccgatagtgttgaatggtgggataatcttgaatgggaagaagaaggtatcagaccaatgctggagccccttcttaaaatcgtgtcataa

SEQ ID NO: 50205 - DNA, 530 bp, Oryza sativa
  Clone ID: PAT_MRT4530_52714C.1
gggagagaaacatatatattatgagctgtgcagaaatctggactcaagtgaaacattcacagaggtattgattgaccatggcatcttcttcccctaggtacagatggatcgacagggagggatccatccgtgatccatcatccgtgcggggcttcatggggatatagtaatgaatggaacggtgcgaaaccgaccgatatacaaacttaacgcagagactaaccactaacgacgctaagaaataaaagtcggaaggccatgccaacagctagcataaggaggcggagccaaatatgatttacaagaaagcagcattaatgtaataatggagaagaagatgaagacgaagagaagaggagtctaagccaaggaggcttggttgtaggaagagcccatatagtggacaaaaaactttttggacgcgacgcacgcactggtggcgttgatgaacaggaacacgccggctgtgacgcggaagacctccgtggggtacacaagatacgacgccgcggacctccccgcctgcgcga

SEQ ID NO: 50206 - DNA, 3041 bp, Oryza sativa
  Clone ID: PAT_MRT4530_52715C.1
atggcacaaattttgggtggtctagtcaacattgttgtaacaccgatctataatgctatattcaaacatgcattgtatccattcaaagttaccagaaatgtggagaatctcgagaaggctacaaagaaattgattgctaaacgtgatgatgttgagaacaagattagtaacgatgagagaagcggcatgagaataaaaagtgaagcaagaagatggttggaggacgtcaataccaccatatctgaagaagcggatattaatcagaaatatgaaagcaggggaatgactttcggcggatgctccatgaattgctggtcaaactacaaaatcagcaagcgtgcatcgcagaagctccttgaagtgaaggagcattatatagctgatatgagtgtcgttggagatcaaccatcgccagaacctgttcaaaagatccctattccctgtgatcatgtaatggacaatgataacaatcttcgtgaagctctggactatatcaagaacgatccagttgggataattgggatatggggtgtaggtggagttggcaagacccatctcctgaacaagatcaacaattcatttcttggggactcttcctttcattctatcatctatgttattgcctctaaagagtgttctgtgcagaagatccaagctgagattgtcaagaaacttaacctacggaaagatgacgatgtaaaattccaagcccacatcatttctgaatttctcgacggaaaaaattttctgttattgttggatgacctctgggagaggattgatcttctggaagttggcataccaacactaggaattgaaaacaacctcaagaggaaggtggtcctcacaacaagatcacaggatgtatgtggtcaaatggaggtgaggaaacagataaaagttgcttgtttacgagatgaggaagcatggaaactatttctggagaaggtcgatgaagaaactctcccttccagttctctaattgaacttgcaaaacaagtagtgaaggaactcaagggcttgccattggctcttgtaactgtcggaagggcaatgtacgccaaaagggacccggtgctatgggagcataccattgattacatgaaaggggcatgtcgtgataaggacggtcccctctctatggaaactgttttcaggcaacttaagttcagttatgatagtttacggaatgacaccctgaaacgttgtttcttgacttgtgcattgtggccagaggatgtgttcatagctacagatgaactcgaccaatgttggatgggcttaggtctggtggacaaggatgatatacaaagttcctacagagaagcatgtaacgtaagaagtgaacttcaatctgcctgtttgttggagagctggcatacttctcgtgtaatcacaatgcatgatgtggttcgtgacatggctctatggatctgttgcggttgcagtgaaaagaacgacaactgggttgtccatgcacaagttggcaaaaatttatcaagaagaaccatcccatggagcaaagctgaatgcgtctccttgatgtggaatcgcattgaagaattgcctcccatggattcaaattattttcccgcaaaactcaggacattatgtcttcaaggcaatcgtttggatggaaggatagttgaaactcttaagaatttcactgcactcacatatctggatttatgctcgaattccctcactaacataccaggggagatatgtgccttggccaatttggagtatctcgatttgggatataattcaggaatatgcgaagtccccacctgctttagagaactcagtaagctcaaattcttgtatctgtcatgcactaacgtatggagaattccagaggatgtcatatctagccttaaagcactgcaggtcatagacttgacgccaaaacccaaaccttggaatcggtacggtaacagagaaaaccacgcggatcatatgccttcagtagtactaatccaagagttaaccaaactaagtaagttaaaagcagttggcattactgttgaaagtgtttctagttatgaagcacttaaggaatatcctaacctacctattaggagacttgttctaaatatagaggaacgagagtcagtgttctatctactgactggtcctttgtcagatcacttggctcaaatgaccttacataagttggaaatttatcgcagcagcatggaggaaataataatagagagacacgagagtggtggccatttggaacaaaactatagttttgacgctctgaatcagctggacttacaatttttggaaaacctgaaagttattacgtggaaaggaatacgtccggaattgcttttccataggctcaccgttctgtataccattgactgcgaccagctggaagatatctcgtgggcgctgcatttaccttttctggaagaactatgggtgcaaggttgtggcaagatgagacatgccattcggaacatatcaaagcaagagagctcaatgcaatcgattgatacattcccgcgcctcgtttctatgctatttgcaaataacgatgggttggtcagcatatgtgattcagatgtgacattcccatccctaaagagcctgagggtcacaaattgtgaaaatcttaagaggcttccttttcggcggcagcagagcttgccacccaagttgcaggttatatactccgatagtgttgaatggtgggataatcttgaatgggaagaagaaggtatcagaccaatgctggagccccttcttaaaatcgtgtcataatgattacgctgagcagtcctgtgatgtgtttcatccatggttagtatctccccccgtctctctccatcttgtacatatggtacaaattatcgcagaacaagttgttgtaattagggacttgagacgcgacccccgcgtcgttctcgcgcgggcggctcgggggcgaaaccctagccgcccacgccgccacaccctcatccccctcctccacctcgccgacgctggaactcgccggcggcaaagccggcggcgtgccgagaaggcgg

SEQ ID NO: 50207 - DNA, 618 bp, Oryza sativa
  Clone ID: PAT_MRT4530_52716C.1
gaaaaagaaaaagggaagtacatgctcgcgaagctcatggcgacggcggcggcggcggcggcggcggcggcgaagccagctccggctttgtcgttttccacggcggcggcggagggagacgaacacgcgcactacaaccacaccgacgcgtgccaccacctccggtggacagccaaggagagctacgagtacatgtacgcgcggccgtggagcagggtggtcgacttctacgccgagctcgtgcgcaccggcgccggggcagcggggctcgccgatttgtttgggaaggatgaggctcgtttcgtggatcccccaattttggaagattacacagcaccatcagaaaatcaaacatcaactaaatcatccaaagatcgaggaggacgatgggaaagagtaaccttcaagattgtcctttcatatcatggggggtcatttgatggttggcagaagcagcctggcctcaacactgttcaagggttagtagaaaaacatcttggccagtttgttgacgagaagaaagctaaacagcttgaagcaagatcattgccattagaaggctgtgctgttgttgctgggcgcacagacaaaggggtgactgcccttcagcaagtttgc

SEQ ID NO: 50208 - DNA, 333 bp, Oryza sativa
  Clone ID: PAT_MRT4530_52717C.1
atgttgtcctcctcctcgtctgcatctccttgctactcggagaccccccggaacactaccgcgacaccgtcgccttgctccggccgtcgtcaaggccgcagcgccaagccagtcatcgtccacctcttcaccaaacctgaagatcgccagagccattccctcgtcgttggtccgttcgtctatgtcgtcctcttccgttcgtcgttgccggtcgccaccattgttccctcgctgtgttgtacccatggtaagagcctctcccttcgctgccctctcctcgtcctccccgtgtggttgccgcgtggttgcccacgtgtgcagttcgcgtggtag

SEQ ID NO: 50209 - DNA, 191 bp, Oryza sativa
  Clone ID: PAT_MRT4530_52718C.1
cgcgtccgcgcacacgttacaaacgcacacataacacgcagaaatgctgatcatacaggcagccaagccaggcacactggccacaccccaccatggtactctggtgccggacgcttgccgcctaggtacggccggaaggcgtagctggacgcgcgcatcaccatgcgcaagtccgcggcgaagtccaagcc

SEQ ID NO: 50210 - DNA, 1155 bp, Oryza sativa
  Clone ID: PAT_MRT4530_52719C.1
atggaggcggatgagcagcagcagcgcacaagcacaagatggaaggggaggaggaaaactctagttttggtggtggaagaagagaagaggatggattgcatcaccacctacctcttgttcaacattaacatcaaggacatgttcacccacgacgacgagtggacagtgttgagacccttgccccgccccatggcgcagatggacacgttgcggcggctcgctctcgagtacctcaacttcgccgtcgtcgcctccaacaccattgttggggtcagcaaccgcaagcgcactgtcctcctcgacctcgagtgcgacgccaccgccgacgtgttgtcgcctggcccggagcttccggaagagataataggcggcacggagggcgactgggagctccccattgatgggcgcggcgtgttcgtccccgagctgggcctctgcccacgcctgcgctgcctctgcgccttcgacctgcccacggccacggcgcccccggtggtccggtacgtgtggccggagacgttctctgaggagttgaacgccatgggggtgcgtgctggtaacccctggcagcttggcctacctgggaccatgggcatccagcacgaccaccgccgtgtgcccacgcgctttgccctcttgctcatcgccgtccaactccagcgagatgataaggaggaattctgccttgtcagtcgcaagctacgctgctacgacttgcccgccaatgcaaaaaaatgcctacctgctgcctacctagctaccgtacgactacttgtgactgttggagctgaggggggagaaatccccgttgtgcccacaaaaattcttctcccgccacaaccattcttcctcccaccaccgagccaagaaaagacaagaaaatcttggggattgaaagagaagaaaaatcatcaagaaaagtcaagaagcaaaatcatccgggcggcggcgaggccagtggtggtgaccgacgccgcggcggcaaccggggacgcctcccgccaccgagaacctgccgctgccgcaaagaacccggatctactccccctcctcctcgcagctgccgcgtgcactgtgggcgaggaggcgcggcggcggtggcttgctccggggtctccaggcaattcgcctcctgacgaccgccaacgaatctag

SEQ ID NO: 50211 - DNA, 948 bp, Oryza sativa
  unsure (1)..(948): unsure at all n locations
  Clone ID: PAT_MRT4530_5271C.1
tttttttttttttttttttacggaatggaagcctctcgattcaagataagatcactgcagcacgagcacatcatttcgttgatgattcagtttattcagagatcactatcgattgatacaccaatgtctgttcttttttcagaatgataggagtatttacaagtttacgacttctactcatgactcgatcgcttcactcccaagtcccagtagcaacacaaacagataaggcagcctcagtcttctgccacctcactttcactcacgtcccagcattgcagccttgaacctcctcacaagctccttccggagcagctgtctgtcgaaggaggaagacgagagcaatcccctgttctcctctgctcgtctgatgaggtacgggatgatctgctccactggaccgtacggcaggtacttgctcacctggaacccggcgttgcggaggccgagcgagaggccatccgccatgcccatcagctgcgcgaactgcaggccgcggtcgccgccgccgccgatgccgagctccagcgccctcgccgcggcgagctgcccggactcgacgttgtgcgtggcgagcgtcacggcggcggcgccgcggcggacgcggtcgaggaggaacgcggcgcagccgttgtagcagtcgtgggtgtcctggatgctgcggtggaccggcgacggcacgccgagggaggccgcgaggcgggcctcgcgcgccaggtacgcaccgcggaccagcttgagcgcgaggcacacgcgctcgccctgcgccgctcgcgccatggcctccagccggtcgcgcgcgtcgcggaggtaggcctggacggttccgtgcccgaagggcctcccgccgccgtttaaacgncagcgcgccgtgcgaacgttaagaagccgattggccggctgccccggtggcgtactcggcgtccccccacaagcggggatgtcacg

SEQ ID NO: 50212 - DNA, 159 bp, Oryza sativa
  Clone ID: PAT_MRT4530_52720C.1
atgaagatgatattacccatcagagctgacaaagatgtcggtggtgtggagacgaaggcgcccagcaacaacgacagagttgtgcagccatggcagcgaaataatcagtcgatagcagacgaggcgaccggtgaagaaggcgaagacgcccattactag

SEQ ID NO: 50213 - DNA, 1632 bp, Oryza sativa
  Clone ID: PAT_MRT4530_52721C.1
gcacgaggctaacagcagcagaatccgcgttttcagaatccgcgtcctctcgccgccgccgccgcccgccgcggcgcgcgtgcgtgcatgttccgatccatggggacggggacggggacgaagccgccggcgatgacgacggagcggtacgagttcgggccgctcgtcggcgagggcaacttcgccaaggtgtacctcggccggcacagggccaccggcgaggaggtcgccatcaaggtgatggacaaggagaagctcgtcaggctcggcgccacggagctgatcaagcgggagatcgccgtcatgcagcggctgcgccacccgaacgtcgtccgcatccacgaggtcatggccaacaagcgccgcatctgcgtcgtcatggagtacgtccgcggcggcgcgctctaccgctacttccgcaggggccccagcggcggcgccgccggcctccgggagcacgaggcgcgccggttcttccagcagctcgtctccgccgtcgcctactgccactcccgcggcgtgttccaccgcgacatcaagctggacaacctcctcgtcgacgagcaggggaacctcaaggtcgccgacttcggcctctccgcgctcgccgacatggagcggcgagaggcccacctccagaccgtctgcgggacgccgctgttcctcgcgcccgaggtgttcaagcgccggggctacgacggcgccaaggccgacgtctgggcatgcggcgtcgtcctctacgtgctcctcaccggccgcaagcctttccccgacgagcacgtctccaggctctaccgcctgatcgggcagaaccagttccagtgcccgccgtcgttcagccctgaccttgcccgtctcgtgcgccgcctcctccagcccgaccccgaccgccgcatcaccataccagagatcatggagatgaggtggttcaagaggggattcaaggaggtcacctactacatcgacagcaacgaccgcctccgcagcctcgacggcctcgacggcgagccggagctgtacgactccgacaccgacacgatcgagtcctcgtcgtcgtcggaatctcccaccccggtggccggaacgccccgcggcatgcacacctcggtgtcggcgccggctctgtccgagctcgaccgcatggaggacagcgcgtccctcccgctcccgctcccgctcccgccccggccgcgcatgccgcggcccaagagcctgaacgcgttcgacatcatcgcgtcgtcgccgagcttcgacctgtcggggctgttcgaggagcgcggcgagaggatgcgcttcgtgtccggcgcgccggtggccgacattatcgccaagctgcaggagatcgccgggatggtgagcttcacggcgcggaccaaggactgccaggtgagcatcgaggcgacgcggaacgggcagaagggcgcgctcgccatctccgccaaggtgttcgagctcacgcgggagctcgtcatggtccaggtgtgcaagaaggccggcgacaccgccgagtaccgcaggttctgcgacaacgagctcaaggccggcctgcgcggcctcgtcgtcgacgccctgccgcctccggtggagggcggcggccatggcggcgcggctgctgcggctgaagccgaatga

SEQ ID NO: 50214 - DNA, 161 bp, Oryza sativa
  Clone ID: PAT_MRT4530_52722C.1
gtcgccacgcgtcgccaagacaagcgacgatcgagaacgaacgaacagcgcgtggtccatctcctctctctcccggagccccaactgctcagctcgcttttctagcacacacacactggcggggcctatgcccaaccccgctaaggtggtctgtgcagaga

SEQ ID NO: 50215 - DNA, 322 bp, Oryza sativa
  Clone ID: PAT_MRT4530_52723C.1
accaagcgtccgttcgccgccaacgcctggcgtcaccgccgccggcgccgcggcgaaatagagacccacatggttgatgcacctgtcccggatgcggcctgcgtcactgtctgaccacgcgcgtcagacaaggcagcaatggcaccagaaggatcccagctagatgctaaacactatgatagctgatatgcgaggagctacgtgaaccaatgtgaaaccgatgagacgttgacatcttatgatgaagatcatgagagttttgatgacatggctctgcaagagaacctcctgagaggcctctatgcctatggtgtcgagaagc

SEQ ID NO: 50216 - DNA, 435 bp, Oryza sativa
  Clone ID: PAT_MRT4530_52724C.1
caacaacatattctagaaagtgtggccccctgcaaaacgcaaattctatgtatggctagtcattcaaaacagagtttagaccttagatagacttgcaacaagagaaaaacaatgtccgttgccccctctgtcgaacaaggaacgaatcggagcttcacctctcgcccactgtagatacactacaagtctggaggcaactagcctcgatggtggcctatcagcagttagacccaaaccaataggagccttgcctggatgtccaagtctggtgagagatgcttgataacaaaaaagaggtacccaagaaagacttgcgtagcttggtccttttggttgtctagaaaatctggaaagaaaggaacctgcgagtttttaaacacaaggagactacggcacctagcctggtagcaaaaaataaaggaggaaacaagaact

SEQ ID NO: 50217 - DNA, 433 bp, Oryza sativa
  Clone ID: PAT_MRT4530_52725C.1
tgctagatcgcgagcgacagaggatggccgcagccatgtctatggctgcctagggtttcgcggcggcgacggcgaggtggatttgggggtgggtggggaggacttctcactcatgtcgggaacctttgaaccattgtcccactcatacacagctgcactgttccccatgtgagaaacgaccgtgactaggactagaccttacacctgtgcttgttgtacgatataccagaggacttttttaaccatggcctggaattcacttccacgaggagtctaactcaggacctgaggagtgctactgaaaccacccaaccaactaacttagaggccctttcgcttgcattgagatacttaactgataactcacatacttattcattcctgccacaacttggattaacatacattcctgcataaatcttttcaggaactc

SEQ ID NO: 50218 - DNA, 976 bp, Oryza sativa
  Clone ID: PAT_MRT4530_52726C.1
ttcctctgccaattaggtctgtgaggtcaaaggtctgatgaacctggcaaaagcagagacagatttctgaccacagaaccttcatctcagtgcagaattttcaaagactgcatttctgttgtacagtaacatttccctggaaagactcctttacatatgatcagagacaaatgaggcttttgcaaatgtaaaacaatgaagttccacctttgaaagttgaaacccactagaaaggagacagataaagcattatctatgtcggacgcgtgggtggagtactaaggaggaacttagcatctgttgaggaatttagcatctgttgttgttagagaagaaaataatgagaaaacctgtgatcaaagggattcgaactcaggcaagcatgctgctccctgtcagccgagctctccctgccaaccaagctaggtgccgttctcttctacataagtagtagacgaaactcagctggttttaactgcatagacaagcattttgctgtccttctgtcagtaaccatgaaatgcaacacacggtcacccttgagctggtgagacacagctatcagccacaaagcagatagtactttgcttacaggagatgattctggagtgctttctttctggtttcggcagctcaatgatcccaccgtgaaaggcgaggaagcaacagaaatttggtagctcctccaaagtggagattatcgtggaagctgagctgtttccaaatcccaatactacacctactaatcgtctcttatctgaaagataccactgatcatttctgaataacgaaaaaaatgagaatgtgtaaataggcaaagttctatgattaaggccacgattgtcggttatttgggcgttttccacatatgattgatggcatctaatgatcacatttctactgattatatctctgggtcggttcagtaatgaggaaatgagagggaacggctccttcaagttgttttactgtcttg

SEQ ID NO: 50219 - DNA, 516 bp, Oryza sativa
  Clone ID: PAT_MRT4530_52727C.1
aaatgaaagagaggggtatgggtagcgactcaattctgcagggaattcggctgtacatgagtattttgattgagttgtattccctccagtagaaacttacaaatgtacatccttagagaaaagataaggaggaagacataaaatagaaaatggcggcgcacgaagaacgtcgctttgaagaatcagtagttacattgtgattgcggtatcattgattttactgtttatgtggtaattgagtcttccttctgttcagaggatgcaacggcaacagcactgccttgctcatccccttgacccttttcttcatcaacaccctcatcatctgggatcatcactgccttcacctgtgcaacaataaccgtaatgtcatccatcttaccacctattagtttccctccaatgaaacttttccacgagggggacatcaaaaccccgactccgagcctccattgagtagggtgaatcaaaggtgacatccactgaatgcttcctttgcagctctgctagtgcttt

SEQ ID NO: 50220 - DNA, 416 bp, Oryza sativa
  unsure (1)..(416): unsure at all n locations
  Clone ID: PAT_MRT4530_52728C.1
tttccttgggttgaagaagccncaggagggtgntgattttatttcntacgtgaaggaagnaacnttttaaaaggagnggagntgtngtaacatgagacaatcggncaattnattnttntgttaaataaaattatttagcccatnttgggtggtggggcnaangntttggnggnttttttgggggatgtaagatggtaaaaanngtttngnnggggnaagggttttttatttttggtngggtttttttgngnttnggnaggggtnggtnttttnnaatntgtggnccaaaggtggganaaanagtnggttagggtgtttatttttttttgtgnaaangttntgggnttttttnttttnnaaaaaaanaanaaaaanaananaanaancnccncaaaaaaaaaaaaaaaaaaaaaaaa

SEQ ID NO: 50221 - DNA, 293 bp, Oryza sativa
  Clone ID: PAT_MRT4530_52729C.1
gataaagcatgaacccaacacgggcaaacaggacgccctccgaccataggacatgacaccctcataaaaaaaaagacttcccggtgaagcaacaaataggtgacaaatgcggattccatgtgtgccacaacatgcgccttctgtacagagaaaaggtgaagactttggctgagtttgagggcacaattaccaagtctctgcctaccaactttgaggaggttcgcggggagatagcaagcttcatcctccacgaaataattaaccccaaagaaatgtttagacttaaactaaaa

SEQ ID NO: 50222 - DNA, 325 bp, Oryza sativa
  Clone ID: PAT_MRT4530_5272C.1
actagtggatcccccgggctgcaggtccagccgctgtgccgacccaaacatggggcgctgctccaacggtttcagaccacaccactgggaaactgggaaggaaaagaatggagcaggcaacttgtggttcagggaaggtatttttgcccggtcagatacggcttgcggccttatttaccgggttgggcagaatgaaccaagtatggctaatggacttggagattcacgcaccgaaatatcgagtgctcttctctctcttttccatgagattacaaagatggtgcacgccatggtgggcaatctcacagagcagtctgaactctga

SEQ ID NO: 50223 - DNA, 2493 bp, Oryza sativa
  Clone ID: PAT_MRT4530_52730C.1
atggcggcagcggcaagcctcttcttggagacgcacaggctatcaatgtctagtcaaggtggctatgacaatagcgccgtgacgtggacgttgcaggcctatgagcccaacacgcggcccagccaacgagccgcgcaacggcccaacaacatagccattctgccttggccgcggtcgcgcaccgtcgcttcaccgcggaccgcgccaccacgcggagcgcacgcacgcacgcacgccggcagcggcagcggcggggaggcggcggcgcgcggcgcggtggtcgcgtgcgtgatgtggcgcgcgccgatccgcggcctcgcgtcggcggcggcggccagggccggggccggggcgccgctgtcgggcctgaccgacgcgctgctcgcggcgcggctcgcgaaccacctgctcacgacgccgcacatcccgccggagctcctgcccgcggcgccgctgccgctccccgtgcggctccacgtgctccgccacccggcgctcccgccgacgtccaagctctccttcttcctcgccgccacgccgccgtcctgcccgctcctcgccgcgaccttccccgtgctcgtccgtgcgctcgccacgcactcgcctcccctcctcgacgcgctcctcccgttcgcgctctcctcgtcgtgcccctcggagctcctccccgccctcctctccgcgctcctctccgcctcccgcgtcgacgccgcgctcgccctcctcgacgctgctccgcctgatctcctgccccgtctagccgccgccgcgatcccttccctcatcgcctcacctgaccccatctccgccgtccctgccattcgcaggcttctccccattgcctcacacccgccccccgtccgagccaccaatcgcctcctcctcgccttgtccaaagagaacctctacgatgacttccgtcacgtgttcggcgaaatgtcgaggaggggcctcccttctaacataaggttctacaacatttgcatccacgcgtttggcaagtggaggaggctggatatgtcgctaaagctttttgctgctatgaagaccgcctctcctcctcttgtgccagacatatgcacacacaattcgctcatccgtgcgcttgtggttggtgcaagggtcgctgatgctttagtggagatgcgagggagctatggggtgaagggggatgctgtggtgtacaattcgcttctggatgggcttttcaaagctaagaagctggatgaggcatgcggtttttttgagacaatggtggcggatggtattcaatgctcagcaagcacacacaacacagtgattgatgggctattcaagaatgggagagcagaagcagcgtgccggctgttttatgatctaaggagaaaaggccaactgttggatgggattgcatatagtattatggtgagggagttttgcaaggaagggaagggggaccaagttgcggaggcggtagagttaatgaaggaaatggaggagcgagggtttgctgttgatttggtcacagtaacatcattgctcatagggtttaacaagagtagacgttgggacttggaagagcagatagttaagttcattagagatagttctgtgttgccagatgctattcgatggaaatcaaatatgatgtctgctttgcaaggaccacaggacagagagaaagatggaacatcaatttttccctttgatggcaatattgatgatgtgatgagtttggtcaatcccgtggtatgcactggtgcaaatgaagaaacaccaaaagatgagcccaaggatgattggtctttgtcaccgcacctagatcatcttgctaaacatgctgatcatttgaatagttctgctatattcacaattgacagagggcagagggtgcaaggtatgggagccaagacatttgatgctgacatggttaatacatatatgtcaatttttttagcgaaagggaagttgagtgtagcttgcaagttgtttgagatcttcacaactctgggaaggaaaggaacgagttatacatacaattcattgatgacgtcatttgtcaagaaagggtatttgaaacaggtatgggcaattcttcatgagagaggtggacagctctgccccaatgatatagctacatacaatctgatcattcaaggccttggtcagatgggaaaagcagaggttgctggctcgattattagtgaactgtcaaagaaaggtgtttacatggacatcgtcatgtataacacattgatcaatcaattgggaaaggccgggaaggttgacgaagcaaactctttgcttgagcagataattgggaggggcataaaaccagatgttgtcacttttaataccttgatcaatattaatgcaaaagctggtagattaaaggaagctgacaagtatttgaggaagatgattgcagaaggaattgctccgaactatgccacggaaacaatattggttttccttgataaggagattgaaaagaaaaggcagcagcctagatga

SEQ ID NO: 50224 - DNA, 105 bp, Oryza sativa
  Clone ID: PAT_MRT4530_52731C.1
cggacagaagtgaattaaatcagcttcaagttattgcacatttcaccatgaagaacatatacctcatacatggaactgcctttaccaggattaactctcatttac

SEQ ID NO: 50225 - DNA, 1026 bp, Oryza sativa
  Clone ID: PAT_MRT4530_52732C.1
tgggctcactctacccggccggggcctccacacacaccccaccgccactcggcgccgccaccccgcaccaggtaagggaggaggagtaagaagatgtcgcacaggaagttcgagcacccgaggcacggatccctcggcttcctcccgaggaagcgctcctcccgccaccgcggcaaggtgaagtcattccccaaggatgacgtcaacaaaccatgccacctcacctcctttgtcggttacaaggctggaatgacccacattgtgcgtgaggtcgagaagcctggttccaaactccacaagaaggagacctgtgaggctgttaccattattgagacacctcctattgtcgttgttggacttgtggcctatgtgaagactccacgtggcttacgcagtctcaactctgtctgggctcagcatcttagtgaagaagtaaggagaaggttctacaagaactggtgcaagagcaagaagaaggctttcaccaagtatgctctcaagtatgatagcgatgccggcaagaaggaaatccaaatgcagcttgagaagatgaagaagtatgcttctgttgtccgtgtgatcgtgcacactcagattaggaaaatgaagggcttgaagcagaagaaggctcacctcatggagatccagatcaatggtggtaccattgccgataaggtggactatggatacaagttctttgagaaggagatcccaggtggtgcgctgtgtcagaaggacgagatgattgacatgattgatttcccgaaggctaaggggtaaggcggttgggggtccgggtggggtcgtcgcgcgggccgctggccaccgcaacgaactccctacgcccgagcgtccgccgtgctctgtgggctgttattgctgctacccgaccttagcgccaccgctcagtcggggcgccgtttgtaggacaatgggtggactgccgtgggactctcgttagcgctacatactgatggggacgatttactgacttctgcgggttgtgagaagtgattagtgcttcat

SEQ ID NO: 50226 - DNA, 291 bp, Oryza sativa
  Clone ID: PAT_MRT4530_52733C.1
cttgaatcgcaggagctactacaagtgcacgacggtgggctgcccggtgcggaagcacgtggagcgggcgtcgcacgacacgcgcgccgtgatcaccacctacgagggcaagcacaaccacgatttctgggtagaccgtggcagctgaggatgatattcccttaaatggtgttgtacctagtagcagggatttcaatattcagtgagaaggtgtgtggtttgcataaatccattaagcaagatgtcaatacgttgtaagaacttcctatttagtgagaacaatattatttt

SEQ ID NO: 50227 - DNA, 2159 bp, Oryza sativa
  Clone ID: PAT_MRT4530_52734C.1
gagagatcacaacagtaaaggaggcgacttttgacactcaacaagcgcagagtttcacagatcaagaaaccgatctcagtagttcctccaatcctgaagaggcagtgcaagaaagtgacttagtcaaaagtgagcaggaaactgatgttcagcaagagcaagaactggactccacagaagaaaccaaaggcactgaagattaccagcaaaatggagtttctacctgtgaggagtcagtgactgaggttgagccaaacgttgatgatcagcatgtgcaggagaataaatcagcggtagaagtaaaagaaaatgaagatacagaaactgaagaaatatccaagcaaattaattttaccacttctgagaatggagctcaagaaagcagtgaacaagaagccgaccaacctttttatgtccaacccgtacagcagcttgaattaaccacagatagcaaggacaatcaactcgtagaggcagaagaaacatccagccaaagcaacattgtcacccctgaagatccaactgcagaagatagagttgcatatgaaattgacccatctgttgatattgatcaagggcatgaactagaattagtggaagaagtcaaggatactgatgccattgaagctgaagaaacctcccatgcaggccaagcagtttcttcagcggagaaattttcagaaagcaatctatcagctgttgagttgactcatggtattcagcaagtgcattacttggagactatggaagaaatgaagggcactgaaggcacttgtgatgaagaaatctgctatgaacagacagctacttcagaggatccatctccaacagataatggaaaatcactacaagattatcatgtagaatcaaatgaagaaaatttgggtaatggaatcggcgatgtaatttcagtgcatgaaaagatagaagataatatacatgagtcagcagaactgaaggacttgcaggacaactcactagtgtatttcatacaggatgaaacatctgaattgggtgaaaaaactcagatcagtgcgaacagaattgaggaaaatgatgatcacatttctactgaagatacagaagagacttccaacaatacaaatctagtcaaagaagggccaaatgaacatggttcaagccagacatcaaatgttcaagataataagcaacttcatgatgttggacttcaaacacaagttcgtgaaagatcagtggatattgggcaacaagatgaggacatgaagaacgttaacttggatcaacagcagaaggaagatgaagaaattgagaagcagaaggaagatgaagaaattgagaagcaaaaggaagaactccagacagatgaacagaaacatgatgacaagagggttgatttcatcatagacacacaagtggagtccattgatgcatttcaggctgaacaaacagattccgtggttactgaaatgctcaatgatgaagtaactcaacatgaacccgaggattccatcccaagaactacagatgcgatggttgaaaacattacggaaataaaagaagagactgaagaagagaatggaccaaatagtggtggcaccttagaggtttctgccaaaaactataatgaagatgtgcatgagaatacagaaaaggatgcagtggtagaaaaaacttcaagtagtgaacatgatgaaatagctggtgaaattagaaatgaagaggtaacttatgtcactgttgaaccttgtttggcatcatctctggagagagatcttcaagttgattcagacctttcaaatgaccagatgctagagaataatcctatagctgttccacagaatgatgaatacatgtacagagcggaggaaggatacacaaacaaagtcaacgttgacatgcatgccattcaagaatcagataaagtgattgaagatgcagaagaaaaacaaggaatgcaaaatgaagacaatgttgttcaccatgatgaatctctggtcacaactcaaaaggaagaggcatcccaagtgcatactgatgaacaatacagtgcagacactaaaatggatgataccgcaatttcttatgcagaaatgacacatgaaaatacaagtacagagcccagagaagttgaagatacaaaggaaaagaaaggattcaatgactttccagaatttgtt

SEQ ID NO: 50228 - DNA, 516 bp, Oryza sativa
  Clone ID: PAT_MRT4530_52735C.1
atggccgggaggcaggctgaaaagttcagggatgttcagagcaggatcgactcctacctcctgctcttccccgtgatcagccacatggacatcactcgtcgtctcgatcgaatctacaacatcctggatgctgctaagatgtattggaaggaaccacatggagtccaagagtttagttttaacgagctcgcaaaggcgaccaacaactttgcccctgaaagaaagatcggtgaaggtggcttcggctcggtgtacatgggaaggcttcctgatgggcgggtggtcgccatcaagcaccgttgtcggaactcagatcagggtatggaggtgttcatggagaagcagcggcgcctcctgccaccgttccggaaggaaaaggaggagaaagagcatctgcttgtctatgagtacatggagaacggctcgctggatcaccacctgcacggcccaacgtcgtcatcgtcgtcgtcgccagtgatggcgtcctggaagatacgcatggagatactgctatag

SEQ ID NO: 50229 - DNA, 345 bp, Oryza sativa
  Clone ID: PAT_MRT4530_52736C.1
atggcgctgtggggcgggctggggcaagcggcaacggtggcgcagctggtcggggcggacatcggcggcctcatcaccatgatcatgcaggcagcgatgacggctcagcagaacaagaaggagtgcgagcagctcgcccgccgcgtcttcaccgggctcgacgacacgctccgggaggcgcacgagcttgtgatggcatgccaggacaatagcgccatgtacaggttggtgatggccgggaggcaggctgaaaagttcagggatgttcagagcaggatcgactcctacctcctcctcttccccgttatcagccacatggacatcactcgtcgtccagcctattaa

SEQ ID NO: 50230 - DNA, 1155 bp, Oryza sativa
  Clone ID: PAT_MRT4530_52737C.1
atggccgggaggcaggctgaaaagttcagggatgttcagagcaggatcgactcctacctcctgctcttccccgtgatcagccacatggacatcactcgtcgtctcgatcgaatctacaacatcctggatgctgctaagatgtattggaaggaaccacatggagtccaagagtttagttttaacgagctcgcaaaggcgaccaacaactttgcccctgaaagaaagatcggtgaaggtggcttcggctcggtgtacatgggaaggcttcctgatgggcgggtggtcgccatcaagcaccgttgtcggaactcagatcaggaacggctcgctggatcaccacctgcacggcccaacgtcgtcatcgtcgtcgtcgccagtgatggcgtcctggaagatacgcatggagatactgctataggtgtgtcgcgggccatcgagtacctgcagtcctgcggtgagcagccgattatccaccgcgacatcaagacatccaacatccttctcgatggcaactgggtgccgcgcttgacggactttgggtatgcgttcacctgggaaggcccaggcactgatattaatgttctttgtggtaccatgggatacatggccccggagtaccttatgacatgggctctgaacccgacaatcgacatctacagtttcggtgttgtgatgctggaggtattgacggggaagaaaccatatctctttaaagaagaatggaaggaggagaagagagaaaaatgtgagcaagatggaaagaacacagaagaggacaaggaggagagtgaacgagaagaagaggagaagacaacagaagaacaacatgagtggcaaaagcgggacgggtggtctagtggtcacagcttggcgtctttaacgccactgattgaggcggggaagtgtggaaggtgctggacaggcgccggcagcggagccaacgggaagccagttgaagcggcggaactggttgggccaacggcagcttcctgccttcgggttcggttggaagaagggtccacccatttggaaattggtggccaatctagagaaggcgctcgagctcgtccgttgcgacgggtaggcggtagcatagcgtgggctcccgagacatcttatgtgaataattgggcaatgtatattctcatcatgtaa

SEQ ID NO: 50231 - DNA, 661 bp, Oryza sativa
  Clone ID: PAT_MRT4530_52738C.1
atggggattgttgcagaaacagagatcaaattaactggcacgctcatacatctaaaggcgagctttggacctgcactagagttaagcagatctcccaggcctcgtgttttctgtcaacaagtcgacaacagggtagtcttcctcctcgaatccatgcccggcgagatcagagacagcgctagatccctacagccggcctctggaggagaggagggcatcgaatcacaagccatagccacaagccacattgcatatccacccgaaggaagtcaacagttagccgccaactacaagtcgtcggatagttcccggcgagtgctagacgtcgacgaggaatcccgcacacaagaccaggaagcagtggtgctccatccacaaaacgattttcactccctagatgggtccgacattatgctaaatgagaaggttgaatgtgatgcttgcaaacttcgtgatactcagtgtgtctcgccgtacaaaccatttctcttcccaaatgttgtccgatccacccacggcggtgtcaacccaccagctcgggatcagacgatgacatattcggattactccgaccgaatcaacaccttcttgtcatcaaaatctattgtgtttaccaggacgcacatatacatctgtggcctcgacgtgcacgtcgctatct

SEQ ID NO: 50232 - DNA, 1647 bp, Oryza sativa
  Clone ID: PAT_MRT4530_52739C.1
ctacccgtcgcaacgggcgagttcgagcgccttctcgaggttggccacgacttccgaaatggctggccgctcctcccactgcagctgcaggcagcgagctgctatctgcgccaccagttccgccgcctccagctgcctcggcgttggctccggtgccggccgcctgtccagaaacttccacagctcccccgcctcgatcagtatcagcgccaaggacaccaagctttggtgaccaatcccgtcctgctctagccactcataccacctttgttttgttgttttcccatcttcttcactctcctccttgtcctcttctgtgttcttcctctcttgctgatcacattcttccctcttctcctcttccacacattcttctgtcttcttctccttccattcttcagagaaatatggtttcttccccgtcaatacctccagcatcacaacacccaaactgtagacatcgactgtcgggttcagagtgccatctataatgcactccggggccaagtatcccaaggtgccttgtacgagaagatcaaccacatggtccgggccttcccatgtgagtgccagctcgaagtccgttaagtgcggtgcccagcttatgtcgagcaggatattggacgtcttgatgtcacggtggatcaccggccgctcagcgtaggactgcaagtactcaatggccctcgacacacctagcagtatctcgatgtgcatcttccaggatgttatcactggcgacgacgaccgtgggccgtgcaggtggctgttaagggagccgttctccatatactcaaggacgagtaggatctcttccagctttttccgaaacggtggcaggagctggcgcttctccttcacacagctgccaaagacgcggacgatgtgctcgtgactaaaggaacggaggatgctgagctctcttatgaggtctattttcccaaaggcggctgctgcttcgctatcctcctgagcggcagggactggatttgggggcacggggaaagcaggcgtagatggtccgggcgtgttggttggaagcaggatgttgtagatacgatcgagacgacgagtgatgtctatgtggctgatgaatgggaagacgaggaggtacgagtcgatcctgctctgaacatctctgaacctctcagcctgccgccctgccatcaccaacctgtacacggcgctcttgtcctggcacgacaacacaagctcgtgcgcctcccggagcgtgtcgtcgagcccggtcagcggccgccggatctcaggccgccgaagcacctccggatcctgcaggtgctgcagcagctcggcgatcgtgaagacgcggcgggcgagctgctcgcactccttcttgttctgttgagccgtcatcgcagcctgcatgatcatggagatgaggccgccgacgtccgccccgaccagctgcgccaccgtggccgcgtgccccgtcacgtcccacagtgcgatggcactaagatcaggattctgttctttgttcgtcaaccgcgaccccgtttccgcccagcgattcgtctccactagaacagaatccctcgacgacgacgaggccgcggcggcggtgccaacagcggagcagtcgagcagatagtgcaagcagtctcgcgccacgccactcccgaccat

SEQ ID NO: 50233 - DNA, 493 bp, Oryza sativa
  Clone ID: PAT_MRT4530_5273C.1
atgtaccatgctcctgtaaccgctagctaccaccagagcgcgtgggcgaaaattggccggattgtcaacccgtacatccatcgctatgcaccattcctcaatacacccatttctgcagcccaaagatggtggttcaggtagcaaggctgaggacagaatcacgatatttgcagatctgatcatgcggagaacttatctacaatgtgttttgaagagctattacaaacttagcacgccgttgctctcgtcatgatggagctgtgcatcataaaaactcctgcaagtagttcccttttgtattggcttatactttgaggttaacattgatgcaagaacggtgttataaaccctggagggctttttcaccaccgtaatgctcgatcagtgatcacgacgatgttctatataattcctgccaaactcaggctgacctgtatacaatggattgctcttagattgcatcatctaaaaaaaaaaaaaaaaaaaagataag

SEQ ID NO: 50234 - DNA, 1339 bp, Oryza sativa
  Clone ID: PAT_MRT4530_52740C.1
agcgagaaccttgacgaaatttattggaccgactgcggcagtaataattaaacaattccaaaattgcactgtcaagcgttaaacattccatgttgctttccaacgatttccaggctttgatggatacaatgaaatcttggtttaatagtgattttcacggttcaaccaacaactaaccaactgctgccgaatctaattcaagctggtcaattggctacttctccggtggtgaggtcagctgccttaagttgaactttgcgagctctttgtacctctcgaccaccccaatcatgcatatagtcttagctatctggacaataatagtcctgtctggactgctgagatcaaccttgtgaggttgaggtacagattttgctaccgcgttgataattttcatcctatcaatacctgtgttcgaccttgcttcatataacacagcaaacttatataccgaagaagattcctttggaaagtacttttcaacaagtggactaattgcttttgttatttcctcttctgatgcataacatgtcacctcagtgggcaaaaacctcagaataaatctggacatatgtttacgagttgaagcagctgatgacatcatattctgtacgatctcaactggaccagggtctccatctcttttgtgcatttgaatgaagatgcaaccgttgcagcctgaatcaagggttgcgaagagcctctttttcctatccccaagctccttcaaatcctcatcaatcaaatcatcaatgggtttatcattggacccttttggtttatcagtggactctgttggcttatcagtaggctcttttggttctgtctgttcagatatcggaggatcttgtacgcgctgcttctttagttttgattcatcagcattatctgtttgttcctcattgtccttgctgggaactacaggggtgtcagacacctctttctgctgctcagaaggtgtggtttcacctttgtctgcattgtttgtgtcatcagtcacctcccctgaatgatcttcttcctcatcatccgaagaatcggaatccgcaaacgtaatttttttgttcaatggtttatcagggatgcttttgggcttcccatctgatcctttcccatccaccagatcttcatagaaggagtcgagcagggagagggcctcgcgggtggcctggcgctcgcggccgccgtcgcaggtgaggaagaagccctgcaccccggggcgcagcgggtacgcccccttcctcaccggcttcccgtgggggaggtacttccgcttcctccccttggccaccacgccgccgccgccgccggggttcggcttgccctcgccggaggccat

SEQ ID NO: 50235 - DNA, 1663 bp, Oryza sativa
  Clone ID: PAT_MRT4530_52741C.1
ctaaccgtcgcaatgggcgagctcgagcgcgttctcgaggttggccacgacttccgaaatgggcggccgctcctcccactgcagcagcaggcagcgtactgccatctgcgccaccagttccgctgcctccagctgcctcggcgttggctccgctgccggccgcttgtccagcaccttccacacctcccccgcctcgatcagtggcagcgcgaaggacaccaagttgtggcgacgactaaacatttcccgctttcgccattcatgccattcttcttttgtcttcccatcttcttctcgttcactctccttgccctcttctgtgttcttcccctcttgctcacattcttctctcttctcctcttccacacgttcttctgtcttctccttttcccattcttctttagagaaatatggtttcttccccgtcaatacctccagcatcacaacacccaaactgtagacatcgactgtcgggtttagagtgcctgctataacgcactccggggccaagtatccataggtgccaataatattctcctgatggcctgggccttcccatgtgagcgcccaaaggaagtccgtcaagtgcggcgcccagctcgcatcgagcaggatgttggacggcttgacgtcacggtggatcaccggccgctcaccgtaggactgcatgtactcgatggccctcgacacacctagcagtatctcgatgcgcgtcttccaggacgtcatcaccggcgacgacgacgacgacgacgttgggccgtgcaggtggtgatccagcgagccgttctccatgtactcatagacaagcagatgctctttctccttttccttccggaacggtggcaggaggcgccgctgcttctcctcgaccaacacatcacagtagccatatagtggaacaatgtgcttgtagcggatgggggagaggattgtgatctctgccatgaactccttgtaaccctgaagtgagttccgactacggtgcttgatggcgaccacccgctcatcaggaagccttcccatgtacaccgtagccgaagctaccttcaccgatctttctttcaggggcaaagttcttggtcgcctttgcgagctccttaaaattaaactcttggactctatggggttccttccagttccaacagatcttagcagtatcctgggaggctgggacagggatttggggcatggagacaggagacatagatggcccggccatgtcgttcggaagcaggatgttgtaaattcgatcgagacggcgagtgatgtccatgtggctaataactggaaagaggaggaggtaggagtcgatcctgctctgaacatccctgaacttttcagcctgcctcccggccatcaccaacctgtacacggcgctcttgtcctggcacgacaacacaagctcgtgcgcctcccggagcgtgtcgtcgagcccggtcagcggccgccggatctcaggccgccgcagcacctccggatcctgcaggtgctgcagcagctcggcgatggtgaagacgcggcgggcgagctgctcgcactccttcttgttctgctgagccgtcatcgccgcctgcatgatcatggtgatgaggccgccgatgtccgccccgaccagctgcgccaccgtcgccgcttgccccaacccaccccacagcgccat

SEQ ID NO: 50236 - DNA, 349 bp, Oryza sativa
  Clone ID: PAT_MRT4530_52742C.1
cgcagccgcgtactaagctggaccctagacgccgcccttttttttttttttttttttttcctttttctgttctggcttttttttgacgtttatgatttcctgaaggagctttccacgagatcaaaggccaatggctatgctattttcggacatcccagggcgaggggggcagctcccagggttccgaagagctggcgtggcctgggcaaagactccccacaaaagactctcctcgccggcgcccggtcgggcccttcccggcatgccgcggaggggcctagcctccctcggctcgtgcccggggggcccctggcccgggccgccgggggcccgccgcgggggtgggccc

SEQ ID NO: 50237 - DNA, 313 bp, Oryza sativa
  unsure (1)..(313): unsure at all n locations
  Clone ID: PAT_MRT4530_52743C.1
gaatggggaaactgaaaaaaagttaaaaaaactaaaaaaatttaaaaggtggtacactaaaaaaagggtttggcactcccaaattttntaagaaaatccctttttttgggcaaaaaaagaaaaggggtttaaacaaaaaacatggcagggggaaaaatttttgaaaatttttaggggaaaaaccaatgctcaaagaatttcccaattttttcaaaattacacattttaaagggaataaggggggccttttttggggggggtatttagaaaccttttggggttttttgggccgatttttacttttaaagtccaa

SEQ ID NO: 50238 - DNA, 491 bp, Oryza sativa
  Clone ID: PAT_MRT4530_52744C.1
gtcatgagaatggcacttcgatggatctaatacaagaagttaaaagaggaagagaggatgaactgcatctgagcttcatgaaacttccctaaattgtcatactttatgccggtacatgagaaatggagttttaatatatggtttaaaatgaaattacaactgcttgaacatgacgatgaggcccacagatgcctggtctacattgaggttggtatgctttggacatgtgacttcagtgaattttgaactatttggacgtgttatcttattttgatcagttaattgtggttggactcagtgtggacttggtcagtgatgtacgatcttatgtttctatctaggatttggtcgaactgctgtaactgaacctagtttgcctttctggctagatttggtgaagatgtatgcattgaccttatttattttgctatggccaatgtactgatgtatatgaatatgaccatatggtgatctaaaaaaaaaaaaaaaaa

SEQ ID NO: 50239 - DNA, 288 bp, Oryza sativa
  Clone ID: PAT_MRT4530_52745C.1
atggattttttatgggacggagtgcgcacgtcgtcgtcgacgaccgatcgagctcgtatgacgcctcctccgtcgtcgccgacgtgggtgttcctgaaccgcaaggcgtgcgtgtgcggcggcgaaggcggcgatagcgagcccgtcctgctgcagggcgccgacgacgtctcccttgagctcgccgcgccgccacgcgagtcggtgctcaccgtgtccccgcgcgtcttgctcggtgacgtctccgtcctcgcgctcgacccctccgctgggctcgtcctcgtctaa

SEQ ID NO: 50240 - DNA, 294 bp, Oryza sativa
  unsure (1)..(294): unsure at all n locations
  Clone ID: PAT_MRT4530_52746C.1
tatgttnatgagtgccgtcgtgtgatggatatgaagaggcggacggttgtgttgagcggccgtcgttggagatgagacgaagggcaaatgagtccgatgaaaaatttctccactccaatctaacaccgttacttcaaaatgcgacggaagtgctacgggacgaagaaaaaccggtgagaaggataaggaagcccttggaagtgtccaacgcaagagaatggcgcgatcaaggggtggtagtcaagcatcccaacgagaacctcgatttaggtctaggatgcgtgatggtgaagg

SEQ ID NO: 50241 - DNA, 607 bp, Oryza sativa
  Clone ID: PAT_MRT4530_52747C.1
tcctgaaggagaatctccctttgacatatcgccaacaatattaaatttttttttgaaatatgtaaacctatatgtgtacatgaaagtatgtttaacaataaatcaaatgatatgaaaagaataaataattacttaaattttttgaataagacgaatggtcaaacatatattaaaaagtcaacggtgtcaaacattttgaaacggagggagtatataaaaagtataaatccagtcgatttggttcagggaaatctccgacaatatatcgatttggtcctagctcgttcaacagctgctaataataataataataataataataataataataataataataataataataataataataataataataataataataataataataataataataataataataataataaatgcaaccgacgacgcagacgaggaaacaccaacaacagcagcagcagcggaaccaacggactaacacccaacactacaggcgacggctgggaactaggacgaaaccctaatcttcacttcacttcatcttcacttaaaggcagaggaactatatatatatttatatagagtaagggtgagtactttcgtactcagc

SEQ ID NO: 50242 - DNA, 351 bp, Oryza sativa
  Clone ID: PAT_MRT4530_52748C.1
atggcgggcggcggtggcgcatcctcgccccgccctcctcaccgacggcgctctcctcaccgcctgccccaacgccgagtggcggcggcatcctcgggacctggcgaagaagcggcggcggcgcggatcccaaacatggaagctggaatcaaggacctgaacgatcctggagaccaagccaccggcgacgccaccgcgcgcgcagcgatcactgcgtcgctgagagccatcgccgtcacctccggtctctccacgcgccccgacttcgccgccaatctcttccccgcctactcctccgccgggcgcccagtccttgccgccgcggagctccgagctcggccccctacctag

SEQ ID NO: 50243 - DNA, 1278 bp, Oryza sativa
  Clone ID: PAT_MRT4530_52749C.1
cggtggcgccggcacaaggaccctcctcgcggtccacgtcgagaccgagaagacgggcacgtcgcaccagcagatcacggggaagcacccgccgccgtgcgccgccctgagcaccccggcgccggcaccgcccccgcccgccgccaccatctgctgcgcgagcgtctccgtgctcgccagcgccctggccgccgtcacgggggagaagccggcggcgaccatccgctccgcccagcgccccagcgtctcgtgcctctcccgccgccccctggatccccgccgccgccgccgccgccatggccgccaaggaggacccgaacccgagcccgaccaccgggcgcttccccgcgttggtggccgccggcgccgaatcctccccggccgccggtagccgctctcctcccgctccccctcctcctccacccagggctagcctcgggatctccaccgccatggtgaggttgcccgaagtaccctgcgccgccgccagatccaccaggcgcttccttgtgctcgtggccgccggcgaatcctcctccgctgcagccatcggtggcaccggtagtcgctctccccctccccctcctcctcctagggcaagcctcgggacctccgccaccacgtccggctggatccccgcagatgccgccaccatggccgccaaggaggacccaaccacctggcacttccccgtgttcgtggctgccgccgaatcctccccggctgccggtagccgctctcccgctccccctccgcctcctaggccgccggtgaatcctcctccgctgcagccatcggtggcaccggtagtcgctctccccctccccctcctcctcctagggcaagcctcgggatctccgccgccattgcctccgacgagctcgccgtcgccgccgtagcgtgagcccgatgcgctagcaccaccagcaccagccgccgcgaacctcaccacgagaaggtcccgttccccgttcccggccggatactccaccagcccacctagggcaaacgcgtcgggctggatccccgccgccgccaccaccatggctgccaaggaggacccgaccaccgggcgcttccccgtgtttgtggctgctgccgaatcctccccggctgccggtagctgctctcccactccccctcctcctcctagggcaagcctcgggatctccgccaccatggtgagcttgctcgaaccctgcgccgccagattaagttggttgtttccctagcttcctcgttgactactactccagtttgtttcaaggaaaaaggagg

SEQ ID NO: 50244 - DNA, 387 bp, Oryza sativa
  unsure (1)..(387): unsure at all n locations
  Clone ID: PAT_MRT4530_5274C.1
gtggaggngctcgacctccgcgccgccaagcgcctcctgctcgcnttcnagcgccgcctgcgcnacaacctcgaggnccgcatgangcaccccgacgaccccgcccgcttcgccgactccaagatcgccctccacgncgagaccgaccgcntccgnctcctcgccggcgccccggacctcttcccggacctngtncccctnggcctcgnctcctccctctnctccctnctcacccacgacaacgncgacctcgncgccgacgntgccttcctnctcgncgaccttactgacttcgacgacnngacgaactngcggcttcaattcttggcgangncttgtggaagcaaagncttgacttnttgtcaaatntttcngttttcgaggcga

SEQ ID NO: 50245 - DNA, 2109 bp, Oryza sativa
  Clone ID: PAT_MRT4530_52750C.1
atggcggagtcgcaggtggaggggatgaggaaggcgtacgcggagatcatgctgaacatggcgcaggagtcggcggcgcgggtgctggcggcggagcggcgggcggcggcgctcgcggggggtttggcggcggcgagggaggacggcgtcgccgcgctcgtcaggctcaaggccatcatggaggccaggttttcacaggcgcggaagaacaaccaaacagacaagtgttcaggctgcctgagcaggcaaaatttatcatcctatcagataaaagaagcagagtcacaatctttggcaaacattaataagattaaggaactacaagagcaattacatggtgctcaagatacagtggcctcccttcaaattgaactgcagagatcaaatactgaactggagcaagcaaggagcactttggctgaggaaagaagaaataaccttcgctcctgcaataagatcaattctaataaaaatagcagctcttcttctagaaagcatctacaaggcagagtatcctcaaagagtaaaaatacggcaaaggaaagtggagctgttgaaaacttggagacactgtaccgttgtgattctgatctgggttcattcatggctagaactaagaatcctgagctgtatcgcaatgggtgtacacaacgtatccgtgcaatcaagcagcgaagtccaaattcggatacatccctggtagaaaacagcaagcaaactagtgcactgaatagccgttctaagactggaaaaactgataccaacagaaacccacagagcacaaggtccatcatggaacagatacttcaaacaaaatttctggccaactgcaagagaaagagaggtaggcgaagcaggccaagttacatgcatgataattctggtgagcatgggcaaacagagtacaagtcgtctgatacatctgatggaaatgggtgtttgctgctacttcaggctcttgaacaagatctttcacctctaaaggcgtcttctggaagtgttggtgagggattagctgaccagaaggatgaattgctcaaggatgaaaaggatgctgacttgaatcttcaccctgcttcccctggaccaaatgatgtactttcagtaaacaacatgcagatgaaaaggaggaaaaggtctaagactatgagagtctttgaatctgattttgaggcaaaagctgcccctgaatttgggaacaccctgccaaaatcaagtaataataatagcatgctaaatagtgaacagagctctgatccacctgctggaaacaatggtcctgttttgcaatgtactgctgaaaacttgatgcacgtgactgatgctgcaaatgctgatcaattaaagtctgagaacagctccccgctagtccctcagtcaacagagagtgaaattggagatgaaggtaactcgcgagtggatcacaaagagtgtagaacaccagataataatgcaatagtcttggaagaagtgaatgtggataaaagctgcattattttagcttcagatggagctgattcttcgatagtcagctccctggacaaagaagaaaatgcaaaagaagcaacttctggagttgccgtgcaagctgaaggtgccagatatatcaaatacacattcaatcgcaggaaacgcaaggccgcgcctttagacagcactcctcaaggggctgtccctgagaaaagcagtagtgtggtttgcccatctgagaatcatgagcctcatgcaaagcctgagacgcaagatctcgtcatagagtcacctccaggtgacaatcaactaatccatgttgcccagcagagtcagacacatcaccatgctctagcctactcgatttacttcaacctaaacatgagatatacctccgggtcgtactttgattcaagatctgcagtcaagtacacttctacaatactcactccgttgaaagatacaaggcagggtttcacttatcgcatgataatcacacgattatcgcgggggtacgacgattatcacgcgattatcgtgtttatcgcgctaccgcagggtggtggttatctcggcccaaacgataagaacaatatgaaacccaaagcgaagaaaaagaatgcaccatatgagaagtaa

SEQ ID NO: 50246 - DNA, 1656 bp, Oryza sativa
  Clone ID: PAT_MRT4530_52751C.1
atggcggtggagatcccgaggctagccctgggtggaggaggagggggagcgggaggagagcggctaccggcggccggggaggattcggcgccggcggccaccaacgcggggaagcgcccggtggtcgggctcgggttcgggtcctccttggcggccatggcggcggcggcggcggcggggatccagcccgacgcgttcgccctaggtggcccggcggagtaccccgccggcgacggggagcgggacgttctgatggtgagcttcctgcgttccatcgcggcgttcctggccgacgggacgtgccagatgcaggtcaacgacgggctgagctgcgtcgtcgacctcgccggcggggacgccgacggcggcggcgtcggcgaggggaggtcggcgcagcggctggcgtccgcgttcgccgaggcgctcgcgctgcgcttcatcctgccgtgcgacggggtgtgccgctcgctccacctcacgcgggccccgccgccgccggccgtctccgccgcgcgccaggggttccgcgcgatgtgcccgttcgtccgcctcgccgccgccgcggccaacctgtccatcgccgaggtgatggaggccgagcgggcggtcgtccacgtcgtcgacctcggcggcggcgtcgacgccaaccagtgggtggagctcgtccgcctcgtcgccgcgcgccccggcggcccgccgggcctgctccgcctgaccgtcgtcaacgagtcggaggacttcctctccgccgtcgccgcgtacgtcgccgcggaggcccagcgcctcgacctcagcctccagttccatccggtgctatccagcatcgaggagctctccgccaccgccaccggatcaatcggatcccgcctcgtcgtcatccccggccagcccctcgccgtcgtcgccaacctccagatccaccgcctcctcgccttccccgactacgtggacggcgtcgcgagcaggaggccggcggcggagcaatccggatccagccagcatacgatgacgacggcgacgaagacgaaggcggacgcgctcctccgcgccatccgcgacctgaacccgaagctggtggtcctgacggagaacgaggccgaccacaacgtcgcggagctcggggcgcgcgtctggaacgcgctcaactactacgcggcgctgttcgacgccctggaggcgagctccaccccgccggcggccgtgccgccgcacgaacgcgcgtgcgtcgagcggtgggtgctcggcgaggagatcaaggacatcgtcgtccgtgagggcacggggcggcgggagaggcacgagacgctggggcgctgggcggagcggatggtcgccgccggcttctcccccgtgacggcggccagggcgctggcgagcacggagacgctcgcgcagcagatggtggcggcgggcgggggcggtgccggcgccggggtgctcagggcggcgcacggcggcgggtgcttccccgtgatctgctggtgcgacgtgcccgtcttctcggtctcgacgtggaccgcgaggagggtccttgtgccggcgccaccgctgtggccaccggcggcggctggtggtgctggtccatcgggctcaggctacggcggcgacggcccatcgacggcgagctcgtcggcggcaatgtggtgggtcggatga

SEQ ID NO: 50247 - DNA, 1317 bp, Oryza sativa
  Clone ID: PAT_MRT4530_52752C.1
atggccgcagcggtggaggattcgccagcggccacgaacaccaggaagcgcctggtgggttcgagcaagctcaccatggtggcggagatcccgaggcttgccctaggaggaggagggggagtgggagagcagctaccggcagccggggaggattcggcagcagccacaaacacggggaagcgcccggtggtcgggtcctccttggcagccatggtggtggcggcggcggggatccagcccgacgcgtttgccctaggtgggctggtggagtatccggccgggaacggggaacgggaccttctcgtggtgaggttcctgcggtccattgccgccttcctggccgacgggacgtgccagatgcaggtcaacgatgggctgagttgcatcgtcgacctcgccggcggcgtcggtggggggaggagggtccttgcaccggcgccaccgctgtggccgtcggcggcggctggtgctggtggtgctagcgcatcgggctcacgctacggcggcgacggcgagctcgtcggaggcaatgtgggctccggcaaggtcaccatggcggcggagatcccgaggcttgccctaggaggaggagggggagggggagagcgactaccggtgccaccgatggctgcagcggaggaggattcaccggcggccacgagcacaaggaagcgcttggtgggttcgggcaagctcaccatagtggcggagatcccgaggcttgccctaggaggcggagggggagcgggagagcggctaccggcagccggggaggattcggcggcagccacgaacacggggaagtgccaggtggttgggtcctccttggcggccatggtggcggcatctgcggggatccagccggacgcttttgccctaggtaggccagcggagtaccctgccggcgacggggaacgcgaccttctcatggtgtggttcctgcggtccatcgccgccttcctggccgacgggacgtgccagatgcaggtcaacgatgggctgagttgcgtcgtcgacctcgccagcggcgtcggtggggagagggtccttgcaccgacgccaccgctgtggccgctgccggtggctggtgctggtggtgctagtgcatcgggctcacgctacggcggcgacggcgagcttgtcggcggcaatgtgggctccggcaaggtcaccatggtggcggaggtcccgaggcttgccctaggaggaggagggggagggggagagcgactaccggtgccaccgatggctgcagcggaggaggattcgccggcggccacgagcacaaggaagcgcctggtggtcaatgagtcctag

SEQ ID NO: 50248 - DNA, 861 bp, Oryza sativa
  Clone ID: PAT_MRT4530_52753C.1
gacagcttgaggggaagtgaaaccgggcgagcttagagttagtgacagcagtaacaataataataatgaacattaatacagtataaccaaaaggtagcagcagacgaagctactaccgtgtttcgatcaagtacaacgttgtggtatatgatgggttaaaattggctgcaatcactaaaatcacatgtccatcctgaatgtctcaagtctctcaatcgaggatcctccagccctgttttcgcaagcttcagatgtcatttgtatacacagattatcagcattgtggtgagggtgatgattgtcgcggttgtgaagatagccgccgcaaccgccgatgcagcaagaccagggcgctctcggggatctttgttgtagtacttacagcagtaaagagttgctgcatagtaccagatcaacggacacaagaaacctaaaaggaaagaggaccatcctataccacaaccaaagcaaggaagtcgtctttcaaacattgccagccgtgggttttcttcatctctgagcaatgtatacttgccaagacagccctgacaatggcaaaattgatccgagcctgcttcccccatttaatttagagcagttcagcaaagaagcacccagtaatcttaatgcaatatctccgttgcagattcctctgtgccgtagcaagaatcagtcataacaacatgaagataaggacatcaatgatgcaggttgtctagaatggtcatgttgctgtacggagcaagacgaagcatgcgccgccgccgatcggaacagaagtggaagcaagatttgtgcgttcttggatgggccctcctgctctctgttgcccatccaagaacgcagcagagccctagcggt

SEQ ID NO: 50249 - DNA, 113 bp, Oryza sativa
  Clone ID: PAT_MRT4530_52754C.1
atggcattttggtctaagaattttgttaaacacattgaaaggaggaggggcgcccgtggttgggaggtggagacgccgacggtgaatggtgttcgcgagtgcggcgcacctag

SEQ ID NO: 50250 - DNA, 344 bp, Oryza sativa
  Clone ID: PAT_MRT4530_52755C.1
tgggtttttcgccagcgcggcctcccccacatttcattctcctgtttttattttttttcccatgccccacttttttaaacactagccaaaaaacggcctttaaaaaaaaaaggcgggtttttaaaagatttcatttattttaaaattaaagaagattcgcaaacctggtaaaaaggggtgttttattcccaaaaaggttcgaaccgtttttactttaggggggggtccccaattattaaactccccctttaggggcccaaaattattattattaaccccaacctttccttatcgattattattataaacaattattattatttttattaacacccttattacta

SEQ ID NO: 50251 - DNA, 575 bp, Oryza sativa
  Clone ID: PAT_MRT4530_52756C.1
agcataccctcaaaaacggtttaataaggaatgattcgcatagagatgtacttgataatacaacgaagggtgtgtggtttaaaccctcagatctcgtatacaattcttaacatgttcaaaaaaaaaaaacagaagaacagaaaactgatgcggcagatgggccggaccaccgagaccgtccggccttctcggcaccgtgggctggggctgggaggcggggctcgatcggtcggatcagaagccgcagaagtccttgtcgctgggctggcccggcttgccgatctgcgtgcagccctgggtgcaggcgtcggcgcagtcgaacttgttgggcgccgcgcccagcgtcatgcactggttcttcatgcagtcgcagaagcagtccagctcgccggcgtcgccggtcgtctcctccccctccgcgccagcgcccaccgccgctgccgccaccaccgccgcgaccagcagcagcgccgccgccgcggctctcctcgacgccattgcgatcccggttgattctcccgtcgtgatcggatcggatcgatccggcaggtcgcattcggacgccgggaattccg

SEQ ID NO: 50252 - DNA, 1410 bp, Oryza sativa
  Clone ID: PAT_MRT4530_52757C.1
atgaggctggttggattgactggtgggattgcgtctggaaagagcacgatctccatcccgttcaagggtagcggcattcctattgatgtagcagacttaggtgcttggcgttgcatggtagaattgcgtgttccggcatcctcatgttgacggtgtagaagacttgaggtgtcgaacgctgagatactcgtagtcggatgcggagtctcttgcatcagtggtgtggtggttgccgtcagaatcgttcgtgcttctctggtcgctgtctctgctcaaattggtggcgttgagcgtgttctacgcgacaggtcgtctcctctggttccccaacgtgcccgcttagttccagtctcctggctccacatatttcatctgggatattttgggagatactaaaactgtggataaaaggatgcaaggttatcgtatgcgcgcgccaatgtggtacagaaaggcactggaggttggaagaagattgtagaagcttttggaaatgatgttctgttagaaaatggagaaattgaccgagctcgcttaggacagattgtcttctcggaccgggaaaaacgccaagttctaaaccgtctcctggctccacatatttcatctgggatattttgggagatactaaaactgtggataaaaggatgcaaggttatcgtcctcgacattcctctgttgtttgagacaaagatggaccaatggacgcaccctgttattgttgtgtgggtgaatgaagcaacccagattgagaggctaatgtcaagagatgggtgctctgaagaacaagctcggaataggatcaatgcgcagcttgcgttggactggaagaagtcacaagcagacattgtgatcgacaattctggcacgctggatgaaaccaaagaaaagtttcaggaagtgttgaggaacgtctctgaacccctgacatggaaggagcggttgaggtctcgggatggtcttttctccgttgtggcgtgtggccgtcgtctggtggcaggtcgcgacaccggccgtggtacgaccaacaacaggtccagcgcaaccttagagcagtgtaagaatcatcgttgggtgcatgatattaagagagcaccttcaaaccacgcaattggggagcattttaggtctgggatgcagtttaggaagtactacgtactgcaccatggagaagaggacgagatgatttgcaagttttcttcgttgtcggtgtacatcatgttcttcatggccaagacgattgctcgatgtagtaacctgatcttggtagacgatagcaccatccaagggggccaggccactggccttcaacaagttggccctcatgttaggctagctggatggtgtggaagggaaatgtatgagttttccagaatagtgattaacatgcaatctattcggggcgattaa

SEQ ID NO: 50253 - DNA, 1685 bp, Oryza sativa
  Clone ID: PAT_MRT4530_52758C.1
cccacgcgtccgtagctcactgcatcttcttcctcctcctcctgatcaaattaatcatcgtctcctccattgcattcttgcatccatccatctagctagttagtgttgttcttgttcgtgttcttgttcttgatgtgcattgatctttcttctctattgatctaattgttcttagattgagagtgaagttgtgagagagctggacaccatttctctcatcaatatcccttagccaaaccttgagaaaagcctgtgaagcatgtaagaacacaccagtttgttccatccaaacccaacccaaaaaagcaccaaaaaaaaggtcatcagttccaagtcccaaaagcattgttctttcataactaggcatctcggttaattagggtggatattcctccactaatcccttagcgaaaaatctacaaaaaccactagatcatgtaattttcggcgaaatcattccacccccagctgaagaaaaaaaaacaaaaaaaatataggccaagagaatcatattccagcatgcatcgttagctagtagccatcatctcagtcgcagtccggtagtaatactggacacaatcctcccattgctgtagcatttacctctgcaaaagccatcaaatcatgtaattagtagctaaaaacccatcctatttctacctcatcattcgcctgaaaagagaaaaaaacaagaacaaaaaaaaaaagaagttgcaagaagaggagagcaagaaagagttgatatattaatggagatggcggcgccgaacgggggcggcgcggcggggatgtcgtcgccggtgaacggggcgtcggcgccggcgacgccggggacgccggcgccgctgttcgcggggccgcgggtggactcgctgtcgtacgagcgcaagtcgatgccgcggtgcaagtgcctgccggcggcggtggcggaggcgtgggcgccgtcggcgcacggctgcgtcgtggagatcccggcgccggacgtctcgctcacccgcaagcttggagcggagttcgtggggacgttcatcctcatcttcttcgcgacggcggcgccgatcgtgaaccagaagtacggcggcgcgatctcgccgttcgggaacgcggcgtgcgcggggctcgccgtgacgaccatcatcctgtcgacggggcacatctccggcgcccacctcaacccgtcgctcaccatcgccttcgccgcgctccgccacttcccgtggctgcaggtcccggcgtacgtcgccgtccaggtgctcggctccatctgcgccggcttcgccctcaagggcgtcttccaccccttcctctccggcggcgtcaccgtccccgaccccaccatctccaccgcccaggccttcttcaccgagttcatcatcaccttcaacctcctcttcgtcgtcaccgccgtcgccaccgacacccgcgccgtcggcgagctcgccggcatcgccgtcggcgccgccgtcaccctcaacatcctcatcgccgggccgacgacaggagggtcgatgaacccggtgaggacgctggggccggcggtggcggcgggcaactaccggcagctgtggatatacctgatcgcgccgacgctgggcgcggtcgccggcgccggcgtgtacacggcggtgaagctccgcgacgagaacggcgagaccccgcgcccccagcgcagcttccgccgctga

SEQ ID NO: 50254 - DNA, 735 bp, Oryza sativa
  unsure (1)..(735): unsure at all n locations
  Clone ID: PAT_MRT4530_52759C.1
ccccaggtagccaaggagcggtggcgatggcgccaggagacgggggaggagggcctaaacagcggctgccgcccggctagagcggcggcgacgctagaggcaggtcgagcggaggggacggcatcgggcgacggagcggcgcaaacggcggaggccacccggctcgagcggcggcggcggcggaggtgggtcgagtggaggcgacgacgccgggcaacagggcaccccaaagggcggcagccgcccggctcgagcggcagcggcgccagaggtgggtcgagtggaggcgacggcgctaggtgacggggaggcccgagcgaaggacagcgatgacgacgtcgggtgggccttcctccgtgccgccccctctacgctggctaccagcgcccaaagctccattttcaccgctatctccctccccaactttgccactctcccttcccatctacagctcgacaacaccggcggcggctcgacgacggccacttcgtgcccctcctggccaaatccggccttaaggtcgccagatctggcctttgggtggcggcggtgggtggagggctcgactgcaggagcatcaactcanaggcggcggcggcggctcgactgcaggaacagctcaacgacatccatcccgcgccccctccatgggagtggcggcctcgacgacggtggctgcagatcgacagcgttcacactctttctcccctctttccagccgctgtgcccagcttt

SEQ ID NO: 50255 - DNA, 2493 bp, Oryza sativa
  Clone ID: PAT_MRT4530_5275C.1
atggcgccgccgggcaactccgacgagctcgcgagctccaagaaggtgaagaaatctaactccaaggaggagaggaagcacaagaagggcaagcatgagcgccccgccgcctccgacgaagcgccgactccccgcagcgacgcgaaggggagcaagggcaagaagcggaagcacaaggacggggagggggagaaggagcacgggaagaggtccaaggagaggaagggggagggcgaggcggcggaggcgaggcgcggggacgacaaggtgaggcgggcgatggaggacgagaggttcgcggcggcgcggaccgacccgaggttccgggcgatgcggcggaaggaggcgaaggtggagctcgactcgaggttcaccagcatgctgacggacccgaggttctcgtcgtcgtcggcgccggtggacaagcacggcaggaggcgccgcaagaagggtggcagggagaacccgatgctgcagtactatctcaaccaggaggaagaggaggaaaaggagaaggccaagttggttgaagaagaggaagaagagggggacgcagaagagcagcaaggggaagaagagagctccagtagcgacgacgacgacgacgatgaggacgaagaagaggacgatgacgacgaggtgtactctgtcggcagtgacattgcgcattatttgatgggcaggcatgatgatacacctatgattgacaaggaaacccataggcttgctgttgttaatatggactgggatcatattaaggcagttgacctgtatatggtgatgacatcttgcctcccaaaaggtgggcgagtcttatcagtgtcagtctatccatcagaatttggacttgagcgcatgaaaattgagtcaactaagggcccagctgcccttgttgatgtcaatggtagtgatggtgaatatagtggtggtgatgatgatgacgacgatgaagaagaagaagatagtagtgacactgaacatgattctgaggctgaaaacaacaagctacgtacttatgagctaaacagactgaggtattactatgcagttgtggtgtgtgattccagtgcaactgcaaatcacctgtacatgaatcttgatggtacagaattattgaaaacatcaaatgtgttcgacttgcagtttattcctgactctatggaatttaaacatcctgctcgtgatgttgctacagaggcacctccaagttacaaggagcctaattttgaaactcgtgctttgcaacatagcaaggttaagctcacgtgggacgatgatgaaccagaacgcaaaaaggtcttgaggcgaaagttcactgatgatcagttagatgatcttgatatgtacttagcaagtgatgacagtgcatcagacgatgaaggtgcagataatcatggtgacgagtctctacaaagtggagccaaaagaaagttaacaagggaggagaggttggctcttctactacaaggtgacaaatccgaggaggaacaaactgatggcgaggacatggagataacattcaacacagagcttgaggaccttagcaagcgtatacttgacagaaaggtcaacaatgagaagactgtctgggagaagcaccaagagaaaatgaaagagaaacgtaaatctaggaagagaaggtcaaaggatgatgatgatgatggctatagcagcgaagatggcctggatgaacatgacgatttctttgatgatgaaatgtctgatgaagaaattaagccaaacaagaagcagaaggcaaaggccaaagataaaggaaaggggaaaggaaaggacaaactcccagaacaacatttggaggatgaagcaaccagagaagagttggagcttttggttgcggctgacaaggatgcaggcaacggtgcaaagggttataacttgaagcgcaaaaagggtacgaagggcaagaagggtaaagagcaatctgttgaggacgaacttcccgacatagatcttagcaaagatgagaggttctcagccatgttcaattctcattggtttgcggtggatcctactgatccccagtacaaaaggagtgcggcctttatgcgcaagcaagctgggataaagggagcacatgaaccatctctgggaggtagaggtagtggtagaggtacattgccacctgatgatgtgcctaccgatactcatgaccagaaacctgatggcacatccacggagaagctggaaacaatgtctgcagtcaagtcactaaaacggaagcttactgcattaaaaaacacaagcaagagtgaccgatagagaaaagctttgctttaccctgatgaccaatgaacaagcttttttttttatttgtctatgacgagagttattttggctttagaatagtttttaggtatgttatttatgtttgctacctacctatgaaaatgtgtcaaaatttgggttttgacaatgatcaagtaggacaattgtgttatccttaatatttttgaaaacggggatccactaaag

SEQ ID NO: 50256 - DNA, 1316 bp, Oryza sativa
  Clone ID: PAT_MRT4530_52760C.1
atggcgatggcatttttgggacaaagtcgtttgtacgatggcatttcttggaactcacacttgtcgatggcatttctggtcccacctgtcagcgtggccacgtcagcaccctctctctctcttccccctcctctcccttcctcatctctctctctctcactcttctcggcaagccggccggtggctggggcgaaggccgccagggtgaggcggcggcggcaggtcgcgaatggcgagacggaagcgctccacgccgcggtgctcaaggaggagcagcagcagcacgaggtggaggaggcgacggtcgtgacgagcagcagcgccacgagcggggaggagggcggacacctgccgcaggggtgggcgaagcggaagcggtcgcgccgccagcgatcggaggaggagaacctcgcgctctgcctcctcatgctcgcccgcggcggccaccaccgcgtccaggcgccgcctccgctctcggcttcggcgcccccgccggcaggtgcggagttcaagtgctccgtctgcggcaagtccttcagctcctaccaggcgctcggcggccacaagacgagccaccgggtcaagctgccgactccgcccgcagctcccgtcttggctcccgcccccgtcgccgccttgctgccttccgccgaggaccgcgagccagccacgtcatccaccgccgcgtcctccgacggcatgaccaacagagtccacaggtgttccatctgccagaaggagttccccaccgggcaggcgctcggcgggcacaagaggaagcactacgacggtggcgtaggcgccggcgccggcgcatcttcaaccgagctcctggccacggtggccgccgagtccgaggtgggaagctccggcaacggccagtccgccacccgggcgttcgacctcaacctcccggccgtgccggagttcgtgtggcggccgtgctccaagggcaagaagatgtgggacgaggaggaggaggtccagagccccctcgccttcaagaagccccggcttctcaccgcgtaattcagcagctgcatggatccgatccgtcagagagtttttgtctagggagtgaaattcagtcgaaacacactattcgttgattcgttttgtgccgctattgtttaatttgttcctgcttttgtacagagcaagcgagtgatacatagccatacatacagtcatacagatataggtctagctcttccttggttctttgtaacactggaactgtacctgtatcttttacactttgttctttgacagtcatatattgtagaccataaaaaaaaaaaaaaaattcgaccaac

SEQ ID NO: 50257 - DNA, 369 bp, Oryza sativa
  unsure (1)..(369): unsure at all n locations
  Clone ID: PAT_MRT4530_52761C.1
catccagcagctcagccgccacaagccatggccgatgcgagctcggccgccgtcgctgcccccaagccccaactggccgccggcacttnngcaccaagcagggccagctcgacgacgccgtcgccgcccgccaccaagctcgaacagatcagctccagcaatgttcaatccaacgacttttgcattgattgattgattttctctgctcgtgtgattgtgtgattggaatcgactagcttgaaccaattgatagtatccctgtgctgtgcgtgcattgcatgtgtacatattaccaaatctctgttgcatatggatccactcttggatatcggttttcgcttgaatgccgttttcttctgttattttgtt

SEQ ID NO: 50258 - DNA, 871 bp, Oryza sativa
  unsure (1)..(871): unsure at all n locations
  Clone ID: PAT_MRT4530_52762C.1
ttcgtgcagagtcgcagcggnagagttgcatagacgaagcggaggaggaggcagcgaggcgaggcgagcccaatcggaaggcatggatagataccaaagggtggagaagcctcgcaatgagacaccaattagtgagaatgagatcaggatcactgcacaggggaggatgaggaactatatcagctatgggatgtcgttgcttgaggaaaatgggcatgatgagattgtcatcaaagctatgggaagagccatcaataagacagtcatggttgttgaattgatcaagagaaggatcggtggtcttcatcagattacatctactgaatcaattgacatcacggacacttgggaacctttggaagaaggccttctccccctagagaccacccggcatgtatcaatgatcgccataacattatccaagaaagcactggatacgttatctccagggtaccagccacctatcccagctgaagaagtgagacccgcttttgactatgaacacgaagtagaatctttccccactaatcgtggaagaggccgtggtggtggcagaagaggcaggggcagaggcaatggtccccccgcttatgattatggcgaggagtgggaagaggaaggagattattacaactacagaggcagagggagaggccgtggtcgacgtggtggatatggctatgattacggttatggcggcaggggggactattatgaagatcagggcgaatactttgaagaaccagaggactacccccctctctcatcctcggtcggcttcacaggacgtggcaggggaagaaggggcggaggaccgggaccattccgtggtcgcggccgtgggcgtggtccgccaccgccaccgcgtcgt

SEQ ID NO: 50259 - DNA, 504 bp, Oryza sativa
  Clone ID: PAT_MRT4530_52763C.1
gcgtggccgccctttttttaaaagaattattctttattttctaacaagcatagacaacactcttcagcatccagggggaaatgattcaaaattcagtctatttgggacaatatgagtggtagataagtccagcagggagaaacagcagggctcaccacaaacttttggggttacattcaaaacccagcatataaatttcaccttctaatagctactaaagcgaactggagcaaacattcctggggctaccaacagcatagtctgtcttgatgcttaaacctcctggacagtcaaacctgaaaaaagaaattcacaatcagtaacagctaacaatggctggtcaattcaacaaaagaaattttgtaccttatgtgtcagtgataaaaacagtaaagcacagaaggcaatgtaaaaaacatatataaattcaggatgaactatagacagctcaattgtgtgtattacagggttgtaagttggctggtctttaggctgcaccaatcc

SEQ ID NO: 50260 - DNA, 1164 bp, Oryza sativa
  Clone ID: PAT_MRT4530_52764C.1
gtgcgcaggagcgacgtgcatgcaggctgcttgtgactgcacagcacgacggagcaccacatttgcagcagagccgcctccgccgcactcgtccatcgccggagcttccgcatagggtttcggcgaaccggggggagggggggggagagcaagatcactgcacaggggaggatgaggaactatatcagctatgggatgtcgttgcttgaggaaaatgggcatgatgagattgtcatcaaagctatgggaagagccatcaataagacagtcatggttgttgaattgatcaagagaaggatcggtggtcttcatcagattacatctactgaatcaattgacatcacggacacttgggaacctttggaagaaggccttctccccctagagaccacccggcatgtatcaatgatcgccataacattatccaagaaagcactggatacgttatctccagggtaccagccacctatcccagctgaagaagtgagacccgcttttgactatgaacacgaagaatctttccccactaatcgtggaagaggccgtggtggtggcagaagaggcaggggcagagccatgagcaatggtccccccgcttatgattatggcgaggagtgggaagaggaaggagattattacaactacagaggcagagggagaggccgatttagaggacgaggacgtggaagaggccgtggtggctactacggaggtggtcgacgtggtggatatggctatgattacggttatggcggcaggggggactattatgaagatcagggcgaatactttgaagaaccagaggactacccccctccaggccgtggacgtggcaggggaagaaggggcggaggaccgggaccattccgtggtcgcggccgtgggcgtggtcgattctaagatgaaatcaggaggaggtgcccttgaagcttgagaactcgtgtgcttaaattatctgataatgctgttctgtatgggggtttcgacatgaatccgtatgccccatcagtatgtttttacttcccgtggcggtgtgactgattgggcaaattttgtggctggatcttggttttgtagctaggcctgtcctgtcagcaaaagcaacaacaaacaaacaaacaccctgtgctgctgtttatttatcaacaacctaggtttccttcc

SEQ ID NO: 50261 - DNA, 3158 bp, Oryza sativa
  Clone ID: PAT_MRT4530_52765C.1
ttatctatagtattcttggcgcagaatttcgaaccccccatggtgtcctcgaagtaacaattgaggttcttcacctccaatcagctgtatgtcatgatcggacaccttcagatatcctccttcccagacgtttctagataagcaatcaatcacgtccatctcccaaatagttaaatcggcgttagcaacgttaaccgatctatcggctagcacgacttctatctggtcaccttgccactggattaaactctggtgcatagtcgaagggatacaataattcgcgtggatccagtcccttccgtgtaatagaccatacgaacctttcccatcgatgacaaagaaggtagtcgggaccgtcttgctgccaacggttatcttgattttcaaaacgccattggcttccgttggatttccaccaaagtccttaagaaccatgttagttttcatgaggtattccgcgttctttcctagcttcctgaatgtggcgtacggcatcaagtttaccgcggccccaccgtcgactaatatcttggacatcggcttgccatttacaaagcccttaacatataatggcttcaaatgccaatgttcggttccttccggtttctcaacaacgacctgcttaggtgaaaggactaatttcggtagggattcctccataatttccacacccgttggctcagcgcaatattctgctggtagcacaaataccatgttgaccgatgaggattcaacggtctttcctttagctatccatcttgctttgttggcttcgacctcatcggttggaacaaccttactcttcacgcgccattcctgtttggtccttttcagccgatggttgatttcttcgtgaacttcctggaaccattctctgctccacatcctttgaacccttcttttatgatttttagtgaaaataccggaagggcaccactgctgtttcctggattcatcttcctcgtcttccctccagatgggatcttgatggagcggtcccaatctctgatggacaggcaacttcttctgtatcggccgattttcattcctaggaagaaatcggcttgagctgccgacgtggtcttcgtcgattccgctgcatcctgggtagttttgtattgagggcaatctcatccccccattcatgttgacaggaaaaggattgccgttgatctccattgatttctttgggtcatcgaacttgattcttctttgctcgatggcggattggatttgttgcctgaagaccttgcactcattggtgctgtatgatcccgtgctatgccacttgcagtatttcctctttcctaattcaatagccgatgggatcatatgaccagcggggaggtggatttgtttctcccgaagcaataggtcgaagattttattagctttggtgatgtcaaaatcaaatgtctcctcttttccggaatccttgacccattgacatgtgaccactcttttattcctcgcccactcggctgttgctacctcaggatcctcttcctcttcgacttcagagaggtaggtgttaacattcttcaccttctgagctaggtgagccaggctctcaaattcctgggttgcgaacttctccctggtcggtgccaataggccttggaaggcgagatcggcaagctgagaatctgtcaaagcgaagctaaaacatctgttcctcatatctctgaatctctggatataatcttgaaccgattcatcgtgcttttgtttgatcgacgttaaatcagacagtttcatctgatgaatcccactgtagaagtacttgtggaactgtctctcaagatcggcccaggtgtgaacaaaattgtatggtaacgctgaaaaccatgtgaaggccgatcttgatggaaacaatctgactcgcaaagcgtcagtagccgatacctctccgcaatgggccaagaatcggttgacatgctcatatgttgtcacattgtctttccctgaaaactttgagaaatctgggaccttgtatcggttcggcaatggcactctctcaaaatgttctaggtatgggtgccgatacaggttcccactatccttaggcttgagcccgaattgctccctcatcacatcggctatcatatctgcccaaggcttttgctgaggtgctcctttgtggacccccgtttttttataacaggaatcaatcgtgtagacagtaccatttccctggatcaagtagtctggtacacacgaattcatagcacctctccccgccatcctcctctctctcccgtgccgccggccgcctccagccgcctctccctccttgccggagcgccgtccggtcgcgccgtcgccaccagcggcctcgcagtagtctcctctcccccggcttgccctccgtttcgcgtggagacccccggaggcgcgtccccgccggcaaccggtggcattgccgccacccaccgcctccagccgcctatgccgcctcgccggtgccgcggctgtcgtcatcgccatcctccctcgacgtcgccgcgtcgccctccaccccggcctaccctcggtttcgccggaacgccgttgcccgcggcgcctctccctcggtctcgccggagttccttcggcaaccccttccaccgtgcccgtgcgccggccgatgtcgccatctcctcctccggcatcgcagcgtcaaggttgccctcggcctcgcctcccctccatctgaaccccgccgcggcgtgttccacgccgtcctcgtctccgtgcagccgcagccggctgcccacgtcgcctcctcgctggccccggtcgtcgtcgtcgtcgtcctcccatcgttcccggtcgtcgtggcgttcgtccctccgtcaagccgatcgcgttcaccgcccgtggttcgtcaagcgagccgctgcagccccgtcgtcgtcttcgtcctcggctctgcgtcgtcaagcctcgtgccggccgtgtctcgccttcgtccaaggatcgccgccaaagtcgttccctcgccgttcgcctctgtcgtccccgaaccgtctccgccgtgcccgttcgtcgtcgtcgttcccacgcctcgtcgcgtggtgctttcgtcgttccggaggttcccgaagcgtggttcgtggtcgtcgccgaaggttcggaaggccgttctctctgagcaaggcaagtcacatcatccttga

SEQ ID NO: 50262 - DNA, 288 bp, Oryza sativa
  Clone ID: PAT_MRT4530_52766C.1
atggaggaggcagccttgagtgggaagcgagctctgtatatcagcatatccttatctcagattaaatcttttgtcactgttttgaaaacgcaaggattttcatatcatggtggtacacagtgcagtcaagttatgctgaggatggggagcacctgcagaaggcacaaacctgctacccttggggcaaacaaacccaagtgccttgccgaggtggaggaagaggaggcaaaggcagaggaggcccataaggagaacacatggtgggcggttgctatcggtgacctgtga

SEQ ID NO: 50263 - DNA, 707 bp, Oryza sativa
  unsure (1)..(707): unsure at all n locations
  Clone ID: PAT_MRT4530_52767C.1
acacgaccggcccacgcaacgcgggccacccgagtggcgacacccccgcgtctccgcccggccccgtctggccgcgggccgcagcatcttctcgtctcggggaccgacccccccgcaacactcgctctcggcgcgacacacctcaaccgagtggtgcacactacaccacgccgcccccacccgcccgcgcgcccgcagcgccgaccacggcgcacgccttcgctacccccactgcncccggccccccgctccccggccaccgccgcacgacggccccccagcgccgcctcccgcaggggccgtgggcgcccctacgcccctgcccccgtccgcccccgcctccccggccgccacggcgcccccgcccccccccgggccgggcacccacggcgccccccaaccccgcccacgcggttggcggggggcccccgtggccggtgggtggggcttcggcaacctatgagacgcgctccacggcggccgctgcctcctcgtcgtggcctccgtccgtccgtcccgcaatgctgccgcctccacgtccggctgtcccatgcgtcacccgccgccgccgcctccgtgtccccgccaccgccgcttcctcgttcggtcgccgccgcgtcacccgtcgccgccacctccgcgtccctcgccaccgccacctcctcgtccggttgtcccgcggtgctgaccaccgtcgtttacagtga

SEQ ID NO: 50264 - DNA, 468 bp, Oryza sativa
  Clone ID: PAT_MRT4530_52768C.1
atggagaaaagcagcgatgagcagtgttgcattcatcaaggtctcgaggagaacgaagatagggttttcccccgacaacaccaccagagagagagggacatctcgacagcgctcctaaaaaggccatcctccgtcagcgcgaggacattgctgaaccaatatcgatctgcatgctccattgctctgccacaggccatcctccgtcagtgcgaggacattgctgaaccaatgccacatgccatcctccgtcagcgcgaggacattgctgaaccaacgcccctcgtctctgtcaacgcgaggacatcgctcaaccaatgcccctcgccggtcagctgccgcaggcctctgcggcacaccaccttcactggcctccctgatgccaccacgtcctcccacgtcgtcggttgggcaacctccctgctatcgcctgcactgacctcccaatgctatcggctggaccgtgcataa

SEQ ID NO: 50265 - DNA, 627 bp, Oryza sativa
  Clone ID: PAT_MRT4530_52769C.1
ccctctaaccaacctttccaatgtcctctcaaatctcaatgaccggctccaagggaccacaggggctcttcccaatccttcccattaatcagctaggagaaacagttctctagattgaggatgactctcttccggtcctgagcgccagagccacactctcagtgctcaaccctgctgatataaattagccactgcctttatatcagtacaagttcatgttcaaaagtgaggctctctaatgaactcaagagctgcctgtacctgaagacattccctttcggttaggccccttgagagatactcagccttttctttttagtttctccacctcatccatttattaggctgagacttcaaagacaagtattattccagaatgtctttctccccaaagggagaagtaattctagaatgatggtagtcatcaaagcagtcaactatgtgaattaaatgaccccttgtcatcttttatttgttctgtccccatctctgacagcactatagctgattctggcaaacactgatcatctgtccctattgaatcagctaccactctccacatgggtaaagtttccaactgacattgaccaaattcacagcacatttcccatcaagattcagatcgat

SEQ ID NO: 50266 - DNA, 333 bp, Oryza sativa
  Clone ID: PAT_MRT4530_5276C.1
gcacgagggtgacttgccagcttattcaccctatgcctttttgttccctccatatgttcttacgaggcctgctatcaacatttctctctctcaagtccaaacttttccatgctgcccaaagcaccagctttgcccaaaactaacaacttaactttcttccccgagaagtaataacaatttcaagctaaagttggtagttcggacacaacaacataactgactctttttatgtacagaaatatggattattgctaaattttagcttggaattatttactggatcttggtggaaattctgttaaagattagcttagcagcccatggagaatgaga

SEQ ID NO: 50267 - DNA, 450 bp, Oryza sativa
  Clone ID: PAT_MRT4530_52770C.1
ccgacgtcggcgacgtcgacatccccggtgtgcgtcgcctcaagaggtcctggctgccgcagccattgctcgacctgaacaagctcttcacgaagcagttcatcgagaacggccgggagatggtcaagaccgacggcgttctgatcaacttaagcattctctctcgtgttcgtctgagaataaatatctactgctacataattcctccttcaatgtcacgtataagtgtacaagtgaaaggagggagtgtgataaataaaagcactctcgtgtgtgcggctatgcgtagtttgggattgaaaaaggccaatttccaattggcaccaccaaagctcctccttgttcccggttaggaacaaatttggttgttttcatttttcagtttgtttcagttgtgttgcaaatctattgtcttggattctccccaaaaaaaaaaaaaaaaaaaaaaaa

SEQ ID NO: 50268 - DNA, 444 bp, Oryza sativa
  Clone ID: PAT_MRT4530_52771C.1
atggggaatgtttatttattacatgacgaaccgatgcctattgttgatacgatccaattaaataacaattacctcaagctgcttgaaaatgcggcgaatcaccgtgacatcaccgtacgcaatgttgccaatcatattattgataatttacatgccgacccgacccaatggcattatgtttcccatattgattggatacaagcacgctttaatgcgtatcaacaacgcatacaacaagaagatgagatacctttagaacaacaacatcaactgcgtcaacttcctcaaaacatactaagttcccatacggaactcagtcaaaaagagcgggaacttagtaaaaatatacagagttcccaaatggaactcagtaaaaaatcacagcgttcccatacggaactcagcgactcagtacagtacaagtacgagtatttgtataaataa

SEQ ID NO: 50269 - DNA, 1798 bp, Oryza sativa
  Clone ID: PAT_MRT4530_52772C.1
cttgttttagccggtttcacaacagcatcataaagcagctgctcgtgccatggcaccaccgcctgcggtgctcagctccggtgagctcggcgcgcgagggcacacacggccgcacgtcgtgttcgtcccgagcgccggcatgggccacctcctccagttcttccgcttcatcggcgcgctgtccgcccacgacgtcgacatctccgtcgtcaccgtcttcccgaccgtgtccgccgccgaggccgaccacttcgccgccctcttcagggactatcccagcgtccgccgcctcgacttcgacctgctgccgttcgacgcgtccgagttccccggcggcgacccgttcctgctccggtgggaggccctgcgccgctccttgcacctcctcggcccggtcatcgccggcgtcaccccgcgcgtcacggccaccgtcaccgacgtcacgctggtgtcccacgtcaaccccatcgccaaggacctgggcgtccagtgccacgtgctgtacgtctcctccgcggccatgatgtccctctgctcctacttccctatctacctcgacaacaaggatgccggggccgacgtcggcgacgtcgacatccccggtgtgcgtcgcctcaagaggtcctggctgccgcagccattgctcgacctgaacaagctcttcacgaagcagttcatcgagaacggccgggagatggtcaagaccgacggcgttctgatcaacacgttcgacgcgctggagccggtggcgctcgccgccctccgcgacggcaaggtcgtccgcgggttcccgccggtgttcgccgtcggcccgcacagctccctggcgagcgaggcgacgaagggcgccgccgccgacgcagaggggtcgccgatggcatggctccgccagcagccggcgcggtcggtggtgtacgtcgccttcggcagccggtgcgccgtgagccacgagcagatccgggagatcgcggcggggctggaggcgagcggctcccgcttcctgtggatcctcaagaccacggtggtggaccgcgacgacgacgccggcatccgcgacgtgctcggcgacgggttcctggagcgcgtgcgggggcgcggcgtggtgaccaaggcgtgggtggaccaggacgcggtgctcagggacccggcggtgggcctgttcctgagccacagcgggtggaactcggtgatcgaggcggcgacggccggcgtgccgctgctggcgtggccgcggggcggcgaccaccgcgtggcggcgacggtggtggcgagcagcggcgtcggggtgtggatggagcagtggagctgggacggggaggagtgggtggtgagcggggaggagataggggggaaggtgaaggagatgatggccgacgccggcgtgcgggagaaggcggccaaggtcggcgaggaggtggccaaggcggtggccgtcggcggcacgagccacacgggcatcctggatttcgtcgccaagctcaaggctgcaacttaagcacttctctctcgtgttcgtctgagaagaaatatctactgctacataattcctccttcaatgtcacatataagtgtacaagtgaaaggagggagtgtgataaataaaagcacctctcgtgtgtgcggctatgcgtagtttgggattgaaaaaggccaatttcccattggcagtttggcaccaccaaagctcctccttgttcccggttaggaacaaatttggttgttttcatttttcagtttgtttcagttgtgttgcaaatctattgtcttggattcaccccaaaaaaaaaaaaaaaaaaaa

SEQ ID NO: 50270 - DNA, 543 bp, Oryza sativa
  Clone ID: PAT_MRT4530_52773C.1
atggcggcggtcgacgcggtggcgctgctggccgtcgtctccgcgctcgcgttcctcgtcacgccctacgtcaggatggtggcggccgaggtcgggggcctggtgtccgacctcgacgcggcgggggtggcgtcgtcgtactacgcgccgttcgccgcggcgggcgccggggcggcgatcgcggccgtggcgggtgtggtggcgtgggacgccgtggggcaccgggcgcggaggtgcgggaagccccggtgccgcgggctgcgcaaggcggtggagttcgacatccagctcgagacggaggagtgcgtccgcggccagcagcagcgcctgctcccgctccccgggggacgcgccgcgcttctcgcggccgccggggcgcgccccgtccagctcggcgacgcgcaccgcgagctcgaggcggagctcaggaagatggcgccgcccaacggccgcaccgtgctcatcttccgctcgccgtgcgggtgccccaaggggaggatggaggtctggggcgccaagaaggtgcgccggatcaagaagtag

SEQ ID NO: 50271 - DNA, 759 bp, Oryza sativa
  unsure (1)..(759): unsure at all n locations
  Clone ID: PAT_MRT4530_52774C.1
attcggctcgaggttggaaagagccatttaattactnnnttcagttctgagctgtcattggcaccaaacaagcatggatacaatcaagtccttcaagggctacggcaaagtagacgagttggagcagcaagcctatcagaagaagacacgtaagcgcctcataatcatcgcagtctcttccatcgttctatttgcggtgatcatcgccgcggtcgcaggggttgtgatacacaagcgcaacacctcatcatcgccctcctctgactcgcccccgcaaactgagttaaccccggccgcgtcactcaaagcggtttgccacgtgactcagtaccctaactcgtgcttctccgcaatctcctcgttaccggaatccaacaccactgatccggagctcctcttcaagctctctctccgcgtcgccattgacgagctctcgaagctctcgagctttccttcgaagctccgcgccaatgcggaacacgacgcgcgtctccagaaggcgatcgatgtctgcgggaacgtcttcggcgacgcgctggaacagctcaacgactcgatctccgcgctcggaagcggcgccgctgatgccggaaagattatctctccggcgagtgttggcgacgtggagacgtggatcagcgccgcgctcacggaccaggacacgtgcctcgacgcgctcgccgagctgaactccaccgcctcgcgcggggcgctgcgcgagatcgataccgcgatgaggaactccacggagttcgcgag

SEQ ID NO: 50272 - DNA, 104 bp, Oryza sativa
  Clone ID: PAT_MRT4530_52775C.1
cacgaccgcgccgcgctgcccaaggaggtggaggccgcccgcgtcgccgtcgagaacggcaccccgttcgtcctcaaccggatcaaggagcgcctctcgtaccc

SEQ ID NO: 50273 - DNA, 616 bp, Oryza sativa
  unsure (1)..(616): unsure at all n locations
  Clone ID: PAT_MRT4530_52776C.1
ccaccctgggcccccnataccataccgcntctccccgcctttgcccanattcattaatccacgctgncacgacagtttcccgtactgtnaaccgccantgagccaaaccaaattaattgattanctcactcattagccaccccaggcccgacacgtgatcgtccggctcgtacgtgtgtggtcggcgtccggatagcaagctcgcaccggatgctgccatgaccgtccttaccctgccgctgattcagagggaacgaagctcagcacatcctcaatctctccaagtacagttgtatctgctgacatttaacagcacatcagagttaaccaccgtatggctcgaacacactccaggccaggccagggtacttggtaactgaagatcaacactactgaacaacggacgatatatatgtcccgtcattagcgtattggcactggtggaggtgggctgatgccaatgggctggatgattaattagcgtgtgcgttggactactggatgttggctaactactgactctgctactttgttttacgctttccgtgtttgagaggttgtttttcttctttgacgccacaaaaaaaaaaaaaaaaaaaaaaaaaaaaaaaaaaaa

SEQ ID NO: 50274 - DNA, 302 bp, Oryza sativa
  Clone ID: PAT_MRT4530_52777C.1
ataagctgtcgagcagagttgacgaggttgtcaatggatatatatcatcaattcacagagcgaccacggtgtgcgactcatcagtgatcggtggtgtcattttcagactgccgtacgtgcatgcatttttccaggggaagcaacatggaaatgcatgggtgcgcaggatcctagaatctttagcagtatatacactgattagattcgactttcatgatctaagggcggatccaccttctaggcgggatggatggctaggagtttatgccctcaaaccattaaggtcgagcgacaatgacaga

SEQ ID NO: 50275 - DNA, 496 bp, Oryza sativa
  unsure (1)..(496): unsure at all n locations
  Clone ID: PAT_MRT4530_52778C.1
nnttntttttttttttttttttttttttttggcacacccgcaccgtgcagtgtgtttccccttttcccttcggctcagaatcagaatgtgagcccaccaaccaaagtaattgcaactagctacaccaaaaaaacatgtactactagctagctcctacacacgagcaaaggaaaaaagaaaaggcaatcaagaagcacaaagcaggtaaagaaaaggggccacacttgtgtccctcttgctgagatttctgttgtcacggcagcaaaatttaattacaggaccttggccagaaggatacggtaatagacaccttcaaagccaaaagcccgggttttcaccaccgcatgcatcgatcatgcatgatcagttaccatccatgcatataactcttgttggtggtcttcttcttcttctaatggaccaaaaggaaagagacaaattaaggaacaaaaagctagctagctagctatatgccttggatcagctacttgccaat

SEQ ID NO: 50276 - DNA, 3828 bp, Oryza sativa
  Clone ID: PAT_MRT4530_52779C.1
tttgaactgtcttggatagtaatgacaaagatacaaaagaaaacccttcagaaaatagtaacacgataggtagtgaagaagtcttgagtcacggtaaccaggaggaccagaaggtgcctgaaatggataataccaactgcaagattaggcgagcatcaaggccatctcgtacgacgagtagaacggcaaggcgtcccggcacccggggggcctcctagaactctcgccttccccgcgccgccgccgccctctcaaaacgagcgatcgagaaaaaccctcgctgctctcctccccctccccctccccctccgccgccacctcagatctccatctccccgccaccaaatccccccgaaaccgcgagctcctcgccatggcgtccatgatgcaaccgcagatcatcctgctgaaggaggggacggacacgtcgcaggggcgcgcgcaggtggtgagcaacatcaacgcgtgcacggtggtggcggacacggtgcgcaccacgctggggccacgcggcatggacaagctcatccacgacgacaagggcggcaccaccatctccaacgacggcgccaccatcatgcgcctcctcgacatcatccaccccgccgccaagatcctcgtcgacatcgccaagtcccaggactccgaggttggtgatggaactaccacagtggtgcttcttgctgctgagttcctgaaagaagcaaaaccttacattgaggacggagtacatccgcatagtctaattcgcagttataggactgctggccatttggcaattgaaaaggtcaaagacttggccactagcattgaagggaaaagccttgaggaaaagaaggaattgctagccaagtgtgctgcaacaacactctcatcaaagttgataggtggcgagaaagaattttttgcatctatggttgtggatgctgttcttgccattagcaatgatgacagacttaaccttcttggaataaaaaaggttcctggaggcaccatgagagattccttccttgttaacggtgttgccttcaagaagacattttcctatgctggatttgagcaacagccaaagaagttcttgagtccaaagattcttttgctgaacatagaactagaattgaaatctgagaaagaaaatgcagaaatcagattgtctgaccctttacaataccaatcaatcgtcgatgctgaatggaatatcatttatgacaagttggataaatgtgtcaaaagtggggcaaagatagtcctttctcggttggcaattggtgatcttgcaacacagtattttgcagaccgggacattttctgtgctggccgtgttgcagaagaggatttacaacgtgttgcagcagcaacaggtggtaccgttcagacatcagtgaataatgtcattgatgaggtacttggtacttgcgaagttttcgaggaaaggcaagtgggcaatgaacggttcaatatatttagtggttgcccttctggtcaaacagcaaccatagtccttcgtggtggtgcagatcagttcatcgaggaagcagaaaggagcctccacgatgccatcatgattgttagaagagctcttaagaactcaacagttgtacctggtggtggtgctattgatatggaaataagcaagtacctcagacagcatgcacgtaccatagctgggaagtctcaattcttcgtaaactcatttgctaaagccctcgaggttattccaagacaactttgtgacaatgctggatttgatgcaactgatgtactcaataagctccgacagaaacatgcatctggtgaaggtgctaattttggtgtggacatcaacactggtggaattgctgattcctttgctaactttgtctgggaacctgctgttgtgaagatcaatgctataaatgctgcaactgaagctgcttgccttattctcagcgtggatgagacagttaaaaatcccaagtctgaaagtgcgcaaggtgatgcggctgctagcgcgatggctggccgtggcggaggagcgatgcggggccgtggtggaaggggcatgaggaggcggtaatcaatctacgccacgtttgtttagcttcgtcgctcgtgtggtttaaatttaggagtaggttatttgcagtctgctctttatcgaagtttttcgtgacgctacatgcatgccctgctcgatgtatttccaattgtgcttgtcagattcgtgaaaacatggcaaatatttttgtgatggttgcctactagcttttgtaacttcacatgttgactgtttcaatcaatgggtattcttcttgatcctccgaaatgctaactggcagacagcacttgcctcaagatgctggacctgctatttctcagacatctaacggaactttccctagtcttgaaaagaccgaagaagtttgcaaagaagctgggagagaattaccaacagataaatctgctgcatttgaagatgagaatagcagggcatgcaaatcaaaggcagagctaaagcagcaacaatttcattctgagaagagtagcagtttacctaaatctgcagaaggtcatatcccatcttctgctgatatatcaagaaaagaaacacctggggttcagagactcaaagagcagggaagtctaagaacagaaagggaaagagagaaggacaaagaggcttctcggagactggaagaaacaaaagaaagggataaaaaatttgagaaggaaagggaaattgctgaagagagggaaagaaaaaaactagaagaacaggaaagggagagggaacgggaaaaggatagacttgctgttgaaagagctacaagagaagcacatgagagagcatttgctgaggctcgtgaaagggcagaaaaaatagcattggaaagggttactgcagcacggcaacgggcttctgctgaggcccgagaaaaagaagagagagcgagtactgaagcagctgctgagagggctgctaggataaaagcagaacgtgcagcggttgaacgagcaactgcagaagctcgagagagggcaattgaaaaggctaaggctgaaaaggctgccgcagaggcaagagaacggagagaacggtacagatcctctttcaaggagagttttaagtccagcaatctggataatcgacaggacacacagtttcagagagcggtttccagtaacttaatgagaaacccagattcatatagcaaagggcttgaggttgaatcagctttaaggcataaagcaagattagagaggcatcaacgcacagctgagcgtgtgacaaaagcactagctgagaagaacatgcgtgacctgctggcgcaaagagagcaagcagagaaacataggttgtctgagtacctagatcctgagatcaagagatggtcaaacggaaaggaaggaaatctgcgagccttgttatccacattgcaatatattcttggagctgacagtggttggcagccagtgccacttacagagctaattacagctgctgctgtgaagaaagcctacaggaaggcaaccctttgtgtccatccagataaattacagcaaaggggtgctacaatcagacagaaatacatatgcgagaaggtttttgatcttcttaaggatgcttggaacaagttcacttcggaggagcgctaggatggatgctgaaacagccgatttattttcgagacaggaaattcgttagtaattatatagccatattgttagtttgttaattcaatattggtgtaaatatgcagttctagatatcttgctagatgatgatgacgctcgtcgctccttgaatcgattcaataaaaaagcttcattgctcctaaaaaacaacaa

SEQ ID NO: 50277 - DNA, 350 bp, Oryza sativa
  Clone ID: PAT_MRT4530_5277C.1
gcgtgaaggagcatctgtccttcataacgccatgtgcacagatgagggcatattctgttattgcgatggacacagtccacaccgcacatgaaaattcaacaacgagtgctgaataccatccatgtgatgttgatgacgttcacaagccgcatagtgctgtcacgattggtgcaatgcgtgaggcattggatcttaactatctcatcctaacaccgctgagcagttttgtgcaggctgctgcttaaagtgatgcaaggaagataggaggtcgtagtctgaatggaggggaggaagtgcccaatgcagacactgctcctgcttttgctagggaccaactaatcctgggaatt

SEQ ID NO: 50278 - DNA, 259 bp, Oryza sativa
  unsure (1)..(259): unsure at all n locations
  Clone ID: PAT_MRT4530_52780C.1
acgacattcgactcatctntaacncctcntcctnngncncnaactccnncannctgnggccctnaantcctgcagagtnataacctgtgnacnccncgnnacggacggtggantctctcttcntncacgntnctancntnggtcaaaccatatcttncngatgccanctctatacttngctgctntcttcttncaacattcntatcgtncacgnctanatntntannccggattgcntcaantgccactanggattgct

SEQ ID NO: 50279 - DNA, 467 bp, Oryza sativa
  Clone ID: PAT_MRT4530_52781C.1
cgtccgggggactctgtcgtgctgccctgcattaatcatatccgccatcacccctggataggacctcagcttcatgggcgcaactcctctttctggttacctgactctctgacccaaggccgtcggatgccgtgtgcgcgcgttgacagcctacaaggccgtgatgcaggattatgcgctaaggattggggtacctgcggaatcaccttgtgacctaactgctcacagctggcagagagccgagagagagacctttctctggcgaaaccccataagctccacaccaccagagcaccatgacaaagataaaaacgaaactaaaaggtggccaaacccgacaggactatattgttcccaggaagaagatcatgtaggctatcggaaacgctcaactgctcacgacatggggattgaccgaatacctgaacaactttgttcctggctgaagattggtgactaactgataa

SEQ ID NO: 50280 - DNA, 440 bp, Oryza sativa
  Clone ID: PAT_MRT4530_52782C.1
ataattgtgctacaaaggtctggagttatgtcaatgtccaaatgaattgtgatgctcagttagaagggtggcatttaaatcctagtgatgcatacattgaggacaagcacttacaggaagctaaaagcatagttaaagaaatgcatgaaactatttctgatgttaggagttctgcactgtacacaaagtttattgatcatgtgaagaaagatgagagcgtttcttctcacatttcaagcatgttgggagctcatgaatgcatccaattggttatttatggccttgggagctttgaatttgatgtgaagtctcaatatcagcttgccttcgctcttcttctaaaggcagataatatattcccaattggtgacattgaaatatatgatccagcactctctcctgctgatgtcaaagcatgcttcgacttggggatcctctag

SEQ ID NO: 50281 - DNA, 288 bp, Oryza sativa
  Clone ID: PAT_MRT4530_52783C.1
ggggggggaaaaaaaattttcctttgaagggaaaaaagagggaaaagaaaaaacggggggggattccataaggttttcttaagaaaaagggaaaaaaagaattttttttttaaaacccaggaaacccccttttggaagggtccttaatggcccccatttgttgggcccccgggaaaatcacaggggaaaaggggaaaaatgaaacaaagggaccgttaattgccccaaaaaaaaggccttgttgaagttgccataaaaataggacccccggcccataaatgctgtttc

SEQ ID NO: 50282 - DNA, 4497 bp, Oryza sativa
  Clone ID: PAT_MRT4530_52784C.1
atgggctccgtgtcaccaccagcgccggaggaggacgcggccgccgtggagtcggccggggcggcggcgcgcatgttctggcatgagacaaagcggctgtgggccatcggcacccccatcgccatcggcaccatcaccaactacgccatcagctccgtgaccaccatgttcatcggccacctcggaaacctccccctcgccgccgcctccgtgggcctctccgtgttcgccaccttcgccctcggcttcctcctgggcatgggcagcgccctggagacgctgtgcgggcaggcgttcggagccgggcaggtgtccatgctgggcgtctacctccagcgatcctggatcatccttctcggcgccacggtcctgatggtccccgtgtacgtgctggccgagccgctgctcctgctggtggggcaggacccggaggtggcgcgcgcggcggggcggttcacgctctacatcctcccgggcgccttcgccttcgccgtgaacttcccgtcgggcaagttcctccaggcgcagagcaaggtgggggtgctggcatggatcggcgtggcggggctggcgttccacgtgggcatcacctacctcgcggtgtcggtgctggggtgggggctcccgggcgcggcggcggcgtacgacgtgtcgcagtgggcgtcgtcgctggcgcaggtggcctacataatggggtggtgcagggaggggtggcgcgggtggtccatggcggcgttccacgacctggccgccttcctccgcctgtccatcgagtcggcggtgatgctgtgcctcgagatatggtacctgggcctcatcaccgtcctcacgggggacctggacgacgcccagatggcggtcgactcgctggggatctgcatgaacatcaacggctacgagggcatgatcttcatcggcctcaacgcggccatcagcgtccgggtgtccaacgagctgggctccgggaggcccagggcggccatgcacgccgtggtggtggtggtggcggagtcgctgctcatcggcctcctctgcatggcgctcgtgctcgccttcagcgacaagctggcgctcgtctacaccagcgacgcccacctgctccgcgccgtctccaggatcgctggcctgctcggggtcaccatggtgctcaacagcgtgcagccggtgctgtccggtgtggccgtcggcggcggatggcagggcctcgtcgcctacatcaacctcgcctgctactacctctttggcctccccgtcggctaccttctcggttactacttcaacctcggagtcgggggggtttggggtggcatgctctgtggagttgcacttcaaacactcattctactctttgtagtctggagaacagactggaaggcagaggtagagcttgctctaccttatagtcatttcattaagagaaatgaggtttacaggttacaagttaaaggaaggccgagcttgattcggatttgttggccagctgcatccttgatccctaatcctcctttaatggatttttcacctttccaaaagaaagcacgacttattttgtcagttgtctcgatagatttctctgtccaaatacatatatatcatcgcctgccattgtcatcatcgcataggagttcccaactgaagaattgctaccttcctaatttaaggaaggagagtgcaaggcttgccagcaagaggacaacttgttccgttgcaaccgagccgccgccttccacaaccgaagaaccagagatggatcttccaaaggagatattcctgaaagaatacaaaaagcctgattacttatttgactcggtcaatttggaatttcaacttggcgaagacaaaacaatagttacatctaaaatagctgtatctccaggaactgaaggtacctcctctccacttactcttcatgggcgtgatctgaagctgctatcaatcaaagtcaatggcaaggaccttaaggtggatctgtttgtcttggtcagggatggaggtttattatgtccaagtgtgagtgaagattatatggttgattcacgccatttgactgtttcaagaccacctggtggtacattcaacttggaaattgttacagaaatatatcctcagctaaatacatcattggagggactttacaagtcaactggcaatttttgcacccagtgtgaagcagaagggttccggaagattacatactttcaggatcgtccagatgttatggcaacatatacttgccgtatcgaagctgataagacgttgtatccagtactgttgtccaatgggaatcttatagagcagggggatcttgagggtggcaagcattatgcattgtgggaagaccccttcaagaaaccaagctacttatttgctttagttgctggtcagttggattgcagggaggactcatttactacatgttctggccgaaaagtaacacttagaatttggactcctggtcaagatttagcaaagacagcgcatgctatgtattctcttaaagcagctatgaagtgggatgaggaggtttttggccttgaatatgatcttgatttgttcaatattgttgttgttccagatttcaatatgggagcaatggagaacaagagcttaaacatatttcaatctagacttgtgctggcatcaccagagacagctactgatggggattatgctgcaattttaggtgtcgttggacatgagtatttccacaactggactggtaatagagtgacttgtcgtgattggttccagctcactctgaaagaaggattgactgtattccgggatcaggaattctcatcagatcttggttgtcgcacagtaaaacgtatagccgatgtttctaaactcaggacctatcaatttccacaggatgctggccctatggcgcatcctattcgtccgcattcgtatatcaagccaccatacagatctgatattaattcttctaattttactggcagatggacaatttttataccggtttatgaaaagggtgctgaagttgttagaatgtacaagaccatgtttggagcttcagggtttcgaaagggcatggatctttacttccaaaggcacgacgggcaagctgtgacttgtgaagacttttatgctgcaatgtgtgatgcaaataacacccagctgccaaactttttacaatgtcaagaagtgccacctacccctggccaaccagttaaagagccgatgttcattcctattgctgtcggacttgttgattctaccggaaaggatatgcccctaacttccatttacagtgatgggatgctccaatcactcactagtgatggccagccagtcttcactactgttcttcaatttaataagaaggaggaagaattcatatttaacaacatacctgagaaaccagtgccttccttgttgaggggatacagtgctcctgttcgtcttgattctgatctgactgagagtgacttgtttttcctacttgccaatgattcggatgaatttaacaggttgctctctgtttcctgttttaagtcatcttctcttttattggagatttttaatctgagaattcttgcattccttaggtgggaagctggtcaggtgctgtcacgtaaactgatgctcagtcttgtagctgacttccagcaacagaaaacactggccctgaaccctaaatttgttgatggacttagatcaatcctgcggaacacaagcttggataaagaattcattgcgaaagcgataactttgccgggtcaaggggagattatggatatgatgccagttgcagatcctgatgcagttcatgctgtccgtacctttattaagaaggagcttgcccttcaactcaaagatgaccttctttcaacagtgacaaataacagaagttctgaagcttatacatttaaccatgatagcatggcccgccgtgcattgaaaaacacatgccttgcttatcttgcatctctgaatgaaccggacaccactgaacttgcatttgttgaatacaagtctgctactaacatgacggagcagtttgctgcactagcagcattgtctcaaaatccaggccaagttcgtgatgacacccttctggacttctataacaaatggcagcatgattatttggttgtaagcaagtggtttgctcttcaagctacatcagacatccctggaaatgttgctaacgttcaaaagttacttggtcaccctgcttttgacatgaggaatccgaacaaggtgtattcgctaattggaggattttgtgggtcccctgtgaatttccatgcaaaagatggctctggttacaagttcttgggtgaagttgttttacagctagacaagataaatcctcaggtggcctcccgcatggtgtcagctttctctcggtggaggcgatatgatgagagcagacaagctcttgctaaggctcagctggagatgatcgtgtcagccaatgggctatcagagaatgtgtacgagatagcttcaaagagcctggcagcttga

SEQ ID NO: 50283 - DNA, 727 bp, Oryza sativa
  Clone ID: PAT_MRT4530_52785C.1
gtaaagtccctccaatgatgtatttagctcaggatatatatctgtagcatcttcacagttgaatgtaccaccaggtggtcttgaaacagtcaaatggcgtgaatcagccatataatcttcactcttagggtcctcgccattgactttgattgatagcagcttcagatcacgcccataaagagtaagtggagagcaggtaccttcagttcctgtagatacagctattttagatgtaactattgttttgtcttcgccaagttgaaattccaaattgaccgagtcaaataagtaatcaggctttttgtattctttcaggaatatctcctttggaagatccatctctggttcttcggttgtggaaggcggcggctcggttgcaacggaacaagttgtcctcttgctggcaagccttgcgctatatagcgacaaggaaggcgtggctggtcttgtccaatgcgagacctacattaatacatcttccttccttaaattaggaaggtagcaattcttcagttgggaactcctatgcgatgatgacaatggcaggcgatgataagttgtcctctccccccagccagcgagcgatcgatcggagcaggaaggcgtggctggtcttgtccaatgcgagacctcgtcgcgtccccgcgagcgagcgagcgatcgatcgccagcagttcgccttagactgcccccccgaccaagtagaatctgcaacttgcgaagaaag

SEQ ID NO: 50284 - DNA, 1509 bp, Oryza sativa
  Clone ID: PAT_MRT4530_52786C.1
atggcgtcgcctccgtccgctccctcctcctccgccgccgcggccgcgcgtgccgctccccatcgcccgcgcttgcggtcgcggcgatctctccggccgccgccgcagccgcagccgcgggtgcttccctcttccgtcgcctgccgatcctccgctctccgggacttccaattcagaaatatctccacgagacccacaagcaggcgcgatgtccttccagttgcctctgcatttgatgaggatctgggtgatttctcgctggtgcacgctgatggggatgaccctttagaggttgttgtatattcaagtgagagcgactggagcgatgaggaggtcgtgttaaatccaacgagtgatgttgagttacctctaaagagcaagagccgctttgagggtgtagaggttctatcagcattagctggatttctttttgcaccagttgctgataacatgaagattcatcatttccggaggagagggaagcttatgtctccattctatagaaagccaacaccagcaatgggaggattgttctttgtacctattggcatttttgttgcaagaagacaggttggttcctcaactggagtgaatggagcagctattataaccctcatatttgcaatggttggatttcttgatgatatttcaaatcttgtcatggactgcaatcgtaaaataccgcattggatgagattatttgttcagattgttgctgggatttacttatctatctggttaagttctacaaatatttcaacaccatataacacgaaattccttgttcctcttcctcctcctcttggccttgcattcataggaaaaatctatctcgttttggctgcaatatgttctctttccatgggcactggagttacattggttgatcatcttgatggcttggctggtggcgtcgctgctttagcacttgctggattgtctgttgcttccctcccaatttgttcagaaatgagtgtttttggagcatcaatgtcaggcgcttgcactggctttcttttccataacagatatagggcctcaattgttatgggacgtgttggctcttttgcactgggaggagcaattgctacaattgcagcctgcagtggaatgttcattccgatgttcatcgcatgcagcatttttcttcttgagctgctcttggtaatatttcaggtcccttttcagatggctaagaagcacttccttgggacaaatagatatcccttgcgtattcttccctcgtattactttcttaagtcgtggggtatcaaggaaccttatattgtggctggcgcatacattatatcatgcctattgacggcatttgcaggatatcttggtcttgtttcagcgagtgatcttgcacgtccaagtcaaaggtccaaaatgcccctgacatatcgtaggcaaataacggttgatatgaattcagtggaaaataaggaatattcccaaaaatatttacagatttctacaagtggtcagaacacattcgctggtggttag

SEQ ID NO: 50285 - DNA, 783 bp, Oryza sativa
  Clone ID: PAT_MRT4530_52787C.1
atggacggcaaggtggccatcgtgaccggcggcgcgagcggcatcggcgaggcggcggcgcggctgttcgcgtcgtgcggcgcgacggtggtcatcgccgacgtccaggacgagctgggcgaggcggtggcggcgtcggtggcggggggcgggtgccggtacgtgcggtgcgacgtgacggacgaggcgcaggtggaggcggcggtggccgccgcggtggcggagcacgggcggctcgacgtgatggtgagcaacgccggcgtgctgctcccgacggggcccgtcgtggacatggacctcgcggctctggaccgggtgatgtcggtgaacttccgcggcgcggcggcgtgcgtgaagcacgcggcgcgcgccatggtgtcgcgcggcacccgcggcgccatcgtgtgcacggcgagcgtggcgtcgtgccagggcgggttcgggccggcggcgtacacggcgtcgaagcacgcggtgctggggctggtgcgcgcggcggccggcgagctcgggcggcacggcgtgcgcgtgaactgcgtgtcccccggcggcgtggcgacgccgctgagctgcgggctgacggggatgagccccgaggagatggaggcggcggcggagccccacaacgtgctccgcgggaaggtgctcaaggcggcggacgtcgcggaggccatgctcttcctcgcctccgaccaggccgccttcgtcagcggccacaacctcgtcgtcgacggcgccaccaccgccgtcaactacgccgtgctccagtccgtcggcctgtga

SEQ ID NO: 50286 - DNA, 212 bp, Oryza sativa
  unsure (1)..(212): unsure at all n locations
  Clone ID: PAT_MRT4530_52788C.1
aatttcctgttttaaagaaagaaatataaaagaaaaaaaaaaggggggcccgggcccccggctattcctaaaggaaaggttaattccccgttccggaaggggggcccccccaaaagnctttataaccggcgttacccccaggcctttttcctttgttaaaccaaaaaagttgggtccccctattagtgtgaagtttctgtaatttattaaag

SEQ ID NO: 50287 - DNA, 319 bp, Oryza sativa
  Clone ID: PAT_MRT4530_52789C.1
ccaaaccccaaaagggggggggggggcccccttaaaaaaaaaaagtcccccaatttttggccccccccccccaaaaaaggaaaaaaaattttccccccccctttacacataaaaaatttttaggtcaaattaaaaggccccaaaccccaaaaaatggggagggggagaccatccacttccatttttttttttgaaccaaaaataaaattcccccaaaataagcccctaagaaacccttgttaagccccttttgggaagcaagaccaaaaggccggccccggcaaaaatgggaaggtttatccccaacgggactttgcct

SEQ ID NO: 50288 - DNA, 110 bp, Oryza sativa
  Clone ID: PAT_MRT4530_5278C.1
actacaacaccaagcgtgctcaagcagtcaagctaagtggtgtactagtgcgcgaccagtgccaccatatgtgtgatgtgccgcacatggccacgcaccgaacaacctag

SEQ ID NO: 50289 - DNA, 349 bp, Oryza sativa
  Clone ID: PAT_MRT4530_52790C.1
aaaaaaaattggggggttttcaacaaaaaggttaaaccccataaaagcccatttccccaagaaaaaaatgggcccagggtttgggggggagaaaaaaataaaagggggggggcctttttaaaaaaaaagaaaaaaaaaacgtgggttgaaaaaagggcggtccccccaaaaaaacccaaaaaaaatttgggcccgcctttttttttaagaaaaaaaaggggtacaggctttatacccgaaaaaaataccccccgggggttggcccaccccggaaggccaagagtgtccccacccggggaccctctgggggccgggccttccccaaaaaaaggggggggggctacccccc

SEQ ID NO: 50290 - DNA, 531 bp, Oryza sativa
  Clone ID: PAT_MRT4530_52791C.1
atgtcggctgaagtatgcggacggacttgcaactggcggaaatccagctcgcaatggaagatatctctgatgggcttctcaaaatctgaagcaacccggcgtccccgccccaccctgccgccggcatcgaagcggcggcatcgacggcgcgtggcgagcggcgagcagggcacggctatccctccgcccgtcgccgcctctctacctccgcaaggcgagcaggacacggggcgggttcggcgattcgtccggcggcgactccggttctgccccgagtgcacgcacacgccttgcccctacgccgcgtcgtcctcatccccttcctccggccaagggtggaataggaatatgaactggggaaccggtacccataggagcccgtcgcccaccaatgggtctctcggctgtgtcactccgccaaaaagcggcgagaggcgcatccctcagccaggggtcgcgtcgcatcgtggggagccaggggtcgcgtcgcatcgtggggaggcggctcggacggaaaagcggacggcatag

SEQ ID NO: 50291 - DNA, 721 bp, Oryza sativa
  unsure (1)..(721): unsure at all n locations
  Clone ID: PAT_MRT4530_52792C.1
cccacgcgtccgattcggtctcaaccaggaggtnccacttantcccaatggtngtaatattgatgtcacttcttcaaacagacttcgttacatccacctagtggcgaagtattaccttcacgatcgcttgaggcgacaaagctggtgcttttttcagtggcctgtacgaaatcatcccggtcgatctcttaagcatcttcaacccgcctgagcttcaaancctcatttcaggcanccaaacgaccatcgacattgacgatcttcaaaacaacacaacctatgcaggtggatatcatcgattggatgtnacgatcattcgattctggaaggttgtcagagccatgagcttcgaggagcaatcgctccttctcaggttcgtcactgcatgtcctcgcccaccatcactgggtttctcgtccctgaccccgcgattcaccattcagcggatagataatgatgccagcaatcaacgtcttccatctgcgtccacttgcttcaacatcctcaaactccctacataccccagcgagacaatcctcaaggaaaagatgctctatgcgattacttccaagtcaggattcgatctatcttaacgatcttcgcgaggagtttttaattaaagatgtattctaggaaattttgaggataatttaggagccagagagagggattgacaattgtaaggagtgaaaatgtataatcggtaaaaaaaaaaaaaaaa

SEQ ID NO: 50292 - DNA, 128 bp, Oryza sativa
  Clone ID: PAT_MRT4530_52793C.1
gagacgcactctagctaatgttcgtaggctacggttcactctaagctgtttacgtactcttgtgacagctaaaattgcatttggggtttccagttatgcccttgttatatccacctaggttgcttgta

SEQ ID NO: 50293 - DNA, 278 bp, Oryza sativa
  Clone ID: PAT_MRT4530_52794C.1
ctgcaggaattcggcacgaggcgtgcgagctttttctcgtctgccgcacacgtgttgtactatacccctttgtggggttctttgcctcatataaggttagaagaaggttagaagaggctagatataatcagcattgcagccttcgcgacaagttcagaagatatatggcaggaggcagtaagacgcggatccatgcctcgctcgtttccactctcctgctgctgctcccattggcgtctgcgatccacaggagcgacttcccggcgtcgttcctcttc

SEQ ID NO: 50294 - DNA, 1395 bp, Oryza sativa
  Clone ID: PAT_MRT4530_52795C.1
atggagcttagcatgatgtatgatgagctctacacgaaagccaaagtgattcaaacagggaagggcaccatccttcgttgtgtctccctcacctccacagtggtggcttttgttctcttcatcctgatgagtggcagcaagcaaaggtattacaactcaattggagttgatgttgcaataacctatatgttatttgtaggagctttttgcttggaggcttgcgccatcatcattgccatggtttcaccgagagcgtgggcatccatggaagctcgaggtggaggatgcaacagcaggcagtataactttatgagctcccgcctggctgatggcaagtcgaggataaccgaggagatgatggccattgttggagctaaggaggtgtggagtaactttcggcacactaggcatggtccagtcaccgatgaaatgaaggagcttatccaccaagaaattgataataacaagagcagcgggagggatgatgatattcaagagaaagaggtacattccctgatgcatacatgcgaggtgatatctgactacatgttcttcctgctggtcacgcagcctgccatgctgcctgttcaacgcaatgtgtatgatttgttagcattggttttgaacgatgccggctatgcacgtacctccagcaaggagcagtttcttgagacagtggctagcggtgagtactcgtgggaccaaccattcatggacttcagggcagcacctcctgatgacatgttgcagcagggttggaagggtttgcatgcagcgctgcaagtaatgttgcagatctgggtgcggctgctgatctacgcggcgggcaagtcccagcacgcacggcggctgagcatgggaggggagctgctcaccttcgtttggctcctcatggcgcatcgggagcttggagacatctataatatccagttccagcttgtggaaaaagagaaagacggcgagttgtttgcctttgccatgggcgagtcagatatgatcgcagtcgaagcccagaaggccagaacgaagtggccgaaagcccgaaatccgtccggaaatgtgaagaatacgtatccgcgcatgatgatgaagcccattgcgatgcatcagcaagtgttcgacaaggacacgttcagctccgacgaccggatgggcgatgtggaggtggacatccagccgctgatcgccgcggcgcgagaacacgagagctcggccgccatcgccggctcggtggaggtcacgaagctgctggcgagcgacgacggcacgctggccagggacagcgtcatctccgtcgtcgacggcaaggtgaagcaggacatcgcgctgaggctccagaacgtggagcacggggagctggagatcgagctcgagtgcgtgccgctcagccagtag

SEQ ID NO: 50295 - DNA, 213 bp, Oryza sativa
  Clone ID: PAT_MRT4530_52796C.1
atggcggtggctcttactataacagaacatgagcgagcggcggtcggcggggtggtggccaatgttagccgcgaggaaggcataccaatccgacgtattgacaagcggctcacccaccgactggatggaggatatgaaaggaggagagaaaggacagggcacagcggcgaccggcaaagttactgcatttttggacatgcagttctggagtaa

SEQ ID NO: 50296 - DNA, 262 bp, Oryza sativa
  unsure (1)..(262): unsure at all n locations
  Clone ID: PAT_MRT4530_52797C.1
actgcttgaattcgaaacatggattcgaaacggaggggttttgagttcaaattgtcttgcctggcgcaaatcttgcaaaacaagaagagggggaaaaagagagagtaacagacatgaggggtgaagggggaaaacgtgcgggctccggctggccctaccgcccccttcccgtacgacgtgctccttgcggcgagcggcgacggcgacccctcgtcgccgcggccaccgtctccatcgccgncgacgtcttcttcgtcgccgc

SEQ ID NO: 50297 - DNA, 711 bp, Oryza sativa
  Clone ID: PAT_MRT4530_52798C.1
atggccaaacacgagcatgtctcttccaagcgtctcaccgtggccgggtatgcgtgggagatccactacaccccaggccacgatgcgcactggcactactgggtcgccttcaagctcgtcttcctcggcatcggcgagcaggcgcagcgcgccggcggcgacgacgacgacaacgacgctggcgccatcaaggcggagctggaggcgtcgggtttcatcaccggcgactccttcgccgtgcgctgcaccatcacggtgctcagcaagaacaccatcaactcggccgagccgtcccccgaccttcacctgcagctcggtgagctgctgcggagcgggagattcgccgacgtcgagttcatcgtttccggcgtgtccatcgcggcgcacaggtgcgtgctcgccgcgaggtcgccgtccctcgccgccgccgtcctgaaaggtggcacgaggaagaaggatgggtcggtgcgcgttgaggtcaaggacgacatgagagccggcgtcttcagggcgctgctccatttcatctacaccgacacgttgatggagctcgactggagagaggatggttctgatcccctgctgccgaggacgatggtgatgagcttgaatgaagccgcgggtcggtatgggctggagaggctcaagcagatttgcgagaatatgcttggatttgacgatgcttgtagtgcagattgtgctgtcatgtaa

SEQ ID NO: 50298 - DNA, 882 bp, Oryza sativa
  Clone ID: PAT_MRT4530_52799C.1
taccaccaaacattaaacggaacaagatattttgtttcagtaacaacaccagacatgttatttatctcaattagtatgagtggcctttatgctttgggaaaaataatgcaggcattctagaagcctcattacgtaagcactgcgctgcgcagcaatccttgagataataccaatgagttaagtgtactcatcgggatttgtctggcttctaataagtgggataccatcttctctccacacaattcggtcctcacatagggcagtaactgcctcaacataaacctgatgttcctcatgaaggactcttgtagccaattgctctggagtatcattggcttgcacaggtacaaccctttgggctagagtccttcctgtgtcatagtgctcatccacaaagtgcacagttggacccgagtacctggctcctgatgcgatgactgctttatgcaccttcaaaccataataacctttgcctccaaatgccgggagtagtgaagggtgaatattcaaaatggattttggatatgcctgaactagctcaaccggtataagcttcaggtagccagcaagtagaatgaagtctaccctgagttccctcagaccattcaacagctcatcagtagataccccctctggagcagacttcaacttagggaacacaacgaccggtatgccattacccctcgcatgctctgctcctccacagcctggtttatcggtaaccaacgcaaccacaacgccattcacgtccccacccagagcggcatcgtggatcgcccggaagttggatcccccaccggacacgaacaccacgagcctcttcctctccaccccgacacccctagcctcacccccccttcgcccccgcccccaccgccgcat

SEQ ID NO: 50299 - DNA, 612 bp, Oryza sativa
  Clone ID: PAT_MRT4530_5279C.1
gttgtgttcattttagaaaaaatacacattatgtgggaatcgatactgccaagatcaatttacaagagaaaattacaaaagatatgctcctaatagatgacatggcagcagaggagacattacagctgcaaggtcttatccatttggctcttgaaaacctctcatcactatttctgtccctggttgagaatgagttcttggaccatcaaacttggatcgagttggatgagattatacgacctttgaagaagttccggaagctagcggagctgcttgatatgtcgttgaaatccatcacggccgcttgggaaagtggggagttaactaattgtggtttcacatcgtctgaggtacaaaattttgtcaaagcaatatttgcggattctcctcttaggaaggagtgcctattatggatttctaggacaccatcttaggatgcagaaatcaaactatttgttcttcactgattcattaggcatcttgtcattgcccttcgtttgtacagatctggttatgttgtgctttgcatttactttcatggatagtatggactatgggggtttcactcgatacagaaacatctatatattctggcagtacaacattaccaga

SEQ ID NO: 50300 - DNA, 498 bp, Oryza sativa
  unsure (1)..(498): unsure at all n locations
  Clone ID: PAT_MRT4530_527C.1
nnntgtnncnacgacgaaacatntnattgccncgngcangatggggtncnncggaaggggcccnatctacctggcnnccccgttcacccgcggaatgcttcngccctcacnnggatactcactgaccccagngaattccngatgtnaacagttaaaacccaaaacgaattggatgcccncaaccnttgggcgtcttgtnccactgtncaaccgctgtttnatcctgttcnatttcnggtnttgtgtaagtttgtccccctgggtnancacnacctatatntcttntccnttcntnccatttcctaattgtntnctgggaatatacntnttggnggganattgantcnggntgtgggaanaaaacccnttttttctntgnctnnatcnnttgttcncncnganttntnnntctccngggggggggnccgnnanccntancccncncttatnatntantnntctcctanaaatcncctngnccctccnttttaaaatact

SEQ ID NO: 50301 - DNA, 1140 bp, Oryza sativa
  Clone ID: PAT_MRT4530_52800C.1
acactctctcccttccgatcgtcgccggcggccatcggcggcgctagggttcatcgggttacgcaggacaaactgcgtaggcgaggcgcgggggaatctcgcgatggaggcggccgtcgcttccaccggctccggcctgcgctgctcgcccaatccgatgcctaagcagcagcacgagcggcgaagtgctcgggtgggcttcgtctcccagccgcgacctcgcgctgtccgctgcgagcggtcgccccatccggatgctcgagcctacgcggcggtggcggtgggggtggtggcgaaggggcgtgaggttgggggcgtcggggtggagagaaggaggctcgcggtgttcgtttccggtgggggatccaacttccgggcgatccacgacgccgctctgggtggggaggtgaatggtgatgtggttgcgttggttaccgataaaccaggctgtggaggagcggagcatgcgaggggtaatgggataccggtggttgtgttcccgaagtcgaagtctgctccagagggggtttctattgatgagttgttgaatgctctgagggaactcagggtagacttcattctacttgggtggttacctgaaacttatacctgttgagctagttcaggaatatccaaaatccattttgaatattcacccttcactactcccagcatttggaggcaaaggttattatggtttgaaggtgcataaagcagtcatcgcatcaggggccaggtattcgggtccaactgtgcactttgtggatgagcactatgacacaggaaggactctagcccaaagggttgtacctgtgctagccaatgatactccagagcaattggctgcaagagtccttcatgaggaacatcaggtttatgttgaggcagttgctgccctatgtgatgaccgaattgtgtggagagaagatggtgttccacttattagaagtcatacaaaccctgacgagtacacttaactcatagtactacctcaaggattgctgcgcagcatgcacgtaatgaggcttctagaatgcctgcattgttttttcccaaggcatgaaggtcactcgtactaattgagataaataacttgtctggtgctgttactgaaacaaaatatcttgtgccgttcaactc

SEQ ID NO: 50302 - DNA, 261 bp, Oryza sativa
  Clone ID: PAT_MRT4530_52801C.1
cacatattatagttcaagcatactactagaatccaacaacaatgaacatcattttcatatttgctctccttgctagggttgcatgcaatgcctctgcgcggattgatcctcttagtcaaagctatccgcaatatcaactacagccgcatctcctactacagaaacaagtgctcacccaatgcagtgtgttcgtaaggaatacaaatagcatattgggaacctccttctgctaaccagctacctatacattgtataacaacc

SEQ ID NO: 50303 - DNA, 404 bp, Oryza sativa
  Clone ID: PAT_MRT4530_52802C.1
tatgcctcctttcttgccgccctccttttttttttgggggcttttgaaaggggggaggtgcacacatcgtcaagagtaatgagctgacttgatccggtacaaatgactgcgaacactgcccatcgacatttatctgtagcctagctaccagattgcttgcaggaaaatacctgggtgtcacactgtgacggcatagctgctatcgtaatttctaccacggggtcggacgtgcttagtttcggtaactcggggcatgcgatctgcggatgcttacagccatcctctgataaaatcgagcttacccgggctctcaggggggtgactcgcctgttcctccatgatctgccccgggttggtccaatgctgcacccagccaccgctgtttggaatgatgccaagtcttg

SEQ ID NO: 50304 - DNA, 1215 bp, Oryza sativa
  Clone ID: PAT_MRT4530_52803C.1
atgaatccgctgctgacggccgccgccgccgtcgtcttgtgcttcctcctccatggcgcggccgcctccggcgacccgttccctccacggttcaactccatcttcagcttcgggagctcctactccgacaccggcaacttcgtcctccagtccgccggcctcccgtccatccccttcaaccactccccctacggcgacaccttcttccgccgccccaccggccgcccctccgacggccgcctccccatcgacttcatcgcggaggcgctagggctcccactcgtgccgccgttcctggcgaaggaggcgaacgacttcggcggcggcggcggcgccaacttcgccatcgtcggcggcacggcgctggacgtcgggttcttcatccggcgcaacaacgcgagcgtgccgccgttccagagctccctccgcgtgcagatcgggtggctccggagcctcctgaggcgcgccggcaacgccaccgcggcggagcgcctcgcgacggcgctgttcgtcgtcggcgagttcggcggcagcgactacaggtacctcctctccggcggcaagagcctcgagcaggccaagtccttcgtgccggaggtcgtgcgagccatctgccgaggcgtcgagaggctagtggaggaaggagcgaggtacgtggtggtgacggggacgccgccggcggggtgcatgccgatggagctgaccaagtacgcggcagccaacgcgtcgtcggcggcggcggcgtatgatcgtcggacggggtgcctccggcggctcaacgggctggctcagtaccacaactggctgctccgggaggctgtggagcgcatgcgcggcaagtatccgacgacgaagctcgtctacgccgacttctacaagccggtggcgagcctcgtccggcgaccggcaaagttcgatcgacatcgatcagccatcgtcgtagctatagctcataaatgcgagtgtgcgacagtagccatgtacacacgtttcacgcagcaaccactgaaagcttgctgcggcgggggcgggccgtacaactacaaccctggagcggcatgcggctcaccgggcgcgtcaacctgcggcgacccgtcggcctacgtcaactgggacggcatccatctcaccgaggccgcatacaagtacgtcgccggcggctggctcaacggcgtctacgcttacccgtccattcttagcctcttggcccaataa

SEQ ID NO: 50305 - DNA, 345 bp, Oryza sativa
  Clone ID: PAT_MRT4530_52804C.1
ttttacgatataatctacttagtatccccctcttacataacttacaccgattttaactacacgtcgtttcttaaaagatatttgctctggtccaacaaaaagtatttcaagataccagtatctcatggtaccaagatccaacgatcggaaacgatttggtaccatgaggtgacgaacacggcgacaggggatcagatcacggcgaggatcgtggaccagtgcgccaatggggggctggatttagactgggacaccgtcttctccaagatcgacagcgacggtcaaggctaccagaatggccacctcatcgtcgactaccagttcgtcgactgcggcgataactag

SEQ ID NO: 50306 - DNA, 2765 bp, Oryza sativa
  Clone ID: PAT_MRT4530_52805C.1
gtccgaaaataggtcgggttcaaaattccccaacctccggtcgcgtagggccgtgtaaataaggcggtctgaaagtaaccaagaagccgtcgatgcctaccgtgtccaaaaacatttccttgtccctcgccttcctcgcctcgcctcgcctcggctctcacacgacgcctcttcctctcgctactactagctcaagctaagctagcaagagcattccttgggctttttttcttgttcggggttgagaggcaatggcggtgatgactgatgtgtcgaccaccgggacggcactccggaccccggcggcgggggcggtgaaggagggcgacgtcgagaagctccggttcatcgacgagatgaccaccaacgtcgacgccgtgcaggagcgcgtcctgggggagatcctcggccgcaacgccggcacggagtacctgaccaagtgcggcctcgacggcgccaccgaccgcgccgccttccgggccaaggttccggtggtgtcgtacgacgacctgcagccgtacatccagcgcattgcgaacggggaccgctcgccgatcctgtccacccaccccgtctccgagttcctcaccagctccggcacgtcggccggcgagcgcaagctgatgcccaccatcatggacgagctcgaccgccgtcagctgctctacagcctcctcatgccggtcatgaacttgtatgtgcctgggcttgacaaggggaaggggctctacttcctgttcgtcaagtcggagacgaagacgccgggaggcctgacggcgaggcccgtgctgacgagctactacaagagcgaccacttcaagaaccggccgtacgacccgtaccacaactacacgagcccgacggcggccatcctctgcgccgacgcgttccagagcatgtacgcgcagatggtgtgcggcctgtgccagcgcaacgacgtgctgcgcctcggcgccgtgttcgcctccggcctcctccgggccatccgcttcctccagctcaactgggagcagctcgccgaagacatcgagtccggcgagctcacccctcgcgtcaccgacccgtcggtgcgcgaggctgtcgccgccatcctcctcccggaccccgagctcgccaagctcatccgcgccgagtgctccaagggcgactgggccggcatcatcacccgcgtgtggccgaacaccaagtacctcgacgtcatcgtcaccggcgcgatggcgcagtacatcccgaccctggagttctacagcggcgggcttcccatggcgtgcaccatgtacgcgtcatccgagtgctacttcggcctcaacctccgccccatgtgcgacccctccgaggtgtcctacaccatcatgcctaacatgggctacttcgagttcctccccgtggacgagaccggcgcggcttcgggcgacgccacccagctcgtggacctcgcccgcgtggaggtggggcgcgagtacgagctggtgatcaccacctacgccgggctgaaccggtaccgcgtcggcgacgtcctccgcgtgacggggttccacaacgcggcgccgcagttcaggttcgtgcgccgcaagaacgtgctcctctccatcgagtccgacaagaccgacgaggccgagctgcagcgcgccgtggagcgcgcgtcggcgctgctccgcccgcacggcgcgtccgtggtggagtacaccagccaagcgtgcaccaagcgcatcccgggccactacgtcatctactgggagctcctgaccaagggcgccggcgccacggtggtggacgcggacacgctgggcaggtgctgcctcgagatggaggaggcgctgaacacggtgtacaggcagagccgcgtcgcggacggctcgattgggccgctcgagatccgggtcgtccgcccgggcacattcgaggagctcatggactacgccatctcccgcggcgcgtccatcaaccagtacaaggtgccacgctgcgtcacgttcccgcccatcgtcgagctgctcgactcgcgcgtcgtgtccagccacttcagcccggcgctcccacactggactccggcgcgacgtacaacgtctcctgcccacccgagccgcactgtcccgtcccgtccccgggtcaaccacctcccccgcgcgcaccacgacgttggaccttgcgtgttggtgttggcggtggtggtggattgggctggttggcttccacgatggcggcacgcggtgcaggtcaaggaggccggggtccgaggattcaacggctgctcgcccgtctcgcgcctcacacgcacgcgcgcccgtgcgctgcgtcggaaacgtggccgtgtggccgagacacagccacacagggggcgggttcccttgccggagtcccgcgcgcgcgccgctcgggctacctacctaggcgggggcggcaacgagcgattgcgtgcgggccgcggcgaggttttgcaggagggcgggcgggggcgcggggcgacgtgccgtgacaagaaccggcgctttgcgtgggaaattcgtccccagggattcatggacacgtcgaagatgaacgcgtgcaaggaggtgccgctgttcccgaggagcaaaagaaaggctcacattgctgctggtgcccgcttggcaagcaaagtagagagcgaggcacacacgcacgcacgacggcgcgagacggtccggaaacgctgcgggggcgcgtggttcatgtgggctcggccggtcaagggagagccgaggcaatccagctcgtcgcgctgcctgcctgactcctcgtcatga

SEQ ID NO: 50307 - DNA, 1737 bp, Oryza sativa
  Clone ID: PAT_MRT4530_52806C.1
atggtaacgcctctttcaaacagcaccaagagcaacgagcaatgtgacattgaaagaaaacatgatggttcaattgattcagtggctaaaagaaagggatcactctgccaacaagttgcaaattctgatggcgagagaagaacaagatattcagggcctaaccttccagaggtcacttgcaagcacttgccttcatactggcccttgcttcctatgaaggattaccaggggtatgtcctctcattagtaaatcacagagttactattggcaacttggaagtgatgaggactgcctatagacttctgagtttccctaccacaaacccgaagggttatggcaaagctactagactgttttcccttccaattgatcaagctgtcaccttgacggacatctggtgccatatacactccctgatgccattcaaagatgctgcccgtgctgcatgtgtgtctcatgcttttcgtcgttcctggcaacaccgccccaatcttatattttgtattggaacactggggttggatttcatcaacaaaattgatcgtattataaaaaaccactcaggcattggcatcaaatcgctacagttagaatatgatactttttgcaatgctagaaggagcgctagcatcagctatcatctcaataattggcttcagattgctgttacaccatggattgaagaactaatccttacactgtcgctatcttcatacaatgtggattacaatttcccgtgctcacttttatctgatgggagaggaagttcattgcgacatctttatcttggcagttgtttctttcatcctacagttaatcttgaattgagaaacctgacgaggttgcatctggttactgtacatattacaggagatgagtttgggtgccttctttcgaattcttatgctttggagcgattggaacttaaatattgttatggaataatttgtctgaagataccttgcctgttgcaacgccttagccacctggaagtgtttgaatgcagaatgctgcaagccatagagaataaggctccaaatctttgcagttttgaccttggagctaggcaggtacggctcttgcttggtgaatcattgcaaatgaaaacactatccttggactatcctagtgccgtctattatgctcgtgcagagcttccatccaatgtgccaaatcttgaaattctcaccatttgctcggatcacgagatggttgatacaccaatgttgcctagcaaatttttctatctcaagtgcttgactattgatcttgcttggagactttccccagcctatgattatttctctctgatttcttttcttgacgcttctccttccttggagactttttgtctcgagatatcacaggaccgaatggagaatgaattgattattggagatatgtcacatatgaggcaaatgctagaacaccgtcatgacaacctccagagcgtggagattattggcttttgctatacaaagagcttgatcgagctaacatgtcatattcttgacaatacaacgtcgcttaagcaccttaaactggatactactcgtgatgtttttagctgttctacaggcaaacacgacaaatgcttccatatgggtaaggatatgctcaccgaagccaagaaagcagttttggcaattgaaacttacatcgagccaaaagttccctccactgtcatgctaagtgttgtgaaaccttgcaaccgttgccatgttgctgaatcttag

SEQ ID NO: 50308 - DNA, 474 bp, Oryza sativa
  Clone ID: PAT_MRT4530_52807C.1
cttgactgtttgaccaccatgtccaacgtctgcttgcaatatcgctattaccccaaagacccggcacataccttttgttgcaaagactgcgctagaaacgctgccaacaatgccccaagcctgattgagattccaagtgaccatgtcatgtacctcaacgccgcttccgccttttatgaaggttggaacggaaccccgccacttattcggaccatctacctagtcacctggacccgagagtctcgtaatgagtttgaggcgtaccgtgaccaaatcgagagccgtggaaactttatcgctatggacaagtacgcaggcaacgagcggaaacggttccgtggtgccgagagagcttgcactattggcgaggatggcaacgtcacaatgtgctacaacggtgattgtaagctttgtgaggcgcttcgtgaaggattcaagccatatctggatctcaaacgacgtactggataccac

SEQ ID NO: 50309 - DNA, 560 bp, Oryza sativa
  Clone ID: PAT_MRT4530_52808C.1
gtcaaggtcgacgtcatccatctgctggagatggtgtgcgaggagtacggcggtcgggtggagctcgcgaaggcctacttcgctgggctgacggagtcggtgcggcgccacttcaacggcaacggcgtgatcgcgagcatggagcactgcaacgacttcatgctgctgggcacggaggcggtggcgctgggccgcgtcggcgacgacttctggtgcaccgacccctccggcgaccccgacggcaccttctggctgcagggctgccacatggtgcactgcgcctacaactctctgtggatgggcgccttcatccacccggactgggacatgttccagtccacccacccctgcgccgccttccacgccgcctcccgcgccgtctccggcggccccgtctacgtcagcgacgccgtggggtgcacgacttcgacctgctccgccgcctcgcgctgccggatgggaccatactccggtgcgagcgctacggttgcccgacgcgcgacttactttttcgccgacccgctcatgacgggaagacgatgctcagatcttgaacgtga

SEQ ID NO: 50310 - DNA, 275 bp, Oryza sativa
  Clone ID: PAT_MRT4530_52809C.1
tttttttttttttttttttttttttttttttttttttttttggaaaaaaatgcccatatatatatatatatatatatatggatgtattattagaaaaaaaatggcttatatttagatccataagaaataagggatttttccccagttggggcaggggcccttccggaaaaaaacatgaaagaatgggggaaatataagcaaagaataaagctaggtcgtcacttattttttccagaaatggccaagggccattttctaggggttcgacccttaac

SEQ ID NO: 50311 - DNA, 399 bp, Oryza sativa
  Clone ID: PAT_MRT4530_5280C.1
tacgtcggtctttaccttatggcccccacctctggcgcggctgcggtcggtgagatggccaagcggctgccgccgaggtgggagacgcgtctgctgactctgcgggctctagatcgctcagatccgttgtacgacgagaaggaggcgagcgaactggacaggcaggacgccgcgctcgaggcgcccgggctgccggtccgcgtgtctgcggcgacgcccaaggattcctgcgggtccagcgccatctgcagcttggagtcggacatggacgttgagaaggcggatgtatgacatggcaagtccaagtacttattggagacggttggtaacatctgcacgaacaaggtgcagcttgacttgaagagcagggaagatgaaacaaaagcttggaaaaagggg

SEQ ID NO: 50312 - DNA, 5862 bp, Oryza sativa
  Clone ID: PAT_MRT4530_52810C.1
atggccgaacaagcaaaggcgcacaacctctctccgagcgttagcggtgacgatggggagccaaacccacgccgtcgagctcgtactccaccgcccccaccacgccaaagtcctaggcggaaggaggcgctcgagagggtcgaaggatccgcgacttcgacatccacgggtgatggggaagggcggcgagatggggagcgtcgcctcctcgtctacggcgacggcagcacgccccagggcgcgctccaagctacgggcgcgctcctacgtcacccgcccattgtccctgacccggagtctccagcccaacgttggctggacgacgtggccaacttggtcatgacggcacggcagcgcctaggtgctggtgggcggtcctccgccaccaagacctctggcgctgctaccaccggctccgtgtcgtcaaggcggagggcgcggcgagcggcggctgttgctcgccattcggccgccactccttcgtcagcgcctccgacccaggaagatcagcgtggggggccagatgcccgcatcgatatcgagcgccggcgtaatggtcggcatgctccccacgcaacggagggcgcctcctcgtccggagtgtcacctcaacacggacgcggggatcagccctccgtgcccccggttggtggtgtcggctgtagagcctttgtggcgagccttcggaacgtccgttggcccccaaggttccggcccaccatcgccgaaaaatatgatgggagcgtcaaccccgccgagtttctccaggtctacacgaccgggatcgaagccgccgggggtgatgacagggtcatggcgaatttctttcccatggccctgaagggacaggcgcggggttggctaatgaacttgccacccgcgtcggtccactcctgggaggatttgtgccaacagttcaccatgaactttcaaggcacatatccgcgcccaggtgaagaagcggacctgcatgcagtccagcgaagggatgatgagtcacttcgctcatacattcagcggttctgtcaagtccgcaacaccataccatgcatccctgcacacgcggtgatctacgcgttcagggggggtgtacggcacaaccgcatgctcgaaaagatcgcctccaaagagccccagactaccgcggagctttttcagctcgcggaccgagtggctcgtaaggaggaggcatggacctggaacccctccggttccggtgtggcagcttcggccgcccccggatccgctgctcagacagggcggcgtgacaggaggaggaagaagaggtcagcccataccgacgacgagggtcatgtcctcgccgtcgagggcgcttcgcgggccacccgaaaggggaggcctgcgggcgacaaaaagatggaggtcggtgctcccagcagggagcgcccaaccggcaagtggtgcatcgtccacaacacttcccttcacgaccttgcggactgccgcgcagtcaaaagtttggctgagtggacgaggaagtggggggaggagaggaggcaggagcgccgagagggcaagtccccggcggttccttccggcaatcggcgaagtgaggccaagcagaaggcccccgccgaggacatcggtgacggcgatgatgacctaggtttccaagagcctggggccaccattgccactgtcgatgggggagcgtgtgctcacgtttctcgccggagcctcaaggccatgaagcgagagcttctagccgtggcccctactcatgaggcgacgcgccgggcgcggtggtcggaggttgccctcaccttcaaccagaccgaccacccaccgtgcgttgcccggggaggacagatcgcaatgccgattatcggtgtgacgccggggcacacttggccgctaggtcatatcgacctcccggtcaccttcggtggatccgccaacttccgcacggagcgggtgaactttgatgtggcggacctcagtctgccctacaacgcggtcttggggaggcccgcgttggtgaagttcatggcggcggtccactacgcctacctccagatgaagatgccgggccccggtggccccatctctgtccatggctacctcaaagtcgcgcttgcttgtatggagcagcgcgcggaccacctcgccgccgtgtccaagcccgagggtggcgacgagaggcttggcacatccgcccccgccgccccgaggcagcggatagtcacatgcgacgaggtcctggaagacgcgctcgtctctttcctgcgggcaaacgctgacgtcttcgcatggagaccggcggatatgcccggggtccccagggaggtgattgagcaccgtctcgccgtgcggtcgggcgcaaggccggtccggcagaaagtacggcggcaggccccggaacgtcaagccttcatccgcgaggaggtggcgcgacttctggaggccggattcatccgcgaggtcatccatccggagtggctggcgaacccggtggtcgttcccaaggcgaacggcaagcttcggatgtgcatcgactacaccgaccttaacaaggcatgtcctaaggacccttaccccctgcctcgcatagatcagattgtcgactccacagcggggtgcgaccttttgtgttttctagatgcatactctggttaccatcagattcgcatggctagggaggatgaggaaaaaactgcattcattacccccataggaacttattgttatacgacaatgcccttcgggttaaagaatgcaggtcctacttttcaacgtactactcgaatttctttgggtagccaaataggacgtaatgttgaggcttatgttgatgacttggtggtaaagacgcgcaaccaagagaccttactctcggatctagcggaaacttttgagagtctccgctccgcccgcataaaactgaaccccgataagtgcgtgttcggtgtacctgcgggcaagcttctcgggttcttggtctctgcccgaggcatcgaggccaaccccgagaagatacgagctatagagcggatgcgcccccccagcaagcttagggatgtgcaatgcgtcaccggttgcatggccgccctaagtcggttcatatcgaggctgggagagaaggctctacccttatttaagctcctcaaacgttccgggccgtttacttggacggaggaagctgaacgtgccctcactcagttgaaggcgtatctcagctctcccccagttctggtcgccccggagccaaatgaacccttgctactctacttagcggcgaccccgcaagtggttagtgcggcgttggttgtggagcgcgatgaggacaatcctcattccgcgcacccccaccctgtgctgacttggcccgggagagagcagggaggagaggcccccgagccgaacggtggcccaaggcccccgacgaccggagcagaccctctgcccgcttgtcagacggtgccaggtgcccccgacccccaggatggcccgagggccactgcgggaaggccgcacctatcgccctctgaccccgaggctaaccctgtgccgactcgacccgggagaaagcagggagaagaggcccccgagccgaacggtggcctaaggcccctgacgaccggagttggccctttgcccgcttgtccgacgacgccaggggcccccgacccccaggacggccccgaggccactgtgggaaggccgcccctgtcgtcctccgaccccgaggtcgtcggcacagaagatgagtgcaccctgcgaggccgcttggacaaagagcgccccagggatgtggcccctagcgaagaggatcggccccaccgaaaagtgcagcggcccgtctactttgttagtgaggccctccgggacgccaagacccgataccctcaggcccggaagatgctttacgctattctgatggcttcgaggaaactgcgccattatttccaggcgcatcgggtcacggtggttacgtcttaccccctcgaccaaatcttgcataatcgagagggtactggacgggtggtgaaatgggcaatcgaactttctgagtttgatttgcactttgaaccacgccacgctatcaagagccaggccctcgccgattttgtggcagagtggaccccagctcccgagcccggcgccggtgcaggggtcacgttgacctcgccgagcggagacgtcctcagatatttggttcgccttgactttcgggcgaccaataatatggcagagtacgagggactccttgcgggactcagggtggcagctggaatggggatccgctgcctcctggtgttaggcgactcccagctggtcgttaaccaggtctgtaaggagtaccggtgctctgacccgcagatggacgcttacgtgcgccaagtatggcgtatggagcgccattttgacgggatagagcttcggcacgtgcccagacgggataacacggttgccgacgaactctcacggctcgcttcctcgcgagcccagaccccaccgggcgcctttgaagaaaggcttgcccagccgtcggcgcgacccgaccccttaggggagacggacgcgcctgacaggcccccgatgcccgtcggagtccaggcctcgggacccgaggggagcgctcccagctcccttagattgattgcttggatcgctgagatccaagcatacctcacagataagactctacccgaggaccgcgaagggagtgaacgcgtccagcgcatctccaaacgctacgtgctggtagaagggaccctctatcggcgcgcggctaacggaatcctcctgaagtgcattcctcgagaacaaggcgtcgagcttcttgccgatatccatgaaggcgaatgcggagcccactccgcctcgcgcaccttggttggcaaagcctttcgacaaggtttctattggccgacagctctcaatgatgcagtcgacctggtccggcgatgcagagcgtgtcaattccacgccaaggaaatccgtcagccggcccaggccctgcagatcataccactttcatggccatttgctgtctgggggctcgatatcctgggaccgtttaggcgggccccgggcgggtttgagtatctgtatgtcgcgatcgacaagttcactaagtggcccaaggcttatccggtcgtcaagatcgataagcactccgcacttaaattcattaagggcatcacagcccggtttggagtgcctaaccgtattattacggataacggcacccaattcactagtgaacttttcggcgattacagcgaagacatgggcatcaagctctgcttcgcctcacctgcccaccccagaagcaacggccaagtggagcgcgccaatgcggaaatcctcagaggccttaaaaccaagaccttcaacatcctcaagaagcacggcgattcgtggatcgaggagttgccagcggtactctgggcgaaccgaaccacgccaagccgagcaaccggggaaacgcctttcttcctcgtctacggcgcggaagcggttctcccatccgagctcaccctgaagtcccctcgagccaccatgtactgcgaggctgatcaagatcagcttcgcagagatgacctcgattacttggaagagcgaaggcgacgcgcggcccttcgagccgcacgctaccagcagagcctgcggcgctaccaccagcgccacgtccgggcccgatcactctgcgtcgacgacctcgtcctatgccgcgtccaaacgcgtgctggattgagcaagctctcaccaatgtgggagggtccgtatcgagtgatcggcgtcccccggccgggctccgttcggctggccacgggcgacggcacagagctgcctaacccgtggaacatcgaacaccttcgtcgcttctacccctaa

SEQ ID NO: 50313 - DNA, 427 bp, Oryza sativa
  Clone ID: PAT_MRT4530_52811C.1
tggtttgactacgcgtgcggaacggcttctttcttctttcactggcggcgggggatcggagtttatcctcctgcaccggcggcatggcatatgagctcatcagaacgtaaatgggacgtgggagaatagcgcatgctaccttgaacggaccgtgcgtgtggaaggtgatctgcattggactaaccattggtctgaccagtggaggaatactgaagatgcataactggtactagcagaggaagacttgatccttgtacgacatgcttaagatgggccagatcaaggttgtcgcctaggagtagtgtttggtgttgaaagaactttgcctatgagatttgcaagttatgtgtgaaactatctggatagcatgacaaacctagagccggggagaatgtgatgaaaaataaacatagtaattttgtgaaca

SEQ ID NO: 50314 - DNA, 959 bp, Oryza sativa
  Clone ID: PAT_MRT4530_52812C.1
aggaaggcgaagacgatccctagctttacgatctctttctccctgtgcatgacgctgctacgatccagtagtgcttattattagagaaaattcgatccgtagcataggaaaaaacccggtaccaaaaaatagcacgacaaattttctacttcgaccagaagcacatgacactaattttcttgcgatttatagcactcccgtcacatttgccatccaaacatcaagagggcaatggaggcgcggcgaagaggccgtcgatagcggggagcaacctcgacggcgagtagcagcagggataggacagcggaggtgtgggctgcgacgccgagtacggccaccatggcgttgttcgccagcgccatcggcgtacaacggcccacatccatccacatcgacgctagggccgcccacgtcatcatcgtcgtcctcgtcctcaagcggcctctttgccgccgtcagtgaagaacgcggtttggtggcggtggcgcccttcgtcggtgggcttcggtttggggtgctccctggccggggacgacagcgcggaacttctccttgccgtcgctgtggttgcggccgatgacgagcttgctgatgcagcgccaccacgtgatggaccccgtcgacccgctcttccgtggggggcgcgtcaccgaacacgcggccaaacaagtggggaacgaagggtaaatgagtccgacaaaaattttctccactccgatctaacgccgttacttcaaaatgcgacggaaccgggcagcatggtcgatggcgtcgaggtcggagaggagggagccaggcagtacagtcaacggcgtcgaggtcggtgccggcctccccgcccgcgcccgagcgccaccacccgcggagagggatgcggtgggtggagatgagaaagagatagaggagagatgaatgcactgggtgggtgggtgaaaaccggttttaaatgcgtgggtggg

SEQ ID NO: 50315 - DNA, 1167 bp, Oryza sativa
  Clone ID: PAT_MRT4530_52813C.1
atgggccgatgggcgtacctctccgaggacctcctcgacgacatcgtccgccgcctcccgtgcgaggtcgaccgcctccgcatgagccacgtctgccgctcctggcgcgtggcgctcacgaaggccgagcccccggcgccgccgccgcctcccccgctcccgtggctcctcctcccggaagtcgacggcgagcacgggcttaccttctcctgcgtcctcagcggctggcgccgcacccaccccttcttcctcccgcacgcggcgcgccgcgcccgctacttcggttcgtacgacggcgcctggctcttcctcgccatcgacggcccgcaaggagaccaagcatacctcgacctccccaacgcgatccccctcaactgggatctccctccggaagcgcaggatctcgagagaatcgccatcgtcgccgccactctctcgtgcccgccgactgaacaaggatgcgtcgtcgccggtatcatcgtacttcctcaggccctcctccgcggagtcgcgttctggcgcatgggcgatcgcgtcgtctcggcggttttcgcggaggcgtggccaccggagcaagtggaggacctcatatacttcaagggaagggaaggccatgaaaatttccttctgctcaccgatggggaaaacatttacgtgtgtcaacccatgttccatggagatgacccgccaatggtgccagtattctcgaatttggtgcgcttcaagccgcgcggatccagcggccagcgggtccttgctcgctacctcgtggagtcccgaggggatattctcatggtcgtcaggtttcgctctgatcttcagtcgtcggagttccgggtgttccaacacaaagacggcgagtttggggagaacttgtggagcttgatgtctgagctcgatggccggatgctgttcgtcggacgaggctgctccagatcgtacgaggcgcgcgactacaggtaccctggcatggagggcgtctacttcttggatgaccggagcttccacgaccagatcgtggggttcgatggcgatgcacccaaggagccgtaccgctgcagcgacaacgggagatgttcgagaccaccttcccaggtcgagcgctgcttcccggagcggggccagtcgagatccaagtactcgcctccggtttggattctcccttga

SEQ ID NO: 50316 - DNA, 5994 bp, Oryza sativa
  Clone ID: PAT_MRT4530_52814C.1
atggctgaacaagcaaaagcgcacaacctctctccgagtgttagcggtgacgacggggagccaaacccacgccgtcgagctcgtactccaccgccccctccacgccaaagtcctaggcaggaggaggcgctcgagagggtcgaaggatccgcgacttcgacatccacgggtgatggagaagggcgccgagatggggagcgtcgcctcctcgtctatggcgacggcagcacgccccagggcgcgctccgagctgcgggcgcgctcctacgtcacccgcccgttgtccctgacccggagtctccagcccaacgttggctggacgacgtggccaacttggtcatgacggcacggcagcgcctaggtgctggtgggcggtcctccgccaccaagacctccggcgctgctaccaccggctccgtgtcgtcaaggcggagggcgcggcgagcggcggctgttgctcgccattcggccgtcactccttcgtcagcgcctccgacccaggaagatcagcgtggggggccagatgcccgcatcgatatcgagcgccgacgtaatggtcggcgtgctccccacgcaacagagggcgcctcctcgtccggagtgtcacctcaacacggacgcggggatcagccctccgtgcccccggttggtggtgtcggctgtagagcctttgtggcgagccttcggaatgtccgttggcccccaaggttccggcccaccatcgccgaaaaatatgatgggagcgtcaaccccgccgagtttctccaggtctacacgaccgggatcgaagccgccgggggtgatgacagggtcatggcgaatttctttcccatggccctgaagggacaggcgcggggttggctaatgaacttgccacccgcgttggtccactcctgggaggatttgtgccaacagttcaccatgaactttcaaggcacatatccgcgcccaggtgaagaagcggacctgcatgcagtccagcgaagggatgatgagtcacttcgctcatacattcagcagttctgtcaagtccgcaacaccattccatgcatccctgcacacgcggtgatctacgcgttcagggggggtgtgcggcacaaccgcatgcttgaaaagatcgcctccaaagagccccagactaccgcggagctttttcagctcgcggaccgagtggctcgtaaggaggaggcatggacctggaatccctccggttccggtgtggcagcttcggccgcccccggatccgctgctcagacagggcggcgtgacaggaggaggaagaagaggtcagcccataccgacgacgaaggtcatgtcctcgccgtcgagggcgcttcgcgggccacccgaaaggggaggcctgcgggcgacaaaaagaaggaggccggcgctcccagcagggagcgcccaaccggcaagtggtgcatcgtccacaacacttcccttcacgacctcgcggactgccgcgcagtcaaaagtttggctgagcggacgaggaagtgggaggaggagaggaggcaggagcaccgagagggtaagtccccggcggttccttccggcaatcggcgaagtgaggacaagcagaaggcccccgccgaggacatcgatgacggcgatgatgacctaggtttccaagagcctggggccaccattgccactgtcgatgggggagcgtgtgctcacgtttctcgccggagcctcaaggccatgaagcgagagcttctggccgcggcccctactcatgaggcgacgcgccgggcgcggtggtcggaggttgccctcaccttcgaccagaccgaccacccaccgtgcgttgcccgggaaggacagatcgcaatggtggtttcccccactgtttgcaacgtaaagctggggcgtgtcctcattgatggaggagcagccctcaacatcctttcccccgcagcctttgacgccatcaaggccccggggatgatgctccggccgtcccagccgattatcggtgtgacgccggggcacacttggccgctaggtcatatcgacctcccggtcaccttcggtggatccgccaacttccgcacggagcgggtgaactttgatgtggcggacctcaatctgccctacaacgcggtcttagggaggcccgtgttggtgaagttcatggcggcggtccactacgcctacctccagatgaagatgccgggccccggtggccccatctctgtccatggcgacctcaaagtcgcgcttgcttgtatggagcagcgtgcggaccacctcgccgccgcgtccaagccggagggtggcgacgagaggcttagcacatccgcccccgccgccccgaggcagcggatagtcacatgcgacgaggtcctggaagacgcgctcgtctctttcctgcgggcaaacgctgacgtcttcgcatggagaccggcggatatgcccggggtccccagggaggtgattgagcaccgtctcgccgtgcggtcgggcgcaaggccggtccggcagaaagtacggcggcaggccccggaacgtcaagccttcatccgcgaggaggtggcgcgacttctggaggccggattcatccgtgaggtcatccatccggagtggctggcgaacccggtggtcgttcccaaggcgaacggcaagcttcggatgtgcatcgactacaccgaccttaacaaggcatgtcctaaggacacttaccccctgcctcgcatagatcagattgtcgactccacagcggggtgcgaccttttgtgttttctagatgcatactctagttaccatcagattcgcatggctagggaggatgaggaaaaaactgcattcattacccccataggaacttattgttatacgacaatgcccttcgggttaaagaatgcaggtcctacttttcaacgtactactcgaatttctttgggtagccaaataggacgtaatgttgaggcttatgtcgatgacttggttctaaagacgcgcaaccaagagaccttactctcggatctagcggaaacttttgagagtctccgctccgcccgcataaaactgaaccccgataagtgtgtgtttggtgtacctgcgggcaagcttctcgggtttttggtctctgcccgaggcatcgaggccaaccccgagaagatacgagctatagagcggatgcgcccccccagcaaacttagggatgtgcaatgcgtcaccggttgcatggccgccctaagtcggttcatatcgagactgggagagaaggcgctacccttgtttaagctcctcaaacgctccgggccgtttacttggacggaggaagctgaacgtgctctcactcagttgaaggcgtatctcagctctcccccagttctggtcgccccggagccaaatgaacccttgctactctacttagcggcgaccccgcaagtggttagtgcggcgttggttgtggagcgcgatgaggacaatcctcattccgcgcacccccaccctgtgctggcttggcccgggagagagcagggaggagaggcccccaagccgaacggtggcccaaggcccccgacgaccggagcaggccctgtgcccgcttgtcagacggtgccaggtgcccccgacccccaggatggcccgagggccactgcgggaaggccgcacctatcgccctctgaccccgaggctaaccctgtgccgattcgacccgggagagagcagggagaagaggcccccgagccgaacggtggcctaaggcccctgacgaccggagttggccctttgcccgcttgtccgacgacgccaggaacccccgacccccaggacggccccgaggccactgtgggaaggccacccctgtcgtcctccgaccccgaggtcgtcggcacagaagacgagtgcaccccgcgaggccgcttggacaaagagcgccccagggatgtggcccctagcgaagaggatcggccccaccgaaaagtgcagcggcccgtctactttgttagtgaggccctccgggacgccaagacccgataccctcaggcccagaagatgctttacgctattctgatggcttcgaggaaactgcgccattatttcctggcgcatcgggtcacggtggttacgtcttaccccctcggccaaatcttgcaaaatcgagagggtactggacgggtggtgaaatgggcaatcgaactttctgagtttgatttgcactttgaaccacgccacgctatcaagagccaggccctcgccgattttgtggcagagtggaccccagctcccgagcccggcgccggtgcgggggttacgttgacctcgccgagcggagacgtcctcagatatttggttcgccttgactttcgggcgaccaataatatggcagagtacgagggactccttgcgggactcagggtggcagctggactggggatccgccgcctcctggtgttaggcgactcccagctggtcgttaaccaggtctgtaaggagtaccggtgctctgacccgcagatggacgcttacgtgcgccaagtacggcgtatggagcgccattttgacgggatagagcttcggcacgtgcccagacgggataacacggttgccgacgaactctcacggctcgcttcctcgcgagcccagaccccaccgggcgcctttgaagaaaggcttgcccagccatcggcgcgacccgaccccttaggggagacggacgcgcctgacaggccaccgaggcccgtcggagtccaggcctcgggacccgaggggagcactcccagctcccttagattgattgcttggatcgctgagatccaagcatacctcacagataagactctacccgaggaccgcgaaaggagtgaacgcgtccagcgcatctccaaacgctacgtgctggtagaagggaccctctatcggcacgcggctaacggaatcctcctgaagtgcattcctcgggaacaaggcgtcgagcttcttgccgatatccatgaaggcgaatgcggagcccactccgcctcgcgcaccttggttggcaaagcctttcgacaaggtttctattggccgacagctctcaatgatgcggtcgacctggtccggcgatacagagcgtgtcaattccacgccaagcaaatccatcagccggcccaggccctgcagatcataccactttcatggccattttctgtctgggggctcgatatcctgggaccgtttaggcgggccccgggcgggtttgagtatctgtatgtcgcgatcgacaagttcactaagtggcccgaggcttatccggtcgtcaagatcgataagcactccgcacttaaattcattaagggcatcacagcccggtttggagtgcctaaccgtattattacggataacggcacccaattcactagtgaacttttcggcgattactgcgaagacatgggcatcaagctctgcttcgcctcacctgcccaccccagaagcaacggccaagtggagcgcgccaatgtggaaatcctcagaggccttaaaaccaagaccttcaacatcctcaagaagcacggcgattcgtggatcgaggagttgccagcggtgctctgggcgaaccgaaccacgccaagccgagcaaccggggaaacgcctttcttcctcgtctacggcgcggaagcggttctcccatccgagctcaccctgaagtcccctcgggccaccatgtactgcgaggctgatcaagatcagcttcgcagagatgacctcgattacttggaagagcgaaggcgacgcgcggccctccgagccgcacgctaccagcagagcctgcggcgctaccatcagcgccacgtccgggcccgatcactctgcgtcgacgacctcgtcctacgccgcgtccaaacgcgtgctggattgagcaagctgtcaccaatgtgggagggtccgtatcgagtgatcggcgtcccccggccgggctctgttcggctggccacgggtgacggcacagagctgcctaacccgtggaacatcgaacaccttcgtcgcttctacccctaa

SEQ ID NO: 50317 - DNA, 352 bp, Oryza sativa
  Clone ID: PAT_MRT4530_52815C.1
cagacgcgtgggtggacctacactaacgggtacgattcaccaaggagctagatcaacatggatgaataacacaataacataagaatatatggacgagcgtaactggctaccaatctatgtgaggcagtcaacttctaagttgcatgcacatccgaccactccaattataatgactgtgcctggaacagagctagtaccatttacaggcttgttgcatgaaagatttgctctaaaacaatctgtagaagaactgggcaattcaggtttgttgtttggatgcaggaacctgaatatggtctacatatatgaagacgaggtgcaaaacttgattcatgacggttcactttttgag

SEQ ID NO: 50318 - DNA, 6084 bp, Oryza sativa
  Clone ID: PAT_MRT4530_52816C.1
atggctgaacaagcaaaagcgcacaacctctctccgagtgttagcggtgacgacggggagccaaacccacgccgtcgagctcgtactccaccgccccctccacgccaaagtcctaggcaggaggaggcgctcgagagggtcgaaggatccgcgacttcgacatccacgggtgatggagaagggcgccgagatggggagcgtcgcctcctcgtctatggcgacggcagcacgccccagggcgcgctccgagctgcgggcgcgctcctacgtcacccgcccgttgtccctgacccggagtctccagcccaacgttggctggacgacgtggccaacttggtcatgacggcacggcagcgcctaggtgctggtgggcggtcctccgccaccaagacctccggcgctgctaccaccggctccgtgtcgtcaaggcggagggcgcggcgagcggcggctgttgctcgccattcggccgtcactccttcgtcagcgcctccgacccaggaagatcagcgtggggggccagatgcccgcatcgatatcgagcgccgacgtaatggtcggcgtgctccccacgcaacagagggcgcctcctcgtccggagtgtcacctcaacacggacgcggggatcagccctccgtgcccccggttggtggtgtcggctgtagagcctttgtggcgagccttcggaatgtccgttggcccccaaggttccggcccaccatcgccgaaaaatatgatgggagcgtcaaccccgccgagtttctccaggtctacacgaccgggatcgaagccgccgggggtgatgacagggtcatggcgaatttctttcccatggccctgaagggacaggcgcggggttggctaatgaacttgccacccgcgttggtccactcctgggaggatttgtgccaacagttcaccatgaactttcaaggcacatatccgcgcccaggtgaagaagcggacctgcatgcagtccagcgaagggatgatgagtcacttcgctcatacattcagcagttctgtcaagtccgcaacaccattccatgcatccctgcacacgcggtgatctacgcgttcagggggggtgtgcggcacaaccgcatgcttgaaaagatcgcctccaaagagccccagactaccgcggagctttttcagctcgcggaccgagtggctcgtaaggaggaggcatggacctggaatccctccggttccggtgtggcagcttcggccgcccccggatccgctgctcagacagggcggcgtgacaggaggaggaagaagaggtcagcccataccgacgacgaaggtcatgtcctcgccgtcgagggcgcttcgcgggccacccgaaaggggaggcctgcgggcgacaaaaagaaggaggccggcgctcccagcagggagcgcccaaccggcaagtggtgcatcgtccacaacacttcccttcacgacctcgcggactgccgcgcagtcaaaagtttggctgagcggacgaggaagtgggaggaggagaggaggcaggagcaccgagagggtaagtccccggcggttccttccggcaatcggcgaagtgaggacaagcagaaggcccccgccgaggacatcgatgacggcgatgatgacctaggtttccaagagcctggggccaccattgccactgtcgatgggggagcgtgtgctcacgtttctcgccggagcctcaaggccatgaagcgagagcttctggccgcggcccctactcatgaggcgacgcgccgggcgcggtggtcggaggttgccctcaccttcgaccagaccgaccacccaccgtgcgttgcccgggaaggacagatcgcaatggtggtttcccccactgtttgcaacgtaaagctggggcgtgtcctcattgatggaggagcagccctcaacatcctttcccccgcagcctttgacgccatcaaggccccggggatgatgctccggccgtcccagccgattatcggtgtgacgccggggcacacttggccgctaggtcatatcgacctcccggtcaccttcggtggatccgccaacttccgcacggagcgggtgaactttgatgtggcggacctcaatctgccctacaacgcggtcttagggaggcccgtgttggtgaagttcatggcggcggtccactacgcctacctccagatgaagatgccgggccccggtggccccatctctgtccatggcgacctcaaagtcgcgcttgcttgtatggagcagcgtgcggaccacctcgccgccgcgtccaagccggagggtggcgacgagaggcttagcacatccgcccccgccgccccgaggcagcggatagtcacatgcgacgaggtcctggaagacgcgctcgtctctttcctgcgggcaaacgctgacgtcttcgcatggagaccggcggatatgcccggggtccccagggaggtgattgagcaccgtctcgccgtgcggtcgggcgcaaggccggtccggcagaaagtacggcggcaggccccggaacgtcaagccttcatccgcgaggaggtggcgcgacttctggaggccggattcatccgtgaggtcatccatccggagtggctggcgaacccggtggtcgttcccaaggcgaacggcaagcttcggatgtgcatcgactacaccgaccttaacaaggcatgtcctaaggacacttaccccctgcctcgcatagatcagattgtcgactccacagcggggtgcgaccttttgtgttttctagatgcatactctagttaccatcagattcgcatggctagggaggatgaggaaaaaactgcattcattacccccataggaacttattgttatacgacaatgcccttcgggttaaagaatgcaggtcctacttttcaacgtactactcgaatttctttgggtagccaaataggacgtaatgttgaggcttatgtcgatgacttggttctaaagacgcgcaaccaagagaccttactctcggatctagcggaaacttttgagagtctccgctccgcccgcataaaactgaaccccgataagtgtgtgtttggtgtacctgcgggcaagcttctcgggtttttggtctctgcccgaggcatcgaggccaaccccgagaagatacgagctatagagcggatgcgcccccccagcaaacttagggatgtgcaatgcgtcaccggttgcatggccgccctaagtcggttcatatcgagactgggagagaaggcgctacccttgtttaagctcctcaaacgctccgggccgtttacttggacggaggaagctgaacgtgctctcactcagttgaaggcgtatctcagctctcccccagttctggtcgccccggagccaaatgaacccttgctactctacttagcggcgaccccgcaagtggttagtgcggcgttggttgtggagcgcgatgaggacaatcctcattccgcgcacccccaccctgtgctggcttggcccgggagagagcagggaggagaggcccccaagccgaacggtggcccaaggcccccgacgaccggagcaggccctgtgcccgcttgtcagacggtgccaggtgcccccgacccccaggatggcccgagggccactgcgggaaggccgcacctatcgccctctgaccccgaggctaaccctgtgccgattcgacccgggagagagcagggagaagaggcccccgagccgaacggtggcctaaggcccctgacgaccggagttggccctttgcccgcttgtccgacgacgccaggaacccccgacccccaggacggccccgaggccactgtgggaaggccacccctgtcgtcctccgaccccgaggtcgtcggcacagaagacgagtgcaccccgcgaggccgcttggacaaagagcgccccagggatgtggcccctagcgaagaggatcggccccaccgaaaagtgcagcggcccgtctactttgttagtgaggccctccgggacgccaagacccgataccctcaggcccagaagatgctttacgctattctgatggcttcgaggaactgcgccattatttcctggcgcatcgggtcacggtggttacgtcttaccccctcggccaaatcttgcaaaatcgagaggggtactggacgggtggtgaaatgggcaatcgaactttctgagtttgatttgcactttgaaccacgccacgctatcaagagccaggccctcgccgattttgtggcagagtggaccccagctcccgagcccgtctcagtccccgaggccagctcgggccccccgcagctgcctcacaccgcccattgggtgatgcagttcgacggctccctgtctcttcagggcgccggtgcgggggttacgttgacctcgccgagcggagacgtcctcagatatttggttcgccttgactttcgggcgaccaataatatggcagagtacgagggactccttgcgggactcagggtggcagctggactggggatccgccgcctcctggtgttaggcgactcccagctggtcgttaaccaggtctgtaaggagtaccggtgctctgacccgcagatggacgcttacgtgcgccaagtacggcgtatggagcgccattttgacgggatagagcttcggcacgtgcccagacgggataacacggttgccgacgaactctcacggctcgcttcctcgcgagcccagaccccaccgggcgcctttgaagaaaggcttgcccagccatcggcgcgacccgaccccttaggggagacggacgcgcctgacaggccaccgaggcccgtcggagtccaggcctcgggacccgaggggagcactcccagctcccttagattgattgcttggatcgctgagatccaagcatacctcacagataagactctacccgaggaccgcgaaaggagtgaacgcgtccagcgcatctccaaacgctacgtgctggtagaagggaccctctatcggcacgcggctaacggaatcctcctgaagtgcattcctcgggaacaaggcgtcgagcttcttgccgatatccatgaaggcgaatgcggagcccactccgcctcgcgcaccttggttggcaaagcctttcgacaaggtttctattggccgacagctctcaatgatgcggtcgacctggtccggcgatacagagcgtgtcaattccacgccaagcaaatccatcagccggcccaggccctgcagatcataccactttcatggccattttctgtctgggggctcgatatcctgggaccgtttaggcgggccccgggcgggtttgagtatctgtatgtcgcgatcgacaagttcactaagtggcccgaggcttatccggtcgtcaagatcgataagcactccgcacttaaattcattaagggcatcacagcccggtttggagtgcctaaccgtattattacggataacggcacccaattcactagtgaacttttcggcgattactgcgaagacatgggcatcaagctctgcttcgcctcacctgcccaccccagaagcaacggccaagtggagcgcgccaatgtggaaatcctcagaggccttaaaaccaagaccttcaacatcctcaagaagcacggcgattcgtggatcgaggagttgccagcggtgctctgggcgaaccgaaccacgccaagccgagcaaccggggaaacgcctttcttcctcgtctacggcgcggaagcggttctcccatccgagctcaccctgaagtcccctcgggccaccatgtactgcgaggctgatcaagatcagcttcgcagagatgacctcgattacttggaagagcgaaggcgacgcgcggccctccgagccgcacgctaccagcagagcctgcggcgctaccatcagcgccacgtccgggcccgatcactctgcgtcgacgacctcgtcctacgccgcgtccaaacgcgtgctggattgagcaagctgtcaccaatgtgggagggtccgtatcgagtgatcggcgtcccccggccgggctctgttcggctggccacgggtgacggcacagagctgcctaacccgtggaacatcgaacaccttcgtcgcttctacccctaa

SEQ ID NO: 50319 - DNA, 387 bp, Oryza sativa
  Clone ID: PAT_MRT4530_52817C.1
atggcgagtccagccaatgatccaaacaaaagtccaagcatgtgcagccgagccgtgcaggccggcttcgtcggcggtggcggcggcggcgtcggcgttgtcggcgccgccttgcacgactgcgacagggtccttggcgaagaggcgggcgatgaggtcgcgcgcgtcggcgtcggcgggccgcacgagccggagccggaggggaaggcgagagggcggcggacgatgttgcggagggtggcctcattggtggcgttggcgaatggggtgcggccgcacgggctctccctctccgccgccgacgccggtgagctccggaggtggcacaggtacaccatcccgatgatgtcgccgctgccgatgcgtcgcacaagtcccgcggcctga

SEQ ID NO: 50320 - DNA, 426 bp, Oryza sativa
  Clone ID: PAT_MRT4530_52818C.1
atggggcaaggcgtgcgtcagaccgccaaccggataaaagagcgtgctgtactgcgttacatgcagcgtgacacgcttgaccagactacttctttaaggggtcggggtgcctcggccctcggggccggggcaagcgtaacccgaccccccctcgggggaaatcaggaggagggcggacacctcaccctcgggcccgacgtccccgaaggtgccaggccacgcgggcgattgcgtctacctcaagcctctggtcatgatactcccggtcccatatcaccgacagtagcccccggcgttatgccagagcaatttcccttcccaagggaagcgactgccacaccacttgagcagcgcgcgaatctgggcgagcagattcgtctcgcccggagatacggcaacgccgcttcggtcggcgagcgtaattaa

SEQ ID NO: 50321 - DNA, 117 bp, Oryza sativa
  Clone ID: PAT_MRT4530_52819C.1
atgcagatatctcctgctggtcgtatgacagacgacctcatgtgcttcctgaccatatggtactcgcccatcatttttgtttatgtttcgaaagctgaaatgattcatcctcactag

SEQ ID NO: 50322 - DNA, 348 bp, Oryza sativa
  Clone ID: PAT_MRT4530_5281C.1
atgaagcggccggccaaaggcctcctaacttgctctaaggccgtgacgaatggtggggaagcgactgcggcttgctttgtcaatggaaatctttggcaaaggaggtggtggagtggctcccgcatggacatggcgcaagcttgccgtgatgccatggctagggggaatggcgggaagcaacccttcctcctcttccctaggatgggtcccgccaggccgccactaggactcaggccttcgctgtggtcgtcgcaagttcctcccctcacgcatcttcttcttcatcaccatcatcgccaggcactgcctcgcattgtgctggagtccgctcgtttccgtcgatggtag

SEQ ID NO: 50323 - DNA, 1341 bp, Oryza sativa
  Clone ID: PAT_MRT4530_52820C.1
atgaatgatattgtgattttcaatgaaatcataagcaacattggattggtagaaatctctctgagaggcatgtctttcacatggagcaacatgcaagaccaacctctgctccagcaacttgattgggtctttacatctccagcctggaatctgaaatttctccacacatcattaacagctctatctaaatacatctctgatcatgctccctgtctgatttctattgaaacttcagttcctaaatcaagattatttaggtttgaaaacttatgggttgacatgccaggatttatggatgtcgtttcacagttctggaacattcctgtcagaggatcaaatcaagctatcaagttgaatggaaagatgaaaaatttaaggaaaggactcaaaatttgaggaaaagactctcaaatatgcataccctcgtctcaaactgcaatgaggttttgctttttctggacaaaattgaagagcaaagagatctagccattcaagaatggaatttcagaaccatattaaaggaccatatccttcagctcttaaaatacaagaatgagttttggaagaaaagatgtacaataagatgggttaaatttggagatgaaaacccaaaatacttccaagctgcagcaacagacagtcacaacagaaataagatctcacatgaaagttggatgacagaataatatcatctcatgaagaaaaggcccaaattttattcaactctttacagacagaatgggcactcccgagcacttacagtctgatctaaatctgagcagtttgatacagcataactctaacctaaatcttttatcctccatgccttccaaggatgaaatggaccaaataataaagcaaatgccaagtgatagagctctaggacctgatggtttcaatggtatgtttctcaagaaatgctggcatatcatctctgaggatttctatgctatggcagatcaatttttcagtggaggaatctcaattcagaacctgaacaactctttcataaccctagttccaaagaaacccaatcctgaaagtccaaatgattacaggcctattgctttgcaaaactctgttctgaaatttgtctccaagattatggccaacagactgcaatcagttatccttgatattattcatgagaatcaatatgtgtttattaaaggtagaaccatccaggattgcctagcatggagctttgaatacatccatcagtgccatcaaagtaacagggaaattgtaattctgaaaatatattttgagaaagcttttgatttagtggagtatgaggccatcattcaaatcaatggaactaaaaaatttaacggcgtagca

SEQ ID NO: 50324 - DNA, 333 bp, Oryza sativa
  Clone ID: PAT_MRT4530_52821C.1
ccaggtgcccagaaaagtatcaaccttacattttataaaaatcataatcatttggggaagggtttactcaccgataaacttttagcaacaaaagaaatgcccagatttttcagcagcaacagggggtaatcatacaaaaatgggtgggggggggaataattctagctttactgaaaaaaggatgatgtatagtttatagtttataagagggccttacttttacaggtacaatttaacccatgaccttggggcgccatccaaaaaggacatccttttgcagggctattgttttgacaaatgaatccattgaaaagagaggtttcatattttttt

SEQ ID NO: 50325 - DNA, 254 bp, Oryza sativa
  Clone ID: PAT_MRT4530_52822C.1
cagacacgtgcggtcgcctgccctcacagtggctcttgatctcatataatgcatcgggggactggtgcacctaatgagatgaaaaaataatgctcataactacatatgcaaagtctaatactatgatgcttgctacaatacactaatatgtgctaattcagcgctacacaaatagttaaaaagacctattccttggatactaatatcatagacgtacgaatatctcgaatcgtggctatacatatagagcttgt

SEQ ID NO: 50326 - DNA, 3946 bp, Oryza sativa
  Clone ID: PAT_MRT4530_52823C.1
cccgggctgaggaatcggcacgaggcacctctctcttatccgctcctccagcggcgaggggcgaggcaaatttccaaatcccaaacccccccccccccccccaaaaattttgaaaaacaaaaggaaagtcctcagatcccctcacggccgcactaccacgccggaatctctcccgaatcggaccgacgccgcgcccggccgcactgcgggggcttctcctctcgcggcgcggccggggctacgcggggccctgcgccgccgttcgcggtgaatgcctgagcccgaggtcggcgtcctcggtggccggggcctgcaccgcgacggcctcaaggggtggcctgacctgcggtcgctgtccgggaagaagatgacgacgccgccgccgccgccggtggagaagcagcagcagcaggcgcggcccgcggcggtggcgccgccggaccaaaccctagagttctcggacgggctcctcctccgcgtcctcgcctgcctcccggagccccacctcacgggcgccgcgtcgctggtctgcaggaggtggatgcgcctcgcggggcgcctgcgccgccgcctcgtcgtcagggactgggcctttgtgacccaccgcctacaccaccgcttccccgaactggcggacctcgacctgttcccggcgtccattgtcgctccggccgtgccgtccccgacctcccctctcctcacctgcgccgaggtgtcgctaaccctagacaccggcgcggacccgccgctcgtcgcctgccgtttcctcgcagatgacgtgctcgacaggggccttgttgccgttgccgccagtttccccaacctccgccgcctctcagccacagccgcctcggagtccgggggtctgatggatatcgctggcggctgcgcaactttgcaagagctcgagctccaccgatgcaccgacctcgccctccgcccagtctccgcctttgcgcatcttcagatcctccgccttgtcgcagcctcctctgcgttatatggcaccagtgaagatggtggtgtcaccgacatcggcctcaccatccttgctcatggatgcaagagattagtgaagctggagcttgttggttgcgagggaagctatgacggcatcgcggctgtggggcggtgctgtgcgatgcttgaggagctcaccatcgccaaccacaagatggacaatgggtggcttgctgcgctcgctttctgcggcaacctcaaaaccctaaggttgcaaggatgttgcaggattgatgacgatcctgggcctgcggagcatcttggtgcctgcctcacgcttgagagcctgcagcttcagcagtgccagctgcgtgaccgtcgtgccctccatgctctccttttggtttgtgagggtgcccgtgagttattggtccagaattgctggggccttgaagatgacatgtttgccatggcaggactgtgcagtgtcaggagatataatgcttgcaaattgcaatgcatggacccctccatgtttggagtcagtatgccactattgcttctgtggagagttaagttcctctccttagaaggttgctcacaactgacaactcgaggtctagaatcggtgataacctcatggagtgatctgcagagcctaaaagttgtctcttgtgataaaatcaaagatgaggaaatcagccctgccctctcagagcttttctccactttcaaagagcttaagtggagacctgacaacaagtcacgtctcgctgcaagcctcgctggcactggaatgggaaagaagggcagggtgctttgcaaaaggttaagagaacgggagatgaagggaaaagggcagcgaactgatgccggtgcacagctatctacgaaccgggcccgcatgtcagtgaaggggagggcaccgccaccggaagagggcaagaagaacggcgagaagatggcggccgccgccgcgatcccgatcccgatcccctgcgtcgcggagcccaccgcggcgtcccgcgtctcgccgggctcgtcccccgcccgctccgacgcctccgagggcgccgcgttctacgccgccgacaccgaggccgagccggaggcgtccgtcgggaggagcacgcagatgctgctcgcgatggccgccatgggcggccgcggggggccctacggccgccgcccggcgtcttcctacggcagctgcgccgcgtggagcgccgggtcgctcaccgaccaccgccccgcctcgccgtccccaatctgcagccccgtgagcagcaatggaggggagggctgccgcgacgttgagagaactaatccagtgccaccaagattcatccacaaggccacgccagctagattgatgcgccgagctcgctcctcacataattaccgtaggcgtttgggggcaatggatgctatcaatgaatggagattgcccaaagtcagtgaagaagaggatgaagcagtggatcaaacggattggcaggctgatactctgtcttctcgtatatcctcagctcgtgattggaactttgaggctggtggtgcctatgagggaagtgatcataatggcggtgcgtttaaccattcagatggcgaaaatagcccagttgcagtgcaaagaatggggagatggccccagggttctgcggtaaaacataaggaaaattttgtccacgccaagttggttgcctggaagaatgcggagattgaaaagctcatagacaagctgagaaggaaagaggccgatatcgatgaatggcagatgaatcaggttacacaggcaaaggagaagatgaaaagaattgagatcaagttggagaagaagagagcgagagcagcagagaagatgcaaaaggcaataaaagatgcacaaaagaaagctgataagaagaaaatcaaggagcatgcagcaaccgacaatcagatagctagtgttgagagagcaatggtgaagatgtctaggacaggaaagctcccctggtctctggctgttctggtttgtccaagtaactgcaaccagaacaattccagtgcattatcaactattccaatgcgctcaggtgaaggacgtgattgcgaggtgcctggaagcacggctgtccaagggacaaatgttccgacaatttcgcaggagcaagatcgatccgtgtacaaggagttacgttcgcaaaacgaggagttcttcgagctgttcatgttgaaagtgtcgctgaaaaggcagatcgaccgggtcaatcatcacctggcactgtgccgtaagctgtggcggcaagccaacgagtccgccggcggccaccggtgcggcaactcatcgtgttcaggaggtcaccgacaccgagcggttgcagtgccggtgccgcatgcagaggccacgccacgcgcgatgccgtcgacaccgctcgcggtgcctctccccgcgacggcgatggcacagcgcacacaatgcaacctcgcgaggatgccgcggccgcagcagccaaactgcggcggccgtcccggctcgagcagaggcggcgccgtcggcttgtcagcagccggtcgaatgctggagacgccggggcagccgcacgtggcgcccaacggctggcctgcggggcacggtcacccggcgtctgggactctcgccgccgccatggcatgctcttctcgtccggtggcgcggcagcagggcaaccggagagagcaagggtgggacgcacatcaggctcaggttggtgctcaacaccaaaatctcccgcgatttccaccgcagcaaggcggtggcaacatcggcgagaggcaggggcagggtcagttcaggccgggtacgccgtcctatgtgcaggagcagcgaccgccgccgcagtcgtcgtcgtcgcacgaggcgctgcaggcgggagagcggcaacaagccaacaacaacagcagcggcagcagccggcagcaaaggcaaacagacacacaacggtggcaagcaggcgcgaacccatga

SEQ ID NO: 50327 - DNA, 635 bp, Oryza sativa
  unsure (1)..(635): unsure at all n locations
  Clone ID: PAT_MRT4530_52824C.1
ctcgtgccgaattcggcacgaggtttgttttttttttttttttngactcagggacgattcttctagtagcagactcctctccagctgtnacctgcacagctganctganccgtcttaaggggtgcacattcctccatctgatgttctaaactacaggncacgttcaccaatcatttctctaacctctgaatgcttgggcctatgactattgactaaattaattggctcttgcatccattgcataatttgtcnatccaacggaagcatttgcaaggcgatgatcncatnttaggaacaagaaaaaccganatgctttttctgctcttccactctactgtncctccctctttggcctgtttctagtgcgcggancaacancaacaanaactccctccttctccactggngccgggtgctcggggtnctcctcctcttcttcgcctccgncgtcttggtcgaantcctcattctcttccattatcgctttgttggactccatctcncnttggaancgctcntccaagtcctccgggaaacnggnngggggtgattaacntncccacaaaaaagganaaccggangaaaaaancccngaattaacncnttcgtgctccggggggggccccccgggcccc

SEQ ID NO: 50328 - DNA, 466 bp, Oryza sativa
  unsure (1)..(466): unsure at all n locations
  Clone ID: PAT_MRT4530_52825C.1
ggccacctttgacacatcgacgagcgaaggtttcctgcacaacgacggcaagggtttctcattcacagaattcatcaagggtgtcttcagcccgttccgttctagcaactatcaatgggtattctggacacgatttctcttcactgcgggtttcaacatcgtgctctcgtttctggagtacttccttgcagacgtggtgaaaccctacaacctgttcggtttagtagagctggaatcgccacanaaggcatcagcagtatttgtctgtcttgtgctcgccggctcgttggcatcagcacttgttagtggcatcttatcagacaagtacgggaggaaggtgctcgtgtatgcttcgggtggcgtgatggccgcggtgcatttctcgttcctattctactacccctactcgttattatgcctcggcggatttgtctttggcctagcgtatggtgcatacataagcgtc

SEQ ID NO: 50329 - DNA, 611 bp, Oryza sativa
  Clone ID: PAT_MRT4530_52826C.1
gggagagaggtgttaatggcgccatgaatgcgaggggtggcgccaactgctaacgacttccttcctcctcaccccgtgcagccgcggccatgtgatgtgctgctgcagctgcacagcttgcagaaatgcagtgtactgctgtactgtttacctgcttactactcctgccctggtatggtctctggagtttggatcgaatccggccattttcaccttggagaaaatgggtccctgcacctgtgaatttccgggttcaacgagtgattattggtcttattttaatttttttatgattaatattttttattgtcattagatgataaaacataaataatactttatacgttatttattttttaaatttttttcataaattttttaaataagacggacaattaaaagctgtatacggaaaccggtaactgcacttaaaatgggacagaggtagtactgctatcctgtctcaaaaaaatatatataaaaaatgatcggatatgatatattatagtatcatgaatctgaatagacgcattcaaattcgtcgtagtgtcacatatatcacactcgacttgtatttcgggttggaaagagtacaagatcagaagttactc

SEQ ID NO: 50330 - DNA, 234 bp, Oryza sativa
  unsure (1)..(234): unsure at all n locations
  Clone ID: PAT_MRT4530_52827C.1
actttacatactgtactactactagcgcgtaagctagctaactaactacncgtatnctgcccgcaccgtgatggcctcctcgggacaccttttctggggcataagggtagctcaagtccaccggcgggctgcccgtcagccgacgatagattaactagggctaggaatgccggagcaatcacgggcgtgtaaggtcgatccatccatggccaattgagggcataaagaagttcg

SEQ ID NO: 50331 - DNA, 819 bp, Oryza sativa
  Clone ID: PAT_MRT4530_52828C.1
atgcagcgatctttaaaccaagaacagaggaaaaccgcaaaagaacacaaaagaacagaaacttccacggaggagaagacgcagcggcaggggacgaagggtaaaaccggcacttcgcaggacctcgtcgaggccacccgcgccaccgtggcacggggttccgcgctcacggtagacgtgacaacgacactttcgccgtatggagcggtggagcccacccacccatcctccgctgcgtacggcgttaagtccgacggagggggagggggcgaggaatccgaagcttcgaacgatccgacggctgagtcgcctccacgcgggcaatcccagccgtcggatattcacgccgtcccccgagccgttaaactccccgggcatccacgccctctcggctctcttctcttcgcttcctccaccagaaaaggctgccccgcacgcgcgcgagcgagggaacccgcgcccatgggccatggcccatggaccgagcctaccaaacaccatcccaccgacacgtgggtcccaagcggccctcccatccgagccgtctccgcggttcacggtggacgcggcgcattcaacgcggggctcatggttttccacaccgccgggccggagttaccacgccccggcggtaagcacggttaccgcgaggttaccgcggtatttatattaccatacccccgcggtaactgcgcagttaccggcgaggtcaaaggaactatctcaatggtggcgaagatggattgtgtgcaaaggcagcaggagaatgtaagaggttcaagcggcaattgggtgacattgagagctcctcaagcatag

SEQ ID NO: 50332 - DNA, 420 bp, Oryza sativa
  unsure (1)..(420): unsure at all n locations
  Clone ID: PAT_MRT4530_52829C.1
gtgatcaggggagagttttcaactatttagacctaattttcagggttagggtagtagagtgagattgctagctagtaagagattaatccactttaggggtcaaaagcttatccccgttgtttaaggttatccttgggtcacgagctagctttattagcatacttgttaaagttatttacacacttttagacacgtctttagtcacgagtgacacctaggtcaagctagagaagcaggaaacctgcagcattcaagcacctaagcaagaagcaaatatatattattcctcgtcagtgtgcgtgcacttgacaccaacttaatcagtataatatttttcagtaaaacaaagctaaaaacatcccatttttgtctgccagtagtagagtctagagaaagagagagaagcncaaaaaaaaaaaa

SEQ ID NO: 50333 - DNA, 1105 bp, Oryza sativa
  Clone ID: PAT_MRT4530_5282C.1
ttgtaagaatcaccagccttgcaaaccaatcaacctgtctagattaatttttgcatgctctctggaatggagaaacaacctgcaatgcttctcgttcttgtgacactctgcgccttcgcatgcaagcgatccgtcgcacagtctgcctttgccacgttctacggtggcaaggacgggtcgggcaccatgggtggcgcgtgtgggtacggtaacctgtacaacgccgggtacgggctgtacaacgcggcgctgagctcggcgctgttcaacgacggcgccatgtgcggcgcgtgctacaccatcacctgcgacaccagccagaccaagtggtgcaagcccggcggcaactccatcaccatcacggccaccaacttatgcccgcctaactgggcgctgcccagcaacagcggcgggtggtgcaacccaccgcggcagcacttcgacatgtcacagccggcctgggagaacatcgccgtctatcaagccggcattgtccccgtcaactacaagagggttccgtgccagaggagcggggggatccggttcgcgatcagcggtcacgactactttgagcttgtgaccgtgacgaacgtgggcggcagcggcgtggtggcgcagatgtcgatcaaggggtccaacacgggctggatggcgatgagcaggaattggggcgccaattggcagagcaacgcgtacctcgccgggcagagcctgtccttcattgtgcagctcgacgacggccgaaaggtcacggcctggaacgtcgccccgtccaactggttcttcggtgccacctactctacctcttgggtgcagttctgaagtactgcaacgtacgtacaggtttagttgataaattatacacatgctgttcatggacataattaattaattactagccatcccggccgtttgtgcatgttctgctaggttgtgtgttgcgtggcattaacttgtttttctctgttaccagtcgtttttgtcaaacgcgttggttgtggcaagcgcgattgaatgttttgcccaccaattaatgtaactgatcgtatgggtgttgagttaataaattatgtttaattatgcggatgccaaaaaaaaaaaaaaa

SEQ ID NO: 50334 - DNA, 546 bp, Oryza sativa
  Clone ID: PAT_MRT4530_52830C.1
atggcgtcgaggacgatgacactggaggtgacggtggtgtccgccgaggaggtcgtgctgccgccgacgaggcgcccgctcggccgcggcgcgtacgcggtggtgcgcacggcggcgtcggcgtcgtccccggcggcggcgttactccggcaaacctgcaggcatccagcagagagcaccttgattgcaaatgcgccagaaattgttgtaccttgggagcaggagaatgtcttcgtcagatgccacgtgctgatggagaacaaatcagagattatccatcaatttcagctatctcgaaagcttatgcttggctgtgatggttgtgaggaaagaaatgtgccaatgctggctatgccaaattgccaagtctggaacgaaccggcaggctttgcttcgcttggcattggctttggcagcgccggcgtaaatgaatgtccgcactccaatacgcatgaatcgggtcaggcagtagctgtcatgttgctccctactggcacaatgggaaactcacattcatggtggccaaccaaatccgttacactttaa

SEQ ID NO: 50335 - DNA, 269 bp, Oryza sativa
  Clone ID: PAT_MRT4530_52831C.1
agcgcgcgcccttttttttggggttttttaaatggatgcaaatatcaaaggaatcacaatagcgggcatgccgaaacattttcagcgtatgcattgattggttcagaactcgacacacctaaattgaaagcgagaattacacttttgtatcttgcaacaggacaccacaaaggaacttccggactagtatgtaacttgaaagctctgaatgctttgacctgaaccctactagaatctgtggtatccccaacatttacaagtaaggcaac

SEQ ID NO: 50336 - DNA, 384 bp, Oryza sativa
  Clone ID: PAT_MRT4530_52832C.1
atgagtagagcctgtagaggagagagcagtggcggtggccggagctctctgggctacctcttcgagccggagccggaggatatcattccggatcactcgactaaatccgttcaaggaaccaacaaggccccaaaaggcaatattgttcttggggacaagatggccagcgacgaagcagatcaagaacaccaggctgctgctcctctgaagaaagaagactccaacccaatagtatctagccgatctgcttcaaacatctaccatactaaccaagtaggcaataactctggccttcttatcacggaccggccgtccacgagagtccgttgtgcgcctggagggccatcgtcgcttggatttctgtttggtgatgaggatgcctaa

SEQ ID NO: 50337 - DNA, 3366 bp, Oryza sativa
  Clone ID: PAT_MRT4530_52833C.1
atgaggcaggctgcgcgtggaccggcgccggcggcgcaaggaggtccgggcatggcgttcccttgctcgatcctctgccactactgtctccacgtggcgccacatatacgatacgagcgcgtccgccggcgatgcggggatggaggaggagccctcggcggccgtggcgcactagttcgaggaggccacatggccggtcctgactggcccaagatggagacagcccacggcgacgggcccatgaagacaaggcatgcggggggcgggagccgtacgggcgacgtggcgtcctcccgttcgacggaccacggcatcggcaggaagacggaaggattactgaagatggaagagatagtcggttctgctatcgttcaagagacggtaaacaggatcatatctgggttgattgaccggtgtgagcgaaaatcaagtgcacgggatcacctggagaggctggagatggcacaaatcaagttggagttcgcacttgagacatccaataaatggcagatcactagtggcccgttgttacgttggcagaagaagctgaagcgtgctactgaagagtgtgatgacacactacggaagtgcaggcaacatatccaggaagaagatgaggtggaacaacaagtaaggaattcttcctttcctaggcgaattgcccatgccaccaagacactggtatcttccatctttcacagcaatagtgatgagctgggtagatcttctgtccaaagattcgagtggtttgcagatggagctaatgattttctaagatctgtggaatttggaggcacaccacgccgttacttgttctttgaccctcttatcgggcaccttatttcagctgaaactgttaggaaagaacttattcaactacctacacaagacttctccagggtgtcacattctcactcatacggttgggagaacattcatagtatagctactgaatggttccgcccaaatccactgtgttgcaagcatcatggtcagaaaggaacaattgttgagggtaaatcttcacttaaagaatttccgcatctgaatgttatccttgtctatacgccccatggctcttcagaagacctattcccagcagttgatagtactgtgattgaggctgtgaaggcaacaatgaacatgcggagcacacggagaaccattcgaggagccaggaaagcaaagatgttgcgacgacatgatcgccggacacacaatcacagacatgaggtcgctgacttcctcagcctttgggctgtgcatgcacctgtccggcttcagggctcactccttgactggattcggaaggagaagaaagtagcaggctggggtaatcaacagaacatcatgatgtctgaagtagttgcttctgcggtagttggcgaggctgtgagcagggtctccaccttcttcgtcgacaagcataaacggaaactaagtgaggaagatggcctggagaggctggagatggcacacatcagaatggaggccgctctggagatgtccggaaagtggccgccggtcacagatgcctcgctgctgcgttggaggaagaagctgaagtgcgcctccgaagagtgcagccaagtcatgaacagatgcaagcgtcgcgccatggaagacgatgagatggagcagcagatcaggcgatgctctttccccagacggatcgcccatgagacaagatcattcttctcctctttctccggcgacaagaatgttgatagcctaatcacaacctcgaccattcagaggtttgaaaggtttgctgatggcgccggtgagttcctgagattcttgcagttcggcagcataggcagcatcaactacatgctcgttgatcctctcacaggtccccttcttgccggcaaagctctgcagtttgaaaatcctcctggaataagtgggtactacctagcggcacggccactacgatttgcagagcgaggagtagtagcctgtgtgtttcttcagtacaagaaccatgagaggccagaggaaaacttcctcctcggaattttgatacgggtgacagcaagcacgaatgtggtcgggattatggccaggtgctcggagaagcttacctccaatttcaagcctgttactgaagctgtgaggcaagagctcgctcagttccaccagcgaggcttctactgcttcccgtttgttgcttctactgatccagagtactcgagaatccaccaatccgaaactcaccgtgctcgcccaaacccggcatgctgcgaagaagaacacgagcaccatggtcgccgcagaagcagtgacatggttgagccgttaggtgcattcccggagccggtgatcaaattggtcgtgcaacgccatgtctctgctacacgacacaagagaacatcgtcttcttcatcatattcatgttcatgtggtcatgccaacatgggttgctcggggccgactctgctgcaggtgacggccgtcttcgcgccgcacgcctcgccggaggagctgccgtccggagccaagagcgtcgccgtcgtggcgatcgacgggagggaggagcaagcggtgcgcactaacgttggatggcgtgagatggaggagctgctgccgaacgccgtcgatcgcctgtgccacgaggctgcggcgcatgaggtgttctggagatccggccatggcgtcgcctacctgtgcgtggagaagatgggcacggagatggcaagatcagggaggctaatctcgcagctgaagatgggagagatagtcagttatgcggtcgttcatgagacagtgaacaaaatcatatctgggttggttgacaagtatgagcgaaaatcaagtgcggaggagcagatggagaggctggagatggcgcaaatcaagttggagattgctcttgagacatccaataagtggcagatcactagtgggccgttattacggtggcagaagaagctaaagcgtgctgctgaagagtgtgatgacacattacgcaagtgtaggcagcgtgtcgaggaagaagaggaggtggaacagcaagtaaggaattcatcctttcctaagcgaattgcccatgccaccaagtcaatgatatcatccatctttcacggcaatatcgacgagccaactgtatcttctgttcgaagattcgagtggtttgcagaaggagctaatgactttctgaggtctgtggagtttggagggacaccacatcgttactcattcttcgacccccttattgggcaccttcttgcagatgtgatctctgagtttctcaagctgtgggttgatcgtgctcctgtcatgatgcagttcgcagctgtggactggattcaggccctacttggggaagctggagattctaaaaagttgctgatgagcatgtag

SEQ ID NO: 50338 - DNA, 3363 bp, Oryza sativa
  Clone ID: PAT_MRT4530_52834C.1
atggggggcgggccgaggacgttcccgggcgggctgtcgaagtggcagcacaagcggatgcacgagaagctcgcgaggcacaaggagcgggggctcctccgccacgagaagcagctctacctcgcccgcctccgctccgagatccgcgcctcccgcctgcccgccgccggcgcctcccctcccgacgacggcgacgggcccacctcctcgcgcgcccacatccgcgccctcgccgaccgcttcctcttgcccggcgccgaggatctctggaacgaagacgacgggcccatccaccgcgccgaccggccgcggccgccgaggaggatcgtctccgttggcgggaatggcggcgaccgccgtaagttggactctacaaagcaggagctaccgaggggtgggaaggagccgcgtctggctgcgttcaatcctaggagggatttccagacggccgcgccctggtggtggcaatggagctcgtcttccgccattccttcgcgaacaaaggaggcatccttctgtttcttcggtcccaagagatcctactcagtgatgcctctgttccaggcgcatcaggagtccagtggtacatcgatggtgccgctgattgctagaggtcttgccagtgctcggattgctccctcgcagttgaatggagagaggttctactcgttcgcagcagggcgatttggcaggaaattgaggccagactcctcagatgaggatgatgaggatatatcaactgcgaagaaggatatgaggtttgcgaggtttggagcatccagtgaggaggaatcaggatacgatgaattggaggcgagaagtgccatcaggaagaaatggagcagtgctgctttgaggaactgtgatatgaagaaggagaggagagcgctcaagtcctatgaggaagaaaacaacgatctcgctggcaaagatgttcttgtcaaggctaaaactggaactggcaaaagtgcagcttttctgctcacagctgaggcaaatgttctgttgaagtaccatcaaggaattggtgttcaatctcttattggtggcactagattcaagctagatcaaagacgtttagaatctgatccatgccagattttagttgctacacctggtagactgctcgatcacattgagaacaaatcttcattctctgttcgcttgatgggattgaagttgcttgtattggatgaagctgatcatttgctagatttgggtttccgtacagacattgaaaagattgttgatagtttgccacgtcaaagacagacactactattttctgctacaatcccaaaggaggttcgaagggtttcacagctagttttaaaaagggatcatgtttttgttgatacagtgggcttgggagctgttgaaactcctactaagatagagagcactacatccatcgacttggaaggaccggaagagaaggttgatggttcaataaagatagttgatatgagcatcaaggaggcagcatatcacgcatggcttggctactacaattcaataggtgatgttggaagagacaagaccatgcttgttgacctagcgaacaggttctgtaaatccatcggtttggaaaagcctccagcactgtacaggaaaactgctctgaagatgggccttaaggataaatcagcagctcacaataaccacctaccagtggtggataggttcaccaagcttcctgatgatgtcttgctcaacatcctggaccgcctcaacacccccgacgctgtggaacacccgcggcttgctgagcttgatatctctagtgcaggcttagaactagttgagctcaactccctaccgaacctcaaacggttgaaggttatcagattaagccagttcctttctagtgcccccaccattagagacctgcacctcagcttcctaagtgaaaagatctgggttcagccagagtgcccgaaactgttgtcacctgttctccagaatctgcaagttctgaatctggatgaactcccggaaggacgcgatatcgcttggacatgcttcttcctcgaagctgcaccctctctgaaggagggcttctgtgaaaaaacaaacgtggagtgggagtcatctacacctgatggtttcaggcattacaacctgactaagctaaccatctatggtttccaaccaaatgagaattttatgggatacatcaggcacgtcatggaagctgcagttaacctagaggacatatctttatacgacaggaaggtgctcgagtgctgtgaagacttggatcccaagatcaaggttgctccgtcagggtatccggagaccatccaggagcaggagttgttgaagaagcaaattacagagggattgatgaacgctgctgtgtctgatgcaacagacaacatcctcaatttcagaaaccaagagattccccttcgccaactcaccatatgcttctacctcaagtactatgattgtctcaccattggcaaaactgttgcccgagcaatggccacccacagccacaacctcgacagcgctgaattcagtattctgactgaggatagcgtgttgcagatgaagtttgaacacccgcggcttgttgagcttaatatctctagtgcgggcttagaactagttgagctcagctccctaccaaacctcaaacgccttgtttttagtctgtggaactgtccccaagaacccttgtcttttggcaacgtcccgttgctttcgagcctaagcctcactgatgaaagcatgagatggcagaaggttatcaggttaagtcaattccttcctaatgtcctttccataagagacctgcacctcaatttcttgagcgaaaagatttgggttcagccagagtgcccgaaactgcttgcacatgttcttcggaatctgcaagttctgaatctggatgaactccctgaaggatgtgatatcgcttggacacgcttctttattgaagctgcacctgtcctgaaggagctatgcataacagtttgggaccattggtgtgagatggagacagacagtgtggaacgggaagcacaaggcttctgtgacaaaacagacgtggagtgggagtcatctgcgcctgatggttttaggcattacaacctgacgaagctcacaatctatggtttccaaccaaatgacaacttccttggatacatcaggcacatcatggaagctgctgttaacctagaggatgtatccctgtacgacaggaaggtgctcgagtgctgcgaagacttggatcccaagatcaaggttgcttcgacagggtatccggaggccatccaggagcaggagttgctgaagaagcaaattacagagggatcggtgatggcgtcacctcatataattcacttccggtcttaa

SEQ ID NO: 50339 - DNA, 3120 bp, Oryza sativa
  Clone ID: PAT_MRT4530_52835C.1
atgggatggacaccgtttgcagccaccgtcaacaattgccaagtgggcgtaggagtggcgaccaggcagaggagcgtgtgcggcgtgggctcgcgacagcgggtgggcacggctcgcgagcaagcctgcgacgagaaggcggaggagtggctgacgctggctcacgagcaagcaggcagaggtgcagcgcgggctcctagcaggcgggcggcgagcgcggccgaggagcgcaagcatgcgggcgataagcaagcggaggagtgctcgcgggttggcggcgagcaggcgaaggagcggcagccggcggctggattatgcctatgtctaaaaatgcaggtgggcactttttccgtaaaaccaattgaggaaggaggaatattctgctcaagtaacattccattactgtataaacactatgacggacaaagtagcagcctggtcattaaaaatcttgagaatttgaagggatcactgggtgaagtccaagagttggcgaagtatcagcaagttcgtttggtgtggtccagaagcaatttcattgaggattcaagcatggctgaggacaaggcagttctccaaaaactccgaccccaccacgacctggaaacaattgaaatagaaggctatcggggtgatgaattttgctattggatgatgaatataaattcttcccttccaaatcttgtgactgttaaactgtctaacatcgcaaactgtcaatgtcttcctccacttggccaattagcaaatctggaagtattgcacatctcagatatgcctagcgtcagaaaagtggacggtcatgtttacggcactgagaaaccattcaggaaattgagagaacttgaacttagtactatgaagaacctagaggaatggttaaccactacactactactaacaggtcacaatgaccatcagctttcacgaagcgaagaagttttccctaatctccaggttcttctcattgcaaattgtcccaggatgagatttgttccaggtttccctagaagtcgggagtgtaccctcgagaaaagctacagcatactattatcatttgaacagttcatcggaagctcaaacttggccttgatcgcactgaaaataaatgactctggctcatcatctgatatcgtgaaatttcttcaaggctgtgtaaatctgttgtatttgactattgattcctgcatcgatctaatcaccttgccagaacctatcaaaaactgccactgcctcaggaaacttgagataacgaactgctggaacttttctgtattaccggagtggttgggagaactaactttcctgcagaagctagatattcaagcaagcaaactggaatatttgccacaatccatccaacgcctgactgccttggaacggttggtgctcaacaagtgcaactacaaactgcgtgaacggtgcacatctagagaggataaagaaaagattaaacatatcaaaacaattgatatgaatgaggtccctttgatgtacttgactccaagctatataatgcttcttcagcaagttactagttctcaatttatcgatctgcatattggtggtctggaatgtatgattggcttgagggagatggagaacttagaattacagacaaaaaaggagttatcctcgttgagtttggagtggtcatatgcctatgctgattccagcgataaatacgcctcttctgagagagggatgcagaatagggctgtttttgaaaagctccagcctcatgatagccttgaaatactttgcataaagaactatgctggtgttgatttccctcgttggatgtctttactcccaaatcttgtgcaattgaagatagttggcatgcaatttgaatatctacaccttgatcagtttcagaacctcaaagagctgtttctctccagagtgcaatttgcgcatctccacctgaatggtctgcagaacctcatagaattgtctctctctggcctaaaatttggacatctccacatcgatcagttacagaacctcagagagctgaaagtctccggtgtggaatttcaacatctccaccttgaacggttacagaacattacagagttgaaactctctgaagagcgatttgaacggctccatattgatcagttacagaacctcaaagagctgaaattctccagtgtggaatttggacatctccatcttgagcggttacagagcatcacaaagctggaactctgtaaaaaacaatttgaacatctccaccttgttcagttagagaacctccgacagttgtatctcttcaccgtgaaatttgagtgtgtcgttttgcatcagttacagaaccttgaggagctgcatctttcacagatagaaagccaaaagtctaacaaaccggtttgcatcgagtgtagccaaccacttaggaagctccaaaagattgtcatgaccaaaataataaacaaagggttacaaatatccgtgcaaggaggagagggtgacaaaaatttattcccgggtcttcagcatttggaaatggaattatgtgagaatttaagattccaaccatccatcccgaggagcacccattacatcatatcaggggaaatatatttcgataaatttaattaccgtagaatattgggttcgttcctgttcccatcgttcaagcaagtcatggggacatcaatccctggatcaacatccaggatggaaatcaagaacaccagtggtctatcttccgaaagatggaagagcattccgcacctcgagcttctaaacatcacagaactaacaatagacaaatgtgttgatagttgtccagtgccaaagtgcatcctgggctggaagtccctccagaagcttgagatacggagatgcgaggatattgaattgcttccagaatggttgggagagatgtcctgtctcactgagctcatagtggagacctactggatggaagctttgcatccatgcatccggcggctcacaaatttgcagagcctgacacttataacatgcttgaataggtttaaagaaagatgcaagtcaggagatgactggatcaatatcaagcacattccgcatatacaaattacagatagaaatgggcgtacggagatcatttcaccaagttgtacctaa

SEQ ID NO: 50340 - DNA, 1497 bp, Oryza sativa
  Clone ID: PAT_MRT4530_52836C.1
atgaagaataagaagggtagtcgccgcaaccgcaataaatcagcagctcacaataaccacctactagtagtggataggttcaccaagcttcctgatgatgtcctgctcaacatcctcgaacgcctcaacacccccgacgctgtcaggacatgcctcctttctaagaggacgatccaccttcgacatttgctctcaaacttaaacatttcgctgcattcctttttgccccattattatggttattatgccacctccaaggatgcaattcagattcagatgaatgctgctgtgtcagatgcaacagacaacatcctcaatttcagaaaccaagagattccccttcgccaactcagcataaccttctacctcaagtactatgattgtctcgccattggcaaagctgttgcccgagcaatggccacccacagccacaacctcgacagcgttgaattcattattctgacagggaagcgggcactatattgctctatcgacgatctccgccacaatggcaagctgctcatgacatttttcggtgcctgtactgatgcatttgccggccttacgcgtctccacctacgcaacttaaggcttgctgaagctgacattccaaacatcatcgccacatgcaaacggctagagtatttgaaattgtccgcgtgtcaaatagaggatagtgtattgcagctacagttggaacacccacaccttgttgagcttgatatctccactgcgaacttagacctagttgagctcaactccctaccaaacctcaaacgattggtttttagtgtgtgggtttgtccccaagaacccttgtcttttggcaacgttccattgctttcaagcctaagcctcactaatgtagccatgagatggcataaggttatcaggttaagtcagttccttgctaatatcaccttcataaaagacctgcacctcaatttcttaagtgagaagatttgggttcatccggagtgcccggaactgttgacgcctgttctccagaatctgcaagttttgaatctggatgaactccctgaagaatgtgatatcgcttggacaagtttctttcttgaggccgcaccctccctgaaggagatgtgcatcacagtttgggaccattggtgtgagattgagacagacaaggtggaacgggaagaacagggttactgcgacaaaacaaacttggagtggaggtcatctgcacgtgatggtttcaggcattacaacctgactaagtttaccatctatggtttccaaccaaatgagaacttccttggatacatcaggcacatcatggaagctgctgttaacctagaggacatatccctgtacgacaggaaggctcttgagtgctgtgaagacttggatcccaagatcaaggttgctccgtcaaggtatccgcagaacatcgtggagcaggagctgctgaggaagcaaattacggagggattggtgatggcgtcgcctcatgtaattcacttccggtcttaa

SEQ ID NO: 50341 - DNA, 601 bp, Oryza sativa
  unsure (1)..(601): unsure at all n locations
  Clone ID: PAT_MRT4530_52837C.1
gactacattttcctgtggaaatggcgcaagtacctcctgctgctggccacgctggtggccggcgtcacctacgacgccggcctcaaccctcccggcggcgtgtggcccgacgacacgggtggccacgccaccggcgacccggtgctcccggtgacgttccacagccgctacctcgccttcttctactgcaacgccaccgccttcgtcgcgtcgctcgtcgtcatcatgatgctgctcgaccgccgcgtcagcggcaaccgcgtcggcgtcaccgtgctccgctccgccatggtgctcgacctgttcgcgctcatgggcgcctacgccgccggggtcagcagggacgtgctcgccgtcgcctacgtctcggcgctgttcggcctggtgttcgcgtacgtcgcgctgcacatcgtcgtggccacgtcggcgctgccgccggtggagtggctgcgcgcgtcggcgaagaggctcgnnnnnnnnnnnnnnnnnnnnnnnnnnnnnnnnnnnnnnnnnnnnnnnnnncacaaagcaggaaggaatagtgttagagagaaggaaagtgtgtcagagatagttaaattaaatttagtggcttgtttac

SEQ ID NO: 50342 - DNA, 624 bp, Oryza sativa
  Clone ID: PAT_MRT4530_52838C.1
atgccccttcgagctgcttcgttctccacctgccgtaacacctcctccggctgcgttgccgccgactgcgcggatgacctcgcggcgcccagcggcgctggcacggaccagtactctgccgtgatgcccgagaactcctccgtcacgttcggcgacgacgaggccgacaacggctaccatcctcaaggaacagcagacttcatctatcagattggttcttccatgagcaacccgatcaagcttggccagatgtctcaaacaacgtacaaatacttctcgcagataccattcgtcggtgcaaaaggagatgtagtcaaggatatgttgcgccgtgggttatctaccactgaagaccgtcatatttacaaccatctcaagagagagtatgattttactgttgccgtggcagaggatcaacagcagcttctggggaagcagtcacacggtgacggcgtgcagatctggagctcgaaggctttgccttggctgtgtttgggggcgatggaggtggagctggcgggcccggcggctgcgtacagaagggggaaaacgatggaggttggaatgggatcaccgggtgtgaggggaaaggagaaggctggctggcagattgagataaactag

SEQ ID NO: 50343 - DNA, 481 bp, Oryza sativa
  Clone ID: PAT_MRT4530_52839C.1
cgggtgtagggcttggtacacgctagtacacgttacacaacctggattgggccatcgtgttccggtaaaagtttgcgtaggaactactactacttgtacatggtgattcacagatgggtgggtcacagtacgggtgcaaatgaaaggcgctttgcatcggcatcgtacgggaatgattctcgcttcactgtagtcttcgcagccacacactggcatgtgccacacgattcacacccatggcttcctgcctgggttaaacacaccttggaaagacgcagccggcggttgcaacttgcaaaattgcgactgcaagcagccgctactgtgtctctgtgaccaacaaatcttcactgcggttttgaggtctcgttgcattggattcgagctgtaggtgttctgcttcttctgcattgcactgcggtagtaatgagtggtcaacaagttgtaacccgcacaagtgaattatgactggatgagatgg

SEQ ID NO: 50344 - DNA, 202 bp, Oryza sativa
  Clone ID: PAT_MRT4530_5283C.1
cccgaaactaatttggaaaaaggagcaacgagtaggccgaattttggaaggggatcggcggcatcgggctctgctacagcgtgcacaggcaggagacggctggagcttgaagatggagtactgtagcggcagggaccacaaacagactttcggccgggctgagaggaagggagagaatgggctgaattcggcccaagactag

SEQ ID NO: 50345 - DNA, 666 bp, Oryza sativa
  Clone ID: PAT_MRT4530_52840C.1
atgccccttcgagctgcttcgttctccacctgccgtaacacctcctccggctgcgttgccgccgactgcgcggatgacctcgcggcgcccagcggcgctggcacggaccagtactctgccgtgatgcccgagaactcctccgtcacgttcggcgacgacgaggccgacaacgggtcgcaccgcagcgaaggcgacgagcccgaagccaagcgctactaccatcctcaaggaacagcagacttcatctatcagattggttcttccatgagcaacccgatcaagcttggccagatgtctcaaacaacgtacaaatacttctcgcagataccattcgtcggtgcaaaaggagatgtagtcaaggatatgttgcgccgtgggttatctaccactgaagaccgtcatatttacaaccatctcaagagagagtatgattttactgttgccgtggcagaggatcaacagcagcttctggggaagcagtcacacggtgacggcgtgcagatctggagctcgaaggctttgccttggctgtgtttgggggcgatggaggtggagctggcgggcccggcggctgcgtacagaagggggaaaacgatggaggttggaatgggatcaccgggtgtgaggggaaaggagaaggctggctggcagattgagataaactag

SEQ ID NO: 50346 - DNA, 732 bp, Oryza sativa
  Clone ID: PAT_MRT4530_52841C.1
gttttcattgctcggcggcgggatcctgacgggcaaagaagagggtggtggtgcggcgacgatggctgaggtgaagccggaagagatcagctacccgcccatggagcagctgcaggggttcgagtactgcatcgactccaaccctccctggggggaggcgatcatactgggattccagcactacatcctggcgctgggcacggcggtgatgatcccggcggtgctggtgcccatgatgggcgggagcgacggggacagggtgagggtggtgcagacgctgctgttcgtcaccggcatcaacacgctgctgcagtcgctgttcgggacgcgcctgcccacggtgatcggcggatcctacgcgttcgtggtcccgataatggccatcatacaggactcatcgctcgccgccatacccgacgaccacgagaggttccttcagaccatgagggcgatacagggggcactcatcgtgtcctccagcattcagatcatcctcggctacagccagctgtggggcattttctccagattcttcagcccgttggggatggcgccagtggttgcattgctcgggtttggccttttcgaaagaggattccctgtggttgggagatgcgttgaggttggacttccaatgttaattctgtttgtcgtgctttctcagtatctgaagaatgtacagataagagatattccaatactgggagaggttctccctgttcatctgcatcg

SEQ ID NO: 50347 - DNA, 1503 bp, Oryza sativa
  Clone ID: PAT_MRT4530_52842C.1
atggacgccttcttctctgctgttcttggtgatcttctcagcaggtccatatccttcacgattgacagatactaccggcagcatcagggtgtggaggagaatctacggaagttacaccgcatgttgctgcggatccaagccatcgttgaggaggcacatgggaggcagatcacgaaccaagctatgctgcttcagcttaggatggtgagagccgtgatgtacagaggctactacttccttgataatttcaggtaccgaactgttcaagcgcatgctcaagatgaggtgggtgatcgctctcttggcctgtcccctttcagccaatttaagcggttttgtttctccactagaacaaggaaaattgcatccgaagttttggaccagaaggagttgcagaagatgcttggtcacctagaaaacattgtttcagacatgcaggagtttgttgcgtttgtgagttgctaccctcatatgagtcgtcaaccttattgcagctacttgttgctagaaaactgcatgtttggtcgccagatagaacaggagaggatcatcaacttcttgctagaaccaaatcatcctagtgcaaaaggcattaatgtgcttccgataattggaccgggcagggtaggaaagagcactcttgttgagcatgtctgtcatgatgaacgggtgcgtaaatacttctccatgattgttttatgtagcgcagatagtattgggggtggttttcttacagacaccggtctaatcaaacatcgaaatcctacctcaactggacaatcattggttatcattgaacttgctgatgatgatatggacgacagaacatgggcaagaatattgcacaacctaagaggagagcacataacacctgtgagtaagatcatattaacgagccgatcagacaagataagggcttttggaacaacagaagcacttcatttagattttcttccaaaagaagcattttggtatttcttcaagacgattgcttttgggagcaggaatcccgaagaagagccaaagctagcatccatttgtatggagatcgcgaccttggtgaagggatctttcatggcaacacacgtcattggtggcatactcaggtctaatcttagtgctcaattctggtgcaggtttctcaaatgcttcaggcattacacagacatgcatatctccgtgctaggagaacacccaagcgacgcgtatacaaaaacaagtggacttacttacatttggacatctagaaatatgagtgttgtcgcagcgacatatagcctccatcaagcaagttctgctcagctggctgatctatccccaattctatcaaatgatgttcttaccggagacgttgagcctccggagaaatttgatgccctggagtggcgatctagcatacctccttactacaactatatttcgcattacgagatacttgcacaaccaccggatatgctgcctaaaaggaagcggtcccggtcgctctcagaaggtttggtttaa

SEQ ID NO: 50348 - DNA, 108 bp, Oryza sativa
  unsure (1)..(108): unsure at all n locations
  Clone ID: PAT_MRT4530_52843C.1
atcnangcccactgaactatatagaatattcaagcgggcccgcctgaccacaaacggatggttacagagcgaggagcaagatttacatggacttagggcaaggcagaa

SEQ ID NO: 50349 - DNA, 267 bp, Oryza sativa
  Clone ID: PAT_MRT4530_52844C.1
atggcgaactctatggtggtgagggtactgcagcagcacgtcgatgctgaggggttcttggagtcccgtggtgaagaggtccaactgctgatcctccatgagaggtccatcgcgagagagcaagtcgaggaagcggtcgatgtcagagagcttgccctggatggaatcaaggacctcagcaaggccctttttccaatcttcgccaatgttggtgacggtggacatggcgcggcggcggcgaggtcgagcaggatcgtggaagtctga

SEQ ID NO: 50350 - DNA, 395 bp, Oryza sativa
  Clone ID: PAT_MRT4530_52845C.1
agatgtggagctgggtttgggcttgtcggaggacgaactcctcgagcgggggaccgtgaggcccctcctttgttggttcggccgagggcagcgagtgaaagctaaggagctgggaagattggaagctgtcaaggggatcgggcccctcaaaaaggatgagacaaagggaattataccggttcaggccgctaaaaaggctaagcgatccaactctttgttcttcgaccccccctcttcactggacatgaacctccttttatactccaaggggttctctcacatgcgcgggggtgtgccgcccagtgaagggagccgacacgggaaggatccccctcattcaccatttaatggaagtggattttgggtgtgcgaatgcaccaggaacaccatccctg

SEQ ID NO: 50351 - DNA, 2515 bp, Oryza sativa
  Clone ID: PAT_MRT4530_52846C.1
atggtggcgacggtggtgacggaggtccgtcgaggtggagcacgcaagcggctatggcttcaccgactaggaggcgcgcctgagggtggcaccatgcgaagacatggtgtcggcggtcttccaaagccagcccaaacttgggccaacccgtcttcgtgcgagccgagtcagttcaacggcccacaagccgagaagccgagcgtggcccacattcgcggcgatggcccgatgcagttccgcggcccattgggcagaccttatccgcccacccgctcctcacaatcgcggtcgtcgccatcgtcgtccatcgtcgtcgtcgccacttgccgccgccgtccgcccactgccgccaccgccaccgccaccgccaccgccaccacccaccgccgccgctccctcggatctcctccaccgccgccgctccctctgctctccgcccacaccgcccgccaccctacctccccctaccgcccccaccgccgccaccgccaccgcccgccgcccctgcaccaaaccctagccccgtcgccccccaccctcgcacgcgcactcgccctcctccctctgcgcgccgccacgctctcctcctcggctcctcccctcgcatgcgccgtcgccaccgccacctcgccgttctcctgccctcacgcgcgttgcctcgcctctcctcgccgtcctcctccacctcgccctcctccagccatcgtcgccgacccaccgctgcctctccctcccaatgaggtctagaggtcaggtccaccaaatccgcggcaccgccaccgccgccatcgacgggtgacgccgcgccgtcgacgcccgccggcccatcgcctcgagtcggcccccgcccacccgcctcgcggcatcgacgcctgccggccccgcgccaccgctgaagctgggtcgaagggagtccgcggcccgccgtcgacgccgcgtggtcggccgccggcatcgccgcctccgccgcctcccctcgccgccccccgccgacgccgcggcggccggggagaagaacgcccacccgcccccgcgcgtgctcgtcacctacttcaacggcgtcgaggagtccttcgtcgccgcggagggcgccaccgcgcaggggatccgcgaccagatcctcgaccgcgggcgcctcctcgacaccgagcatgctcttccgcgacggcggggagaagtggcccgtcctcatccccgaggagcgcgtgggttgacatctttttgcctggcagccaaagaaagccgaggagaagccccaggcctagtgatccaggcatagatggaatagcttccagcatatcttgaggtgttcattttggctatgttgttcaggacacccttcctctttatttttgctgaacgcgcttcagtagatgttaaaaaaaaaccttcctggaatgggtgttccatagtcatatatcgctgtacgcttatagcccttctctcagtgcagtctgttgtgaacgaatttattcagaataagcaccctcactgttttgtagtggaaaaaaaaaaaaaaaaaaaaaaaaaaaaaaaaaaaaaaaaaaaaaaaaaaatctccccgtctcgttctcgttgtctcctccgctccttgcgccgccgccaagacgagtcgcgtcgcggctgaacaggggagggccgggcggcgatctccatctggcgagcagagcagcggaggggaggggatcctgaggaaatgcaagttaataaagaggcacctctggggtgcctcaagccaatttctcagtataacctgcaagagcagagaagcaacgggtttcctgagaatagtgaaaaaaagaatgatagtattgcaacagaaagagtcttggaggcatctcctcttccaaatcaaggctttttcagacccgttcaacggacagaatattatgcctatccatttatttatgctgattaccaaatgccgggacagccacaaccttacaacttagataaccaattttatcaaataaacagggaccacagttttcctattgagagtagagttcaatatcttccattcaagatgccccctcaaggttaccctcctgatgcacaacttcaggaatttcaatattttgggggtattgactttgaagcaacctgtgacaagggagacaatccacatccacaagaaatcattgagtttccatctgtcttggttaacagtgcaactggacaacttgaagcttccttccaaacgtatgttcggccggcatataatcaacttttgactgacttttgcaaggagcttacgggcattcaacaaattcaggtagacagaggtgtgcctctaagtgaggcattgctcatgcatgataagtggttggaggaaaaagggattaagcacaagaacttcgctgttgtgacatggtctaactgggattgccgtgtaatgttggaatctgagtgcagattaaagagaatcaggaagcccccttactttaacaggtggtgtttggatccagggactaaacctaatctctgtcacatcggatgtttggacactaattag

SEQ ID NO: 50352 - DNA, 3123 bp, Oryza sativa
  Clone ID: PAT_MRT4530_52847C.1
tcagtcagaaactattttgtttatttcttcaacataggaagccctaattgtctgtatctcagctacaacttctctcatgcataacctatcagttggcctcctcctgctgcatactagtgcgagtcttgtgacagcagtaatgacactgttgatttctcccgatgcattctcaactgatagcataagggggtcaacaatatctatcagtagttctggatatgccatttccgcatatttctgtaaacatctcaaggagcaatataccaaagctgtagacatcaccgtatggagaaatttgaccaccttctccatattctgcaatgcatatgcgacattagcaattcctggagcaacatatccaattgtacccattatccccacagaactctttgaattgatcagttgttcaccttctggatctgtaagaatctttgcaaggccaaaatccccaacatgagcaaccatgccatccccaagaagaatgttgctgggctttaagtcgcaatgaactattgctggctggcagttgttgtgcaaatagtccagtgcagcaccaatatcaagagcaatattcaatctctgcattaacgtaagaacttcgactggacttgatggatctatgtctggatgtatccacctatcaagactaccataaggcatgaactcgaacacaagggctttgaagtcattttggttcaaattagggcaagagcagcaagttatgacaccaaccaagttccggtgttgaattttgcttagtgccttacactctgctacaaaactcttagaagaaccagattgctcaagatcgaaaaccttcacagctacgtcagatactgaattcttgaaccgcattgtacccttgtaaacagatccataccgccctgtgccaaccaaattgttggatgtgaagccgtttgttgctttggccaagtcagaataagaaactcgaggatacatttgattcatgaaagaagaagcaactatttctactttcgatgacagaggcctcaatctcttcttcaaatagaagaccagaagtaccaatatgaagcacaccaaaatgacactagcactcagaatccctgcttttcggataatttgaagtatccttcgattagactttactcggcatgagggcaaatgcagctcttgaataccaccacaaagcttgtcgttcccaacaaattggaatcccgtcaaattggaaaacacaccatgtgttggaacttgaccatcaagatgattgaaggatatgtctagttggtatagtgacgtcatgcttatgaaggtttcagggatttgtaaagacaagttattgtgtgcaaggtatagttccttcaggcctttcatgagtcctaattcctctggaattgcaccagtgaggctgttcttggtcaaatttagcagttccaaacctcgcattttacttatagacaccgggatggtactgttcaaggagttgccatccatacgaagttccatcaggctctggcaactgcttatagcatctggcagcgccccagctaacttattattgtgcatatacaagtatgtgagctttgtgagaccgccaacctcagatggaagagaactactaaattggttcctagacaaatccagaacgaatgacaaggatgataggctaaagatctctccaggcagtggacctgaaagcttattgttagaaaatgttgcactgacaagcctttgtaagtttccaagacttgctggaagaggaccatccaggttattattatttacagaaagatgctgcaattgtgtcaagttcccaagcgaggatgccatcatcccagacaatagattattgtctagtgtcaagaactggagcattgtcaaccttccaatgttgtcaggtatgaggcctgtaaaccggttgctagagagccctagcttaattagtttagggaagttgccaatgccatctggtattctgttagaaatttcattaaatctaagatccagtagttggaggcgctccgataggttaccgatagagttcggcaatgcacccccaagcctattattttggagtgtgacaccccggaggctagtgcaatttgtcaataaagtgatgaactcccagtcctgcaccctgcttgccattaactggttcccattgagcaacaggaagtttgggcagagcgtcccgatctctggaggcacaatgccagtgaagttgttacctgagagatctatggagtacattgtggttgcatttgcaattgaagctggaatgcttcctgtcaaatggttcagggcaaggataaggtattgaatttttggtagggcgttgccaagatcggagggcagtgtgccgtccagttcgttcatctccacaccaatctgaacaagtgaggacaggttgaagatcgttcttgggatgttccctgagagatggtttacttgcagtgccagcatctcaagcttactgagcctaccaaggctctcagggattggtccactgagctggttgtcattgagatacatttcccttaacgacgagaggttgccgagtgacggtgggatgatcccagtgaagttgttcttccctagtgacatgatcttgatcctcgacaatccgtcaagccaatcagggatctcacgattgagtttgttcaggtcaagttttatgctcacgaggcgagtgcagttcctcaagccatgtgtgatcccaccttggagcgaattgtttgacatgtagagtgtcgataaccatggcagctgcccaattgtcgaaggcatttcaccttggagtgaattgtttgacaggtcgagatatttcattcgcgacaatcgcccaattgttggagggatttcaccgtgcagcagattgtagctgaggtctagagttctgaggtatgtgaggttcccaatagatggggctatgtagccaacaagccctgctgaggacagattcagtgccaagacccttctcttatgcttgatgctgcaaatgacaccatgccaccggcagaagtcagtggttgcgttccatgaggccagtgcatctgactggttgcttagacctgctctgaatgctagcagagcatccagatcagtctcattgctgaatgcttgagcatattcggtagatgccat

SEQ ID NO: 50353 - DNA, 624 bp, Oryza sativa
  Clone ID: PAT_MRT4530_52848C.1
atgatcatgaaccttagagtggtggtgaaggacgcctcgttcttcgtcatcatgtcgccggagacgacgtggcgccagagctccatccggaaggggaggaggacggaaccggatgacgggaggacggagccggatgacgacgaggtgttgcttgtagggaggcgcgcggaggacgtcgcgccatatctccgcgttcttgaggacgagcagcgactggtgctcgtcgatgccatcgaaagtcgggatgctgatgctgtccgagccactcccgtctttctccaagcttgtgcaagcttccaggccaaagtgaactgccacacctttttcgacgcggtagatgaaatcatctttgctccgatccatgatgtcatcaaggcgggggtgtgtggtgcaccaacggacatcagcgaggtgtaccgaccggactactgccacgcgggcgccgatgtgttcgattctgggatgttcgacacagtgtgttcgatcggccagttcccggcgctggacagcttcgccgcccaggagttcgattcttttgttgtcctcgtagatgatgtgatcgatgccgtcgtcagtggcgcggtcgttgtcgtcgtagaggatgcggtcgatgtcttcgagtaa

SEQ ID NO: 50354 - DNA, 539 bp, Oryza sativa
  Clone ID: PAT_MRT4530_52849C.1
gcacgagggtggaaaacagggaagttccaacaaaagacccacaacgggggttcatgtttgagttacaatagttcactaagatgctgacttgtgttaaactgctaaactaatggaggaaattgcgtatgtactttcttggcttcttcgtgattactcttctgacaaaaaaatctgcgaaactaatcagcagaatgcagcttcgtacatctgaaagacttgaaacacagccaaacagtgcagtatgaagcagcaactaaactcaaaatgaatttcgcttctacggcagcgtcaaaattcaacatatcatcaagcatgaacactcaaaacatcagccaattaatccttcacttacggctgggtaaatgtcttgacccttgcaatggagttcctgtcatatgttcactgcatttcgtggtgatacgttttaagttggcaaagcttcacaagcaatcatttgataaagtgaacactgcttctgtccaccctattccgttcccatttcgctgccttgtgaagccaaatccttcggtgaagcagtt

SEQ ID NO: 50355 - DNA, 2205 bp, Oryza sativa
  Clone ID: PAT_MRT4530_5284C.1
atggcggctctgacggaggacatcctcctccagatcttctcccgcgtgggcagcatcaaggacctcttcaagttcgccgtgacatgccggcggtggctgcgccgcttcaccgacccggccttcctccgcgggctgtgcctggacagcggcgagggccaccgcgcgcgcctcctcggcttcttcttccagcagacgagattctatcgctgcgaaaagatgatcaagatgcgggtgacgcagcagagctcggtctgtccgcccaccttcctgccggcgccgtggtcgccgctcggcctcacggatcgcaccctcacctccttcctcgccgccgacgacgacaccttcaactacgccgagcccctcgcagcgcgctgcggcattgtcctgatgcggcttgtcccccgcaccgcgctgatgatagcgtgcagccacctcctcggcgtctgcaacccgatcaccggggaatgccacgttctcccgcctctgaatctctccggcctccatcgctacttgaccagctacgccatcatcacgtccaccgacagcgacctagatgggaagcagccgccatcatcatcatcgtcagggcgctccacgttctcgcagctgtacctcgtcgtccaacacaagaaagactgtaacgagtacttctactcctactctgctgctacgtgcagctggagcgctcccaccatgtgcgtggacggccgccgcttctccctggtgggtgagagatccgccgtcgttcacaagggcgcggcgcactggctgtttattgatcgtgtatctagcgcaacccaagatgacatactgtacaaactcaccgcggcggtggacacctcagaaatctccttgacaaggctcccctttgtgctggaggctcaccgctcctctgcgataccattggcggtgccttacccagactattcccatatatgtcagccccgcgagaagtggtttaacttcaacaggggatcaatgctcgtgctgtacaggagcaacggcgtcttcatcctcgacctcgagaagaaggtgatggaaaagctattgtctagacatggaaaagctactgctgaaaggccttcgagttctgaaggatacatatggaaattgagtttgttggtgatcacagttacaggtctgactccatggcaaaaagcccaaaacctgaacccaaagaaagaacagcccaccaccacagcgctccaaaaacggggcccactgcacatttttctttgcaacgtcagcgatccgcacggaaacgcatcgcagccgtctaaccgaaaaggcaccggacgtcacacattcatccacgtcatcgatccgcgggacaagcctctccaccaatcagcgcccacttttacccactataaactcaccgcacccgtgtcctccttccacaccgcaatctcgcaacacatcagcacacaccgctccaaagcaaaacccacggacccgcttcccctccccgagaagaagagagcagcatccatggcgcccaaggcggagaagaagccggccgcgaagaagcccgcggaggaggagcccgcggcggagaaggccgagaaggccccggcggggaagaagcccaaggcggagaagcgtctccccgccggcaagggcgagaagggcagcggcgaggggaagaaggcggggcggaagaaggggaagaagagcgtcgagacctacaagatctacatcttcaaggtgctcaagcaggtccaccccgacatcggcatctcctccaaggccatgtccatcatgaactccttcatcaacgacatcttcgagaagctcgccgccgaggccgccaagctcgcccgctacaacaagaagcccaccatcacctcccgggagatccagaccgccgtccgcctcgtcctccccggcgagcttgccaagcacgccgtctccgagggcaccaaggccgtcaccaagttcacttcctcttaggctgcacctggtgctattgtgctagtagtaatattagtttgatctatttatctactagctgtagtgcatcaatgatgggaaatggatgttggggatttagtgactgtaagaagaattaggtggggctgcttttgaggaacttctgtttcatggattcgaaatacactagtaatgcttttgtatcatgtgaatatgtgatctctcctatgttgtctttcgttgccttgtgctgaacttgtgtttgttttaatt

SEQ ID NO: 50356 - DNA, 522 bp, Oryza sativa
  Clone ID: PAT_MRT4530_52850C.1
atggataaaccagcgccgcaggcgttcgtataccgtatcagcacggcggatgagtgggcgcagcttcagcgcaccggcggcacccttggcggtgacctcgaccgctccaccggctgtatccacctcagcgacctcagtcagggcatccacaatgttagaaaaaagcaggtgaggaaaacgcttaagaactttttcctaggaaggaatgatctatacctactacaagttgacacttccaagctttcagatggcttagtttatgaggcagctgatgattcaaactattttcctcatttctatggccctggtcggagttttgcacctcttcaactagacgctgttatcaaggaggcagagaaaatagttctggtagacaatgatttcacctgcagtctacttgatggagcataccccttatcgtgatgtgtaagggtgacctttcccttgatctttataatgttttgaaaaattcgctacaggacgctcaaaagtttgcagtattttgaaaaaaaagctgcaaaa

SEQ ID NO: 50357 - DNA, 520 bp, Oryza sativa
  unsure (1)..(520): unsure at all n locations
  Clone ID: PAT_MRT4530_52851C.1
ccgcggtttgaagaattggaacataatctgagggaatgcaacttggaaggttggaactggcgcaagatgccccggatggatggttggacaagtgtgcctgctgatccctgccaactgttggtggctggcatgtgttgcttggnccagctctgcagggaatgggaaacagatgatggagatattgcatgcatggagccctgcgtctggatagaaccancaattgggtggattgttgaatgcaaggatgcaatggctnttgaggactgcaatgtgtgtgtgctggcaatacngaggctgcatgctgatggacancaaattggtgcaacttttancagacaatgcaagtgtgcgtgtacatgacatgcctgctgcggtagttcaggattaaggagcatagtgagtgagcaactgtatatatgattggttggtaggactgcgggaaattcaacgtttgtgtgtatccggtcagtttgggaattatcattccagtttatcttttnaaaaaaaaaaaaaaaaaaaa

SEQ ID NO: 50358 - DNA, 533 bp, Oryza sativa
  Clone ID: PAT_MRT4530_52852C.1
aagatagacccgttcaaagtgaacaaaggggtggatttaaacagtaataagatggcgcacgttgatatttctgacactaaagaaaaacactggtaatacttggttttgtgttatgtatccttcagtaattccaattgagttctactatacgtacgactggagctgtacgactcacatccgaccaccaatcaacactctcaacatcttcccatgtgggcctaggcatgtagcagctttgcactagtcagacacaatggtacacgctagtcatatgtatagacatttccttccaaatttcagaaggatcctctttactgatttatttctgtttaaatccctacggagttcatgtcattttactttcagatatgaaatctgaaatttccgttcttctatttctaacttgcaggacgtacagattgtgctattaaacacagtagagttgacatcttttttttcgtcacccgcacatatcattgtagtacttgtgcattttcccggaaaaaagtacttgtgcaaaaaaaaaaaaaaaa

SEQ ID NO: 50359 - DNA, 308 bp, Oryza sativa
  Clone ID: PAT_MRT4530_52853C.1
atggggtcgtttgttctcatctttgtaatcgcgattagtgcatcacttgtaccgggaggggtgactcaaagttcacctgccacctttttcgtgacctctcccaacgtgtttcgggttgatgtgcccgagagcgtcgtcgtaaccctcatcagatccacaccaaacgttcagaatgttcaagtgagagtctctttgaggcggcctggttcgggtgtacatttttcggaagatacaagagctgtcagcccaggtagctctcagtcgctttaaataagaagcactgtaagccagactatgagacatttatt

SEQ ID NO: 50360 - DNA, 610 bp, Oryza sativa
  Clone ID: PAT_MRT4530_52854C.1
ttaccattgcgggtgctctaagacaccgctgccttcgtccgctccggtcgcagccggcggcgccacaactgttatcctcccactcccaccagccggtttcgcccttttcgtcgccatccgctccttgtcgccgtattggatgagaagctccacggtgccgccgagctcaaccttggcagattgagggacggtgtcaacctcggcggcggattgaggcggcccctcttctccaccccttatcggtgaacacagatgcaagtggtgtgggtcgacgactgcagatcgagcgatgaataacatctcatttggtcatggatcctgacgggtgagatctactcagctattttgcattcgtgcatggtgggtaccgactcaccatcagcctctccaccacttacattttcctggtttttcctgcttagcagagtttgatcgttgcgaagtctctaggccgcatcccgtgcagctgagcgcaactggcgctctggagactcggatctggtgtacctgcgggtcagccatcgtttagagagcaatcttctttatactggaagagaaatcatggcatctatggaagacattggaagtgcattaatccccctagtgggta

SEQ ID NO: 50361 - DNA, 2691 bp, Oryza sativa
  Clone ID: PAT_MRT4530_52855C.1
ggcaaccatggatgcacactctgctttcatgtttctcctcactttgatccatcttcttttgcagatatcagctcgtgatttcctctcacctggctcctctctctcagtagagcgcagttctgatgtgctctactcaccagatggtactttcgcctgcgggttctacaacatctcccccaattcctccatcttcgcagtttggttctccaactcagctgaaaagacagttgtgtggagtgcaaatcttggtcgtcctgtgtacacctggggatccaagatcaagttaaacatcgacggaaatatggttttacaagactacggtggtcagattgtgtggacaaacaatgtgagctcttcaaatgtccaagaggctcggttattggagagaggaaacctcatcgtgaaaggccaaggtgatacaattctatggcaaagctttgcttctccaactgatactttgctacccaatcagattattaatggtactataaaactggtatctagtactagtagtaatagattacttgttcctggccactacagctttcattttgatgatcaacatttgcttacattgtttgatgacgagaaggatatctcttttatctattggccaaatccattcataaacatgtgggcaaagaaaagaatatcatttaataccacaacatttggagttcttgatagctcggggcatttccttgggagtgataatgcaagctttatggctgctgattggggtcctgggattatgaggagattaacactagattatgatggtaatcttaggttatacagtctcaacaagacagacggaacttggctagtcacatggatggcatttactaacctctgctttgtacgtggtttgtgcggcatgaacggaatatgcgtgtatacacctaagcctgcatgtgtatgtgcccctggacacgagatcaatgacccaagtgacttgagtaaaggatgcaagccaaagtttacaatcagctgtgacagaaagcagaagataagatttgtgaagctacccactactgaattcttagggtatgatcaaagtacacatcagcaggtttcgcttagtacttgcaagaacatatgcatgagtgattgcagctgcaagggtttctcatactggcaaggaaatggtaactgctatccaaaatcttcacttgttggtggtgtaacaagccaatcattgcctggttcaacctatctcaagcttcctgaggctttaaaagtccgcgagtcctccattccccgctcacagccttctggtcgtcaatatggccctaattgtagcgcagagaaccaatattccattgcaaatttctcagatatctcaagaagtggtcaaagtgaatcaagatttttctacttctacggattcttatcagcaatatttctcatcgaggtaattttgattgcattaggatggtggtttattttgagaatggagggcaggcaattaacaggagtatggccagctgaatccggctatgaaatgataacaagccatttccgcagatacacttacaaggagttgcagagagctactagaaaatttaaggaagagcttggcaggggagcatctggtgtagtgtacaagggaatcttgaaagacgagagggcagtagccgtgaaaaagttggcagacataagccaatgtgaagaagaattccagcatgagttgagtgtgatcagtaaaatttaccatatgaacctagtgagggtatggggatactgttctgatggtccacacaggatgttggtttccgaatatgtggagaatggttcgttggacaagaagttatttggaagtgaggcctcccagaccttacttgaatggaagcaaagatttaagattgctcttggggtggccaaaggtttagcatatcttcatcacgaatgcttagagtgggttatccattgcgacgtgaagcccgagaacatactgttggatgataacttggagccaaagatcaccgactttggccttgcaaaactcctgaacagagggggatccaataaaaatgtatcacgtatccatggaactagaggttatatagctcctgagtgggtttctagtctcccaataacagcaaaggttgatgtctacagcttcggagtggtccttctagaattattgaagggaagtcgtgtttcagaatgggcaaaaactgaggatgaagatgatgaggttgaaaaggtccttcggcgggatgttaggatgctggcagagaatgtgaagttgcaggaggatagcgaacggtcatggatcactaacttcattgactcgagattgaatggccagttcaactacttgcaagcaagaacaatgatcaagttggctgtttcatgcatagaagaagatagaagcaaaagaccccccatggagaatgtagcgcagatgcttctatcagttgatgaagaaaatatcattacatagcaacttacctgtcctgcatcaaaatgtagaaccatttggcccatcaatgtaaaactccccccagacggaaaaacatgtcttttgggacagctgaattgacctgcgctcagtgcaatttgcttgtcggaaatggcaagtaatattgactggagggagcatatttgtaacttgtactgtaagaaactaaaattatatgaggcaatatgtgctctagcatcaatcgaaaatgggtattttgtccc

SEQ ID NO: 50362 - DNA, 477 bp, Oryza sativa
  Clone ID: PAT_MRT4530_52856C.1
atggccagttggccacacactcaatcttcgtcgtcgcagctcctcctgtcaacacctgctctccgtcaacaaaccaccggccaactcatctctccagctaagaacgtgagatgtcggtgttggatgttgatgattggaactttgggagactgtcttgggaggataagaaccacagaaaccgctttgctttccttgcgctcggtacgcaaggaattgcccacagccaatgagttacagggaaatggaacttggagatacagatatatacatactggagatggctctgttagtagcttcagaggtgatggctttggggtgtccaccaacctcgagatcacaatacatactccaaaggcttcagaaggaattatgaaagtatttaaattgagtataaaaagatatggtgttgctaacttcaagaaaatgtctcacccaatttctgcttttcctgtctggttaaacaattaccccttgtag

SEQ ID NO: 50363 - DNA, 262 bp, Oryza sativa
  unsure (1)..(262): unsure at all n locations
  Clone ID: PAT_MRT4530_52857C.1
gcactgtcactcgcggacgccgcgagccgagctgagctacgccatggcgggggcggtggtgctggcgctgcttctgctgctcgcggcgatggcggcggcgtcggtggcggcagcgggggatgcgccggcgaggcgttctcggcgaaccgcgcgtacgggcgtgcagcgacctgccgcggctcggcgcgtcactgcgctggacgtacgaccgcggcgcgggcggggagctgtccgtngcgttcgtggcggcgcccgcggcgcg

SEQ ID NO: 50364 - DNA, 972 bp, Oryza sativa
  Clone ID: PAT_MRT4530_52858C.1
atggtggaggcagtggcgtcttttcggagaggaggcgttggcattgccgggatgagcagcagcactctggaggaggtgcagatgcaggagacgctcatcttctctgataccatcaaggatctcaagatgctgaagtcgcagctgtactctgcagcagagtatttcgaactagcctacacgcaggaagatgacaaacaggaggtgatgaacaacctgaaggagtattccgtgaaggcgctcgtcaacactgtcgatcacctgggatccatatccttcaaggtttcaagcctcatcgatcaaaggttcgatgaggttgacgacacaaatctccgggtgtcctgcatccatcagagagcccaagtgagccaagcatgcatggacaaggaaggcctttcacagcaatcattggtgatcacagctcccaagtatcacaagaggtacatcttaccagcaggagatggttcaatgcctaatgctgtgcccaacttcagcgagatgaggaaggccaagaacagagctgcacagatgcaacaggtcttcagcgcagcagcagcatcccaagcaaaagccaaagagaagcaaccttcattcagcaagcttcggtcgatcgcccgtgcaccttcgcaacgtgcacgctcgtcgtcaccagcacagcgcccaccttctgagaatacaatacccaccaaacgagcagataagaggtcagaatcgccaattcccaggaccacgccactcacaaggtctggatcacttccacaaaagccatccttgttgaaaacttcaagtgtcagagttcagatgcacacatcagagcacaagaaattggcatcagtgaggtcacaagctgacagaaacgatgacaaggaaggcgagcagactccaaagaagggcaagaagtttctcaagtcgctgctcagcaggcgcaagtccagaaaagaggagcctttgccctgttactttgatgattactga

SEQ ID NO: 50365 - DNA, 500 bp, Oryza sativa
  unsure (1)..(500): unsure at all n locations
  Clone ID: PAT_MRT4530_52859C.1
ctcccagcctcagccagccatccttcctctctctcagctgcatcggccgggggagaatcggagggcacgccggccacgagcgcgccgccgtttagatgaagtcgacggaggagtccgggaaggggaggcggcggtcgttcccagcgatagcgagcggcggggagcgcttcctggcgacggcgacggcggtggagacgctgagctcccgcatggcgagggcctcctgcacggcgccgaggcaaatggcgcgggaggtcggggaaaggatgccgttggcgaggagggtggcgaggagggtggcgtggtagtcgacggccttccgccagtcgtgggtgcgccaggcgtcgggggtggcgacggcggccattcactgttgtaggacctgatataaaaaagcaagtagagtgagacaaaatcaggattcttttgatggatagtgaatgtagttatgtacactgatgctgatatcttgacattttagccggaagtcagatactant

SEQ ID NO: 50366 - DNA, 787 bp, Oryza sativa
  Clone ID: PAT_MRT4530_5285C.1
acgccgcaatctcgcaaatcccaccgcttccctttcctctcctctccccgagaagaagagggcggcatccatggcgcccaaggcggagaagaagccggcggcgaagaagcccgcggaggaggagcccgcggcggagaaggccgagaaggccccggcggggaagaagcccaaggcggagaagcgcctccccgccggcaagggcgagaagggcagcggcgaggggaagaaggcggggcggaagaaggcgaagaagagcgtcgagacctacaagatctacatcttcaaggtgctcaagcaggtccaccccgacatcggcatctcctccaaggccatgtccatcatgaactccttcatcaatgatatcttcgagaagctcgccggagagtccgccaagctcgcgcgctacaacaagaagcccaccatcacctcccgggagatccagaccgccgtccgcctcgtcctccccggcgagctcgccaagcacgccgtctccgagggcaccaaggccgttaccaagttcacttcctcctaggctgtacgcctgcatctagtcctagtagtaatagtagtttttatatgtttatgtggtatattgtttaagtgatatccaagattggaaatggatgttaaattgttggtttggtagtcattggctgtaagaagaatggctttgggttgcttttgggaaacacttgcttcacggatcgggcataagtaaccatgcttttataacatgcgaatgtgtgctttctcttgtgccatcattgataagaattacccttgtgcc

SEQ ID NO: 50367 - DNA, 306 bp, Oryza sativa
  Clone ID: PAT_MRT4530_52860C.1
atgacaaccagaacggtgctgttgtcggagtactcggactcgggccacgacaacagtggccggaacggagctgtcgccggagtggttggacatggagttggagccggtggacgtgggctgcacgggtacatcgcgtgcgcggtggtgcttctggcgtcaactccatatgctcctctccacattcaaggcgacgagctccagcatggggtgtggacggcgaaggacgactgccgctggcgacaagctccggcgtgggacgtggactatgagcccaccagcaacgacgcctcggttcctaactcctaa

SEQ ID NO: 50368 - DNA, 3004 bp, Oryza sativa
  unsure (1)..(3004): unsure at all n locations
  Clone ID: PAT_MRT4530_52861C.1
cagcatgttcgtcagcgcgctctcccacgcccccgtcccggtggtggggaagaggaagggggtgccggtggtggtcttgaagatctgcttgacgtcctcgagtttttttttgttcagacttattgccatgttatgtgctatcattgaacattttaacagttgaactggatgtattcacaagatcaccgaagccccggagttcagatggtagcagctaaagctagttctgccagcatctttacatcacatggtaactcggcaactacattacatgtataaaagagcaaacaaaatgacgtacacagttgaggatgaccaacagaagattcagctcaaaacaaagctagtattactgggtagtacggcaagcatgatcagaaaaatcgatttagacatagtagatcatgccgacttcgacgaggctaatgtggggtatgtgcagcgccaccgcgggacccctgcagttcttgcggaggaacgagtaagcgtagtcgatggcgaacgtcttgaggaagttggagttcttccttgccttcacgtaggagtggccgatgatgtaagtcacgccggcctccttggcgtccaggagatcagccagctcgtcccgcacctgggggtcgatccgctcctcctccgcaatctcaaaacggactctgcgacgccggctgagactaccggactcctgctcgtagatggactggaggctccggagcgtctccgacctgctgctccttgtcagggacgtgcctgaagcctcgttattggagtccctcatcaccagaccggtgccggttgtgtcctctgtgtgtatgacagccatcctcccttccgaagattcgtagctcccagaggaggctgcctcctcggcttccatttggatgaacttggcaatgctcatcaccaagtggttctcaaagttctcgtcatctttctgcacatctttgtagccatacctcacgatgcaccggtacatacggtattccctggggccgatccgtccaatgaggtaccgttcgtcctctggaacgaacggcacaggtacggacttgacgcaaacgaagaccagaacctgatggaaagcaggcaggttggtgacaaagtgcgagaagatggaaggcaccccggtgaccagctctgtgtagatgagaccgattccaggcacccgaacgatcccaaggctcggaccaagtgtcaggatccatttcattgagaccttgttctggagatcaaacaggtacttcctccgagagccgtagtgccatacgtacatgacgagcatgaacacgaaggcaaatacgattggtgcccatcctccctgaggaactttagtgactgctgccgacaggtacaccacttcgattgacccaaacgccacgacaaataacaaggcgagcaggatgtttttttgccacacaaatatgataaccaatgccatcaaccaggtggtaacaaacatcacaacgatacacgcaagaccgtaagcatttccaataactgtcgtgtctcggaaaccaagtgtcacagcaagacaaagaaccatcagaatccaattaatctcaggtatgtaaatctgaccatggatccaccttgatgtatgcacgaccttaacccgtggaaaacatcccaaagaaagacactgcttaacaattgaaaaggtagcagatatgatagactggctgcccacaaccgctgcaagagttgcaatgacaaacactggccaaaacagggatcttggtacagattggtaaaagctatcttctacagctgacatgtttctggaaagaaatgcagcctgccccatgtattgcagcacaagacagggatatatggcaccaacaaaagccaacctaatagatgcagcagtgaagtggccaagatcagcaaacatagcttcagtacctgttatagcaagaagtactcctccaagagaaagccaaccatcttttcctgtcatcttgaagaactttataacataatgtggagaaagagcaagaaatattctgtggttccagtggatgatattataaagcccaataacaccaatactcaacagccatactacaacaatgggcgcaaacataaatgctaccctatgagttcctcggtgttgcagtgcaaacaggccaacaagcacaatacatgcaatgaacaccacccaaccatctggtattcctcctgggccagggtcttttaaaccagagatggctgacaagacagagatagcaggtgtgaaaacaccatcacctatcaccatgcatgcgccaaacagaacaaaaagtagtaaacaagtccgtagcttcctgtgcttctccaggaatcttttgagtggagaggaaataatgccaccaactccaggctgatagtacgttgaaagctcttcgtctgccgattgctggtttggaagcaggctgaactttgcatgcctgcagagaagtgagtataaagcaaatgttccaccttccccattatcatctgcgttcaatacaattattacatacttcagcaacggaagaagtgtcaaagtccaaaatatcagcgaaaacaatccaaatatggttgtctcatcacggtaattattcagcctcccagaaaatgcacttttgtagacgtacaggggtgatgtactcaagtctccatagaccacaccaaagctctgaaatgctagcagagagatagttctgcaataacttttccattggtcctgcggcggggccgggccgggcacggcgaccctgtgattgtgaatagtaactattactgagaaccgatcagtacagtccagtatgtaaaacaagagagaaagcagatattggtagctgggcatcccctcaccttgtgatccatggcaaccttttaacttagtcgacgaggaagccctattctttttttttcntccgcgcccctcctctcaggcgattctacagtagggggaggacgaggaggcgaggggagaggaatcgcgaggaatggaattcggtgggccggacgcgatcggtcccaccgc

SEQ ID NO: 50369 - DNA, 478 bp, Oryza sativa
  Clone ID: PAT_MRT4530_52862C.1
atcctgctgggttggtttccttgatgagtctgtacgtctctccgactcggactcgggaagctccaacaacacccggacttcaagccatcactcccgcgaggaggacctcactcggcgtctaaacgagctgcgacagcgcggccgtctcgcccaaaatgccatcctccaagtcaagttgggagaacatgatgtcttcaccacgctacagaacaacatgatagccgccaaggccctcctcgacaacatgccgattccaggcgacccggccgtcaagaccaccatcgctcagcgactcctctggcaagagaccatcccgccacaaaataccgggtcaaggcgtgtcgaggcatctcaagcgggaaggtcacacccaagtctgcgcaccagcgacctgcgcgacaagatcgaggtgggacgtcggctaaacgccgacctccgcaacgtcatgaacaagcgtcgccagctccgcgacgcctaa

SEQ ID NO: 50370 - DNA, 564 bp, Oryza sativa
  Clone ID: PAT_MRT4530_52863C.1
atggagggcatcggggtaagcgatgcacatgcgagggcagcaagacttttgtggtcagactggattaaaaattcattatggtgcaagtatgatttccacttttccacagcaagagaggtgggaattgattgcttcgatgatctgatcccgcaaaagctttggctccctcaactggctaagcgagatcgaacgccaggtttcatcacggtggagtacgacaagccaaggtacgtgaccaagatggcggccaaagtcatcgatcaggatggcaagctagatctactcttgaagaagatggaggattccgatcgcaagtgggaagagagcgagaagcgcagggagcagtcggaggagaagagccgaattgagttcatggctctcaaggtggtggtggaatctcattttacagtcgtggagaaacgcgtggatgaactccaaggttcggtggtggaattgcaagacaaggtcgagaagctgcagattgtggttcagcaggcttcccgtgagccattttctgctcctacgtctcctacaggtgctatttcccaccttaccttctcctga

SEQ ID NO: 50371 - DNA, 183 bp, Oryza sativa
  Clone ID: PAT_MRT4530_52864C.1
atgacacgtttccgtgcaccgacatgccaccacgacataccggaaagaggccggttcgccccgtccccagcaggcaacgggcagcccccctctcgtgccgtggtgaatccggaagccgatcaaacggacgccccggccgacccaactccatcacgcccaccctcgcctgggtacgtcggctag

SEQ ID NO: 50372 - DNA, 435 bp, Oryza sativa
  Clone ID: PAT_MRT4530_52865C.1
gccactgcgttcaaagatcccatagactagaaagataagtgtcattttcccaccttcttactaccttttcctattcttgaacacaaacatttgctacctcaaaatgatttttattcatgtgatccctaagaatattggcatgcagtctgcatacattagatgcttacaccaatacttcgcgtagtaggaattaagaaccacctgtaaaaaaattacattcatgtaggtgatgactgatgaatgagagtgagtgcatcatgcactgtgcatgtttatgctcaatttctgggcaaagagatcaacttgcatctggcaatcaaactagatatctattccattatctaaacatcttgccatgagctaatctgctaaaacagagaagtaatctgctacttctactggatcttctttcacactggaattcaattagttcag

SEQ ID NO: 50373 - DNA, 396 bp, Oryza sativa
  Clone ID: PAT_MRT4530_52866C.1
atggcgctcgccctgcaggccgactgcttcaccagcgacctgagccagctcatcatcgccgacgtgatgtccgggtcagtgccgctcgacgcaagcacgagtatctcgggagggtggccatcttggagaggccagagcgccggatcttgttatcacggacggcgggaggcggcggagggagcagggagctcgttccttggtgagggcgccatgctggtggagtttacctcggaccagacacatccagagccaatgtggccaccacattgtacattgcagtgtagatcctctgaagcttcctgcttactatgcaggatgttgtacaagatcaagggattattttctgtactgaaattatccactcaactgtatgatgtttctgtagctaagctttag

SEQ ID NO: 50374 - DNA, 447 bp, Oryza sativa
  Clone ID: PAT_MRT4530_52867C.1
atgctcgtcctcatcctcttccttctctatctacccacagctgggaggacggtgacacggctcgccctggatgcagcgaggtggcgcctactcgtgttgtacacctacctggcgccgtggttcgtgtacgctgccgtgggcgcctacgagctcgactcctggcgctgcctctccctcgctcgcctcgatgggccaggcgggtgtgcggccgacggcagagcgggcgcggccgccggcgctgcgggctctgcggcgcacggggaagaagcgggagagggggagaggaggcggccggcaccagagaagggtagggaggcggccagcgcgaggcccgcgccgaggtggagggcgtgggggcccctgcgctccccgcgcgccaccgcctgcgcgtggaggggaaccggtggcagcgggactggaagttgtcggaggccgccgcgcgcctag

SEQ ID NO: 50375 - DNA, 312 bp, Oryza sativa
  Clone ID: PAT_MRT4530_52868C.1
atggaagtattttgtgttggcatcgccttctctgaggtggagaataacctcaagggccatatgaagttgcagtttactctgggagatgagatttctgctccaggatctcaagctatcggccgttaccccaagtttatggaaaagtcggtggtgggctttatggtgtggctgctccatattccaggcagtagacactacatcttggaagccaggcaggtgaatccagaagttctcaaaccggaaggttttgacacgcggggcttctccttgtctagtgagcagcagtggacagtgatccgacaaggaggttga

SEQ ID NO: 50376 - DNA, 398 bp, Oryza sativa
  Clone ID: PAT_MRT4530_52869C.1
cgggaaaccctggaagacataccacgcttgccacaagcgggaatgggtaaactacttgatctgtagtatagctttcctctagctgacatttccaagctagggtgggtgtgatggagtatggatgggccctacgacagcctttgctgcttccgaattcaccgtggcatgagggggggctgcccgctgcctgctgggggcggaggtgaaacctgcggtgtgatgtgattggtcagatggggttatatgaaggatcttgtcacaatcactcgacatggtgacatgtcatgcatggcacggtgacatgagtggattgtgtcttatgggtacagttgtgcacctctagctagagtaaaactattcgaatagccgtgcccgcggttatgggcgatcgaccagat

SEQ ID NO: 50377 - DNA, 937 bp, Oryza sativa
  Clone ID: PAT_MRT4530_5286C.1
ctcgcgaatcccaccgcttccctttcctctcctctcctctccccgggaagaagacagcagcggcatccatggcgcccaaggcagagaagaagccggccgcgaagaatcccgcggaggaggagcccgcggcggagaaggccgagaaggcccccgcggggaagaagcccaaggcggagaagcgtctccccgccggcaaggccgagaagggcagcggcgaggggaggaaggcggggcggaagaaggcgaataagagcgtggagacctacaagatctacatcttcaaggagctcaagcaggtccaccccgatatcggcatctcctccaaggccatgtccatcatgaactccttcatcaacgacatcttcgagaagctcgccggggagtccgccaagctcgcccgctacaacaagaagcccaccatcacctcccgcgagatccagacctccgtccgcctcgtcctccccggcgagctcgccaagcacgccgtctccgagggcaccaagtccgtcaccaaattcacctccgcttaggcttcacccctgcatctatctatgtgttagttttagtgctatcgatgattggaaaatggatgttagatcgttagtttggtagtcagatgtcagtgatctggaacagtagctctgattttaaaccatgtgaatgtgattcctgggtatgtgatgtttgaccgccttgtgtctgctggtcaacgagtgataactagatctaatttttgtggaactatttacatggttgctacttgcattctgttcaactgttgtaaattcctctgtctctcgttggagttttattctctggagcatgtgtggaattgcctgggcatgcttttgggaaactatagtctgtagtcctatgttatgtttggttaattggttgccctgagcttgttggaattaatctatgtataattttgtgc

SEQ ID NO: 50378 - DNA, 342 bp, Oryza sativa
  Clone ID: PAT_MRT4530_52870C.1
atggcgcaaaccctttataatcccactattggttcaaacattatgtccataacctttgcattaaatttcttaggggatgaaccattagcaccaatggataaaaccttccgagcccatctattcctatcatcaaaggtcatgttactcttcgttgtgccaataagacaaaaagatgtcaaggctatcctggattttcatgcattcaaattctccaaattctatattctcatagaccatcccatagaaaaacttcttacagatgtgccgcaaaccggtgtcatcaacatcaaactcgggataaatgtgtttccatcccgatcttatgatcgtgaaactctttga

SEQ ID NO: 50379 - DNA, 463 bp, Oryza sativa
  Clone ID: PAT_MRT4530_52871C.1
gtgacactatagaatactcaagcttgcatgcctgcaggtcgactctagaggatccccacttcatggaagaatctggagaacagcgggatcaagcctaccatggcgaaggacaagaggtgcacggatcgctccggatatcgcggccacggcctcgactctcccgcccgcacgacggcaccgcccggcatgatcttgcaaggaaggctaaggtgcctgtctgccgtgatgcaagaggaagggagcactgcgtcgccgggttcgagaagcgaaaggacgagtgggcggttggcgaaaggaagaagacagagtctccttctctgcccccttttatcctcgcctcatccgcgctcacctcctcatttcgcgagccaataactgccctcacgatcctcacgcccgcatttgtctcttcgcatcccgcgcccaatcatcacgtcgcccattgtatccgcttccgccttta

SEQ ID NO: 50380 - DNA, 443 bp, Oryza sativa
  Clone ID: PAT_MRT4530_52872C.1
ttttgcttaccttcctctcaggttccaaccaccataatcaaattactccaaaggccaagctcagcttccattcgtcccaggttctcagccctggctgctctgccaagatccatccatggctcctgtcttcttcctcctcctcttcagccaaatctttctctgcaccgcagtggacaccatcaactccaccacgccgctgtccgggacgcagaagatcgtctccaagggcggcaggttcgcccttggattctacaccccgccacaaggtaacaacaccgcctccggcaccggcaactactacatagctatatggtacaacaacataccgttgcagacgacggtgtggacggccaacagcgacgtgccggtgtctgacccgaccaccgcattcttgtccatcggcagcgatggcaatcttgtcctccttgatcaatccaagaaca

SEQ ID NO: 50381 - DNA, 1693 bp, Oryza sativa
  Clone ID: PAT_MRT4530_52873C.1
agaaaaagcagcagaggacatttcatatctcatctcacctattgccagtacatgcaccagtcccaaaacgacattgagccaaaagatggcacacagaaatcacccaaaggccaacccccatctccactctcgaagtggcagccatgcatggcaacagtgcagggcgccactctagtggccagaggcagcacaagtgagggaggaggtgaaagagacaaggcacaataggggtgatcagaaactatgacagagtacagtggaacagtgaccactgggaagctatctccactgtcagcaatggaggcaggcggaggaatagttactggatagcaagaaaagggcaaagcttcgctccactagacactggtgcgagtgggccccagctttagtgcccactgttcaaattacaactctggtagcacggtcacgattcgtggtttcgcactcagaaatgaagataaaagaatcatgagcgtgagaattctgatcataaccaggtggaacatagagagggatatcatatggagaaggtccctctctggacaaacgacgaatgttatcagcaagcggcggtggatgcacggtgaggtttcgcctccaccagaataggtggcagtcaggcggtcggggggaagtagaactggtggtggccgggaaatggatgggggcgggaggaaggcgagcgggcggcgtcggcgacggtgcccgtagagaatcctgatgatgctgcagtagggagtaatggcaaaggggagccctgcatttgccatgaccacgaagtagggaacgactggggacccaactcaggtcttttctccataggtacttccctgaggttcacaaagaagcccggacaaggagatgcatataaatgtggatgctgggacatcgatgtgccctgaggaagcacaggccactgaggacttattggctgagtaacaacagaacttgaagcttcaggagaatcacaattcaactggaacccagttagggtaccatcacttttcagctcatgaacgttaggctgtgaaattctcagatttaagtcaatgatgtctccatcaaccacttcattgtcggtttcaggtagaacatctccatcataagaactaggatcaaaattagtaacagcttcccttccattgaagcggatagctgcccggtcatatgctcttgcagcctcaatttcactgtcaaacaatcctagatagatgtacttcttgccgagcagctggcccatccgagcttcccaccggccacacttgtgcagtgtcacaccccggtactttgagctcccccttgcaaatcctgtgctttggcgccgaagtatgtgcacaaactcctccttggtccaattgcgcatctgcttcaagtcgtcctcatagtcattcagattaaagttgatatccgcgtcgaggcctctgaacttgatcgccgcgcgatcataggccctcgctgcggcatgagctgtatcgaaaccacccaggtacacctgcttcccgcagtcccagatgtgcgactcccatcgcccggtcctcctgtagaaggtgacgcccctgtactgggagctccgagacctcgggccgcggcggctcttcttcccgccggcgggggacctctggctctgcgccaccccgagatccgccgcgcggcgcggccacggcccctccccagccgccgccggcatcggcat

SEQ ID NO: 50382 - DNA, 246 bp, Oryza sativa
  Clone ID: PAT_MRT4530_52874C.1
atggcgctcgctaacctggacactgccgagaacactgtggatgaaagatcagccacaggttctctccttcatcaaggcgtagcactatccaggttgacgcttgacatgacaagcattcactccgccgtacaccgactctctgtgtgtgttcagcacgcggatcccccggacgcgctgactccacctgcaaatcctcaacagtgcaagggggatcgctctagatgcgaccgcaatctaccacactga

SEQ ID NO: 50383 - DNA, 1026 bp, Oryza sativa
  Clone ID: PAT_MRT4530_52875C.1
aaccaattcgcccactaacctctgcttcttcttaaggtagagagagaaatagagagagagagagagagagagagagagagagctcaggatcgacgagacaccagcgaagacgttgaggcgcgcacgtgggcagcccgcgcgtcccctcccccatcgccgccgtgctgcttagatccgtcgagctccggtcccgccgtttcttgcggcggcgagcgagcgagcgagcacaaggagttcttgctgcgcctgggaggaggaggaggaggtgcagcacgatggctgtggaccgtgggctcctcctgctcgtcgtctcggccgccgtcctcgtcgggctcgcctccgcgtcccccttcatttccgacagcgtgttcctggggagcgtcggatctacggggaggagcttgctgcaggccaagaagaattgccctgtgaattttgagttccaaaactacacaataatcacaagcaagtgcaaagggccacggtttcctgctaaacagtgctgcgatgctttcaaggaattcgcatgcccatttaatgaatatatcaacgacgagagcaatgactgtgcatcaacaatgttcagctacatcaacctctatggcaagtatccacctggtctgtttgcaaacgagtgccgagaaggcaagctaggtctttcttgcgaaggcgtttcccaaaaagatagtgtcgtttcaagtgctggccagcaagctcagagcagcttgcttgctttcatcatgctgacctttggactagctgcattgtggttccattgagttattatgtcttccatttatccaaagttggtgtgctgttgtaaccaatgaggattgagttagttcacccggctgggcattttccttttgcgtgtaaaatcctttgtaatttatggcagaggctacgtattatctggaatctcacttctcggttgactacttagaactcaaaatctgtcgctgcattgtaactgctacattatgttgcatcaaattcatgtcaaaaaaaaaaaaaaaaaaaaaaaaa

SEQ ID NO: 50384 - DNA, 153 bp, Oryza sativa
  Clone ID: PAT_MRT4530_52876C.1
atggcgtccgacgaggcttctggttgcaaagaatctgaccccacacgagctcttgtcttcctctccaccccctgcgccccgagcccccgagcatggcgatcctcgcatcccctgctccctctccagctccgtcccgcccgcagggacgcctag

SEQ ID NO: 50385 - DNA, 513 bp, Oryza sativa
  Clone ID: PAT_MRT4530_52877C.1
atgatttacatccgatggcactggaggcgcgcctctcctccctcccagatcctcttgtcccacaccttcttctctcccacttcgcatccatgccgccagtattgccgcgatttcctccccatcccctccaacaacgcgatctccgccaaatcccccgcaaggccgcaagcccgcaacacatcccctcgcatcgcgttccatctctcgctagatcactgtcgcctcgccgccctcacggtcgcactgcataggccgattcgacgccgccacgagtcgctgcccgtcttccgcggccacgccatcaccgcctggccgatcgatccccgtcgaccacgaccacgccgcccgccgattgcccattgccacccgccgatcgtcgacctcgagccgtacacgattcaccgccaccgccagtcgccacattgctgtcagatccggttcttcgccattgacatccaccggtcgtccactcccacaacgccgctcacgtccttgttcagatttgctgtgtag

SEQ ID NO: 50386 - DNA, 804 bp, Oryza sativa
  Clone ID: PAT_MRT4530_52878C.1
atggctgtggaccgtgggctcctcctgctcgtcgtctcggccgccgtcctcgtcgggctcgcctccgcgtcccccttcatttccgacagcgtgttcctggggagcgtcggatctacggggaggagcttgctgcaggccaagaagagtacgtttccctccatttcttgttcagttccatccttttgtaacttcaattgctcgtggtggattcgaggttgggttaagagagatgcttgttgctacatttataccattgtgaggtgggactttgacaacagggttaagtataacataccaatggaaattacaaaccacgctttgctgcaactgcttttccaagattatgaactgttttatgatgggtggtgtgaggtgctcagaatctattgcacgccaaaagtgcaggagtactccttaccttctctgcatgctacaagactttcaaattgccctgtgaattttgagttccaaaactacacaataatcacaagcaagtgcaaagggccacggtttcctgctaaacagtgctgcgatgctttcaaggaattcgcatgcccatttaatgaatatatcaacgacgagagcaatgactgtgcatcaacaatgttcagctacatcaacctctatggcaagtatccacctggtctgtttgcaaacgagtgccgagaaggcaagctaggtctttcttgcgaaggcgtttcccaaaaagatagtgtcgtttcaagtgctggccagcaagctcagagcagcttgcttgctttcatcatgctgacctttggactagctgcattgtggttccattga

SEQ ID NO: 50387 - DNA, 551 bp, Oryza sativa
  Clone ID: PAT_MRT4530_52879C.1
ggggcggacaactgggtaacacactggggaatttcacatcgctaatcaccttagatcttagcaacaataatatcggtggaaccataccagataatctgccaatcacattgcagcgttttttcctttctggtaaccagctaagtggtagcattccaagtacattgtcgacacttacgcttttgacaggcttgtccctcaataacaatcatttatctggagagataccagatgcattttcaactctaactggacttgcaaatttagatttttcttccaacaacttgactggtcctttgccaccttcaatgggaaacttgacagcattgactagcctgcatattcagaacaatcaaataattgggttgcttaatgtgctgcaagatctccctctccaagatttgaacatagaaaacaatcttttctccggtcctgtgcctgtgaaactagagaacataccaaattttaagaaggatgggaacccattcaataccagcatagccccatcagcattgcctcctgctgcaccgacaccattaccatcagtatcacct

SEQ ID NO: 50388 - DNA, 2356 bp, Oryza sativa
  Clone ID: PAT_MRT4530_5287C.1
atggcggctctgacggaggacatcctcctccagatcttctcccgcgtgggcagcatcaaggacctcttcaagttcgccgtgacatgccggcggtggctgcgccgcttcaccgacccggccttcctccgcgggctgtgcctggacagcggcgagggccaccgcgcgcgcctcctcggcttcttcttccagcagacgagattctatcgctgcgaaaagatgatcaagatgcgggtgacgcagcagagctcggtctgtccgcccaccttcctgccggcgccgtggtcgccgctcggcctcacggatcgcaccctcacctccttcctcgccgccgacgacgacaccttcaactacgccgagcccctcgcagcgcgctgcggcattgtcctgatgcggcttgtcccccgcaccgcgctgatgatagcgtgcagccacctcctcggcgtctgcaacccgatcaccggggaatgccacgttctcccgcctctgaatctctccggcctccatcgctacttgaccagctacgccatcatcacgtccaccgacagcgacctagatgggaagcagccgccatcatcatcatcgtcagggcgctccacgttctcgcagctgtacctcgtcgtccaacacaagaaagactgtaacgagtacttctactcctactctgctgctacgtgcagctggagcgctcccaccatgtgcgtggacggccgccgcttctccctggtgggtgagagatccgccgtcgttcacaagggcgcggcgcactggctgtttattgatcgtgtatctagcgcaacccaagatgacatactgtacaaactcaccgcggcggtggacacctcagaaatctccttgacaaggctcccctttggtgctggaggctcaccgctcctctgcgtcagtggagacggcaaactttcggtcgcttgcgtgtttcccatccacatgagagtttggactcagcaagatgacacccctgcaacgtggctccgcactgtgatcaggataccattggcggtgccttacccagactattcccatatatgtcagccccgcgagaagtggtttaacttcaacaggggatcaatgctcgtgctgtacaggagcaacggcgtcttcatcctcgacctcgagaagaaggtgatggaaaaggtcatggactgcttactgcccctattcagtgataaactgaacaggacggctgtggcgtatgagatggacttggttgagttctttgtgctccagctcagtggatacatatggaaattgagtttgttggtgatcacagttacaggtctgactccatggcaaaaagcccaaaacctgaacccaaagaaagaacagcccaccaccacagcgctccaaaaacggggcccactgcacatttttctttgcaacgtcagcgatccgcacggaaacgcatcgcagccgtctaaccgaaaaggcaccggacgtcacacattcatccacgtcatcgatccgcgggacaagcctctccaccaatcagcgcccacttttacccactataaactcaccgcacccgtgtcctccttccacaccgcaatctcgcaacacatcagcacacaccgctccaaagcaaaacccacggacccgcttcccctccccgagaagaagagagcagcatccatggcgcccaaggcggagaagaagccggccgcgaagaagcccgcggaggaggagcccgcggcagagaaggccgagaaggcccccgcggggaagaagcccaaggcggagaagcgtctccccgccggcaagggcgagaagggcagcggcgaggggaagaaggcggggcggaagaaggggaagaagagcgtcgagacctacaagatctacatcttcaaggtgctcaagcaggttcaccccgacatcggcatctcctccaaggccatgtccatcatgaactccttcatcaacgacatcttcgagaagctcgccggggagtccgccaagctcgcccgctacaacaagaagcccaccatcacctcccgggagattcagacctccgtccgcctcgtcctccccggcgagctcgccaagcacgccgtctccgagggcacgaaggccgtcaccaagtttacttccgcttaggctgcatgccttcctctagtttgttagtagtagtagtagcagtagattgatctgtttatgtggtagtttaagtggaaatgatgattgcaaatggatgtaagaattgtgcggggcttcttttggggaactcactgatctggaatagtaatgctttttatgtcatgtgaacgtgtgtagttggcggttgtggcgctgcttttggtaaactgttgcttatttatctgagatattaacgatgctcttctag

SEQ ID NO: 50389 - DNA, 1331 bp, Oryza sativa
  Clone ID: PAT_MRT4530_52880C.1
ccacgcgtccggcgcgcgaggccgacgcaaggaggagaggctgccccggggggagagagagatcacccgcctcgccgcccgcccgcgccgcggcggatcgatggagctgttcgagcgcgcgaggacggtgcggctgcgcggccaccatgacaagtacctgtacgcggaggaggacgagtcgcgcgtctcccaggaccggagcgcctcgtccccgaacgcgcggtggtccgtcgagccggtcccccacgcccccggcgtcctccgcctccgcagccactacggccgctacctctccgcctccaacgagcccttcctcctcggcgtcaccggccgcaaggtcctccaggccctcccccaccgcctcgactcctccgtcgagtgggtccccgtccgcgacggcgcccacgcccgcctccgcacccgatacggcaactacctccgcgccaacggcggcctcccgccgtggcgcaactccgtcacccacgacgtcccccaccgccacgccgggtggatcctctggaccgtcgaggtcgtcgaggtcctcccggaatccctcgtccccgcccccatcgcctccgacgacgaccccgccgcgccgcattacaagacaccttctcgcgggccctctcccgtgccgacgccggcgctggcgcctgcttcgccgccgcggcaccgtccggcgagcccaccttcgtacttagcgcggccaccgccgccgccaccgggctacatcgagccaccacagggatacatcgagccacctccaccggagcccaccctggcgagaattgagtccacagaatccttctcgctgccgctgcacaaggtggatgggcgggcgatccactaccacattggggatgacaacggcgacatcggcgatgatcaggaaggacactcattcacgttcaacgggactagcctggaggagcttttggagaggttgcaggaggagacggggctcaacgacgtgattatctgctctcgtagcccgatcaatgggaagctcatgcccctccgcttgcagctgccgcccaacaacgccgccatgcatatcgtgctcgtgcgtgagtcatcaaaaggagaaaaatcatttctagagtgatgtggtaaaatttgaagagggtggtgtcagcgactcaaatcaagcaagaactgtgcatctgttgtatatattgtaatccctgtttattatcagttccactggctaccataatcaagtattattcttccatcttcaggagatctcattcttgtaagtatttgcttctgtcaacttttttatcatttattcaacaggtagagtgatctctggtagctaaagacccttc

SEQ ID NO: 50390 - DNA, 123 bp, Oryza sativa
  Clone ID: PAT_MRT4530_52881C.1
atgggtgttgatcatagtgaggaagatgaaggggtcggcaaggagctcgttgtcgtcacccttgccgtgaaattgggcgcccaccccagcctttgccagcgcatgcaggcgcagcctgcatag

SEQ ID NO: 50391 - DNA, 379 bp, Oryza sativa
  Clone ID: PAT_MRT4530_52882C.1
ctctcccatcgcctccctctcctcttctcccatacacggccgtctccctctcctctccggtattctcagaggtgaagggagcctgcagtggtaacaacgacggcgcgtggaggtggatccggcgatggggaggagcataggcgaagctcgtggtgcggaggcggatccaacgatggggagcagcgacgaagctcgtggtgcgccgacaacgcgagctgcggcgactcaggccacgggcggtggatctggcggcccggggagtcgcaggcggcggtgggtggtgaaggagaggggcggtcgtggtggagaggtggatctggcggcggggagcggcgtggtcggtggagccgtggtggggaggggtgcgggcggcggctaa

SEQ ID NO: 50392 - DNA, 1269 bp, Oryza sativa
  Clone ID: PAT_MRT4530_52883C.1
cctcctcgtcttcttccttcctcttcccattctgctcgtccgtctccgattcgcagccacatcgacagatccagccgcgcccctgatccagtggtagctcgagcgaggctgctatcacggtggaggattttcgtctgattcgaggaggaatcggtcgggtcgagcagaggagcggaagaagaaagattggtcggaaggaggagagaggtggggatgatacttctccagtcgccgtccaggttcctgctccagatcctgcaggatcgcgtcctcagtggcgacaagggcgtggacatcgattgccacacggtggaattcgacgatgtgcggtatcatatccagttttctatgaggaatccaaaggtaatggtgctatcagtagcattgcccctcccacctcctgaggccatgctatatgatggacttccacttggtgctatcgaggcaataaaggcagcttatggaccagtcgttcaaattcttgatcctccaaaggatggctttgatctcacaatgaagataaacttgacaaagcttccgccagatgaagagcaaaggaatgctgtcttgactcaaattgcatctgtgagagaggtggtgctgggtgcaccactgaaacttctgctgaagcatctagcttcaaagacggtggctcctaatgttgacaagcttgttgctcttgttcaccgtcctaatgaatcctttttcgttgctccccaggcagacaaagttacagtagtataccctatgaggttccaggattccattgatatagttttagcaacttcctttctgcaggaatttgtggaagcaaggcggactagcgctcttaacaacgccccttcctgcttgtggtctccagtaccacctcttgagttaaaaggagtaccttctgatgcactaaatgcaaatgccggttttgttacttttgaccccttttttgtctcactaactcatctttatgcagttgttttcccgcggcatgttgagggtaaaaaattggacaaaacagtttggagtttgttgacttttcatgcttatgtaagctaccatgtgaagtgttctgaaggattcatgcacaccaggatgagacgtagagttgagacgctgatccaggctttggatcgtgcaaaatctgatgcagagaagttgaagaagttggtgaatggtggatctttcaaaaggctggtttgtgcaaataccttgaattcgtgcttaaacccatcttttctttcactgattaagactctcctcgcagagcttgaataa

SEQ ID NO: 50393 - DNA, 1424 bp, Oryza sativa
  Clone ID: PAT_MRT4530_52884C.1
atgctaatgcaggattctctgtgggggatgcaccgagttgacatgtgtgctctcaacgtgttttgttttactgggaagacccacctagaaatacacggggtattccggatagctccacagggtggtcaagttgatcaacaactggatggacagtactgtctctataccgaaccaagtggtacagattcaattaactgcagcagcatttgcaacgccgttcttccaattgatatacatcgattgatcgatcgagaccagaagcaaaaacacccccccgcggtcaccggcggcgccggcggcgagctctcgccgacgccgatgaccaccgcgcggttcgtctccccctccctctcgcgcgtgtccccctcgccggccggccgagtctccgggtcgtcgtggttgtccagggctggggtcgccctccccgctcggccgcacggtctctcgctccacctgaggccgcctgctatggcctccgccgccgccgccgggaacggctctccttccgcgccggaggactccacagcgttgtccaggataggagaagtcaagagggtgaccaaggagacgaatgtgcatgtgaagatcaacctggatggcactggtgttgccgattgcagcacagggatacctttcttggatcacatgctcgatcaactggcatctcatgggctctttgacgtatgtgttaaggcaaagggtgacactcacatcgatgaccatcactcaaacgaagacatcgctttggcaattggaacggcactacttgaagcacttggagatcgaaaaggaattaatcggtttgggcattttacagcaccacttgatgaggcagcggttgaggttatactggatctatctggtcgtcctcatttgagttgcggcttaagtattccgactgagagagttggcacatacgatactcagcttgctggaaaaaactcacaccatattattgaggcaactttcaaagcatttgctagagcccttcgacaagcaacagaatatgacttgcgccgacgcggcactgtccccagattgcaatattcaaaggaaacaaatggaatggcctctacagctcctcgagtcctacttaccctgggaatctccgttggttgcgataacagaacatgaagccattgctaacgagatcaccaaaaaaggaacaaatttagcactgttctcatgatctattcttctgtaacatttagcattcgaaataaacatgtccggccgttattgcaattttggatgctaaatgtcttgagttgtcatctgtgttgtccatcaaacggcgtgtctagcagctcagtttcaatctgtatgagttcagagttggtcatgttgctgaacctctgtattttcaaggaaataaataagttttgcacctaaaaaaaaaaaaaacctcgtgccgaattcctgca

SEQ ID NO: 50394 - DNA, 564 bp, Oryza sativa
  Clone ID: PAT_MRT4530_52885C.1
actagtggatcccgggctgcaggttttttttttttttttttatttaagtttatccatatagaataatataataaaagtatttctatgaattggatcaaatttaataaaatttgctttaaaagaagcacgaggtttttttttttttggtgtgtgtgtaacatacttttgaaatcattagcagtaaaggtgctactagtagtactaattaactcatcaacactccttgaaaaaagataagagatgacaggtttaaggttagctcgatcccagcattttgcgcattcacgcatcccagccgtccacgtcacggcaacggacggcctcggaaaccccaggggattctcacaagaaccaaccgaagaggccgttttccctcgccggcggcgggcgtatttacaggcagttgctcgccggcggcggcggccgcggctgggcggcggtcagcgggaagccgaggggtgccgcgaacagcgcggcgaaggacgacggccggtgcggctcgggcgacgcgacggcggttcttgcggccgcggtcggcgccgccgccggggacgtggccgcggc

SEQ ID NO: 50395 - DNA, 373 bp, Oryza sativa
  Clone ID: PAT_MRT4530_52886C.1
gtattttccaggtacttttcggtgtcgtcaaacagggcaatggaagaaaccaagggcgcaagccgtgaactggagcataaacagaccacacaaacctggcacaaaaaaaaaaaagcaaaccaaaaccccccaagaaaacgcctgcacaaaacaccaacaccgaattggaccaccataaaactcccgagggaaaaaacaggaacacaggaaaaaggctatcgccgaaggcccgtagcacaaagggaaagggcaccaaccaaaccgacatccgcttacaggggacttgatgaatagcaaggtcctatagaaacacgccgaacccccaaaaaatggggggagcccccgggccgccaatgacccccgttccccggga

SEQ ID NO: 50396 - DNA, 1150 bp, Oryza sativa
  Clone ID: PAT_MRT4530_52887C.1
agtctccgggtcgtcgtggttgtccagggctggggtcgccctccccgctcggccgcacggtctctcgcccggcctgaggccgcctgctatggcctccgccgccgccgccgggaacggctctccttccgcgccggaggactccacagcgttgtccaggataggagaagtcaagagggtgaccaaggagacgaatgtgcatgtgaagatcaacctggatggcactggtgttgccgattgcagcacagggatacctttcttggatcacatgctcgatcaactggcatctcatgggctctttgacgtatgtgttaaggcaaagggtgacactcacatcgatgaccatcactcaaacgaagacatcgctttggcaattggaacggcactacttgaagcacttggagatcgaaaaggaattaatcggtttgggcattttacagcaccacttgatgaggcagcggttgaggttatactggatctatctggtcgtcctcatttgagttgcggcttaagtattccgactgagagagttagcacatacgatactcagctagttgagcactttttccaatctcttgtgaatacatctgggatgacacttcacatccgtcagcttgctggaaaaaactcacaccatattattgaggcaactttcaaagcatttgctagagcccttcgacaagcaacagaatatgacttgcgccgacgcggcactgtccccagctcaaaaggtgtgttgtcaaggtcatagtgttgcaggtttggaaaacaaggggtgcatgctactgttccttgtagattgcaatattcaaaggaaacaaatggaatggcctctacagctcctcgagtcctacttaccctgggaatctccgttggttgcgataacagaacatgaagccattgctaactagatcaccaaaaaaggaacaaatttagcactgttctcatgatctattcttttgtaacatttagcattcgaaataaacatgtccggccggtattgcaattttggatgctagatgtcttgagttgtcatctgtgttgtccatcaaacggggtgtctagcagctcagtttcactctgtatgagttcagagttggtcatgttgctgaacctctgtattttcaagggaacaaataagttttgcacctaa

SEQ ID NO: 50397 - DNA, 489 bp, Oryza sativa
  Clone ID: PAT_MRT4530_52888C.1
gcattacaattattcaccagccactttattcagtcatcaggcagagatatattaattactcctctgtccgaaatgtgtatatatatgtagggaagtttataagagtggttaattagctgctagttatcgccgcagtcgacgaactggtagtcgacgatgaggtggccattctggtagccttgaccgtcgctgtcgatcttggagaagacggtgtcccagtctaaatccagccccccattggcgcactggtccacgatcctcgccgtgatctgatcccctgtcgccgtgttcgtcaccgagagacatttgccacatgcatcctgaccagtgggaccaacgggcccacagaaggcggtccatccatacttctggcgccattcaagcggcttgtcagcatcccacgtggcacagtacgcgctaacggccggggcccccaaatcccaattgtttttccgccgacggtagtagtggtacgtggcacgcaccgga

SEQ ID NO: 50398 - DNA, 1809 bp, Oryza sativa
  Clone ID: PAT_MRT4530_52889C.1
atggcggtcgacaacaacttcctgcctcgcaccaagctcgagtttcccacgtacgatggcaagggcgatctgctaccatggctaaatcactgcgagaccttcttccgcggccagaaaactccggactcccgcaaggtcaacagtttcctcgccctggtgtgccgcgacgtcgagctctccgagccccagcagattcaactcttcatggcgagcctcgtcaaccccctcaagacggacgtcgcgcttcgccgaccatccactctcgacgacgcgatcatgctcgcccaggcatacgaacaacgcctccacttgggcgccaccgaccctattcccgagcgagctgtccgcgcactgcgcatggtgctgcctgcaccatccacggcgtcttcaacgccatcaactgacgctgcgtcgacgaccgcatccggcaagcagcccctggtggcagcacttccacgcaagcacctgtcaccggtagagatggcacaacgacgcaccgagggcctctgctacaactgtcatgaaaagtacgtttccgggcaacactgcgagaaatccttcatcatcgaggtcatcagcttccccgacgacacggagggcgaggacgacccgccaccggcggccaacacaatcttggctgacgctggcaagctgctcatctccttacacgccctggccggtatccgcgcactcatgttcaacaccatcaaggtgtgtgcatgcgtcgggacggtggactacctcgctctcctcgactccggctccatgcacaacttcctcagcgagacgcacgtcgtcatcggcacgtccgctttcgacgttgatttctactcccttctgttgggagggtatgacatcgtcctgggcgcacattggctcggcacgctcggtccgacgctgtgggactttgctgaccaatcgttttcgttcggcacaggtgacaacaaagtgacatgggttagcgttgacgctccgtcacccttaacacatgtcatcgctctcgacggtgcgccagacgaactgatggctgaggtgctcgacgacttccgcattctcttcaacgacccgcacgatgacgtccacaagacggcgttctgcactcaccaagggctgttcgagttcctcgtcatgctgttcggcctcaccaacgccccggcgacgtttcaagcactaatgaacaacatgctcctacccttcctccaccggttcatgctcgttttctttgacgatatacttatctacagctcgacatgggcggaacacctgcggcacgtgcgcactgtcttccagacgttgcaggatgatcacctccatttgaagcgctccaaatatcactacagcctccgtttcttccttgatcagcgcctatcaatagtgccgcaacatcagtgggctagcaagcttctcggcttcgacttcgcggtggagtacaagccggggtcaacaaatgtcgtggcagacgcactgtcacgttgcgacgagcacaccacagaagcgttcctgctttcttcgccgactttcgggctattcgacgaccttcgccgtgaggtggccacgacgccggcactgatcagcctcaccgaggacatccgcaagggcctcaagccgccacaatggtcactgacggaaggcctcatcacctttgcgggacgtgtctttgtgtcatcctcgtcgccactgcttccagtgattttggagcttgcccacgacatcggccatgagggcacccagaagatgttggctcgcctgcgcgccgacttccacattgctcgtgaccacaccaccgtccaggagtttgtgttcaactga

SEQ ID NO: 50399 - DNA, 747 bp, Oryza sativa
  Clone ID: PAT_MRT4530_5288C.1
atgggagaaaccaaagccgaacagctggtgacggccgtgtacaaggtgcacgtccactgcaagcagtgcgcgaacaccatcgtgacacagttcacgcagttcccaggagtcagagaggtgaaattggatggaggaaaggtgacagtgaagggcatcggcttcgacgccgagaagctcaggaagaaggtcgagaagggatgccggaggagagttgagctggtgcctcctcccaaggacatagtcactgaggtcaagagcaagaaggaggaactgaagatcatcactgtaagggttcccttgcattgcgcagagtgcgcagccagggtcaaagaggttctacttgagcacaaaagcatttacgcggctaagattgaccttgggaagaacttgtgtgtcgtcgagggggtgattgaggagaagaaactctttgaatacatctaccatagaacgcgcaagtacggcttcatcgaaaaggttgagaagaaggagatcattgtggaagagaaggttgaggtgaagaagaaggaagctgagaagaagaaggaaggcgagaagaaggaggaggtcaaggtgaaggagaaggtcaaggaggtcgttgctccctacttcatcccctgcacgcaccctcacttcatcgattactcacaccctgaactccatggattcaaggacacggttttcttgcattgctcacactctaatcagttcctcagtaacgaaaacccggaagcctgctctgtgatgtag

SEQ ID NO: 50400 - DNA, 5216 bp, Oryza sativa
  Clone ID: PAT_MRT4530_52890C.1
ccacccagaggcccgagccgtgagccgcaagggaaggggatgaggagggagagcacgcgccgcgcgccccgaccgaccggccgagtcctcctcctcctcggctcctctcctctctcctctctctacatctgcggccttgtccccactaccacgctctccctctctctctctctctctccttgtggactcgcagtctcgctcgctcggccgcccccaccacctgttcgaccgaacgcctccccggcgggcggcgaggagatggtgttcaaggggaggttcttctcgtcccggcacaagtcgtcggagtcgtcgagccccacggacgggagcaacagcccgcggacgcccacctccgcgccgcccgcggcggggtcgccggcggcggcgtcgtcgtcgtcgtcgtccagatccgacaagaagaagcccaaatcggagacccccaggaagcgcgacaagctcttcggcggctccgcgtccgggtccgccgcctccaagggcggcgcgggggcggcgcctgcgtcggcctcgtcgagcccgtcggcggacgggaggaaggccgccgcggcgcagcttcgggatgggggcgcgggcggggcgtcggcggcggcgctgtcgcccatcctggcgtcctcgctgggcctcaaccggattaagacgagatccgggcccctgccgcaggaggggcaccgcatcgctgccgcgctcgggagcagtaatctatcgcgtgggcaggcgcaggcggacccgtcggctgcatcggctggcggcggcggcggcggcgggaggaaggctggaagctcatgggcagattcgaccagtggcagccgggggaaagggaaagcggccgaacatccagcgcggggcgccacagcaacgagcctggaaggaaagagctctgcaaaaggtttttgcatcatgatcctgcaagccggctacaggtttttggaagatagggggattagcttatcattgccaagctcttgcattgatagtaaggggagaacagcattaagcaattcaattcaagctcccttcagagcttaccgtgtcgacgatgtgttgagttataaggagattggcgcccatgattttcattttgccgcatggtgtctagatgctaaacttggaaccaccggtgctaactgtgcatatgatccctgtgaaacaccaaaggaatcggaatctccacgctttaaggccatcatgcaggctaccagtgctccaaggaagagagtccctgcagatataaaaagtttttcgcatgagttgaactccaagggggtccgaccattccctttttggaagcctcggggcatttacaacttgaaggaggtgttaaaagttattcaggtgagatttgagaaagcaaaggaggaggtaaattcagatttggcagtatttgcaggagacttggttggtgtaatggaaaagtacgcagattctcatcctgagtggaaggaaactttggaagatttgctcatacttgcacgtagctgctgtgtaatgacaccgggggagttttggcttcaatgtgaaggcatagtgcaagatttagatgatcatcgtcaggagctcccaatgggtgtgctgaagaaactgtacactcggatgctttttatccttacgagatgtacaagattgcttcaatttcacaaagagagtggctttgcggaggatgaagttgttatggatcaacgtgataagatcatacaatctgctgataggcagatattggctcaaccaggtgatgacactacaaccagaggcagcaaaagtgatgtacgaaaatcgtacagtcaagagcaacataatttaaaatggaagagaagccaggagataaagcctgttaagtttctttcaccgcttgatacaacagatgttaaaaaggaggttgagtctccaaccagggagcgtatatcttcctggaaaccttttccatcacctgtcccaaaaccccctaaagaccctacccctattaaagaggaatcacctaataagaaaacagatacaccccctgcagttagtagccaggctgaattgaacagtccagtggaatctacatcacatcaatctcttcctcccaagcatcaacacaaaacttcatggggtcactggtctgaccagccaaatatttctgaagaaggttcaataatgtgtcgcatatgtgaagaatatgtccctactcattatgtagaaaatcactcagcaatatgtgcaagtgctgacagatgtgatcaaaaaggtgtaagcgttgatgaacgtctaattagagttgctgaagcacttgaaaagttggtagaatcttatacacaaaaagaccttccaaatgctgttggcagtccagatgttgcaaaagtatcaaattcaagcatcaatgaagaatctgatggcccctctccaaaactctctgattggtctagaagaggctcagctgatatgcttgactacctccaggaggctgatagcactatttcactggatgacataaaaaaccttccttccatgacatgtaagactcgttttgggccaaaatctgatcatggaatggctacatcttcagcaggaagtatgacccctagatctccactaacaactccaagatctaatcacatagacatgcttttagctggccgaagtgcaattaatgagagcgatgatcttcctcagattgttgaacttgctgatattgcgcggtgcattgcaactactcctctagatgaagaaagggcactctccctattggttacctgcatagaagatctgcaagaaattgtcaatcgtaggaagcatgaggctctcacggtgcagacatttggcacacgtatagaaaaactccaccgggagaagtacctactgctttgtgattcggttgatatggacaaagttgattcagcgagtactgtaatggatgaagaagatgatgttgtccgtagcttacgagctagtcctgttcacccagtcaaggatcgtacttcgattgatgacttcgaaatcattaaacctatcagccgtggagcatttggacgtgttttcttggccaagaaaagaactacaggagacctctttgctataaaggtattaaggaaggcagatatgattcggaaaaatgctgttgagagtatattggctgaacgtgatatcttgattacagtgaggaatccttttgtggttcgtttcttctattcttttacctcccgggaaaatttgtatctagtcatggagtacctgaatggaggggacctgtattctctactgagaaatttagggtgcttggatgaagatgttgctcgtatataccttgcagaagttgtgctagctttggaatatttgcactctatgcacatagttcatagagatcttaaacctgacaacttattgatagctcatgacgggcatataaagttgacagattttgggttgtccaaggttggtctgatcaacagcacggatgatctatctggtcctgctgttagcgggtcttcgttgtatggagatgatgaacctcagatgagcgaatttgaggaaatggatcaccgagcacggagacaaaagcgctctgctgtcggaactcctgattatttagcaccggaaatccttttggggacaggacatggtactagtgctgattggtggtctgtgggtgttatactttttgaattaattgttggaatacctccattcaacgcagaacacccccagacaattttcgacaacattctgaaccgcaaaataccttggccacatgtcccagaagagatgagttctgaagctcaggatctaattgacaaattattgacagaagaccctcaccaacggctaggtgcaaatggcgcctctgaggttaagcagcatcaattttttaaagacattagctgggatacccttgctaggcaaaaggctgcctttgtcccctcctcagatagtgcatttgacacgagctacttcaccagccgttattcttggaatccatcggacgaaaacatctatgaagcatacgaatttgaggattccagtgataatggaagccttagtggcagcagtagctgtgtgagcaatcaccaagatgatatgggggatgagtctagtggcttcactgagtttgaatctagctcaaatgtcaactattctttcagcaatttctcattcaagaatctatcacaacttgtctctatcaattacgatttgctcaccaaaggattgaaggatgatccaccaacgaaatctgagacgtagcagttcgtgttatatcggaatttattcatttgaagtaaccaaacaatttacaaggtgctcgcgtggtgtagatcttgtacatatgaaagtgtgaggcatgggcttgttcctattgaggttgttcctacatttcgcggagccgagtacagttttgatgttgcttgttttcgaacaattcccgtgtcatcatcgatgaaacatccttgaccataagttggaatgcgtcacctaggagcgctgtttttttcccttctcttaccgcacttcatcggccttgggtgccaccaagatttggtcaaggttactgtatgcaaatagaacccttgaagatgtagatggtctgagcaatttttcattgtggcatgtgattgggaatgaccgaatgaagttcctgtcatctcggaggtatccctgtactcggaactatcaacacttcaaaataccattcactgggtataaatctggttaaatagcagtgctcaaattttctcggggcaagtatactgctctgtttggttcgcttggttggtcaatggattcactgtatctttaccaatcgagggaactcgggagactgcgcggtcttgagttcttttctccctcgggccggtgaatgcctaagttttgcagtggaggtggctattacgtctaatttcattcctgttaacaaccaataaattatgaggtaatatgtataatgtaggtttgctactactccctctgtcatataataatataagggattttgagtttttgcttgcaacgtttgacaacttgtcttatttaaatttttttgaaattattaattattttatttgtgacttacttgattatctaaagtactttaagcacaatttttcgttttttatatttgcaaaaagaatttaaataaaacaagtggttaaacgttgcaagtaaaaaactgacaaaaaaaaaaagaaaaaaaaaagaaaaaaaaaaaaaaaaaaaaaaaaaaaaaaaaa

SEQ ID NO: 50401 - DNA, 931 bp, Oryza sativa
  unsure (1)..(931): unsure at all n locations
  Clone ID: PAT_MRT4530_52891C.1
ttttgatcttcgtatcttctcctgctgctgaggggaaggtctattacagcagccagattacaaatgttaatactacaaggatttatatgggatatcagcctttagcatgccaaaataatggtcacacatatccatggtctgaagacacttttcaggttgatgttggtccaccacctatgggtttcactactaattcttcgaaggtggaacgattcttttcccatgaaacaatcactaccaaaatctatagatgatgatgtgcctattacggagacaggggcgatggctgatagcacatcatatggttatcatatcacagccacaggtagcacgagttcaaccagagttgaaaatgggcgccatcagctcatgggagatcctttcgacagtggtactgctgataagttcaatgggaattcgtttgatggattgccttttgacttcattggtagtagtccaatccctgacatcggtgtattgctagatgatgatgatataatgccatatctgggaacataacctaggcaactcttttgcaattgtaagaactgcgacatccagaaatgtaaatggtggcagaagttcctgtatcgttcattagctaatcgctgagaacttgagaagggcgcgctcatcatggcatgctggtgttccgcttaacctgctgcaaccagtgaaggatgcgtcgtgccaatgatctgtaatttgtacccatcgcttttaattagcctgttctggattatttagcctggctgtaaaaaagctcatagaaactcgcttagctggagaatttcctgcaatgctggatggttgtatacatttttacctgtgctaccatgttaattttgctcagttactcatagatnaatcttgatgtatatganacatgttcattgcagctagctcanacataataatacctgaattctgc

SEQ ID NO: 50402 - DNA, 714 bp, Oryza sativa
  Clone ID: PAT_MRT4530_52892C.1
atggcaggacgtggtggaggaggagagctgcggctgctggggacgtggtcgagcccgtgggtgatccgggtgagagtggcgctggggatgaaggggctgagctacgagtacaccgaggaggacctctccagcaagagcgaccacctgctcaggtccaacccggtgcacgagaaggtccccgtcctcatccacggcggccggccggtgtgcgagtcgctcgtcgtcctggagtacatcgacgagacctggggagccaccgggacgccgcagctcctccctgccgatccctacgaccgcgccaccgcgcgtttctggaccaactacgtcaacgacacgtttttcccgtcgtggaaagtgctgttcaggtcgacggcggcggagcagagagctgaggcgttcaagaacgtcgtccctcgcgtggaggcgctggagcgagcgttcggggagtgctccaaggggaaggccttcttcggcggggacgacgcggggctcgtcgacgtcgcgctcgggagccatctggtgtggatcaaggtggtggacgaggtggccggcgccaacctgctcgacgaggccaagttcccgggcttggcggcgtgggcggagcggttcttggccgtcgacgctgtcaggcaggtgatgcccgacgccggcgatgttctgaagcagtacaaggggttcctggccaaatggactgcaggcgctggttcgagctga

SEQ ID NO: 50403 - DNA, 249 bp, Oryza sativa
  Clone ID: PAT_MRT4530_52893C.1
atggcgatgtggaagagcaagaaatcggtagcagcaccggagtcaattggtgttggaacatcaatcgaagcaatgacaccactgcatgatcgatctagaggcatatggccatgtcctgcaagtgcgatcctgaagatttatttccatgcccttggattgttcctcttgttaatttgtgtgccaaatgggggcgcagatacaggcatacagcagctaaagatcataaagaagaaagcgtacaaattgtag

SEQ ID NO: 50404 - DNA, 1605 bp, Oryza sativa
  Clone ID: PAT_MRT4530_52894C.1
atggcgctgagcttctgccaccagtccaccaccactatccgccagccgccgccggccgccaccgccaagcgtcgtcgccaagcgctgccgccagccaccaccagccaagcgccaccaagcgccgccgacgccaagcgccaccagccagctgccagccgccgtcaccacgccaccgaaggagcggcgccgccgctgcatccaaccactcctcagccaccatccaccgaaggaactcgacgccaccctccgccactctctgcgccatcgccagcaccagcatccacgccgctgcgcgaggccaatctcgtcggcagctacaggtgcagctactgctacaatatgggtcccaggaagcttcatctggcctccatttctgccctatcaatctttctctacgtgtttgctcacaccaattcagcacaagccttccccgtcgctgacggcacgtaccctcctgaagctgaaggcccagcagcagaaagttcagacatggacgagcagctggagctcacccctggaccgcagccgagggtcgtcgacgtcgacgactacagagcgagagccgacgccggcgaccacacggaggcgtttcttcaggcctggaaggaggcctgcaactcctccgattacccatccgtgctcctcgtgccggaggggaagacatacctcctgatgcctgtaagcttcaatggcccctgcagagccaccacgatcactgcaacggaatggatcacgttcgacaacatcgatcacctccgtgtcctcggcggcgggacgctcaatggcaatggacaccaatggtggatcaactcttgcaagaccaacagatccatggcgctgtacttcaggaggtgcaaccatctggtcgtggagggcctccagatcagggacagcatgcagatgcacgtcgtgatcgcctactcctggagagtgctggtctcgaggctgctcatcacggcgccaggatggagccccaacaccgacggcatccacgtatccaacagcagggaagtgttgatgagtggctgcatcatcagcacaggtgatgactgcatatcaattgtgaccggctctatgtttatacgggcaactgggatattttgtggaccaggccatggcataagcattggtagtctaggagcaaacaaatcatgggcccatgtttccgacgtgctggtggagaaagctacactggtgggcactaccaacggacgtacaattagccgggaccccagctcgccgctgtcatatcctcgtcctcccactgccgattcaaaaccaaacctgcgcttcctgcccgcagtgcagtgcagcctgcgtcgtgctgctgctgctgcttctgctgctccacatgcgtccaactccaagaggccaaccgaccccgttacaccgctcgctcggtatacgagacacgggacgaggcgggcgtggaacgaggccaagcaaaacggccgcgtcaactacggcccggactcgaaccgatttaaaatcggcgcagggggtcccacgcccgagataacggcagccagccagccacccacccacctctgttctgcttctgcgtaccaggcgcgcgggtcgcggctgccgcgcgcccgcgcctaa

SEQ ID NO: 50405 - DNA, 319 bp, Oryza sativa
  unsure (1)..(319): unsure at all n locations
  Clone ID: PAT_MRT4530_52895C.1
tttcttttttttttttttttttttttttttttttttttcttttttttctttttccaaaggccacaaaaaatctttctttaaaccccaaagcatatcccacattttcgaacaggaaaaacaatcttcagggacggaggatccaggcaaacccccgggggggggggggggctacatggcatacccctaaaggcctaaaccccaaatgggcgcagccttaggcgctnttcttggcgcccccccccggcctagccgggggcggggctcgccgcccgcctcccaagtctcggccgcgggcgctccgggaagtcggccggggcgg

SEQ ID NO: 50406 - DNA, 614 bp, Oryza sativa
  Clone ID: PAT_MRT4530_52896C.1
catcctttacctcgccatcgatggcgctgcaccacctccgccacgcgccgctcgcgctccgcctcgcgaggctccctcgcctcgcgccctcccctcctcctcccgccgcccgcctcctcctcctcctcgcgccgtcgcagcatccagctccgccctggcgcctcctctccaggccccgcgcgctcgccacggccgccgccgatgccgacgacgccggcgccgggggcaacggcgacggcgacggcttcttctcggaggagagcacgtcgtgggagtccctcggcgtatcggaccgcctcgcctccgcgctgcacggggcgggcctcgcgaggccttcgcttgttcaggcagcctgtataccacacgttctcacaacaaacgatgtaattgttgctgctgagactgggagtggcaaaacacatggttaccttgttccattgattgaaaaactgtgctctaaatcaatttccgcagaagatggtaattctcaggacgttacctcagggtcgcccaatatcgcgttggtcctctgtcccaatgtaatgctgtgtgagcaagttgttcgcatggctaattcgttggttgatgagtctggtgaaccacttaaaagtgct

SEQ ID NO: 50407 - DNA, 504 bp, Oryza sativa
  Clone ID: PAT_MRT4530_52897C.1
gtacccaactattgctgctgcaccacacatgttcctcaatgggtacaagaatgtgcttgctgttgctgtggagaccgaatactcgtacccacatgctgataagatcaaggagtatttgaaagtaatcttgtttctatttcactttatgatgatgttttcttaatgcttgataattggtctaactaagataatcaatagatagtagattaccatactaaaatgtagcatgtccatgtcggtacattaacatcttgtttggctgcttggtgcagcgctgctgcagcggctgcctagcagcatgcagctagctggtgaactggtcatttttacttatctacataattgatttagtcgttgagcattattacatagtctagtgagcaattgaatttttatggtagcaaggagtatctcacttaggctgtttgtgcctttattgagtcatccatggcagcaaaatgctgtttaccacactagaaaataagttaatgctgctttggaagc

SEQ ID NO: 50408 - DNA, 1080 bp, Oryza sativa
  Clone ID: PAT_MRT4530_52898C.1
atggctgccttccagcttcctctcgcgatcctcgtgtccctcctggccgtcggcgccactgccaacaacggctacacaacaccatcaccgccgccgccgcagcagcagtacaccccgccgccgccggcccacagtgacaagttgctggtgagggtggagggcatggtgtactgccagagctgcgcgtaccggaacacgcatagcctcaacggcgcgatgccgctgcccaaggcggaggtgtccgttacctgccacgacgtcaagaatcatgtcatggagtgcaagcgggccatcgccgacgagagcggctacttccagacggagctcggcgtgaccaaagtctctgacttcttcatgggcgatccgagcaaggcatgccacgtgcgacttcaggcgtcgccggagttcaagtgcaacaaccccacaaacatcaattactccagcatcgagggcgcgtcgctccgtgacgagggccaagatgtcgtagctatttttcaggaggcccaaacctgggtaaatctctacgtgaataaactgctgccgctagaccttcatcttgcgggtgccactagatctccactgagggggtgccgctatggagaagaaggcggcacaatatggagcacggaagcagtagccgattcacctatcgggcagatcgggcggctgctcgggcttcacgccatccgttgtatcactgaaaaacgcctttacccgttgcaacgcacagggaaaagtccgaattacacccctaagtatgaattaccccctcagactcgaaaaccatacatgtttcaccctcaattattaatatcagacgaattaccactaactcgaaccggagtggttttggtcctacatggcagtccactcggccatggacgaaagaatggtggtacagcgcagcgggactacgtggggaacgacacaacgaagtggcaagacgatgtaggtgttgttgatgccgtcgatgtggcgtccccaggtgcacggcccaatgggtcagcttcagtctccgccacgctccggcccaagcctcccgacgatgggcctccgcgaaacaactcaacaagacgaaga

SEQ ID NO: 50409 - DNA, 518 bp, Oryza sativa
  Clone ID: PAT_MRT4530_52899C.1
aaaaaaaaattcaaaaccccccttaaggaaaaaaaaaggccccaaacacgggaaaaaaaagggggggggatccaaaaaaaataatttaattcccctaggtgggagggggccatttgaaaaaacaccgggaaataaaagggaaaaaaaggaggcgaaaaggttggtcattattttattccaaaaacgggccaggggagggactcgcccgctcctccctttgggaaaaaaaagtggggaatgcccaaatagggcaaaaaaaagggcttggtctccggggaacgcccacactggtcgggccctgggggaatggggggggggtttggctttttagggggggcttaaagttttgggtcaagcttaaggttaaaggtcgggtcaagctttgggtttggggatgggtaaaggcccggtttttgggtggggcctaagagttggtttaggaaaaagctctgggtcttggttttggtccggtggggggtagggccttgagtttggtttctggggggggggtggggttc

SEQ ID NO: 50410 - DNA, 773 bp, Oryza sativa
  Clone ID: PAT_MRT4530_5289C.1
ccggccgggttcggaaccgcaaatcgttgcgatccacacacagcaaaagaaccaccaccgtttccccttcccgagaagaagagagcagcatccatggcgcccaaggcggagaagaagccggccgcgaagaagcccgcggaggaggagcccgcggcggagaaggccgagaaggccccggccgggaagaagcccaaggcggagaagcggctccccgccggcaagggcgagaagggctccggcgaggggaagaaggaccgcgctgggaggaagaaggcgaagaagagcgtcgagacctacaagatctacatcttcaaggtgctcaagcaggtccaccccgacatcggcatctcctccaaggccatgtccatcatgaactccttcatcaacgacatcttcgagaagctcgccgccgaggccgccaagctcgcccgctacaacaagaagcccaccatcacctcccgcgagatccagacctccgtccgcctcgtcctccccggcgagcttgccaagcacgccgtctccgagggcaccaaggctgtgaccaagttcacctccgcttaggctcataggcccctttctcgtcttgctgctaatggtagttgtggtaggttggaattttggatggtatggtactgtgctgtagttattctggcttttgactatcttgggttcatgtaagaaatatcctggtggatttaggacaatattgttatctggatctggtaaagtagtaattatgatgatgatggctttaaaaaaaaaaaacccgcggc

SEQ ID NO: 50411 - DNA, 1206 bp, Oryza sativa
  Clone ID: PAT_MRT4530_528C.1
aaggcgaagactatggaacaggacacgggcgagaggcgaaggatcgtgcgggtactctgccaagccggaggcctcttgagcgaaggatacagggcgaagagtatatgccgaagggagacgacttcgccaaagcaagctcgcccccgcgagggccgaagaagccttttccggcccatcaagcctaggggccattgggccgacaatcgcctaacggcccatcaggattccatgaacctctattacactatgtacccttgtaaatgtccctttcataagggtaaccatttgtcgtttcgacaacagctggcgccgatcgtggggatcttcgaacgaaaccactaagagcgaatgccaccgaagaaagtcgtaaaggagaaggttataaggcgaaaggaaagcgacaccggggcggatatggccgccgaagagggagcagagccttcggcgactgtcgttgaagatggaggaacgccatgtgcttccgcacctgcgccatcactaccaccttcggcccctgctacctctgtgcaggtgccgaacgcggctgacatgacgaaggcggctgcagcggcgagggtactccagaccagggcggagatcctttcgacaagccaactgctggtgccccaagccgctccgtcacagccagcagcggccccaactgcgctcgctgctgtgcaagtccaagtcaaccctgaccccgagacacaaaccgaagccgacatggaagccatgcgacagaacatgacacgactccaagacatgcttcgccaaatgcaaggacagcaacaagcgtacgaggcggcaaggcggtccaaggtcgccttggcaccaatcctccagtattcggcaggctatgtcccaccccaagtctatccacaagtgccgacccagccccttccaccacaagtcgcgcgagcaccaatgtacttcgccgggcagccatcgaccgcagcagcgcatccggcccctcacgtgcaactgcaagctcaaccggtcgctgcccaagtacatcctcaaccgcctggccaagtgccacaaacaatggcagaaggggcttcggctctgcaggcgcagctccaagctttccttcagcagctcagccaaccccagaaaacatttcaagtacagccccttcggccctcccggaggggaatacaagtcaaggtgcgcctagttggttgccttcgaatcagccaggtctag

SEQ ID NO: 50412 - DNA, 1143 bp, Oryza sativa
  Clone ID: PAT_MRT4530_52900C.1
atggcggcgagtgcggccgagtcgtcgtcccagtcccatgaaacgcgggggcaaggagacgcggaggagaagcacccgcagccagcggcggcgacggcggccggtggcgccggcgggggtgtcgagatcagagcggcgaagcggttcaagctgtctgcgcggttcgcggactcggaggggacggaggatgaggatgaggatgaggatgagtacaagtcatggatcgtcagcatccacaatgatcagtgccgacaatacgatcccaagcagcgacgctttaattcctaccgcaccttcgtaggccatgctgcgacacctgagttgctcaaacatctcgacgaagatgcgacgattggccctgaaagaagaccgcttgatgcgttgacagagcaagagttggttgagtcaccgtatgttcttcatgtaaagatactggaatctgatataggcttccctattaatctttttggaactgttctaataagagaacacttgaagtgcgtctacatctttcgacgcgacagagacgattgccagctcattaaatcttcgggtgaaatattgaatctgatcgcaccatatgtagggcctacagatgagagcattgattttgaaatcaacttgaagattaggggcaatatgggagaatcaaatgatagaatttttagcaacggttttacagaagcgcccgaaacatctaattcagggcaaaccaaaagagtcctgctttccagttggctaagtacattagaactggcatatacaactgctcacttcactgtgcaagtcgctatcggaatcaatattttgaaagggtcatcaaatttcttgggaattattaaggcctgtggtactaaaaatgaaggtgatgcggtgctatatgatagtgaagtgtcaggcactaggatcgcactcggagatgatggatctattgcattgtctcgcaacgtagtggttcttcatgttgatgagatgctcttgcttaaattttttgtttatgatgatgacatgatatctaagtccgccccaattatccttactctaggacacaatgacgaatctttcaatattgagcaaggttcttacaaattacgagtgaagctagattggacgaagattaatttgttgggcaatataaactag

SEQ ID NO: 50413 - DNA, 2597 bp, Oryza sativa
  Clone ID: PAT_MRT4530_52901C.1
atggcagaggtgagtatatcgagctttgcaatcaccgttcttgaataagctgcgtattttgggacagaatggactgttcgtgagataaagtcagctttgaacatctagaatgaaatatagaagtttgacacaccactgagttacatattgactcttcttaaagacgcctaatacaagcagtttccttcccactcccttcaattgagtttgtacaatttgaaggatgcagtctatgacggacactatggtttggaagctgttgttaacgaaggacctgagcatgaagtggggaatagtttcatccatagaacaaggaacatgcttacttatcctttcaaattgagtcaaataataaaagaatttcgcaataaacttgatgatatagaagccaatagaacatagttttgactaactgagcatttgattgatgtccatacatctgggagcagcaacagggaaacacattctttcataactgaaccagaaattattggaagagatgaagctaaacgtaagattgttgagacgatttgtacagctacagaatcaaatcctttgtctgtgcttcctattgttggtttaggaggcataggaaaaactgcactggcacagctgatttacaacgatgtacaaattaccgagacatttcagaagaagttatgggtatgtgtctctaatgtatttgatcttaagaagatcctggatgacataatgcagtcaggcacaggtaaaagcaacaaacatttaaacctagagatgctacagagtaaggtgcgtgggtttttatgtgaaaagagatatctgctagtattggatgacatgtggaatgacaaagttaatgaatgggacgagctaaaatgcctactatccagtggaggaagtggaagtgtgattatagtcaccacacgcaatatgagtgttgcatcgatagtgaagaccctagaaccatatgatgtggcaaaactaactgatgataagtgcatgcaagtattcatgcattatgcatttagaggtggcgggccacatgaccctaagttattggaaattggaaaatccattgttgagaaatgttgtggtattcccttggcagcaaagacattgggttccctattgtgcactagtcatgatgttggagaatggcggcgcgtcatggaggataaaatttggaatactgaggcaaaagtatatggtctaatccctgcattaaaactgagttatgatgcacttcctccccatctgcgagcatgcttttcttgtttatccattttcccaaaagaccatcagttgttttattctactacagtcatgttatggatggcattggggatgttgaatacaggcaaggaaagcaaacaaatgatatctgctggaagtaagtgctttcatgatctcctaggaagatcgttgttccaagaccaaattattgtttatgatgaaaccattcaaagctgtaaaatgcatgatcttattcatgatctagcacaattcgtttcagaaaatgagcatgctgttatcagttgtgaaaagactgctttctctaaaagggttaagcatctagtgttggtgaatctgcaaacggttcatcttgctcagtgcgaccaactagagggcctaccaagagacgtgcatcaacttgtcagccttacatatttgagcctcacgtcaaagcagaagtatctactaaaaagtggattttgtggttggcctagcctgacgtttctatatttgcatcactgcgttgagttaacatcactgacagagggattcggcagcctcgctgccctgcgggagctgcgcatcttcaactgtccgaagttggcttctctcccctctgcaatgaagcagctctcctcacttgagaaattggtgcttaataactgcaatgagttggatttgatggaaccaggggaagccttgagcggcctgggcagtcttcgtgcgctcaaccttgtggggcttccgaagctggtgggtttctcagcgagcttccaatctgctgcgtcctctcttcaatatttttgtatcggcgattgccaagggctggagaagctgccagatttcatccaaagtttcacttgtcttaagataattgggattcgtgactgccccgagttgagcaggagatgcacggctgaatccggcgaggattttcatctcatccaccacgttctgcggatttacatcgacaataaaatctgggaaaaggccttagtgtccacggagaccgtgttgctccaccagtccactgtcgtgtccacagaggttgtgagggagcatgaggagggactagctctgtggctccactcccgggccttcttgtcgaggagcaaggatgacaccagagtccagagctacaggtccctcgtgttagtccgcctccgccgtgactcggcatgcaccgtggcgatggtgccggagccggacgggcgaacagggtgatgtaataattgggtacatttgctaattgctacatatttgtgcaactttcatgtgtaacaacggcacaacgtactatgtacggatgtttgaactggatactcatgtttgtaaaaaaaaaaaaaaaaaaaaggcatgtaaggtgagaacattttcaagca

SEQ ID NO: 50414 - DNA, 199 bp, Oryza sativa
  Clone ID: PAT_MRT4530_52902C.1
atgcccatatcacaccacggcgtctcgctgacctctagtggccagagaagaagctccagatcattgaggaagaggaagatgaaaactcacctcgccactctagatccatacaaccgcccacgcgcgtcgccatcaaggtcatcgccccgatatgccacctatgtgggctccgaattggagcttggttcacagccccacc

SEQ ID NO: 50415 - DNA, 1167 bp, Oryza sativa
  Clone ID: PAT_MRT4530_52903C.1
atgaaatcctaataatcaagctttcaccctgaatatctgaacattttgttgcctggcattacgagaaaaatggtatctcagtgcacagtgcttataaattgacgctaacagaaatagaactaaaagagggaaattcttctagcaacactaataacgggagtagatattataggtccatgatctggatagcaaacgtgccccagaaagttagagtgttcgtttggcgcctcgcacgagaaaatctgcctactcaggctaataagtttcaacggcaattagtgacatcaaaaattgcacaatagttttcatgtagtggtgagatgcacaaaagccaaagctttgcgacatgctctgcgcaagatttggggtctcccagggggaagctcttttttaatttttctgggtcggattggctgcttatgcttctaagctccgtactagctaaatccctttagctggtttggagagcttggtatttacgtaatgatgttgtccattgcaaaggtgaggaggtgttgggtatatctgcaacatttttacaagctaccatggctcatttgtgcaagccatgggacaagaacctgatcagaaaggaaaagtagttttgagtgaagtatagattagttccctaaacctgaagataaatagaactttaggcattggttgcagttcatgggaattgccagaacttggttgggctaatattaatgttgatggtgctttttgtgcaggctcaggcaatgcgggtattggcataatcattcatatagttccggttcagtcttgttatcgtcttgaaagtacattcgccacagggcgtcggcggaagaattagaacggtttgcttgtaaggaaggtttagagctggacgtcgaatgggtgcatatacaccagtagtgctagaaacaaattgcatgtttgtagttaatgcactaaagccgcactaagagaatcaatcctaatggtgttatactatcgccgagatgcaaagtacagaggagttgctagtagaggtgaagattcgtcatgttagaaagatgttgcaataggatagctcatgagttagcacggctggctagtagaagaaaacattgtgcggcatgatgggagtatgtttccacttgcatacaaggccttattctcaaagattgtaatagccatgtttct

SEQ ID NO: 50416 - DNA, 2021 bp, Oryza sativa
  Clone ID: PAT_MRT4530_52904C.1
gctacaagacatggtgcagggcgagctgcatttccagtccgagctgagcgtcatcggctgatgtcgcggcggctcgtgcccgccgccgccgcgggaagagatggcgtcgtcgctcgtcgctcggcgagcggcggcggcggtgtctggtggtgcggaaggtggaggtggggaggggaggggaggggacacgctggggaggaggctgctgaagctgatctacccgaagcggagcgcggcggtggtgctgcgccggtgggcggaggaggggcgcaccgtgcagaagtaccagctcaaccgcgtcgtccgcgagctccgcaagtaccgccgcttcaagcacgccctcgagatatgcgagtggatgaggacgcagccggagatgaggctgcttcccggggaccacgccgtgcacctcgacctcgtggccaaggtccgggggctccccagcgccgagaagttcttcgaggacatgccggagcgcgccaaggggccgtccacctgcaacgcgctgctccacgcctacgtgcagcacggccggcgtgacaaggcggaggcaatgctggaggagatggccaaggctgggtacctcacctgcgcgctgccgttcaaccacatgatgtcgctctacatgtcgagcggcgagcttgagaaggtcccggagatgatcaaggagctcaggaggtacaccatccctgacctggtcacctacaacatatggctgacatactgctcgaagaagaacagcgtgaaagccgcggagaaggtctacgatctgatgaaggatgagagggtggttcctgactggatgacattcagcttgctgggaagcatttacatcaatgccgggcttcatgtcaaaggccgggacgcgctggtggagatggagaagagggcctctcggaaggagagagccgcgtactcctcattgctcaccctgtatgcaagcttgtcggatagaggtaacttggacagggtgtggaggaagatgagagaaaccttcagaaagttcagtgacaccgagtacaagtgcatgctcacttcgctcacaaggtttggcgatatcgcagaagcagagagcttttacagcgaatgggagtccgcctcaggaacacgcgattcgaggatcccgaacacgatcctcgcattttacatcaagaacggcatgatggaaaaggctgagggtttcctcgatcacattgtgcagaagggtgtcaagccaagctatagcacttgggaactgtttgtctggggctatctcagcgatggcagaatggacaaagttcttgagtgcctgaagaaagccctgtcatgtctggagaaatgggatccaaaccctcaactcgcgacggcgatatactctcagattgaggagaaaggcgacatcgaagctgcagagaagctcctggtcatgttcagagaagcaggatatgtcacgaccgagatctataactcggtcttgcgcacttatgcgaaggctgagctgatgccgctgatagttgatgaacgcatggatcaggataaggtctcaatggacgatgaaacaaggagtttgctgagattgacaagcaaatacccgattggtgaagtttcgacattgatgtcttgagatgttgcaagttcgggcaaatgaattttcagtcctacaaggatgcaaatgtgttgttaattgatttccaaatcacaagttattgctcaccctgtatttgcaagttttgaactcgaaagcaaagtagcgaggatagactgatacaaggttagtgggctggaatttgtgaatattagcaagttcggtcatgagtctgtataagcactacctgctcccttgccttctgactatctggcgcggctagatagcacaattcgcaacaagttactgctctttgtttttgaaaacagatacagataacacaatcgtgcgtaaatttgcattgtgagaattagtgctgagatcgtattgttttcgctacatagtatcagctccagttactgtgaacccattttgtcaaaaaaaaaaaaaaaaaaaa

SEQ ID NO: 50417 - DNA, 336 bp, Oryza sativa
  Clone ID: PAT_MRT4530_52905C.1
atggccgaaggtggcggtagtggtgctcaccggcgtgaggtggacagcgatctctggcgacggattgcgacggacgaggggtggacaaggcggacctcggccgcgcgagcccgacgacggcggcggcgtggtgcggcggcggccctagcggctgctagaggcggccgaaacggtggagacggcggtggcgagtgggcgcacggtgcgggcgcggtggagagctcgggagcggccgatggaaaaagaaaaaaggaggaggagaatgcggggatggtttatatgggctcgggaggggcggacgaggccgggaggcggccggatttctcgccgacgtga

SEQ ID NO: 50418 - DNA, 725 bp, Oryza sativa
  Clone ID: PAT_MRT4530_52906C.1
atggctggtggtcgtgtggtggcgagtggcagtcggccggtggacgcgcgcggctgtggcaagaggagcactgcggtggcggcaggcgcgcgacagcggcaggaggaggcaggcgggcggcgggcgcacagcaagtggctgagaacctccgacttcgggctcagcacagtcaactaccatgcgcgccccgacgggctcctccacaccgcttatggcacgccgacgtacgttgtccccaagcatcatcctctattgctcgccggcgcgctactgttccaagacgagaacctggtgtgcatctatcacaagatgcggcagggtgacttcagctgcccgacgtggttgacaacggacgcacggaagctcatcaagatgttgttcgacctcaacccagacacctgcatcaccttcgccggcctccacaagatgcagtggttccggaagatggcacatgttcagtgacccatctcaccaagctcgcgcaggagccagtggacatgcttggcaatgtcgacaacgacaaggatgaattgcgcaaggtgctgaacgccttccacctgatgtcccttccaagggctttgacttgtcgccgttgctcgtgcgtacgaccctgccgtgtcgcaagggcgagccacggcgcgcgtgggtggcatgtgattcacgacgcgcgagccggcgagcggcgtggtcacgcgattggaggcgctcgcgatgggcaacaccat

SEQ ID NO: 50419 - DNA, 206 bp, Oryza sativa
  Clone ID: PAT_MRT4530_52907C.1
attcatctggtgaacttgatgcctatagctctcacctggttcacttgcttctgctgggggaactacaacagtaggcgggtgggccatgataattaactctatgaactaactcactgacgacgtaacgaccaccatgtacctgctggcctgtctcaaagatccaagattcaaatcccgcgcatccgagggcatatacactctgtaga

SEQ ID NO: 50420 - DNA, 579 bp, Oryza sativa
  Clone ID: PAT_MRT4530_52908C.1
atggtggggcgagcggcggggcaccaccgaatgctcgccggcggcgacggcgaaacgcggcgaatgctcggcgcgacgcgacggcgtgtggcggcgccgagatctcaaaatcggcggcggcacaatggggaccaatacgagcgcaaccgacgacgatttaaccatctcgggcaatactacgggcgcgagggcttaccacggagtggtggaacggcggagttcgacggcgtgcggcgcggtgcggccgaaataggggcagacggcggtcggcgaggcttgaaggtgttcgacgcccggccctcttcgtccaacggctcccggctccctccaatggcggtaacagcagtgcgagcacctcctctccacaccccgccacccacatcggccgagaggccctgcggcggcggcgcaacccccgctcaccaggatggcgacgcgacggcgacaagagcgacggcgacggacagtgatatcggcctcgatagggaagacgcagggctatgccctagggtgacgcggggtcgttgtggcggccgttatcactcaatcccgaaggcgatgtgcgaggggacgggatga

SEQ ID NO: 50421 - DNA, 363 bp, Oryza sativa
  Clone ID: PAT_MRT4530_52909C.1
ggaaggcaaactggaaaaaagttgcatttgccattgaacaatcggtaaagttggaaagcctttttccaaacttatacctaaatcagggttagcaagactgacgggaggggttttttacatttgggaaggggtggacccgaggttatacaaggcccccgaaggggttgtggccagaacaaaaaaggcaactatcacggggccctggtttacagaaaggaccacgggacaagcccatttaaccttaatattggggtaaatttattccctcggggaagatttcactggaggccaggaaaaaattggggatgaacggaaaaagggcttgggaaccacggggtttgttcggaccaaaatcggggggct

SEQ ID NO: 50422 - DNA, 386 bp, Oryza sativa
  Clone ID: PAT_MRT4530_5290C.1
ggttcaaatatcttcatggcagttaatcatctttccaccgagctttttcttccatatattcccctttcctctctcaaaaaaaaacatgaaaaaagaggtggcgccaaagaaagaaatattttacatagcgttcaaaagaaggaaaaaatattacgagaaatggcctttgggcatcccagttgtgttacttgtaggctactgaattaaactatcactagcatctggctgctggagcgtagctctcctcgtgtatggtctccaacgtcggccgcctcgaccggcggccgccgctgatccgctgcttgagctcgctgatctccgcctcggacgccgcgtcgcccacggccatctcgtccagcctcggccgcgcggcgtcttcctcctcc

SEQ ID NO: 50423 - DNA, 321 bp, Oryza sativa
  Clone ID: PAT_MRT4530_52910C.1
atgcgttatccacgtgtacagtgcgcgccagtcaactcccggtcttcaatggattccggtcggatccatttgccggtaggtgaggcgttcgcgcgctcggtggtggcgggttggtacggtgtcaggccccgcgccgcgcgcgcgccccgtgaacgccggggccccctccccaacaagggagcagctcagctcgcgccgcgctcgtacgcccgcgaccgcgtgcgcgaggagatatcactgtgcgtgacactgttgcgccgacggcgacgccgccccccgtaccccgcaccaactgccgccacacgacgcggccgtacgttc

SEQ ID NO: 50424 - DNA, 318 bp, Oryza sativa
  Clone ID: PAT_MRT4530_52911C.1
atgttggaagaggtggtggcgaagttcacaggggccagtgctagacaaggcagcgttgttgcactattactcaaggaggtgcaacgcatgggaaaagaggagaaagctatagggggcagcgatgctcagtggaggcagcagcacttgggagaggcctacctgcaccgcctgctccatgagcttgctgcctcccacgccatgaccaccgcgagtgtgctccaatgcctaagccatctccgccattgtgaccacaaccatggaactgaagcaacctccgcagcgagcttcatggagtttgctgaatggatatccttgtag

SEQ ID NO: 50425 - DNA, 603 bp, Oryza sativa
  unsure (1)..(603): unsure at all n locations
  Clone ID: PAT_MRT4530_52912C.1
ccggccgggggcggcggctggcctcgccggctcgccgcacccatctcctcgccctactcctttcccggatctccttgtcctcctcctcccgcgaacatcctcgtcgccttcatcgctcatcgtcgtctctgttccaaccttgtggcatcggtcttctcggccctggtgtggccctgtccgtgtcgccgccgccgatgtgcatcgcaagtgacagctccctgttggccatccactggcgacatcagcggtactgcgtgccccatctactgccgtcgaaagtgacagcaccccgtccggccggctcacccatcactgatgcctcatccctcggcagcagcttcttctgttctcctgcttgctaccacatcgatccccaatcagtttagaaactgctgtaaattgcagttattggagtgaactgatgtaactaagtatattgatttttcacagcttcagtaaattaaaacgatgtaagtgagtttctgttccagtgtatgataaattcatggttcagtcattgatgcaagttaattcatgtttcagtggattgatgcaagtaaatgccctgtgcgggttcataaaaaaaaaaaaaaaaaagcggnc

SEQ ID NO: 50426 - DNA, 373 bp, Oryza sativa
  Clone ID: PAT_MRT4530_52913C.1
gcacgaggggcctattcatcctgtttttcaacacattggaatatcagcatggccaggaagagtggttcttacaactcatgctctttactttcagagtatcaaagtgggttatggtgacaagattgttaaatatgatttagcaacagattctgatcaggttatcaagcgtgattttactgggccattgggtgttcgcctgtttgataagggtgtgatgtacaaatcaagcactttaacagagccaatttattttgacttccctgaattaggaggtccctcacgaagagactattggttagcaatcgctcgtgaagtattgcaggtgaataaattcatcaggaagttcaatcttgaaaacgttcagagagcggaa

SEQ ID NO: 50427 - DNA, 268 bp, Oryza sativa
  Clone ID: PAT_MRT4530_52914C.1
aagattctgtgagtgcaaagggccattgtataacagcagggctgcgctcatggagcagagcgtcagaatggccatggagctcgcaggcacggatagcatggtggaccagcacagagaccaaatggagctcaggctccaagagcgctgtcaggcatgaaggggctacctgatgtgctcactgtcacgctgtcggccgtcgataaaacggctgagcgtgtgccacagcacaccatggtgggcctaggacaaacgactacggctatactga

SEQ ID NO: 50428 - DNA, 1292 bp, Oryza sativa
  Clone ID: PAT_MRT4530_52915C.1
cggctcgccccgccttcaggccggccgggacacacctacccgaggaagaggaggaggtggggtggccatggcggcggcggagaagacgaagcccgttctttacagcgagtggatgagctcgtgctcctacagggtccggatcgccctcaacctcaaaggtattgattatgagtacagggcagtgacacggggtgatccagattatgggaagatcaatccaattaagtatgtgccagcattagtagatggggatttcactatttctgattctctagcaatcatattgtatcttgaagacaaatatccccagcatcctcttttacctcaagatctaaaaaagaaagctcttaacatgcagattgcaaatatcgtgtgttcaagcatccaacctcttcaatgctatgctgtaattggtttagctgatggcaaaatgagcgccaacgagagccttcagatagttcagcattacactgacaagggatttagagcaattgaaaaacttctggaaggatgtcgcagtaaatatgctactggagatgaagtccaattggcggatgtgtttctagcgccccagattcacgcaggaataacacgtttccaaattgatatgtcaaaatatccaattctggcgagattttacaaggcctatatggaacttccagcatttcaagctgctgtccctgaaaaccaaccagatgcaccttcatcctgataattgaagggtgctgctccatcaagatgcctgcgtggaagtctgcatttctgcaagtctccatgaagtatacccacgacatcatgcatttcaagctgcacatcctcaaaaccaaccagatgcacctctatcccaataatcaggattccaagcgagccgtatacattgatattcatgtaacttttacttaaaaaattggatgagtagtctccagtgccatacatgtaatttcagtgtaaaatgttcagtgtaaacaagatagtgggacatgaattacctgtgacccacaacattatccatccagtactccagtacctagggatatggtattgttgtatatgtaattgatgatgcactgtctgaacttcagatgcagtatgtgattagtccactgatgatgcacatacgtatgcactgacgtaagcagaattgaatgttggtacacatgtaaacacctcaactattactgaataaactctcatactggcctgaaaaaaaaaaaaaaaaaaaaaaaaaaaagaaaaaaaaaaaaaaaaaagttaaaaaaaaaaaaaaaaaaaaaaactcgagggggggcccg

SEQ ID NO: 50429 - DNA, 1359 bp, Oryza sativa
  unsure (1)..(1359): unsure at all n locations
  Clone ID: PAT_MRT4530_52916C.1
ttntttgagggagaaatatatagcctcgttcaaggtgctggaacaaaattttagaagtttcggtcctatcagaccctcccaatataacattatttcggccagaatttcttaaaaaaaatttcattttattatatgaattcgataatatttttatttaaatttggccaaatttcagtatatcggcatccctccgatacaaacgccaattaaaaaacagaagattaaaccctgatatagctaatctagactagcggcggcaggtagacggaagtggtggagggcggggcggccgtcgaggcccttgccgtcgtagtgcgcgaggaactcggcgacggtggtgctcctgtaccgcggcgggtcgccgccggcggtgagctcggcgatggggccgtacagcctgccgctccggctgctctcgcggcccaggtcgacgttgcagaacgccgccacggacacccgcgccgcgtccctgctccggttggccaccacccggtgctccacgctcctcatcctcccgttgctgacgagctcgagcaggtcaccgacgttgacgacgagcgcgccggcgacgggcgggacgtccacccaccgcccgccgaggagcgcctggaggccgcccatgccgtcctgcaggagcacggtcaggaacgccgggtcggagtgcctcgccgtgccgacggtggcctccggctccgggcacggcgggtagtagttgctcaccacgctgacgccgtcggcgcagcccatcccccccagccgccccgtctccagccccagcgccgacgagaggagctccaggacggacgacgccagccgccgcgccgccccggcgtactccggcagcacgcccctcacgtcggcggggagctcctccggcgccggcgggtccggcgccgcctggcagaagagcgtgtcgcgccagttggcggcgggggactcgaacaggtcgaagttggagttgaacctcacgcggcgccgcgccgcgtcgcgcgtgtagaacgccgccttcgccgccgccggccgctcgttgaaccgccgcaccgccgcgagcatcccgtccgtgaggcgcgccggcacgccgtggttgaccacctggaagaagcccaccgactccgccgccgacctcacctgggcgaccaccctgtcacggtcggcgtcggcgcgcgcgaggtcgatgaccgggatggcgtcggcgtcggcggcgtcggcggcggaggcgaccggtgtggggtcgggagggtggtggaagatgcgcgggacggcggtgacgccggcgtcgacgaggcccttgacgccggccttggtgtcgtcgaaggccttgagctcgcggaggcggtcgtcgtcgtagccggacggcat

SEQ ID NO: 50430 - DNA, 1925 bp, Oryza sativa
  Clone ID: PAT_MRT4530_52917C.1
gtttgttttttttttttttaaagacactacaataaaatcctttattcgtgatggatgataacctttttaatgtatgcctcgtcggtgatcactagtaataagaaaaatatcaactgttacaagtgcggacctgtcagagatgactatatctcaaaacagtccaaaagttgtgatccgttgatgatgactataacccaacatttcctcacatctcggatcgatctgcgtttacgaatattcgagcaagaacgaatttgtcgttcattcgtttcttaccgaacacacacacggtatacccatgtgtataaggtcaagcaattcacgaatttttgctacacatcatcacatcagagctctcccagcctcttggcacagtccacgctgctgtccagcgtctcctccactccatacctgtacttgaaccctaaatccacaagcttgttggtgtcagcttgcactctcaccccctccccaatgacctctttgagcctgatctcgatgtcggggaacttggcggcgaagtggtcgacgcagtccttcatattggggtacccggcggcgcagaggaatcgtccggcgatggacggctgatccatacagaagacgtgcgcgtcgcaggcgtcctcgacgtgcaccagcggcacggaccccagcagcgcctgcaggaacttgagggagttgtgggagggctcgtcgccggtgagcggcgccaggatcaccgggatgctgctgctccacgggcatggctggagcgtgtcgccgccgacgaccgcgcacgtcagggtgaccacctcgaacgccggcgacggcgaggagccgttgtagctcaggagctccttctcggagagcgtcttggatgacacatagcccgtcctcgatcgctcgcactggtccaggatgatgcgcatcgcgtccgtggtcgcttcggcggtgttcttgtacttggtgctggtggggtcgtgctgcatcggggtagcgacgaggaagacgaactcgcagccggcgatggcgggctcgaaggtgtcggcgtcgtacatgtccgcctcgaacagcaccagccgctccgccgcgccggggaactctctcaacggcgccgtcttcttctcatctcctgtgtggctaactgagtgcacccaagactttcgttgtttgatttcctttcctgcacgcaagtgggtgtcatatgtggctctgaacgaaacgagtttcaggtccatatctcgcaggactgaccggcttgagctcttcgcgcattccacactgcaatccagcgtctcctccaccccatacttatacttgaaccctaaatctacaagcttcttggtgtcagcttgcaccctcaccccctccccaatgacctctttgagcttgatctcgatctctgggtacttagcggcgaagcggtcgatgtagtccttcatgttggggtacccggcggcgcagaggaagcggccggcgatggacggctgatccatgcagaagacgtgcgcgtcgcagacgtcgtcgatgtgcaccagcggcacggagcccagcagcgcctgcagaaacttgaggacgttgtggcagagctcgtcgccggtgagcggcgacatgatcaccgggatggtgctccacaggtacggctggagcgtgtcgccgccgacgaccgcgcacgccaaggtgaccacctcgaacgccggcgatggagaggagttgtagctcaggagctccttctcggagagcgacttggatgacacataaccgtccagatgagcattggtgaagtcgtaggtgaggttgagtggagaccagaaggactcgttgatgaagtccttgtagccgccgctgccgtcctcccggagcggcgaggcggcggtgacggaggccgtgtggatgacacggcgcactgtcctggatcgctcgcactgctgcaggatgacgcgcat

SEQ ID NO: 50431 - DNA, 1100 bp, Oryza sativa
  unsure (1)..(1100): unsure at all n locations
  Clone ID: PAT_MRT4530_52918C.1
atgcctcggcgaactgccgacgacgacgacgacggcgccggcgcaatccacggcgtcttccggctgccgaccgccggcgacggcggcgaagcggcggagtctgatcagcacagatcttcgcctcgggctcaccctctcctccgtcgtccacatcgacggcaacaacccttctaccccaaggcaagatttcgatctctgatcattctgcacacctactgctttaatttcagagaaattttaagatacttgagaaggagttccctcacgacggcgacagtgacagctgatcgaggcggcggcggcggcggccatggacggcgacggtcactgttcgtgaaggtgtacatggagggcgtccccatcggcaggaagctggacctgctgccgctggacggctacaaaggtctcgtcgcacggctcgcctccatgttcagagcatccatcacctatcatcattgccatcgacagttcgccgtcgtcgggatgaagacgaacaaggttcatcatgttctgacatacgaagaccaggagggagactggatgatggctggagacgtgccatgggagtatggcaagctagctcagctctgaccaccctaatttgtatatttatttagactgattatagtgattaaattggcatgagttttccnaaaccacgaaaccctgatatatttgtcttttttcttctgttgattgaattctcaaattatatcttttgaactaattatgggattcncccttaatgctngtgtgntgttttttggatgaggcaggctggttccctgaccaagcgtgaagagattgaggattcgcaagagcggatgacaagtactgctatagctgttgaataattgggttaaccacggatggtcaattaattcttccacgagttcttggatttcattcattcttactttgctcattttggtggaccaatttagatttgagatgattgttttcgggagcgaaaatttacctagtaaaagcatagtgatattgagccagaggatattgtcacaaatatattgtacacactagtaaaagaaaagaaacatatactatcgaaatacccttttacttctcaaaaaaaaaaaaaa

SEQ ID NO: 50432 - DNA, 2741 bp, Oryza sativa
  Clone ID: PAT_MRT4530_52919C.1
ggcataaatagaccccaataggaatcagatttcatttcagcacgtttgtttccacatgtaaaggcactctgagcgaccggacaacagaaactggtttagacctttacatgtaaaggcactgctgagttgataaacacgaactggtttggatctagtatagtagtagtatttctgcagtattgctttgcatagcgtcgtgataacaaatcgcgacttccaaacactcgttacagataagtccagctaaacggagaagaggacgaacggctgcagtttcactaggctactcgtccaagtccaacataacggcattcttcctctcctgggctaaacggcggtccttgttcaactttagagctcttcctttctcttcaccagacctgaagattttcttatcagtggatgacagagtttcagctttgtcagtcttaatgtcaaacacatcttgaagaagtccattctcctgcacatgcttgaggaagcctctcccaagaaaccgcctcaagaagttcaactgaatcaattcagaccatgatgacacccttaaaacgtcacgctttcctgaaatcttaacagattcttcagggcactcaccatacttaacaaaatccaagatccgttgaaacagatctctttggtcagtaagatttttcttatctgcacctttaccccctgcctccattgagagattggaggcaagacttgatattttggctttcaaagcttgcatatccaggaaaagtttactcttagaaccaacagttcctccattctcaacatcatcatcttctccaaaggaaacgtcaagcaaatttagctcaaagcacaaagctaatgcttcacccgcagccattcgaacagcacgatcctccgcaccaagaagagtagagagaaatgcaataggctctttccaactatcagcatttatcctccatgaaccaatagttgtaagaagaaatgcccaggcagatatagcagctgctaacacagggggccttggtttacggataattcccacatttgaacctgattttggatgaatcacatcccacatagctttcaaagataactcagtttcagctaaatcagcagcaccaacaaatcggacgcctgccaagcaatcaagtgccgaaatcatcttggaagcatctggccaagtttgaaggaccctagaaagttgtgcatgtgactcctccattatttcatgtgagctgctcccagcaccaactgtaagggctaaaagaccaatggcacgggatgctaaacaagcctcttttgtagatcccttctttatcgaactgttgaacagactcagcagggtggcatatttgttctccacaagaccatgaagaatgaagctttcaaaagcatcaaccagttgagagagtgcggcttccctggtagaccccctcttctcatagagagcatcgatgtacttgtcgaggacgaactcctgcgagccgacgtgctcggtagcgtacgacatggatagatccgacagcgccgtcgacgacgagcccacgctgtcggcgtcgctgctgtcgatcaggtcgtccccgccgccaacgccacggaccttgctcttcttactcttccccatggcgaaagaggccgcgcagcaagaatcagagaacctgatcccaagaaccaaccacagcaagaacaggcgaggcggccgcaagaagacggaggaggagacgcgacgcggggggagggtcagctcggctcgactcgggctcgaatcaggagctagtgcggtgggcgcggatgggcgcggcggcgaggccgagacgggagagggagtcgggatcggggtaggagaagcagcagaagcagaagcaggggttgttcttgaggggttcgggttgtgcgtggagtcgcagagctgccatgtgaggatggggagagcgcgtgcgatgctcgcgagcgagggatggaggaaggaaaggggacgagacgacgacgaactggcggcggcggcggcggcggcggcggcggatgtttttgccttcgcttcgcttcgcttcgtttcctcgcagaaatataaacgagaggcggtggaggatggatgcggcgctgttctctcgctggaaggcaacggcacaaggaaaaagacgagggacagcaacatcgagggagattggaaaaagaaagtggggacaaagaggaaaagaagaggagagagaagggtgaagaagaaggagccagggcctaccccgggcggctcccttccactatcctccattgacaagaccgccgccgtccgtgtctttgtcgacttcatccaggtctttccattcgcattcgctgaaatcgtcgaggacaaggccgtatcgatctttgccatgtgggagggtttcgccaaggtgctcgtccactactaccccgtcgccgacacatcacggagccggtcctcggggagccctagatatactgcacacggggaaggggtgtggttcatcgaggccgaggcgaactgcttgctggaggaggcgctcaaccttgagcacctgctctgcatccccaaggacaagcttctcccgtgcccggcgcccgaggtccgccgactcgaatgcgcccaagccccactgccacaacctcaatgttgcaacggcaaaaggtgcccggaggtagggatgcaagtggatagtcccgctacctatataaaaacccgcttgttaggtcatttcccatatggtagtacaaaatttagaagaaaaactaaactagaagtgagataa

SEQ ID NO: 50433 - DNA, 711 bp, Oryza sativa
  Clone ID: PAT_MRT4530_5291C.1
tgcgctccacacacagcaaaagaaccaccaccgtttccccttcccgagaagaagagagcagccatccatggcgcccaaggcggagaaggagccggccgcgaagaagcccgcggaggaggagcccgcggcggagaaggcccagaaggccccggcggggaagaagcccaaggcggagaagcggctccccgcggggaagggcgagaagggcggcgccggcgaggggaagaaggccgggaggaagaaggggaagaagagcgtggagacctacaagatctacatcttcaaggttctcaagcaggtccaccccgacatcggcatctcctccaaggccatgtccatcatgaactccttcatcaacgacatcttcgagaagctcgccgccgaggccgccaagctcgcccgctacaacaagaagcccaccatcacctcccgcgagatccagacctccgtccgcctcgtcctccccggcgagctcgccaagcacgccgtctccgagggcaccaaggccgtcaccaagttcacctccgcttaggcttttcctctgtcctcctgtctcgtcttgtcgctgctaatgctagttgtagttgtggtagtttgcagatttggatagtttggtactgtggtgtatttaccctggctattgactatcttggtggataaggaacactatcattgttattatggagaaatagtagttatgctactttaatc

SEQ ID NO: 50434 - DNA, 184 bp, Oryza sativa
  Clone ID: PAT_MRT4530_52920C.1
gatttgacacaaaggcaccagatgttgataaaatggaatatggggaagttgttatggatagtgcaagcctgggaactgcacatgaagagtgcgagttggatgggattgcagcgctggcggtagggcaccgccggtgccccgacgacctccggaacaaaccttgctctgagaacaaaccttgccg

SEQ ID NO: 50435 - DNA, 2991 bp, Oryza sativa
  Clone ID: PAT_MRT4530_52921C.1
tcaagtgttcttcatctttgttgtttgatcagatcttgcgttaaacctggtaaaggtcttgtggatatgtcgaattctgagatcgtttaccctggcaaatagaccccaaccatcgcgacgaatttcagcatcaagttgacgcgggggtttttccatctgctctactttttcacgactttctgcatggtgaacaaataggatcgaggcagggacacaaagagagggggcgatgctgcgcggacggctgacctgcggggcgagaagcagaagatgattctccagaacgctcacgcctccgtcattagcctcttcgattggttgcctgccctcctccatttcgagtatgtctgagaggatggtggttcagatacacagtgtatcagcagacaagtacaagatggtggcttttgcaggagcataaaatgttgatctctgaacctttgtatattgctgatgtaaccatttgttctcggaggtgggtgtggcagctcacattattttttatagctcaaaatgaatcatgagctagtttcatctttcaatgttttttatttacagatttaactactagaagtctagtgaatgttcaaggtattgtaaagtgactactactgttgtagagtgtggcctcctccgtttaaagaaggtaaagcaacctatcaggttaggatcctacttttttgttagattaccaaagaaatgatgtaattgttgaagctcagagcagccagagagatctaagaatcgaagtgcatggagactgcataagtagtcagcatcctcactgactccggggcagtatgataagttgagatattctagtctcttgagatccccaagtgttctgggcaagttccgaagtttctcacatctctgaaggttcaaatatgttagcttctgataagatccaatgaatgatggcagctcctcaaggtgtgattctgagaaatccaaagcctcaaggttttgtaagctactcatctggtttggtaatttacgaattcttaagccaaaaccagcaagatacctgagaagcttcaaatagccaatggatgctggcaattctagatcataacaacaggtaagatccaagatccgcagatgattcaatcttaagaatgcatctgcaagaagacagtttttgaatgatattgccctggccccggtgagaacatctttctgaagggttgagtgtcctgtgtgatttatcagcacagcgtaagtggaagagaccttttcagctgaagggccccttgatagctctctaccatcagaaattacaatgtcactaccagcaacatattttgcaaaagcatgcaccaagctattcacctggagtaatgtacgacgattggtaggactgattccagtggcagagacaggcttctgcacaggaagctgcgtgtttgaatatcttccgcatttagcatgtgaactgctatagtcatcaatcatcattagcaaatttctgaccacacaccatgagcaaacataaaatgggaaaaacataaatgacaggataactaggataccatacttgcgccttactgctatggcgataaggcagcccgggatcatcttaggacgctttaccacagagggtatcttttggatttcaaggaagaatagtgataagagttcctgaatgaacatctctccatgcacataagcaggtaaagccccgtgctttgaaccaaccatgtcaagtgctatccactgttgaatcagcttctctctatctattacgaatctgtgatatatttcactgaatggtgcaagtaactcaaacccattagcaaatacttttggcaattcccatatttccttatcccttgcccataaccaggcattatcatccttgttacgcatcattgaaccaagagaatacgctgccataggtatgccttcgcaccttttcacaatttgcctcccaatttcagcacggtccatgtttccggctccattatcaaatgctctctgacaaaatattccccaacagtcatcgtcagataaagggtgcaacttgtatgatggaacagtgcctattagatctgcagatacttcactggaagtcgtcacaatgatcttggtgcacttctctgtacccctcaacatctccttcaattcaattagctgatttttatctgtgctaatcaagccatccaagactatcaaactgcttttgtcagaaagaacttcttggaggcgattcttcataaactgcaagttgttatgaatttgatcattcaggacaaactctgaaatagtttcttcttttttgttaacctgtgaaattatatcattggcaattttattaagctctaatttcctgtcgatacagatccatatacgttgatcaaagttccactcttctccatagtcttggaaaattaaccttgctagagctgttttccctatccccgcaaggccgacaatgggaatgatggaaaatttatcagcatcattttggaagagcaaattctttacattttctctgtcattgtccctcccaaggattttatatccatcaaaaattactggctcattgcaatgcttaaggttggatggactgtgctgcattaaactcaatacaacagaatcttctgttgacagatctaactttcttttgattatccttattctttgcaatctactactattaaagaaacaaggacttgaggaacacaacaatatttcctttgcaatccaggaactgcccctttgagatccggcctcactgcagtcctcaaattcatctagtagatcttggatgtcataggaaatctgattgatcttcctcatccattcctgcgcctccatgctcatcttgaagtatttcccctccacgcttagcagcacatcttgcaaccttgccagggtccgccgtacctgcgccatatcctcgtctatgctcgagggcagcttcaaacgaccagcatctgcggctagccgccgtagaagccggtccacggcggcaccggctgtggccat

SEQ ID NO: 50436 - DNA, 467 bp, Oryza sativa
  Clone ID: PAT_MRT4530_52922C.1
ggcattttgttataaaggtgcgaaggcatacctatggcagcgtattctcttggttcaatgatgcgtaacaaggatgataatgcctggttatgggcaagggataaggaaatatgggaattgccaaaagtatttgctaatgggtttgagttacttgcaccattcagtgaaatatatcacagtatgccctcagctttaaaatcatgcttctcttacttgtcaatcttccccataggattcgtaatagatagagagaagctgattcaacagtggatagcacttgacatggctggttcaaagcacggggctttacctgcttatgtgcatggagagatgttcattcaggaactcttatcactattcttccttgaaatccaaaagataccctctgccactggaatcagtcctaccaatcgtcgtacattactccaggtgaatagcttggtgcatgcttttgcaaatatgttgct

SEQ ID NO: 50437 - DNA, 414 bp, Oryza sativa
  Clone ID: PAT_MRT4530_52923C.1
acccatcaaagaacttaggttcaaggaactaatcagatgcaactggtgtaaagacgttcattactactgttgaagtttctccccggaattcagggattcatagttatcgaggcgtatacaattcggtctaattgcttgcgaccagaaaacaagggttttcttctttttttttttgatctagtaacattcaaggatacccttaatcactaaggctagtatataagcggactcgtggacagacgcatgtgcggacgctacgctacccaacgtgtcctgagccatgaattctataccgaaacctggcggaataccatctatccctataatgagctggattaaagttcgctctcattatgggcataactgttgcctgcgggaaattgttatactgtcacaagttcacaccaaatgcga

SEQ ID NO: 50438 - DNA, 720 bp, Oryza sativa
  Clone ID: PAT_MRT4530_52924C.1
atggcacgcactaagcttgcagctcttgggttcgttgttcttttaagcattggactagccagtgctgcaagagtagaaagatattctagttcccaaggttccggcacaggaagtggacagggaggaggatatgtgaatggtgggggagcgggggaaggaattggggccgggtccggtagcagtaaccgttatggtgctcatgcaagtggcggaggcggaggtggtggtggcggttacagccaatacggtggatcgggatctggtagcggatatggcacgggctcaggctctagccagacctctcaaaatagatattatagttatggcgggtcatccagtgctgggggtgctggtgctggtggcggtgccggacaagctggtggttactggccatccaatggtcatgggtctggtagtggtacgggttatggctctagctccgctaataattactacggaggaccatacgcaaatgctaatgctggtggcaatggtggtggtaatggtcaaggccaatatggtggccgtggcgttggcgcaggtgttggatcgggatacggtgacgccaacccttaatttcctacgtaaaggaaattctagaaaatggagcccaacacacctttgtttgttgtcatgtctatgatgtacaatttgttctcatttatttgtacttgttcaatgtattatgcaagaagaaataaagggcttcattgattcagt

SEQ ID NO: 50439 - DNA, 1648 bp, Oryza sativa
  Clone ID: PAT_MRT4530_52925C.1
atggcctccacgcctccaatcggccaatcgccaattcgcaatccattccccccgaaaccctaagcggcgcctctcctccacgcgccgtgccgcctcccgctcctccctccgagcagtgccggcgtcgtcgtccctgtcacccgcgggtggcggagatgggtctccctcggcgtcgtacatccaggcaccagggtcaccatcaccctgtcaaagaagtgctacaaccgtccggagattgtgctggcaagcagtaaggttgtcaaaaggcgagctgtatctgacattgataatgatgatggtgtgcacttaggaagaaaacgatctgtgagggacagactaggaaataatatggttggttctgagtcgtatgatggccagcagcgtaacaaaagacgacagatagaaaaggtcgggtaggggtagatttgagattgaagcttatgaagaaaggattgtctagcaatggtggtgcagaacaaaggcttgtctagcaatggtggtgcagaacagaatggagtggatctccgtgaaaagctttccaggaaacctaagaatatacggaggtatgatgcaagaggacatgttccagaatcaaggtctagatatgacggaagagataaaattccagaattaaggtcaagatatggcatgagagagaggctccctgaaccaaggacatctgctcttcctagtcgaattccttctgcaagaagcatggatgatctgttgaagttggactcttcaagagaagcttattcctcgtggtctggtaatttgaggcacaggtcccctgaaaaacttaaaagtgctcgcagagatatgtctccctcaagaacatatgatcatattcgttccatgccacccattagatctgctggtacctcaaggacttcaggtctcatcactagagacgctcctgatgcattaagaactcaaccttatgctggcaagtctaccatttctattgatacaactcagccagcaaatggagttgcttcatctgctacagtgatgcctacagctcctgtgatgccagaagtaccgctaacagttactgggttgctgaattcactaggacttgagaagtatgtcttcctcttccatgctgaagaggtggatatggctgcattgagtcagatgggagacagtgacctgaaggaaataggggtaccaatgggtcctagaaagaagattctccaggcagtggcaccttattcaaaacggcgtagatgaacagcatgctcaggaacttggggcgttcgtgggcaatgacaatttattggtgtaagctgcttcattgcagatcttgtatatcccaatggtctagtgctctagtcaatccgtttcattgctgatagatcaacgcatcgcttttcttggcatgcataatcttatctgtcagctgatgatcccaatcctgttattcacgacctgccccttgtgtagcaggatctgaaacatggatatgtagctttgctacactaaccagtcagttttttcttcctctttgggaattgggaacatcgatgacctgtaatcgaaatcccatgctttatgaccttgggagcgttggcaattgagtttactggaacatactagtgttaagattgtgtacagaatgcgaaacagacctgttgtgttttttgtt

SEQ ID NO: 50440 - DNA, 460 bp, Oryza sativa
  unsure (1)..(460): unsure at all n locations
  Clone ID: PAT_MRT4530_52926C.1
ttttttttttttttttttttttggaaaaaagcgagacaattaatttcccattcaacgtgatctcatagtatcagcaaattgtcgctaacaaatcttacacagacacagccagaaatggctcgagaaacatcacatgatttcacctctaaaagatggcatatgcgaccaccaaaaaacagccagcaaaggctcgagaaacatcacatgattttacctctaaaagttagcatatgcgaattgagaaagggggaaaaacttgtaacatttctgaccatccactttacttttcaattttgcgttttttcttgtcagatgttagtggcttctgtttcttctcaacatgattctgagatctcttcttcctccttcggttttgcctcgtgctgccagaatccttctttgattttngtacttgctgagcaagagctacagttcgagcatgtcgntcagcatgtgtctc

SEQ ID NO: 50441 - DNA, 669 bp, Oryza sativa
  unsure (1)..(669): unsure at all n locations
  Clone ID: PAT_MRT4530_52927C.1
acncactncanggcgaattgggtaccgggccccccctcgagtttttctttctttttnntatgagaaattcatgttgaagcagtatanntncaatcgtaanagattcaatnncnatttacaagcantaaggatcgtaacttatctcacnaactatgggaacaaactgatttcagnttacatgatgtatgantgtctaagtcagtgttgatcttctgtttcctccangtantctctctctganncntccctcnncaatttcgatnggctcaccccacagggtctcanatcnctanccctnactcctttcgcatcacttttnnnccnnnggtngtcactncctnnttttccatcncctngnccnnaannactccctccttctctcccnccanattcatcttgggtcncccntnatgcggncctntctggtncgnaaacccctnccccngtgtcctcctntctntctcctgaatctccttcacccgccctcactctctttctcccnnacntccaccntgcngggtntccntctctcttntcgtcccctctttntcctttccctctcccccccttctccttcttcnntcccnccctctnttntcctcgtctccntctttctcgcncatanctcntctcctactctcactctctctctnntcnntctntcttcct

SEQ ID NO: 50442 - DNA, 146 bp, Oryza sativa
  Clone ID: PAT_MRT4530_52928C.1
aaatactcatgtcccaactccgtctacttcgcaggggtcggggaggtgcaggatggcatcggtggtggtgagggcggaggggtggaccagaccatcagcccgacagtgagcacactcgccgtccaagaccatagccatcaccgaca

SEQ ID NO: 50443 - DNA, 536 bp, Oryza sativa
  Clone ID: PAT_MRT4530_52929C.1
gttgataatagaggtgactatatattccctctaattttatctatttcatatacacataaactaatagacaacatatacaacatgttacctctaataaacaaacccctaattagtgctatcatatttgttatagtgtacatatagaggctacctcttgcacgagagatgcctcatcttctccctttttcatcacttctcttctcaaactcatcacataatcctatttaattaacaatcttagaggcagcacatcaaatttcattacgcttgctctaattctatttcatgagcatggtctgtaaatggatcctttgcctcaaaacatatatttagtagctgcagacaagcatccttgcctcaagctgcctctccatgttgaaccttgcaatgaagtcctccactctacgattcagctcatcagttggcaacccaacatcttcctcctcaatcatttcctcctcgattaccttgccttgggaaattgctccttcctgttcttccacttccttaatttttccatccccaacattagcatc

SEQ ID NO: 50444 - DNA, 965 bp, Oryza sativa
  Clone ID: PAT_MRT4530_5292C.1
acgccgcaatctcgcgaatcccaccgcttccgtttcctctcctctccccgagaagaagagagcagcggcagccatggcgcccaaggcggagaagaagccggccgcgaagaagcccgcggaggaggagcccgcagcggagaaggccgagaaggcccccgcggggaagaagcccaaggcggagaagcgtctccccgccggcaaggccgagaagggcagcggcgaggggaagaaggcggggaggaagaaggcgaagaagagcgtcgagacctacaagatctacatcttcaaggtgctcaagcaggttcaccccgacatcggcatctcctccaaggccatgtccatcatgaactccttcatcaatgacatcttcgagaagctcgccggagagtccgccaagctcgcccgctacaacaagaagcccaccatcacctcccgggagatccagacctccgtccgcctcgtcctccccggcgagctcgccaagcacgccgtctctgagggcaccaaggccgtcactaaattcacctccgcttaggcttcacccctgcatctatctattgctattgctaatagttgtagtttgatctgtttgtgttagttttagtgctatcgatgattggaaaatggatgttagatcgttagcttggtagtcagatgtcagtgatctggaacagtagctctgattttaaaccatgtgaatgtgattcctgggtatgtgatgtttgaccgccctgtgcctgctggtcaacgaatgataactagatctaatttttgtggaactatttacatggttgctacttgcattctgttcaactgttgtaaattcctctgtcactcgttggagttttattctctgaagcatgtgtggaattgcctgggcatgcttttgggaaactatagtctgtagtcttatgttatgtttggttgccctgagcttgttggaattaatctatctaattttgcgc

SEQ ID NO: 50445 - DNA, 1311 bp, Oryza sativa
  Clone ID: PAT_MRT4530_52930C.1
atggcttggagttacgtcaaaatgtcaatgttcgggacagccgcagcatactccgaggacgatgagatcatggccgcagtggtcatcctcacccagacgccacgaaaacgcccttggggaggttcagtccctggccacaagacttacaagcgtgatcgaattgcagcagactggcaattgaatcaggactacttcgttgaacgtccactgtacaatgaagaacatttcaggaggaggtttcgcatgagacgggaattgttccttcgaatagtggatgaggtcacagccaagaacaggttcttcacacagaggagaaatgctgctgggcagttaggattctctgctcttcacaagtgcacggtggctctaaagatgctagcatatgttggaccggctgatgagttggatgatcatttgaaaatgggagaaagtactgccctgaagaccctgatggaatttgttatgactgtgatcaaggtgtttggcaaagaatttcttcgtcctcccaggagtgaggagatagagcacatattaagcatcaatttggccagaggttttccgggaatgataggtagcattgattgcatgcactgggaatggtctagctgcccgactggttggcaaggcatgtacagagggcacaaaggcaagccaactctaatacttgaggcagtggcgaccgaggatcttaggatttggcatgcttactttggtttaccagggtctcacaatgacattaacgttttgcatcgttccaatgtgtttgatgatgtgcctaacgggagggcaccctctgttgagttccatgtcaatgacaacatctattcccttggatactacctagcagatggcatctatcccgattgggctacactagtgaaaagcattgctttgccagttagcaacaaacaaaaggtattttcagagcaacaggagtcgtgtagaaaggatgtggagagagctttcggtgtcctgcaggctaagtggaaaatcttgcataggccagctcgtttatggagtccaaaagtacttaattccatcatgcgtgcttgtgtcatacttcacaacatggtagttgaagatgagcgtggggttcagctacctactgtccatccatcagaatggcctggagtgtccgacccacctattaaccaggatagggaaatcccggcaattgaaaaacttgttgatgctcaaaacatcattcaggacagagagacagcagcattgcttcaaaatgacttgatggaacacatgtggatgctatatggccaatgctctggtccctttgctgcaaatcacaggaactag

SEQ ID NO: 50446 - DNA, 779 bp, Oryza sativa
  Clone ID: PAT_MRT4530_52931C.1
ctatatacagtataggttcttgagcttcacgaagctcggcatcacgccggcgaacttgttgccgtagaggagtatctcagccaaggcgctgcatttggtcaggttgtccacgaactcccagccgccgccggcgtcgatcgccgtgagcttgttgttcgacagctccagcgacagcgcgcagagcgtgccgatctcggcgggcacctgcccggcgaagctgttatttgcgaggttgagagccaccagcgccgtggcgttcgacagcgacgccgggatagggtgggcagaataaaaccgaacatccccatcctcctgtgcgccgtccccatccccatccccatcctcctttgcaccttcgcgccgcctcttgaccgcatcagcgtgcgcctctcgcctccgcctccatcgccgcccgtgcgccgcctccaaccagcctacctccgcggctccgcctccatcgccatgcgccgactccagccgggccgcctccacctccagccggcgcgcctccacttccatcgccgtatgccgcctccagccgacccgcctccgtctccatcgccgtgcgccgcatccagccagccggctgcatcccggctcggtggtggtcctggtggaagatgacagccatggccatgagaagctgatttcttttctaaatcgtgttcgatttgcttcttttcttgtctaaatcgtgcttgatttgatggtgcaccaattgtagtgtgtcatctgcgatctaattgtttgattattcgatcttgcactgattatttgat

SEQ ID NO: 50447 - DNA, 478 bp, Oryza sativa
  Clone ID: PAT_MRT4530_52932C.1
gcacgaggtgacaacttgcatcagccttcaacttgatacaagcagccacgcgcattcacctcgcagcgataaccatcagcaacaatggcgcctgtgacaacctcggaccagctcggggccgctgcctttgagcacctggacgacacatttggctccttccccatgatcaggcgctacacgcccatctgtctcttgttttcgcttccggaagatgtcccttccatccagaccgaggttgagcagcatctcaggcgcgctttagcaaagctcgcccgcgatctaccctgggtagccggtcgcgtcatctataaaggccgggacgaaacccactcgggtatccgcagggtcataccccacgcggacgagatcgagctaattgtctaatacagcactgccgagctccccagcttccaagagatgcagatcgccaacttccccatgcggtttttgcaaacagacgtcgtcgtgccgcccatcg

SEQ ID NO: 50448 - DNA, 348 bp, Oryza sativa
  Clone ID: PAT_MRT4530_52933C.1
gggtgagattaggtacgttgctcgttttgaacacaatcaattgattagttaacaatatgtatgctttatcatgccaagctgggcaagccagcaacttacatgtgcaaattaagtccaagctggtcattatctaaaaaagaagtccaagctggtaggcctatcagctagctagccatagatttcttttatgttaattaatttctcaagtactacaaagtccctagtatctcattttcatatatagtcttcaagagaaagtatagggcccacccattggataggttgatggtgatatgcatgcatatgcaatattatgtgcttcccaagtcaaaaaaaaaaaaaaaaaaa

SEQ ID NO: 50449 - DNA, 318 bp, Oryza sativa
  Clone ID: PAT_MRT4530_52934C.1
atggagcatggagaacgtagaactatcgtccctctggtcatcgccctcaagctcatagctcccgtcgccactcgcgtcaccaacgttgttgccgtactcgggctcgcggctttcgtcggcgtcatcgccaacaaagctgtccctatcctcgacctcccggcttccgtcggcattgccgccaacgaactcacttctctgttagctctcaatcgcgtcgccatcgagctttcctcccgctgcatcatttcgcccgtcgctccgccccttttgccgtcgaacatcgaaatcgcccatgtgcttgcttgcgtgttccagtag

SEQ ID NO: 50450 - DNA, 492 bp, Oryza sativa
  Clone ID: PAT_MRT4530_52935C.1
gggctgcaggaattcggcacgagggcggcttcgtccactccggttcgcgtcgccggcgaacggcggcctccgcggatgccccccccccctccccctccacatggtctcgacgcaatgcacctgaagaggaaagcggccaagttccatcttgccgcaatgccgtcctgagcgtcgccgtcgcggatctcctcctgaagaccccactcctgggtgtgggggtgcgccgtacgcgtcgcgtgcgtggtgtggccgtgacatccaacagccgtggacgacgacgacggcgacgcccaccgatggcgagtcctgcccttgggtgtgcggtgggaaggggacttgcacgctcgccgccaggttcggcggccgggacggtggtggctggctcggactcacgagtggcctcacgcgcatgccgcctgttcgacagaatgcctgacccaaggggctaccaccagctggcgggcatcagtaacttccgcagttgaattgtgt

SEQ ID NO: 50451 - DNA, 4207 bp, Oryza sativa
  Clone ID: PAT_MRT4530_52936C.1
cagatctcacacgctttggagcgaacagtccaaggagcagagcagccttcctcttcctctcttctccgatcggaagcaggcgcggcggcggtagcggaagcggcagtcgccgtaggagcggatcgcgatgggagcggagtgcaagtacgaggtggaccaagtcggctgctagatgacactatagaagagctatgacgtcgcatgcacgcgtacgtaagcttggatcctctagagcggcgccccacctccgtcgacgagcgaagcggcgccgcctctcccttctaccgggccgacgtggagctgagcggagcggcggggagggggggtggggaggggggtgaggggagatccacgcgagctgatctcttccgtggtgggtgcgccgtgcgggacggggtcggtcgttttctgtgacctgtagaataggtagggtttgaggcttttgagcagaggcgcatccgccgcgtgggtgggtgggtgcggcggtggaggggaggatgtcgtcgctgagccgggagctggtattcctcatcctgcagttcctcgatgaggagaagttcaaggagactgttcacaagcttgagcaggagtctgggttctacttcaacatgaagtacttcgaagacgaggtgatcaatgggaattgggatgaggttgagcgctacctcggtggctttaccaaggttgatgacaaccgctactcgatgaagatattctttgagatccgcaaacagaagtatcttgaggcccttgataagcatgatcgttcgaaggcggttgaaatcttggtcaaggacctgaaggtcttcgcgtcctttaacgaggagttgtttaaggagatcacacagcttttgacgttggaaaactttagggaaaatgagcaactctccaaatacggtgatacaaaatctgccagagcaataatgcttgttgaactaaagaagctgattgaagctaatcccttgttccgtgacaagcttcagtttccaaatctgaagagctccagattgcggacacttataaaccagagcttaaactggcagcaccagctttgcaaaaatcctagacctaaccctgatatcaagactctgtttgttgatcattcttgtggacaaccaaatggtgctcgtgctccatcgccagcaaacaatccattacttggatctataccaaaacctggaggtttccccccattgggtgctcacgcgccatttcaacctgcacctacacctgtcccacctctggctggctggatgtcaaaccctccagcagtaacacatcctgctgtgtctggtggagctattggatttggtactcctacaaatcctgctgctatattaaaacatcctagaacaccaacaactgccaatccttctatggattatccatcaggagattctgatcacgtctccaagagaacgagaccagttgggatgtctgaggaggtgaatcttccagtgaatatgttacctgtgacatatccacagagtcatagttacccgcaagatgattttcataaaaatgttgcacggacattgagccaaggatcaactccaatgagcatggacttccatccagttcagcaaactctccttcttgttggtaccaatgttggtgacattggattatgggatgtcggtaccaaggaacgacttgttttaagaaacttcaaggtttgggatcttacaaaatgctcaatggccctccaggcatcacttgtcaaagaccctactgtctcagttaaccgcataatatggagtcctgatggaaccttgtttggtgttgcttattcaaggcatattgtacagatctattcataccatggcggtgatgatatcaggcagcacttggagattgatgcgcatgtcggtggtgtaaatgacattgcatttgcccatccaaataagcagctatgtataataacctgcggagatgacaagacaattaaggtctgggaggccactagtggagcaaagcaatttacatttgaaggtcatgaagctcctgtttactctgtttgtccacattataaggaaaatattcagttcatcttctcaactgctttggatggaaagataaaggcttggctatatgataatttgggatccagagttgactatgatgcgccaggacattggtgcacaacaatggcatatagtgcagatggttcaaggttattttcttgtgggactagcaaggatggcgaatcacatctagtggaatggaatgaaagtgaaggagctgtcaagagaacttaccagggatttcgcaagcgatcgatgggtgttgtccaatttgataccacacggaacaggtttttggctgctggagatgaattcttgattaagatatgggacatggacaacacaagtcttctgactaccattgatgccgatggtggtcttcctgcaagtccacgggtccgattcaacaaggaaggtactctgctggctgtttctacccatgaaaatggtatcaagatcttagcaaatgctgatggagtacggttgctgcgcacattggaaaatcgttcatttgatgcttctcggagtgcgtctgagactgtaacaaagcccccaatcaatactttgacagctaatgctgctgcggcggcaacaactgcagcgaacggggatagccgaagcttggttgatgtaaagcctagaatagctgatgagccattggataaatcaaaagtctggaaacttatggagataaccgagtcaagtcagtgcagatcattgaaattaacagataatatgaggacaagcaagatttcaagacttatttacacaaattctggtgtcgctatcttggctttagcttcaaatgctgttcatctgctctggaaatggcctcgcaatgaccgaaactcaagtggaaaggctactgcaagtgtttctcctcaattatggcaacctccaagcggcatcctcatgactaatgacataactgacaaccctgaagaagctgtccattgctttgctttgtcaaagaatgattcatatgtcatgtctgcatctggagggaaaatatctctgttcaacatgatgacttttaagacgatgacaacttttatgcctccgccgccggcggcaacgtttcttgctttccatcctcaagataacaacattatagcaattggaatggatgactcaaccatccaaatctacaatgttcgaattgatgaggtcaaaagcaaacttcgagggcactctaagaaaattactggacttgctttttcaaatgtattaaatgtgttagtctcttctggagctgatgcgcagatatgtgtgtggagcacagatgggtgggataaattaaagagcagaatgttacagataccatcaagtcgtccatcatctataatcttagacacacgtgttcagttccatcaggatcaattgcactttcttgttgtgcatgagacccagattgccatatatgaaactacaaaattagaacccgtgaagcagtggcctgtccgggagaactcttctccaataacgcatgccatgttctcctgcgatagtcaattgatttatgcaagctttctggatgccactgtttgcatatttaatgcatcgagtttgagactccaatgtcgaattcttccagcatcctatcttcctcagaatatcagctcaaatgtttatcctgtcgttgtggcggcacatccttcggaagcaaatcagtttgctctaggcctgactgatggtggtgtttatgtattggaacccttggaatctgagagaaaatggggaaatcctccaccagcagagaatggatcaaccagcgctttgtccacacctcctaatggagcatcaagttctgatcaaccagaaagataatgatgaggagtttgaagtgttacattttttgtacttgcacggtacaaattcactaaccaagacgatgcacttcactcttacagcttcccttccgtagagctggttccaaggggtagtcgatgaacggacggaataaaaagacaagcttaacagcagttcatttgttgcttatatgtctcactgttatctgtattaagtgagggaagagttagtcctagtatttaattttgctgtctgtcgtgctgtgaaaaaagatgtttgcaagtagcttaagctgtagcaacaatttgtctgaacttattatcaccttttattcacaactagaaagtaaattgctgctcctatcgtttgtgttc

SEQ ID NO: 50452 - DNA, 204 bp, Oryza sativa
  Clone ID: PAT_MRT4530_52937C.1
atgagtactgtagcggaggctagggtttgggaatcggggaggagaagaagtgaggagagagatggcaggctcgggctccctctgggtatttatacccccgacccccggaagttctggactgggatgactggaacttccggcctgacagaacagaaggcagtcaggcccaagttcaaaggaatagatgagaattcaaaggaatag

SEQ ID NO: 50453 - DNA, 1164 bp, Oryza sativa
  Clone ID: PAT_MRT4530_52938C.1
atggctaggtcactcgctgctgtcctactccttttggtcgccgccgcgggagccagccatgccgcgtcgccggcggagatgtactggaagatcgcgctcccgacctcgccgatgcccggcgccattcgcgacctcatcagcccagcgagctcagtgggctcagcttcgaaggaggacacggtgggcaacgtgttcttcctcgagaaggacctcttcccgggctccaagatgacgctccacttcacccgcgccaccgccggcgccgcgctgctcccccgcggccgcgccgagtccgtcccgttcgcctccgaaaggctcccggagatcctctcccagctctccatcccggccgtctcgccgaccgccgacgccatgtggtccacgctcgccgagtgcgaggccgcgcggctcgccggcgagacgaccaagcacaagcactactgcgccacgtcgctcgagtccatggtcgagttcgtcgcgtccagcctcggcacccgcgacgtccacgccgtgtccacggaggtgatcagcacgttgacgccgacgccgaggcaggcgtacagggtggaggccgtgaggcccgtggcggtgcccggcggcgacatggtggcatgccacgggatgccgtacgcgtacgccgtgttcgggttgcacgggctcaagggcgcaggcggtggccgcgtgccacggggacgtggacgggcacggcgcggtggcggaggcatacaagaggctcggcgtggcgcccgggagcgtggccatctgccacttcctgcctcaggacgacatgatctgggtgcgcaactgaattaagggaggaaggccgcccccccgaagccaatgcaaccgcccaaatccatccgttccgccatttccaaaaaggccaacaaggccagcgcctgattattgccgccgttttgccgcccgttcccccccgcgcgctgtatccctgtatagcctaggggttgtcgcttacctagtagtagttcgccatcgtcgtttcgtttgcttcgatcgatcgagcgctctgtgtccggtgtgtgtgttgcgttgtaaataaggtttgggtttctttttgcaagggaggaagaagcttctgtagcatatcgccaaaaagctgtagtaataaaatgatctggcgctcgcagctttgccttttggtcc

SEQ ID NO: 50454 - DNA, 502 bp, Oryza sativa
  Clone ID: PAT_MRT4530_52939C.1
gcatctggctttctctgctgctcttggtgtcacccttgggatctttccgatatgtggtaaggagcctctcaagcctcagcatgtcttcattgtaccagatttttctcatagtttaactgaacaaaagaagatatccaaattaactgagttaagtggccttagacagccaaggaggttatgattagatacaaatttgcgcatttaagctgtgtagtttcattgtggcttttgataagctggggcactaacttttttttattcttgaaacaatgacttcctgctccatggtcttgaagaaatagcacacaatcctttttggtaaattacagatacatgtagagtacgtgtatttaatctgttgtgaaattcgaagttcagtgttgctgcgatgcaatggtaatagtgttctggttctagaaagattaattctggctgttatcctagaagtttggaggatcccgtttatattctcgagcacttgtaaatatgatgtggagtagct

SEQ ID NO: 50455 - DNA, 678 bp, Oryza sativa
  unsure (1)..(678): unsure at all n locations
  Clone ID: PAT_MRT4530_5293C.1
tcctaattcccccaaattttcgtctcccctttcccttccccgagaagaagagagcggcatccatggcgcccaaggcggagaagaagccggcggcgaagaagcccgcggaggaggagcccgcggcggagaaggccgagaaggccctggcggggaagaagcccaaggcggagaagcgtctccccgccggcaaggccgagaagagcagcggcgaggggaagaaggcggggcggaagaaggcgaagaagagcgtcgagacctacaagatctacatcttcaaggtgctcaagcaggttccaccccgacatcggcatctcctccaaggccatgtccatcatgaactccttcatcaacgacatcttcgagaagctcgccggggagtccgccaagctcgcgcgctacaacaagaagcccaccatcacctcacgggagatccagacctccgtccgcctcgtcctccccggcgagctcgccaagcacgccgtctccgagggcaccaaggctgtgaccaagttcacctccgcttagattccatctattggtagtatttagttctgtctactatctggtagtggtagaaatggatgtcttattagtgtgtagttggcggttgtggcgctgcttttggtaaactgttgcttatttatctgagatattaacgatgctcttctagaanaaaaa

SEQ ID NO: 50456 - DNA, 720 bp, Oryza sativa
  Clone ID: PAT_MRT4530_52940C.1
atgcccggcgccattcgcgacctcatcaacccagtgagctcagcggcctcagcttcgaaggaggacacggtgaacaacgtgttcttcctcgagaaggacctcttcccgggctccaagatgacgctccacttcacccgcgccaccgccggcgccgcgctgttgccccgcggccgcgccgactccgtcccgttcgcctccgaaaagctcccggagatcctctcccagctctccgtccccgccggctccccggccgccgacgccatgaggtccaccctcgccgagtgcgaggccgcgccgcaggccggtgaggccaagcgctgcgcgacgtcgctcgagtccatggtggagttcgccgcgtccagcctcggcacccgcgacgtgcacgccgtgtccacggaggtcgacagggcagggccgacgccgaggcaggcgtacagggtggaggccgtgaggcccgtgccggtgtccggcggcgacatggtggcgtgccacggcatggcctacgcgtacgccgtgttcgggtgccacacgaccacggcggcggcgtacacggtgacgctggccggcgccgacgggaccaaggcggaggcgctcgcggcgtgccacaccgacgcggcgcccagggtggcggaggcgtacaagaggctcggcgtggcgcccgggagcgtgccggtgtgccacttcctgccacaggacgacatgctctgggtgcgcaactga

SEQ ID NO: 50457 - DNA, 1545 bp, Oryza sativa
  Clone ID: PAT_MRT4530_52941C.1
gtcgcagccgcgggagccagccatgccgcgtcgccggcggagatgtactggaagatcgcgctcccgacctcgccgatgcccggcgccattcgcgacctcatcagcccggcgagctcagcggcctcagcttcgaaggataaggaggatacggtgggctccgtgttcttcctcgagaaggacctcttcccgggctccaagatgacgctccacttcacccgcgccaccgccggcgccgcgctgctccctcgcggccgcgccgactccgtcccgttcgcctccgaaaagctcccggagatcctctcccagctctccatccccgccggctcgccgaccgccgacgccatgcggtccacgctcgccgtgtgcgaggccgcgcggatcgccagcgagacggcgcccaagcacaagcactactgcgccacgtcgctcgagtccatggtcgagctcgtcgcctccagcctcggcacccgcgacgtccacgccgtgtccacggaggtggtcaacagggccgggccgacgccgaggcaggcgtacagggtggaggccgtgaggcccgtgccggtgcccgggggcgacatggtggcatgccacaggatgccctacgcgtacgccgtgttcggggtgcacgggatcaagggcgcggcgtacacggtgacgctggccggcgccgacgggaccatggcggaggcggtggcggcgtgccacggggacgtggacgggcacggcgtggcggtggcggaggcgtacaagaggctcggcgtggcgcccgggaaggtggcagtctgccacttcctgcctcaggacgacatgctctggggtggagatccaggagcagcatatctccagccgctgccgctctccatcccgccctcggtcgccgacgatctccatccagcttcagccgccaccggtctccatcccgtcctcagccgccgccggtctccatcccgcttcagccgccgccaccgctctccttcccgctctccatcccagccagtcgccggcgctcgccatctctccttcctcgcttcggattcaccggttgcgggagagggcaaggtcgagggcaacagcccggacaccaagaagcaggagaggcacaggcgtgtggggttggcaaaagtaaagctgaaggagttgatattactcaaggagtttggacgtggtcatcgtagacctagagactacaaggagttattcaatcatcgccatgccattctgagaaaccatgtagagagagctctaggggttctaaagaagcgatttcccatcctgaaagtaggcactttccatcggataaagaaccaagtgcggattccagcagctgctgcggtgttccacaacatgatccggttgcttaatggtgatgagggctggttggacaaccaacctgataatatagaacctactaattttgtcgatctaccagaaggtgacagtgaataccgaaatgatgtgccatctcttagcaatcaaatgatcagtgggaataatattagagatatgattgctaagaagatgtgggaagattatgttcgtaactag

SEQ ID NO: 50458 - DNA, 1094 bp, Oryza sativa
  unsure (1)..(1094): unsure at all n locations
  Clone ID: PAT_MRT4530_52942C.1
atggggtgtactggaggattgctagagatgtcggcactctctcctatctcgttcctcctcgtttccgtctgctctgcaggtcgccgccgcgggagacagccatgccgcgtcgccagcggagatgtactggaagatcgcgctcccgacctcgccgatgcccggcgccatccgcgacctcatcaacccggcgagctcagcggggtcagcttcgaaggaggacacggtgggcaacgtgttcttcctcgagaaggacctcttcccgggctccaagctgacgctccacttcacccgcgccaccgccggcgccgcgctgctcccccgcggccgcgccgactccgtcccgttggccaccgaaaagctcccggagatcctctcccagctctccgtccccgccggctccccggccgccgacgccatgagtgcgaggccgcgccgctcgccggcgaggcgaagcaatgcgcgacgtcgctcgagtccatggtggagttcgccgcgtccagcctcggcacccgcgacgtgcacgccgtgtccacggaggtcgacagggcagggccggcgccgaggcaggcgtacagggtggaggccgtgaggcccgtgccggtgtccggcggcgacatggtggcgtgccacggcatggcctacgcgtacgccgtgttcgggtgccacacgaccacggcggcggcgtacacggtggcgctctccggcgccgacgggactagggcggaggcgctcgcggcgtgccacgccgacgcggcgccgggggtggcggaggcgtacaagaggctcggcgtggcgcccgggagcgtgccggtgtgccacttcttgccacaggacgacatgctctgggtgcgtaactgagcgcgcgcgcgtgaaaggggaataaaaattngtgtgatctcaagatagctccccttcctaatattttggagctatnnatgcgtatcatnggtcttatcatnnatgtggtatgcgacgacnnccgaaatnngcccactactantacttgtggcanngcatgttaataanngtctgcatttgtacgattcatcganntccatacattcttggtatgacaattgttacacggttggtat

SEQ ID NO: 50459 - DNA, 433 bp, Oryza sativa
  Clone ID: PAT_MRT4530_52943C.1
taaagaatcctcatagttccgtccgattagtttcacttccttgtgcaagaaccataaccgccttagggtcctcatctctatcatgtttagaaggttggttgtggatgcttttatttatcataaatattgcaaatcttgtatgtgtctgtggcactaatcttgcagcgagatgtctccatggtcgagcttgtgaccataaacaaagcaatgccgggagatatcccggattatcttgttggcacttgcatctttgcctaagaagagatgcatcctacgtctctacaaaattttgccaacggaacacgccttcaaggcacaaggttcttgcacccgagataataaaaagacaactaaggagcagtgtagaataacctcaacattcataccacgctccttggtagttaaaatttaactcaccaacgaccaatctcga

SEQ ID NO: 50460 - DNA, 329 bp, Oryza sativa
  Clone ID: PAT_MRT4530_52944C.1
tctctatctattccaagtcccaactgttttcggagctagtaccgttatcttttcaggttaacaagccaactatcccactaggagctggagctggagctgcacttgtatcagcctttgctactatgactgcagttgcgtcaccgcagagctttggccgtagatagttattggattggagcgtggctctttttagttaccattattctgggaaccacatattcgatcaatgtaaaagaacacagtttctttatttcttgattttgtttttttgttaaattaactaagaatagtgcaacccattatttttgtgttcaatattatttttgtgc

SEQ ID NO: 50461 - DNA, 1575 bp, Oryza sativa
  Clone ID: PAT_MRT4530_52945C.1
atgactattcctttccccttcgggctccaagaagaatgctccgcaaatagaaaattccttctgaattgtacttccaagcaagcatttattggaggatcatacacgcaatatcaagtgacgaatatttcactagatcaagggcttctgtttgtcaacttttctcagcacgaagaggcctactcagaattggtagaaataagcagagataacatctcacagtgggtggagtcctggattgacgaattcaacgattttgacgtctctcagcattacggtatttggaagtggtttgtgaccaacatgacttgtgaaaaggctaaaaaatcatctgcttatgcctgcattagcaccaacgatattgacgagtgctcgatacccaatgattgtaagggaatgtgccacaaccaagcaggaggctacagttgcactcgttgccctcatggcacatctttcgatccagccgaaaggaaatgcacttccaccaagcaacataatattgtcttgggtatttctcactttaaccgatcccttttcaataagatcacagtcaagtggaagagaggcattcaaaagaaaattagaagggattacttccataaaaataaaggtttactattggaacaattgatttcttgtgatgacagtgttgcgcataagacaaagatattttctttagatgaattagagaaggcaacaaacaattttgactcaacacggattctcggtagtggaggccatggcactgtttacaagggcattttatctgaccaacgcgtagtagcaataaaaaaatccaaaattgtggagcagagtgagattgatcagtttgtcaatgaagttgctatgttatctcaaatcatccatcgtaatgtggtcaagctttttggctgttgcttagaatccgaggttcctctacttgtttatgagttcatatcaaatgggacactatatgatcttctccatggtaatttgcaaagcaaatgtgtattaacatggtggaatcgcatcagaattgcccttgaggctgcaagcgctcttgcctatctccattgtgctgcctcggtaccaatatttcatagagatgtgaaatctgccaatatacttctcgatgataatttcactacaaaggtttcagattttggtgcttcaagatctgtttctattgatgaaactcacgtggtcacaatagtgcaaggtacatttggatacttggatcctgaatattatcatacaggacaattaaatgagaagagtgacgtttacagttttggtgtaatacttattgagcttataacaaggaaaaggccaatcttcctcaattcaattggagaaaagcagaacctgtgtcatcactttcttcaaagacagcaaaacaataccacatcagaaatagtagatgtacaggttttggaagaagcagaccagtgggaaattgatgagattgcttcgcttgcagagatatgcttgaggcttagaggagaacagagaccaaaaatgaaagaagtggagctaaggctgcaacttctgaggagtaaagtagcaaagaagaagaatagagtagaatctattggataa

SEQ ID NO: 50462 - DNA, 1269 bp, Oryza sativa
  Clone ID: PAT_MRT4530_52946C.1
atggacgagcctcctcagctattcctctgcccgatctccatggagctcatggaggatccggtgacggtgtccaccggcgtgacgtacgaccgccggagcatcgaggagtggctcttcgtctacggccggaccacctgcccggccaccatgcagcctctctccaacttcgacctcactcccaaccacactctcaagcgcgtcatctcgtcgtggctcgatcgcggctcgtcgtcgtcgtcgtcttcgtcgccgtcgacgtcgacgctgtcgagcccgatccacgagctggcgacgccgctgtcgcgcgcgctggagcaggagcggttgctggctgcgctggccgagctggaggagacgccgttcaaggtgaccaagctgaagagcatgagggcccgcatggcgggcgacgtggcaatgcagggggagttcgtcgcctcgggcggggtgcgcgtggtggggcgcgtgatggcgcaggcgctggcggagagcggcggcgacttctcggcgttcgccgcgtgcgaggaggctgccgcggtgctcgccgcgctcccgctctcggacgaggcgtcggtgcgggtcgtccttgcgccggagtgcatcaggcccgtcatggcgctgctccagcgcggcggcgccgaggcgaggctgcacgccatggacatcctcaccaagatctccagctccggatcaggcggcgactggaccgccggcgtcgacatcgacgacgtgatcaagtccctcctcgagctcctctccgacgaggcctccacgaggctcagctcgcgcgcgctcgacgtgctcctcgacgtcgtggagcgggcgcggggcgcccgcgccaaggccgtcgaggtcggcgccgtgcacgtcctcgtcgagctcctcgccgacgccgacgaccgccgcgtcaccgagcgggtactgctgctgctgaagcggctgtgcaagtgccccgaggggcggctcgccttcgcggagcacgacctgtcggtggcggccgtggcgaggacgatgctgcgcgtgtcggagctgtccacgcagctcgccgtcaaggtgctgtggctcgtgtccgtggtggcgccgtcggagaaggtcctcgaggacatgatgctgaccggcgccgtcgcgaagctcctggggctgctccacgtcgagagctcgccgtcgacgaagcagaagacggtgaggatggttaggatccacggggtagtctggaggcagtacgcgtgcttccctaccgacttcagggactacctcaggctgctcgattga

SEQ ID NO: 50463 - DNA, 143 bp, Oryza sativa
  Clone ID: PAT_MRT4530_52947C.1
agttcggtaattattgattatcataaacactgtcaacatgatttgcagaggctaatgttgattgattagaagagctcaagcttgctccacgctgaagctgctgcctcctgctgaaacgcgctcctctgctggtcgtagcactg

SEQ ID NO: 50464 - DNA, 719 bp, Oryza sativa
  Clone ID: PAT_MRT4530_52948C.1
ccccgggttcaaataaagagttgatttggcaggaaaaagtccagttttcccaggttcccggcccccaattggttaccatctggcgggaaagtttgtttcatcttttagatcaaattcccgatgaactaagcagtcaaatccaggcgatcgccattgatggcacttcctccacggttttactgttggatagccaaggcaatgggttaatggagcctctgttgtataacgatgaccggggcaaagaagttaagcatttattatcagcaatagctccagcagatcatttagtgcaaagtgctacttctagcctagccaaactgctttggtactcccaacaaccggagtttgaacgagctaattacttttgtcatcaagcggattggttagcaagtttgctccatggtggcagacccgttagtgattatcacaatgccctcaagctgggctacaatccccacaatttaacctatcctgattggttaaaaaatgcttcttggtttgcccttttacctccagtaattgcccccggtaaagcaatttcccgcttatctcccagcattgccaacgcagaaaaattccctaaaaattatttggtttgtgccggcaccacggacagcattgctgcttttttagccagtggcgcaacgcaaccaggggaagcggtcactaaatttgggttccactctggtgctgaagttactaagtgaaaagccagtgac

SEQ ID NO: 50465 - DNA, 410 bp, Oryza sativa
  Clone ID: PAT_MRT4530_52949C.1
agactgtaaccggggggcgcgcccgcattatttaatttccaaagggcaaaaataattttatttatacatcatgcctataaagggcaagaagttttttttttccttcaataaattgggttacagattgttgcaccaaaaaatttgcctttcgattgattgcttaattaattaattaacagggccttttaattttaactggtcgatcagccaccctgggggaaaatcttttttttttctcctggggtagaggtcattttggtttcatttcacatccgggagaagccatcctactgaaccatgaaagggttgctgaactttttgaagctggtcatgatggcaggcatttcctcctcaaatggaaagatggttatccttagggggaacaccccttttttttttccaaaacctta

SEQ ID NO: 50466 - DNA, 760 bp, Oryza sativa
  Clone ID: PAT_MRT4530_5294C.1
gcaccacgcggcgtcgatctcgtccactccaattacatccatccatccgctctgcaaccttctccggttgctgcgagcgagagcgagagcgatcgctacagccgccggtggccagccatggctgaggagcagaggtggcaggagggctgccaccgcctgtgcgccaacaactgcggcttcttcggtagccccgccacgctcgacctctgctccaagtgctaccgcgaccgccaaggccgggagagtactgcacccgtcgtcgtcgccgccgcagcctcggcctgcccggctactcatccttcctcgccatcctcgtcgtcttgtccggcgttcttgccttcctccactgccgccgaggctggcgtcgtcgtcgcggcggtggcgaaggcgagcaggtgcgcgagctgtaggaagcgggtggggcttacggggttcgcgtgccggtgcggcggcacgttctgcggcgcacaccggtacccggagcggcacgcgtgcggcttcgacttcaaggccgccggccgcgacgccatcgcgcgcgccaacccgctcatcaagggcgacaagctcaaggacaagatctgatccctccccacctgccgtgctccccgtcgccgccggaagaacgcgcggttggattccaaattaaatacgcttattattatgtaagctacagccggccggcggtgaaatcgccagccagccatgcatgcatgcgactgaaatgaaaatgagttcatatctctgctccttaaaaaaaaaa

SEQ ID NO: 50467 - DNA, 1992 bp, Oryza sativa
  Clone ID: PAT_MRT4530_52950C.1
atgccgccgccggcggaggagttcgccgtcgacgacctcgacgagttcgagagtcgcctagacagtttcctcaaccgcttccacgccgacgacctccgccgcatcctcctccccttcccggacggcaagctccatttccccctcgtcatcgacttcgcggagctcctggagttcgaccccgaggtcgcccaccaactctacgactaccccaaggacgtgctcgagctgttcgacgccgccgcgcaacgcgccctcgacaaattcgatgccgccgctcgacgagctgacaagactcttgattctcagaggaaggcgggcgacgagacaatggagaagaagttcgtgcacgtgcgcgtcaacacctcggggtcggcactcgaatgccctgaagcgtccccgagcattgggaaggtgagggtgaagcacaggggaactctgctcactttgaaggggaccgtgatcaggtccggtggcgtgaagatgatcgaaggcgagaggaagtatcagtgcaggaaatgcaagtgcaggtttacggttcatcctgagcttgaggctgggaatcgtataactcttcctgcatcttgcaaatccaagagtgcaaaaggttgtggaggtgccaatttccaattgatagaagatagcataacctgccatgattaccaagaaataaaaatccaagaaaatatacagcttctaggtgttgggtctataccccgttcgatgcctataattttgatggatgatcttgttgatattgttaaagctggggatgatgttgttgttacgggtcgattatctgcaaaatggtctcctgacatcaaggatgtacgttcaaaccttgatcctatgctaattgccaattttgtgaggagaaccaatgaactgaagtctgatctagacatacctgttgaaattatcaacaagtttgaggaattctgggcagcttccagagctactccactgaaaggaagaaattccatcttgaaaggcatttgtcctcaaatttatgggttattcacagtgaagcttgcagttgctcttaccttaattggcggggtgcagcatgttgatgcttcaggaacaaaggttcgtggagaaccacatatgcttcttgtcggtgatccaggcactggcaaatcccagtttctgaaatttgctgctaaattgagcaaccgttcagtgatcacaactggtcttggaagcaccagtgctggtttaactgtcacagcagtcaaggatggaggggagtggatgcttgaggctggcgctcttgttcttgctgatggagggttatgctgcatagatgaatttgatagtatgcgagagcatgacaggacaacaatacatgaagccatggagcaacaaacaataagcattgcaaaggctggattagtgacaacactcaacacaaggactacagtgtttggtgccactaacccaaaaggacaatacgatccaaatgaatccttatctgtgaatacaacactttcaggaccactgttgagtagatttgatatagttcttgttctcttggatacaaaaaacaaaaaatgggataaaatagtttcatctcatatattagctgagaacactgaagaaaagaaaggcaagacaagtgatccggaagtaatgtggacactgtccatgttgagaaggtatattcactatgtgaagcagcatttcaaacctgtgctgaccaaggaggctgaaagagttatctctagttattatcagcgtcagcgacaatcaggaactcggaacgcagcacatgcaagactaatgttcagaaatgatgttacgaaacttgatgctatcgctgccatattatgcattgaatcctccatgacaacatctgcaatagtagatactgctgggaatgctctgcactcgaattttacagagaaccctgaccaggaatgtatcctgaaatgtgattccatagcttacttatccaagaatatcaaatatttaactgatgaaatctcgaactga

SEQ ID NO: 50468 - DNA, 244 bp, Oryza sativa
  Clone ID: PAT_MRT4530_52951C.1
gcaggactctgattaaggacaagccagtcttttagaagctctttgacaaccatatggccgactctttcggatacgccttccatgtcccaaatggctaaagtaagattcgcagttgctcaaacctttcctgctgcagcagctgtgcactgaactccagcaatccttccagtgcctcggctctctgacggtacgacttcgtgttaaatctccaatgcttcattctattcgtatgagctcttgatga

SEQ ID NO: 50469 - DNA, 2324 bp, Oryza sativa
  Clone ID: PAT_MRT4530_52952C.1
ggattgcaacttgcaagcacatccttatgtgtgcttagatagttagatgatccccacggatacacaaagggctccctgccacagaagaaaatattctagttctacacagcattgttttccaagataagtttgacaatgagcatggaacgatcttatatataacattcaattgagctattcccacaaactcagacaactgagctatacaacatatgcagttattcggtttctcccggctggggtaaatatgggaatgtttcagctacgcacacagacaacaaaacggagcaagaagcccaaggttgtacggtatgccgatagcctgtgtaattgtcttttttgcactgttcttcctcgtgactagacgatgaaatatgatgtatctcatgtccacagactatagcttagcaagggtctgactgtatgacggatcaatgcacacaacaaccttgccaacactcttgccagaatgaagatattctaccgcatcaggcgcagaagctacacccacgaatttcttcgggtcaagggaaacctgttgtatgcatcgtgtcatgcaaacctttagctttccagaggcatacaggtcaaaaagtttgtcaagatgatcttgccacaagtgagcatactggattaggaaaaaaccagccacagtttgacttttagcaagaatcttatcacatagtccagtgtagttccgtggcttccatccatgctctccttgatactgggagatcataccaattacaataaggcgtccatggactgcaagtgcattcaagcataagtcaaacatttccccaccaaccgattcatatatgatatctgctcctcttggaaactcttttttcagaacatctttgatcttttcattttggtagttgataactctatcaactcctaaggaagacagaagtgcagctttacatttgccaccacatgtggcaacaaccttgttgcctgctagttttgcgagctgcacagcaaattgtcctgttccaccagcagcagctgtaactagaacaacttgccctgatgccatttggcctgccttctcaagggcaattgaagcagtcaatcctgatgttagcatagcaacgacctctggatctggtcttggcaccggaagaagatgcttggctggaacctgagtaaattcagaataggccccaaaaatcataagggctacaggactgccaactttaatatggttcactgaatctccaacagatgcaacgatgcccacagcctcaaaaccggcatccaacggaaggcgtgcagcagtttctttagcaccaccactgaaataacgcccagcactgaagttaacatcactagcatttacaccagcgtatattattttgaccagagcattgtgtggttcaaccggcaatctcaagcgcacacgttcaagtcttgtagcatcgcgaaaattatggctaagtgtgtgaacaactatcttctcatagaactcaggagtttggacagtcgaaaaggtattttgtgttaacatcctttttgacttgggaagattgagcatatactttctttgttcctctggtgttggccagtactccatccctcttcgtttagttatccaaaggcaagcaccagccttgctttcatcttttataagttcaaatgtaccattaacaatgtcttccatctttatatatccaccagttacatctattattcgacgacttagttgctctgccatattagtttgaacaaactcagggcagagtacattgacacgtataccatggcgtttcaatggagcaagtgatcttgtaaacataacaacgccagcttttgttccactatatatgggatcaaagttcataggataaaggcctgcggctgaaccaatatttattatgacaccaggcttcttcccagatcgcataatttgacttgcaatgcgagtaccatcaataacagcaacaaggttcacatttacagcatgcctccatgtgctagttccatcagatctatcatcataaactagtgtcttgatggcaattccagcacaattgatgcaaatatctagtccaccatatgtgtccacatgttttccaaaggcagcagaaagatcacctgcattagtaacatcacatttaataaacatagcacttggaactttaagatctccatgaaactttttattttcattttgaactaatgaagcggcttctcttccattttcttcagagaaatcaacaactgtcacaaatagacccttctgtgcaagagcaatgcaaagtgctttcccgatgccggagccgccgcccgtgacgagggccgacatcccgggcttcagc

SEQ ID NO: 50470 - DNA, 240 bp, Oryza sativa
  unsure (1)..(240): unsure at all n locations
  Clone ID: PAT_MRT4530_52953C.1
aatccgcgnggacgnagnacaaggggaagcccgncggcctgnccaagatcgccgtcattaacagatttgttaatgnaactttgcaagcgcttnaaggagaagnagtcctatcttgtttggaatgctgttggctgccttggtgtttctgctatcagtgatcttgttagagagttacatggattagtttgttaagtgtacttgagaagtttggcgtttctcagaagagtctgaataatattt

SEQ ID NO: 50471 - DNA, 984 bp, Oryza sativa
  Clone ID: PAT_MRT4530_52954C.1
atgaccccttctttcccagcaatagctatatgtcatagttgtttcttgcatggacaagctcatcatcaatgtgttcctcttccttctcaagctctatcatggtcctccacttcctccataagttctggcgaggtggatgggaagctcttcatcatcgacgaaggcatcttcgagatgcttcgtgagccaccaccaccgcgagataatggacctgctgtaggcgtcaaggtcaagttcgactggtcatggtgcacgcttccatcgccaccattccacaatgtgatctctcatggcgtgcaccctgaccaacggaccatggtcttcagcatgacgaagtattccatgaagaagcgcaccggccttcttgccaccttctcctttgacttggagagctcccggtggacgcagcatgctgacaacgatgatgggcagcccccagcttgtaagctcagtaaggagaggctgttttgcgtggacaccgcggagaaacacattggcgcaacccttgtgcatatgggtggtgacaggagtatggtctgcctcgtgcagtatctatcgattgacaatcaccaaggggacatttggaaggagttcctgcctcaacgcattcgttatctgcttcggataactactttctctcccaagtatgacaagcacgaagatctgcgaattgcaaaatgccaccacattggatcctatcaactgcctgaaattgcaacggtttacgatgatcatctaaagagtcctatggcgttttggatattgtcactaaccaacaagttccatgagcagcttaggaagcaaaagagtaagggcatgtttggattgccacctaaagttggcacaacggaacctgaggccaccacagttatattagtaagggcctgccaaagggcaccaattccaatatctgcagatgataaggctgaacagatgactggttatgttagtattggcctgttgagtacccataatgtggtctga

SEQ ID NO: 50472 - DNA, 342 bp, Oryza sativa
  Clone ID: PAT_MRT4530_52955C.1
atggggcacggaggaggtcaagcggcgcacgttgctgagcgatgcgtgttagacacgggagctggcggccagagtggtgggtgtggtggatttggccctccagtggctagatcaggagcgggcagcgacaaagctcatggcgagcaggcggctccaactacgttgcttctcgcaacggtggcggagctcgcggcgactgcagacgggtggaagcgtggggtggagtgcggaagcgctcccgtggtcggtggcggaggaggacgacagcgtaagcgatggttgcacgacacgaccgtcggcgaggccgaaggcatggaggccgtcaccgtgaggccagcgtag

SEQ ID NO: 50473 - DNA, 352 bp, Oryza sativa
  Clone ID: PAT_MRT4530_52956C.1
atattccccgctcgatccggccaatccaaaccctaggggcattcatcgcctgctgagcccccggatgatgactagctccgcgaagtaggatgagcaggcggcggatgcacgactatctaccctgagaatctccatgatgcattacgcatgaggcatgaggaggatctctcctatcaagtatggccgaatcgtcatattgactggctaatccctccgaggccaccaggctatgcttttgcacagcatgaagattctcctgatgctcaacaagcatgttctggcatggatcggcttcactttgttgggcagctgccaatgcttgaacctgctcaccttgggataggcaaaggtg

SEQ ID NO: 50474 - DNA, 186 bp, Oryza sativa
  Clone ID: PAT_MRT4530_52957C.1
atggagctacagagttatagactacggactgtgtacgtaatactaaggaaactacttccttcgtttcacaatgtaattttcagagcagaatattggttccggtgttgggctcagctacaaaggtgtgatgaagatggcgagttaatgaaggttgcatgccgtaggcttgagacgacagttatgtaa

SEQ ID NO: 50475 - DNA, 253 bp, Oryza sativa
  Clone ID: PAT_MRT4530_52958C.1
gcgcggtttgggtggtctgcctgcgaaaatcattttcgcaggcgtcgcttaagtggtccgcctgcgaaaatctattttcgcagacggacaacgcacttcaccccgatttatatttttataggcggtcatttggcttcaagggatatatccgcctcgtgcggactgtggttcggctggcctttggattcttcgagcacttggagcagagaacctccggacaccagccacaatctgaggctcgcatcgatcctcg

SEQ ID NO: 50476 - DNA, 206 bp, Oryza sativa
  Clone ID: PAT_MRT4530_52959C.1
agtcggacccactatcatcatcagagaaacttatcacaagcaaatcaaaatataagaggcaagagaaaagaacaagtgtaagagacttcctatttgagaaaggaacatcacgcaacagcggcataaaaagcatccgcatatttggaaacattggatggagcagtgaaccgagcccgcagaggctgccgccgcaattgaataacaag

SEQ ID NO: 50477 - DNA, 320 bp, Oryza sativa
  Clone ID: PAT_MRT4530_5295C.1
atgggctgcggcgtgggacgcagaggggcggcacgtgcggggcacggaggtggcgcgcgcgacggcacggaggcctgctccctcatcgctgccgatgccgccctcctccacggcatcgtcggtcgcccgctccgcctccacctcagcctcagccgcccaccgcccgggaagctccacctccgcctccgcctcagcctcagctgcccgccgcacggggagctctgcctccaccgccggccgcccgctccgcctcagccgcccaccaatggtcgtccgccacctagccccagcgtgagagagatggaatgggttgagaagag

SEQ ID NO: 50478 - DNA, 395 bp, Oryza sativa
  Clone ID: PAT_MRT4530_52960C.1
ctggcggcggcgacgacggcgacggcgagaggggcgacttcggggaggagccggcggtggcggggacgacttggcggcggcgacgcggcgaggggggagaggtcctggcggcggcgacggtgacggcgagggggaccacttcggggaggagccggcggtgacggggaggacttggcggcggcgacgacgagggggctggggggcagatcatcgcatgcggtcggcttaagcggccgcatggaaaaatgatctttccatgcgggcgacttaagccggccgcatgcgaaactgatctttccatgcgggccattaagccagccgtatggaaagatcatttttccgtgcgggccgttaagccggctacatgcgaaaaagatatttccatgcggctggct

SEQ ID NO: 50479 - DNA, 782 bp, Oryza sativa
  Clone ID: PAT_MRT4530_52961C.1
gcagtcagttctctttctttttcttttttacttcaatgaaaaaagatacaccaaaataaatttgacaattgacacagtgacaccacaatttccatttgcaaaaccacaatttactctgcctgtaacactgctcttgatcttcaacagatgctcattagcactcctagtacataaatacatcgccctccaacgaggatcatcctgtcgactggaggagaaatgtctagcaaaaacaagctgcccagtgtcctaactttaataaattgttgtacttacacaatcaaattgagagaaacgaaaaacacatgcaaaatggtggtctatatcatcaaaacaaatagttgagaatgaccccaagacttctttacaatgatggtgagacctccaccatcactactgagaccaaagtctttaggtccagttacactgccttgttttgcatactctgcacttcaaaatttagttcttgcccagaagcaccaaggtatgttttctcgtccaccctgcaccctataaccacttataaaggcaccacagcacataaatatgagatctttgagattcatgtgtgctgattaaatttgttggtgcaggatgatggtcatctatatctattgatcagtcagaatattcgtctccactatactgatccatatcttctactcgagaatgcttaggatggtcatagagatcatcatcaaccgaagatctttgtctcttcaaattctcatgcatgctagaagattctccatgttccatcataccaccatgagctgttctgc

SEQ ID NO: 50480 - DNA, 169 bp, Oryza sativa
  Clone ID: PAT_MRT4530_52962C.1
gttaaatccaccgaacgctgtgagggccttagagtggctggtaaaagtccatgttatgatccatgtggggtgcatgctaacctagaaagaaaaggaggaattcaaatcttgcatacagtatttgatacatctgaccattgatccggagatacagcttattctgcgagat

SEQ ID NO: 50481 - DNA, 138 bp, Oryza sativa
  Clone ID: PAT_MRT4530_52963C.1
atggaggttggcgacgatgacgcgcgcacctgtgcgataccccgccgctgccttcaggccttcattgcaccctgcatggaagtgtgctctggcggcgacggcgagacagcttcactcggcaagaaggcgcactcctaa

SEQ ID NO: 50482 - DNA, 138 bp, Oryza sativa
  Clone ID: PAT_MRT4530_52964C.1
ccggccgggctttataacactagccggcagctgccgcctccgcctccgaattcgtcggagcggccgagctgctgccgcccgcatggagcccatcaaggggtacgtggaactcgacacgaaggtcagcggcgacacaca

SEQ ID NO: 50483 - DNA, 230 bp, Oryza sativa
  Clone ID: PAT_MRT4530_52966C.1
tttgggtgggtgcaaaacatgcagctggtggtaatggtaatggtacataatggtaatggtgatgcaaacatgagggttggaaggagcatggcataatggtggaatggctagcaccaggctgaatgcatgatggcactatgacacatgcgtgaatgaaatgatattgtacaaatcgtcaaaaccgatacttatatggtaatactatactcagcccaaacttgataaaaaaa

SEQ ID NO: 50484 - DNA, 1144 bp, Oryza sativa
  Clone ID: PAT_MRT4530_52967C.1
atgaataaaaataatttttccagaatttatcttctctgtttaggtctcctaaaaattcgaactagtttccaaagaacccatattcctctaatttcttctctttggcttgcccttcctctgtgcaacatctctagccgaccagaactgagagagagaccgagccgacagccctcaggcgcgttcgacgcgtggcctcgacgtggcagcgccgaaccgaggcttcacctccacccagctacgtcgccactcttcacccaccatcccggtgccgatccaaccaagggaggaagctccagctctccctctccacctctctttcgtcaccggccgccaagaagagggacatcgccaaccgtcgtcgagccctctccatctctaactcatactcgttccattctcatctcaccatgccgaacaactttggttttgatcccattccatttcatcttctacagcagcgggaacaccgccatgtcatggtcgctctagagcacgctctgtgcaccgccgcagggacatcatcgccgttcccgcttatctggaccaagccgggccaagctgtcgcgccagcatcttcgcctcgacctcctctctatttcccttcaagaatatcgaaggatggtgctacgagtgtggagatcgtccaccgtcttcttcacctccggtcgccgtcgccattgtccgattcttcgcgtcaattcgatgagtggatcgagccgttgccgtcttcccggagctctacaccgtcgctggaccatcttcttcaccgctgccgctgtccagactttcacgcgcctcgttcaaggttcggtgagcacccttgagcccataggattgcatacatgcatttcattcacttagaatcgagcaccaactcaacatgcagtagcagcctaagcacagccgccgctcggactcgccaccggtgttactccgatgtccactgaccgagaaaatgtacaaactctgcagagtaaaaactaattgattagccgtgctcgcggacatgagcggcgtgtggatatatattgagtatagacttatgtttattcttctaaatgctgaaatttacctttaaattatgatgagatttgagaatgatctccttgctgccatgaaaggcaatgaggtgcatatttataca

SEQ ID NO: 50485 - DNA, 1095 bp, Oryza sativa
  Clone ID: PAT_MRT4530_52968C.1
ccccctaaatctgccttgcctggaccatcagactcctcccggcgcgagctcgcgctggcctcggccctccactgtcggccgctccactccgccgctctctcggccctcctctctcgccagcgtggccggccgcctctcccctcgccagctgctctgcccaccgccgccctcacaactgaggatgaacaacgttgtggccgacccaacggtggacgttgggcggggtggcagcgggcgagcgcggcagcgggcggcgatagagggggagagaggcggccgcagtggcgtgtgtgcgtcggtgtggcagtgacagtggagctcggctcggctcgccagccgcctcactcccgtctgccgccgacaaccaccgttgaagagaagagtagaaagaaaagaatgcgtgatccgctgatccgcatcatccagagttatataatgggagaccaaatggaccctgaacagcaaacaggacgccagccaggcaacgtcaaagaaataaaaaacaggagcagacaatatcgtgcatgcatgtcactttcagttttggcaagcaggcaggcaagtattccagccttccttatttctcttcgaccacaaaaacaagctcagcattcgcacaattattcctcgttgcagccggagaaaaacggggccagaaaaatatcagccgcgctacggtacaaaccggcccaggcccggcggccgcgagagaggcgcggtgatgtgaaatctgggccttttgtctccacctgcagccgaagcttcggtcgctacacggctcacacgcgcacgcgcacgcgctgcaaagctaccaaagtctccctcctgatcagcgaggaggaggcggaggaggatgaacgggtcatcaatccctcccgaaaacaatttttttttgacaagccgaaacaattatttttatcgcgaatgattgagatcgatggatggatcgaacggccggtcgatcgataccgacgcgcgcggctgctcttctccgattcgtcgtcgtttttcgcctctaatcccatcgcgaaatccggagcaagaaacggtctacgcatatttggcaccggcattctcatggtagcttgcttgcat

SEQ ID NO: 50486 - DNA, 786 bp, Oryza sativa
  unsure (1)..(786): unsure at all n locations
  Clone ID: PAT_MRT4530_52969C.1
ccggccgggacctctctttcgtcgccggccgccaagaagagggacatcgccaaccgttgtcgagccctcttcatctctaactcatactcgttccattctcatctcaccatgacgaacaactttggttttgatcccattccatttcatcttctacagcagcgggaacgcggccatgtcatggtcgctctagagcgcgctctgtgcaccgccgcagcgacatcatcgccgttcccgcttatctggaccaagccgggccaagctgtcgcgccagcgtcttcgcctcgacctcctctccatttcccctcaagaatctcgaaggatggtgctacgagtgtggagatcgtccaccatcttctccacctccagtcaccgtcgccgttgccgaatccaccccctccgatgattgcttaatcggtgaagaagtgatttaggtgctgacattttccagttgcaaggatttagacttagtctttgagtgatgcgggttatcgactgcttcttctaggacttgaacataatgggtaaacccctagtcggtgtgcttgtggattgggtagacaagtttccgctgttctattatttatttggccggtcggccaatgtaactaaagtagatgtagtttataatcgctttcatcttatttgtgtttgctatgtataatcatgcnttgagatgaaagtgtgaatctagtgcacatcctggggactagattcacatgagtatgagttaggaatatttgagatggtgtagaactttanaagaaaaaaaaaaaaaaaatttgcggc

SEQ ID NO: 50487 - DNA, 207 bp, Oryza sativa
  Clone ID: PAT_MRT4530_5296C.1
atggggtggggatacgcacgcggagacaacggctacggtgggatgctgccgcggatcggaggagaaaggcagaaaagctgtggtggggttgatcacatccactgtgggcttcagctcgctgctcgtcaggtgatggcggtggctgagactgcgcgagaactatgcaaggcggtggctacccttgatgccgacctcatacgccactag

SEQ ID NO: 50488 - DNA, 2787 bp, Oryza sativa
  Clone ID: PAT_MRT4530_52970C.1
atggggaacccaactctgacggagagagtggtggcgacagaaggcgagacggaggcgcttggtgagaaggtggcggaactcacaagcagtcacaacaacatcctgggcaccttgcggggcttggaatcgtggattccgaacgtggatgcggggatgtgggatctgaacaagacggtggaagggatctccacccgtatcacggcgctggaatcccagccgaaggcatcaccaacagcagcgacaccaccgcccgaagggcaaggcaaggtcgagaatcaccagggtcttgcaactgatgcctctgcggctcaggagcataccctggtcaaggttccgtttgaaacgtgggcttcctttgcaacgctgcattttgttggtaatgcaacgctgtggttacagacctatgaggagttgcacagtgtagaaggttgggcggagttatgtgtagctgtgcatagtaagttcgggagagataaatatcaggaccacttagaggagttagagagttttacaaaaactgggcgtgtagacgagtaccataagaggtttgaggagttgatgcatagggtactagtgtataacaaagggtacgatgaaacttattttgtgacaaattttgttggagggctaaagggagagattaaatttgctattaagctacataagccgagaatagttgatgctgcgttatctctcgccaaaatacaggaggagctgatagctgaagctgggaagaagaacttctatgtttccaccagagggagtttcaaggaggctaatacggcacctgggaagattggatatcaagggaaagggagttccagcaatttcttgtctgagagtgtgataaaaaggctgaacataccagtggaagatacagctgtgtcacaggatagattccaagaacctgattccttacctcctcacagggcatttgatcatgccattcctctgcaaccaggggtgaaaccagtcaatttgaaaccctacaggggattaaatgagatcactgtcaaaaataagtacccaatgccagtggtggaggagttgttagatgaactggccggggccaaatggtttactaaattggacctcagatcagggtatcaccaaattaggctacaggagaaggatgaacataaaactgcatttaaaactcatcaagggcattacgaatttagagttatgccatttgggctcagtaatgccccagctacctttcaaggacttatgaacactatttttgctccctggatcataaagcatgtgttggtatttgtggatgacattctaatctacagcccaaccttggctaagcatgtgcagcatcttaaaggggttttgcaagtcctggctcaacatcagctacatctgaagcttagggtagcaactgatccctctaaggtggtagctgtgcaacaatggccacctccaaaaaacttgaaacaactgagaggattcttaggcctcactggttattaccgaaggtttataaagaactatggccaactggcaaggccacttaccgacttgctaaagaagaatgtcaagtaccagtggctccaaccccagcagatagctatggaagcactaaagcaagctctcatcaactcaccagtgctggcactacctgactttagcaaagaatttgtggtggaaacagatgcaagtgacaagggcattggagctgtattaatgcaggagggccatcccattgccttcatcagcaaaacactgggggtcaaatctcaagccctatccacatacgagaaggagtgtttagctattctgttggcaatacaaaagtggaggtcttacttacagcattcagtgttcactatacttactgatcataggagtttgagccatttgagtgaacaaaagttaaccaccagcttacaacacaaggctttcctgaagctcatgggtttgcagtacaagataaagtataaaaagggcctagaaaacaaggcagcagatgctctgtccaggcagtgtgaagaagaaacatctgccatttccatgagtattcccaggtggctggaaatcatacaagagggctatacaaaggacgaggagacccataaattgttggctgaactgagtttattgccagatgggcaaggggatttcaaattggtccaaggaatcatcagacataaagggaaaatatggttaggcaaccacactgaagctaaggaggctgtcctactagccttgcacagcagtggagtgggggccattcagggggttgtgaaatctgtcaacaagctaagactgagcacttggctttcccaggcgcagttttggtataatacatcattccacagtgtgctgggcaagtccccctatgaagtcttatttgctagaaaggccacatcctttggggttgctgatctggggttgagcacagttcctgacattcaggtttggttacaggagcgctctcagatgaatgaattacttcatcaacagctgaaactcagctttcgctactttggtccttacaagattttgggtcgaattggagctatggcctatcgcctggaattgcccgaaggcagtctcgtacatccggtggtgcatgtatcgctcctcaagaaggatgctcatgttcagcctgaagtggtgctgcggcatcaattgatcaagcggggtggtgccactgtgccatatgggttgattcgctggactaatcttcccgatgacttggcaacgtgggagaatttgcggcaacttcggcagcgttttccacaagcaccagcctggggacatgctggttgttaa

SEQ ID NO: 50489 - DNA, 923 bp, Oryza sativa
  Clone ID: PAT_MRT4530_52971C.1
ttttctcggtcagtggacatcggagtgacgccggcggcgagtccgagcggcggctgtgcttaggctgctactgcatgttgagttggtgctcgattctaagtgaatgaaatgcatgaatgcaatcctatgggctcaagggtgctcaccgaaccttgaacgaggcgcgggaaagtctggacagcggcagcggtgaagaagatggtccggcgatggtgtagagctccgggaagacggcaacggctcgatccactcatcgaacggaggaggcggaatcgacaatggcgacggcgaccggaggtgaagaagacggtagccgatctccgcacttgctgcgccattgcctaggatttttgagggtttttgaggaagacttcaaggagaagacgttggcgcgacggctcggcttggtttggtctacagtggtcggaacgacgacgatgtcggctgcggcggcgcttggagcgcgctccggagtgccgggggcacgacggcgttcccgtcgatccgctgcacgatagaggatgaaattaaaaggataaatcctcggcatggtgaggagagtagagtacaatagtcgtcttcttcgcggccggcggcaaggatgagggcgacggagaagttgagagcctcctccctcggtttcttcggcttagaggtggagaatgatgtgtggagatgcagctgggaggaggagaaggctagaataggagtttgatggcgtcgacacgttgtggctacgcgtcgtacacagccggcaccaatctctctctctcggctgtctctggtcggctggaagatttgcacagggtgaggacgagccagagtggagaaattagaggaatatgggttctttggaaaatatttcgaatttttaggagacctaaacagagaagataaattctggaaaaattatttttattcat

SEQ ID NO: 50490 - DNA, 567 bp, Oryza sativa
  Clone ID: PAT_MRT4530_52972C.1
atgccgatctccaagctcgctgcaccactggcaggggttcatgagggatttaagagaggacaccgaggagatgttgatggtgcggtggctcggctcggcttgctccggttcgacggcaacgaagacgatgtcccgatggcggcgcccagtgcgcgctccagagcatcgtcggcgagagaggcgataatggaacgcaagagaagaggaaacgaccgcggcacaatggtgatggcgacggccatcgtcttcacggccggcgacaaggtcgagatgaaaaagaaaagctggagctctccccctcggtttgctcggctcaggagtggtaatggggaggaggcgatgcagctgggtggagctgtcactgtgttggatggaggagatgcacagggtgtggttcaaaccaaagaggctgccatgtgggcccaggtcaatattaattctctccctccaactttatatctcaatattttaacgtgtgaagcatacaaattagtgcgggtttttctgaagatggatgaccaaattagttttgtgaggcttgacattaaccatgttgatatattttaa

SEQ ID NO: 50491 - DNA, 434 bp, Oryza sativa
  Clone ID: PAT_MRT4530_52973C.1
attaaaccaatgatttatgggtgttgtttgttttttacaaggggcaattaagcaactatttaaacaattttcaatcttcctaccctgaaagatcgattggtttataagaagcatgtttattgcttataattatttatgtaaaaccacccaaggactgaggtgggaatgtcaaatgctgagccttataaatcctgatgatacaatttcttttttgccgggagcctatttaagaagcttcacggtgtggaatgttcaaagtcaactactgaacaagtcatggggaacacatcctaggcctccacatattatcgccgccaagctgaaaaaaaaaattttgtacccgttgacattaaccttgaaaggggcattttgattctgccgactttggttacctgtattatggggactccattttggatattgttgggctatag

SEQ ID NO: 50492 - DNA, 1155 bp, Oryza sativa
  Clone ID: PAT_MRT4530_52974C.1
atgaataaatataatttttccagaatttatcttctctgtttaggtctcctaaaaatccaaactagtttccaaagagcccctcttcccctaatttttgagagtaatctatccataatttttaatttctcctccatccaacacagtgacagccgagagagagagactgagggcgccgaccggcactggacggcgtcgacgcgtggcctcgacgtggcagtgccgaaccaaagcttcacctccacccagctgcgtcgccactcttcacccaccatcccagtgccgatccaaccgagggaggaagctccagctctccctctccacctctctttcgtcgccggccgccaagaagagggacatcgccaaccgtcgtcgagccctctccatctctaactcatactcgttccattctcatctcaccatgccgaacaactttggtttttatcccattccatttcatcttctacagcagcgggaacgctgccatgtcatggtcgctctagagcgcgctctgtgcaccgccgcagcgacatcattgccgttcccgcttatctggaccaagccgggccaagctgtcgcgccagcgttttcgcctcgacctcctctccattttccttcaagaatctagaaggatggtactacgagtgcggagatcggctaccgtcttcttcacctccggtcgccgtcgccattgtcgatttcgcctcctccgttcgatgagtggatcgagccgttgccgtcttcccggagctctacaccgtcgccggaccatcttcttcaccgttgccgcagtccagactttcccgcgtctcgttcaaggttcggtgagcacccttgagcccataggattgcattcatgcatttcattcacttagaatcgagcaccaactcaacaagcaatagcagcctaagcacagccgccgctcggactcgccgccggcgttactccgatgtccactgaccgataaaatgtacaaactctgcaaagttaaaactaatcgattagccgtgctcacggtcatgagcggcgtgtggatatgtattgagtatagacttgtgtttattctcctgaatgctgaaatttaccttcaaattgtgatgagatttgagaatgatctccttgctgccatggatggcaatgaggtggatatttataca

SEQ ID NO: 50493 - DNA, 1012 bp, Oryza sativa
  unsure (1)..(1012): unsure at all n locations
  Clone ID: PAT_MRT4530_52975C.1
ccagtaaaatcaacactagttaatctggtccacacattaagttacgaagctacaaatttagaggagaaaataatcctgaaaattagtccaaaatcaattaacaccccatcttctacccacctctcacaatccagccttcacaccctgtgcatctcctccaaccgaccagagacaaccgagactgagagagagatcggcgccggctatgaacgacacgtggccacaacgtgtcgacgccatcaaacacctagtctagccttctcctcctcccagctgcatcgccacaccccattatccattcctaaactgaagaaaccaagaaggagagctccatctcccttttccatctcaacctcgccgccggtcgtgaagacgacgaccgcctccagcgtcattaagccgccgtcgtttcctcttctcttgcgttccattatcacctctcctcgccgattccagccctctaagtttcatcccatttcatgcagtggtttggtgggaactcaaacctcgacgataatgctctggagcgcgcactggacgccgccatcgggaaatcgtcttcgttgctgtcgaaccggagcaagccgagccgagccaccgcatcatcaacatctcctcggggtcctctcttaaatccctcatgaaccccagccagtggtgcatcgagcttggagatcggcatcgtcttccccaattccagccgtcaagctccaccttcgatttctccctctccgatcatcagccatatcaagccggcgacgtcattccgaagctccccgccgtcgccgagtcgttctgctcgcggtcaccgctatctggaccctgccaagtttcattggacgctcgaaccaccgcagctcgcgccgncgtcgccattaattccggtgactaatgcttgcaataataccaccaaaagcgtcgccttgaacccctttacatttatccttacgttgcacgccgagatctgccaccgtttgtcgccggcgagctccaggacgagctcggccatggc

SEQ ID NO: 50494 - DNA, 1140 bp, Oryza sativa
  Clone ID: PAT_MRT4530_52976C.1
atgaataaaaataatttttccagaatttatcttctctgtttaggtctcctaaaaattcgaactaatttccaaagaacctatattcctctaatttctccactctggctcatcctcaccctgtgcaaatcttccagccaaccagagacagccgagagagagagattggcgccggctgtgtacgacgcgtgggctcgacgtggcagcgccgaaccgaggcttcacctccacccagctgcgtcgccactcttcacccaccatcccagtgccgatccaaccgagggaggaagctccagctctccctctccacctctcttttgtcgccggccgccaagaagagggacatcgccaaccatcgtcgagctctctccatctctaactcatactcgttccattctcatctcaccatgccgaacaactttagttttgatcccattccatttcatcttctacagcaacgggaacgccgccatgtcatggtcgctctagagcgtgctctgtgcaccgccgcagcgacatcatcgccgttcccgcttatctggaccaagccgggccaagctgtcgcgccagcgttttcgccttgacctcctctccatttcccgtcaagaatctcgaaggatggtgctacgagtgcggagatcggctaccgtcttcttcacctccggttgccgtcgccattgtcgattccgcctcctccgttcgatgattggatcgagccgttgccgtcttcccggagctctacaccgtcgccggaccatcttcttcaccgctgccgctgtccagactttcccgcgcctcattcaaggttcggtgagcacccttgagccataggattgcattcatgcatttcattcacttagaatcgagcacgaactcaacatgcagtagcagcctaagcacagccgccgctcggactcgccgccggcgttactccgatgtccactgaccgagaaaatgtacaaactctgcagagtaaaaactaatcgattagccgtgctcgcggtcatgagcggcgtgtggatatctattgagtatagacttatgtttattcttctaagtgctgaaatttaccttcaaattgtgttgagatttgagaatgatctccttgctgccacggaaggcaatgaggtgcatatttataca

SEQ ID NO: 50495 - DNA, 159 bp, Oryza sativa
  Clone ID: PAT_MRT4530_52977C.1
gtgagtttgctttggtcgccggcatggcgctggcggcttttgttgcgagcggcggttactcacacgacgacgagtacgcgaagctggtacgggggatgaacccgcccggggtggtggtggacaacaaggcgtgctactaggcgaccgtgatcctggtcg

SEQ ID NO: 50496 - DNA, 1139 bp, Oryza sativa
  Clone ID: PAT_MRT4530_52978C.1
atgaataaaaataatttttccagaatttatcttctctgtttaggtctcctaaaaattcgaactagtttccaaagaacccatattcctctaatttcttccctccggcttgctcttcctctgtgcaacttccctagccgaccgataaacactgagagggagagatcgagggccgaccggctctggacgccgcgcgacgcgtggccacgacgtgtcgacgccctaaaaacgccgagctccatctctgcctctcccagacgcgtcgccactcttcacccaccatcccagtgccgatccaaccgagggaggaagctccagctctccctctccacctctctttcgtcgccggccgccaagaagagggacatcgccaaccgtcgtcgagccctcttcatctctaactcatactcgttccattctcatatcaccatgccgaacaactttggttttgatcccattccatttcatcttctacagcagcgggaacgccgccatgtcatggtcgctctagggcgcgctctgtgcaccgccgcagcgacatcatcgcagttcccgcttatctggaccaagccgggccaagctgtcgcgccagcgtcttcgcctcgacctcctctccatttccccttaagaatcttgaaggatggtgctatgagtgtggagatcgtccaccgtcttcttcacctccggtcgccgtcgccattgtcgattccgcatcgtccgttcttggagctgattgagccatcgccgttcacccggaggttcttgccgccgtcatcagcctagctaccccagccatgtctagcatctcggtgagcacccttcagcctatagaacatacatgcacgcacccaattaaccaatacatgattgtagaagcacatgcatcaccacccgaaaacatcctcctttcgaactcgccgccggcgttactccgatgtccactgaccaagaaaatgtacaaactctgcagagttaaaactaatcgattagctgtgctcgcggtcatgagcggcgtgtggatatatattgagtatagacttgtgttaattcttctaaatgctgaaatttaccttcaaattgtgatgagatttgagaatgatctccttgctgccatggaaggcaatgaggtgcatatttataca

SEQ ID NO: 50497 - DNA, 1105 bp, Oryza sativa
  Clone ID: PAT_MRT4530_52979C.1
agttctcaggatgtgcactagattcacactttcatctcaagcatgattatacatagcaaacacaaataagatgaaagcgattataaactacatctaatttagatacattggccgactggccaaaaaaaaatatatatatatagaacagcggaagcttgtctacccaatccacaagcacaccgactaggggtttaccccattaagttcaagtcctagaagaagcagtcgatcacccgcatcactcaaaggctaagtctaaaaccttgaatcaggaaaatgtcagcacctaaatcacttcttcaccgattaagcaatcatcgagatgctagacatggctggggtagctaggttgatgacggcggctcatggatggtgtatacgcgaagaatcggacaatggctcaccggaggaggcggaatcgacaatggcgacggcgaccggaggtgaagaagacggtggacgatctccacactcgtagcaccatccttcgagattcttgaggggaaatggagaggaggtcgaggcgaagacgctggcgcgacagcttggtccggcttggtccagataagcgggaacggcgatgatgtcactgcggcggtgcacagagcgcgctccagagcgaccatgacatggcggcgttcccgctgctgtagaagatgaaatggaatgggatcaaaaccaaagttgttcggcatggcgatatgagaatggaacgagtatgagttagagatggagagggctcgacgacggttggcaatgtccctcttcttggcggccggcgacgaaagagaggtagagagggagagctggagcttcctccctcggttggatcggcactgggatggtgggtgaagagtggcgacacagctgggtggaggtgaagcctcggttcggcgctgccacgtcgaggccacgcgtcgtacacagccggcgccaatctctctctctctctctcggctgtctatggtcggctggaagatttgcacagggtgaggatgagccagagtggagaaattagaggaatatgggttctttggaaactagtttggatttttaggagacctaaacagagaagataaattctagaaaaattatatttagtcat

SEQ ID NO: 50498 - DNA, 1248 bp, Oryza sativa
  Clone ID: PAT_MRT4530_5297C.1
atgtccacctatgaaaaggaatgtctggctattctgttggcagtggataggtggagatcttatctccaacactctgtttttaccatagtgacagaccataggaatctaacccatctaactgaacagaagttggtcactagcatgcagcaaaaggcttttctcaagctaatgggactgcaatacaaaatcaagtataagaagggacttgagaacacagcagctgatgctttgtcacggcaggttgaagaagaccaacactcaatgtcaataagtgtgccaaggtggatggaaataattcaagaaggatatgaaaaggatgaggccactaaacaactattaacccagctgagtgttcattctgataagcaaggggattttcagcttatgcaaggcataatcagacacaatggcaaaatctggcttgggcaacatgaggaggctaagcaggcggttttactggctctgcatagcagcggtgtgggaggacattcaggaatcacagccacctataacagagttaagactcttttctcttggtctaggttaaagaattatgttcagacatatgtgcagggttgtgaggtctgtcaaaaggcaaaatctgagcattgtaagttatcaggcttgctgcagactttacccgtgccattgcaagcttggtctactgtcagcttggattttattgaaggtctacctaaatctggcaagtttgataccatactggcagtggtggacaagtttaccaagtttgccaagttcatagccttgtctcatcctttcacagctttgactgtagctcaagcttttatccaaaatgtgtatgagatgtttggaatgcccagggtaatcatctcagaccgggacaggatgtttacaagtgcattgtggcaggaacttttcaggctagctgatgcacagtattggtacaatacctccaaccacagcactctggcaaaaaggtcatgccagaagctcagtttccgctattttggtccttaccgagtgctggaaagggtgggtgcagtagcctaccgtttggaattacctcctggaagcttgatccatctagtggtgcacgtgtccttgctcaagaaaatggtgaaacccggcacccaggaacagaatgttcagcctgaagctgttttgcgtcggcaattgatcaagcgaggtggtgcggcggttccctatggtctgattcgctggagtggattgcctgaagagctggctacctgggagaacctgcgctaa

SEQ ID NO: 50499 - DNA, 273 bp, Oryza sativa
  Clone ID: PAT_MRT4530_52980C.1
atggggaggcacaggggcaacgagtccggcttcggcgacggtgatgggagtggctggacccggccaccccttgcctcctacacccccatgaggacgaggatgaggtcaacggtgacaacaagggacgatgcgacgacgaagacaacggccaccacgaggatggcgcagcggcagcttctaggaggaggagaggatggtgctcctttggtagctgaggacggcctgatgcggcggcgagagaagacgccggtgccgcactccttcggtggctga

SEQ ID NO: 50500 - DNA, 3569 bp, Oryza sativa
  Clone ID: PAT_MRT4530_52981C.1
gctggccaaagcactctagcaagagagattaaggaacataatccattgcactttgcatttgaggtgtcttctggggggcggacaataaaattgagaacaagaagttctgctaaagtgaaagattgggtatctgcaataaatactgctcgacgacccccagagggttggtctcacccacaccgttttggttcattcgcaccacctaggggtttgactgaagatggtagcgtcgtacaatggtttcttgatgggcaagctgcgtttaatgctattgcttcttcaattgaggatgccgcaggagccggagggggaggcggcggctgcgggggcggggtcgttcctccggcttcccgagtcggcgggggcgttcgacgagctgccgcgggcgaggatcgtcggggtgtcgcggcccgacgccggggacatcacgcccatgctgctctcctacaccgtcgaggtccagtacaagcaggtcaaggaatggcttcaaaatttgggaattggggagcatattccagttgtgcatgatgatgatgaagcggatgacgtgcatgttccttcacaacatgatgaacactctgtcaaaaatagaaatgttccctctagtgctgtcttgcctgtcattcgtccagcccttggtcgtcagcaatctgtttctgatcgtgcaaaggttgccatgcaagaatatctgaaccatttcttgggaaacatggaaattgtcaactcaagagaggtttgggctgtactgaagccaggatttttagctttgctccaagatccatttgatccaaagcttttggatatagttatctttgatgtatcacctcacatggatagaaatggagaaggccaaagcactctagcaagagagattaaggaacataatccattgcactttgcatttgagatattcattactgattggtggctgtgcccagaactgtaccttcgacgccctttccaccatcatgaatcctctagacttgatattcttctagaatcaagggcaaagcaaggtgtacagtatttatttgtttgtaacagatttggtagcatcaaatgtttaactggtagctgtctacatgagatgataatagacaagtgtatgaagtttaactttgcagatattggctgtatgcattttaaaatctatattcttttgtacaaggaagtttctcttgcattgaaaattaacagcatgtacagcaaacagaggcttttaaacattcatgagaatgttaaagttctgcgataccctgatcatttctcaactggcatatacttatggtcacatcatgagaaaatcgttattgttgataatcaagtatgctatattggaggccttgatttatgctttggtcgttatgatactcctgagcataaagttgtggatgttcctccttcaatatggccaggaaaagattactacaatcctagggaatctgagccaaattcttgggaggacaccatgaaagatgagcttgatcgtactaaatatcctcgcatgccctggcatgatgttcagtgtgctctttatggtcctgcatgccgagacatagcaaggcattttgttcagcgctggaactatgcaaagaggaacaaagcaccaaatgagcaagcaattcccttattgatgcctcaacatcacatggtaattccccattacatgggtaaaatcaaagaatcaaatgaggaagtaagtaaacagactcatgttgaggatattaaaggccagaagttaagctccttgaaagcaccagcatcatgccaggacattccattgcttttgcctcatgagcctgatcaccaggcatcaaataatggagagttaggtctgaatggtttagataacaatcatggtcactcagatcacccaaataaaacccattggaaacagcccattcccaaccggaaggccaagcaagatacttctcttcaggatttacagatgaaaggttttgtggacaatcttggtaccccagatgtttcatcagtaattggacattatgtctttatgatgtggatggttcctaagcccatgattatatctccgtttatgggctcaggggacacggcagtcgaggtggtgcttgatattggagaagttggtccccgagcaacttgttgctgtcaggttgttcgaagtgttggtccgtggtcagcaggaacaactcaaattgaagggagcatccacaatgcctatttttctctcatcgaaaaagcagaacattttgtgtacattgagaatcagtttttcatatcaggtctttcaggagatgacacaataaaaaaccgtgtattagaagcattatacaggcgtatacttagagcagaaaaggagaaaaggtgcttccgggttataattgtcataccgcttttacctggatttcagggaggcattgatgacggtggagcagcatctgttagagcaattatgcactggcaatacaggaccatttgtagagggcctaattcaatacttaagaatctttatgatgtggttggttccaaagcccatgattatatctccttttatgggctcagggcacacggcagactaggtgatggtggtcctttggtcaccaatcagatatatgtgcacagtaagttgatgatcattgatgaccggatgacactgattggatcagctaacataaatgacagaagtttgcttggatcaagggattctgagattggtatgattattgaagataaagaggttgtcagttcaattatggatggaagacattggcaagcagggatgtgacctcttatcgtaggactttatcattgtgcataacagcttggccttcattcagtactggttagtcttattatggatactgtagacgatttaacttcttacatgatctggatgtgcactgcgaactctaactccaagatataccaaaaagtcatgtcgtgtgttcccaatgatcacatccattctaggtcccaatttaggcaaggatttgctcaccggaaggagaaaatcggccacacaacccattacctgggtgttgctgtagagataacagaaactcacaaggatggggatctggcaggcaccgatcctatggaaaaattacaggccgttaggggccatctcgtttccttccctttggagttcatgtgccaagaggacttgagaccattcttcggcgaaagcgaatattatacgtccccgcaagttttccattagcttctcccaaatttttttaactacattttagtagcattagcttcttgtttggtatagttttcccataggatctttttttaggctgtacatgttacatacagggtttttacaattgtatagatgtatatatgtcttgtggaaatagttaaaacttaagagaagaaaagcaaagagagaatcgggcagtgttagttcgcccatcacaaagggaataaaaaataatttcttaggcaaggaatgttgccgttcactttattctttcgcactgcacttgcaaaagaaaggcagttatgttgaaactggtgtcttcaccttgtagccgcatcaggcaccaccattatcaataatgatgtattctttcgtgatt

SEQ ID NO: 50501 - DNA, 1159 bp, Oryza sativa
  Clone ID: PAT_MRT4530_52982C.1
ttaaataaatataatttttccagaatttatcttctctgtttaagtctcctaaaaatccaaactagtttccaaagaacccatattcctctaatttctccactctggctcgtcctcaccctgtgcaaatcttccagccgaccagagacagccgagagggagagattggcgccggctgtgtactacgcgtggccacaacgtgtcgacgccatcaaactcctattctagacttctcctcctcccagctgcatctccacacatcattctccacctctaagccgaagaaaccgagggaggaggctctcaacttctccgtcgccctcatccttgccgccggccgcgaagaagaacaactatcgtactagtcaataagccagggtaatccccatctctttcacgttccatactctcctcaccatgccgaggatttatccttttaatttcatcctctatcgtgcagcagatcgacgggaacgccgtcgtgcccacggcactccggagcgcgctccaagcgctgccgcagccgacatcgtcgtcgttccgaccactgtagacagtagaccaaaccaagccgagctgtcgcgccaacgtcttctccttgaagtcttactctaaaaccctcaaaaatcctaggcaatggcgcagcaagtgcggagatcggctaccgtcttcttcacctccggtcgccgtcgccattgtcgattccgcctcctccgttcgatgagtggatcgagccgttgccgtcttcccggagctctgcaccgtcgccggaccatattcttcaccgctgccgctgtccagactttcccgcgcctcgttcaaggttcggtgagcatccttgagcccataggattgcattcatgcatttcattcacttagaatcgagcaccaactcagcatgcagtagcagcctaagcacagccgccgctcggactcgccgccggcgttactccgatgtccactgaccgagaaaatgtacaaactttgcagagtcaaaactaattgattagccgtgctcacggtcaagagcggcgtgtggatatatattgagtatagacttgtgtttattctcctaaatgctgaaatttactttcaaattgtgatgagatttgagaatgatctccttgctgccatggatggcaatgaggtgaatatttataca

SEQ ID NO: 50502 - DNA, 327 bp, Oryza sativa
  Clone ID: PAT_MRT4530_52983C.1
aaccaagagatgaatatcccttttcacccttttatactgatacatgcgacgatttattattccgcataaccgccggccaggaagtaccctactagaccctagcaccttcaacttaagtgtactgcagctggttggttagctgtgagctttttggaggctgggaatagagaggtacaagttgatgttcattgcaaccggaaaagccccccccgactgttcaagggagcaaaaaaggaagcaagcgaaacacagcggtattgacggaactgggcaagcggaggcatgctgttggattgtagtaataagaagacggttgacgcgagcgct

SEQ ID NO: 50503 - DNA, 292 bp, Oryza sativa
  Clone ID: PAT_MRT4530_52984C.1
ttttcgccgctgctgtcttctctttctgtcttccgaggaagaccttaaccaccaacctcagccgttagaaatgggccgcaggcacaccgggacggcgggccccctggggctgatcgcgtttgggttcacggcgtgcctgatgatgctgagcttcctgtacccgggggcggcctcggggtacatgatcccgctggcgttcatcttcggcggcattgtgctgatcatctgtgggatcattgagctctaccgcgaggacgtcttccacggcacggtgttcgggtgctacgggtgc

SEQ ID NO: 50504 - DNA, 879 bp, Oryza sativa
  Clone ID: PAT_MRT4530_52985C.1
gccgaagcagataatcattttcagggatggtgtgagcgagtctcaatttagccaagtactgaatgttgagcttaatcaaattataaaggcatatcaatatatggatcaggggccaattcctaagttcacagtgatcattgctcaaaagaatcaccacacaaaacttttccaagaaaatactccagacaacgttcctccagggactgttgtagattctggtattgttcatccaagacagtatgatttctacatgtatgctcatgctggacctataggtacctcaaggcccacccattaccatgtcttgctcgatgagattggtttcttgcccgatgacgtgcagaaactagttttgtcgctttcttatgtgtatcagaggagcaccactgcaatatctgttgtggcacctatctgttatgctcatctcgcagcagcgcagatgggccagttcatgaaattcgaggaattcgctgaacttcgtctggaagtggtggtgtccttcgtcatcaggagcagtggcccagaattgccgcgcctgcatgctgatgtctgcagttcgatgtctttgttgaggtggtggtagtaactagtgtgcagcagggcttgatcctctttttttttgaaggaccaatccgagtccttgtaggcacttttgtagtactctagattgatactatgagatacatataggttgggtagggagcatttttttttagatgatatagtgctcctaatgatatagttctgttagtgctcagctattaggaagtaaaggcttacccttgatggtaggtttatgaattcaagacgctaactttgcgccatatctaattgtcaaccagttaaacagatgattcgcaaaaaaaaaaaaaaaaaaaa

SEQ ID NO: 50505 - DNA, 221 bp, Oryza sativa
  Clone ID: PAT_MRT4530_52986C.1
gatccttaacggcgccttttttttttttttttattatggaaaaattttaaaaaaatttcacttatttaagtctataaataataccaccaatatcttggggtcatttgctattgccaaatagtttagtacatacttaagttacttcgatattcaaatctggtagaatgtgtgaaatctagatgaagacctgcttattcctattgatgatctaaacttgctcc

SEQ ID NO: 50506 - DNA, 395 bp, Oryza sativa
  Clone ID: PAT_MRT4530_52987C.1
tttttttttttttttttttttttttttttttttttttttttttttttgtttttggtttttttttttttttggtttttttttttttttttttttttttttttttttttttattttttttttttttttttttttatttattttttttttattttctttttttttaatattgtttgatttttttttttttcatttttttcatgtttggtatttttattcacattttaaaaagggggttcttttcagattcaggaaaaaaaaattgttgcatgctatttattatttagtaaatggtgcacaatggttcttaagtaaaattccctgcaacttatgcgtaattgttgatggaggaaaacaataaatttgaaatgaacattgttttggaaataacaattttt

SEQ ID NO: 50507 - DNA, 440 bp, Oryza sativa
  unsure (1)..(440): unsure at all n locations
  Clone ID: PAT_MRT4530_52988C.1
gctcgcgatctagaacctacaaaacacaatacagacagtatgaaggtcagaggcagtactaagcacatagatgtgttctcgagaggatcaaacatgttccttacataggcgtacatgagcttgccaacaatacgacacatcatccaaggtgaccggctctatcatacatccagtcacttgacaccgataatggtcgtcaacctgtacctacgatacaaaaacctgctacaacaaagccaacgagcactatagtgcccatgctcgncgtgactgcacgcgcagcctgacgaacacgttctgatagacagaaatgctgagagatcggcaccagactcatgcatggcacttgcgacggtcatgtgcgggtcgaccttgccgctgtcgaagccaaacttgtgcgcaggctggtggagcacaaacttgactagctccacgagcct

SEQ ID NO: 50508 - DNA, 552 bp, Oryza sativa
  Clone ID: PAT_MRT4530_52989C.1
atgggccccgtctggtagagccaccggttctgatacttcggttcagaaatgtagctcaatgtgcttctttatcttcgtcaagatgcttagttcaaatgaattgatcttgcttagtaagaatgattttttgcaagaagctagttctggataaactacaaactgtacaattgctgatgcacttgcctgtatcatctggtagtcggtatagctcccagtttttattcccagttcttattcctaaatggctaaatgtatctatgcactatacactccatccagtttgagctgaattaatcttgcttcttaagattgattttgtgcaagaaaccaattctggagaccggacaaactatacaaatggtacatttgctgctgcacctggtagataagttgtttgaattaaagcggtgcttcctgaaatttgaacagatgataaatatgcaagctatatgtcagaataattgacaaatagttatggagctattggtcattggttgactgcagtgtaggtgggaaactgtatggctgtaaagttcaatatactactgccct

SEQ ID NO: 50509 - DNA, 387 bp, Oryza sativa
  Clone ID: PAT_MRT4530_5298C.1
atggctgagagaccgatgcagagtcataactcatcctggctgcccaaacactgccgcgcctgcaccccggccaccacgggagaccacgcgcctgccctcattgccgtccgctgtcacaactcgacgtacgccaccgtgaattttcggccgtcgcatcggaggcatcgtcgcctgcacacctccactctcacgaacaccgccgcgaaggcggaggagagccgacgcgccgatatgcgtacggcgtactgccgtagagcgaaggaagttgtagcaggcgggtggccgatgggtcctcctccttctcatggctgccgtatgctgtccctgttattactctttgagagcttttacagtgtttgcgaggtatctagaggtattgagaggtag

SEQ ID NO: 50510 - DNA, 281 bp, Oryza sativa
  Clone ID: PAT_MRT4530_52990C.1
atggcggcagcgacgggtagcgggccagacgacgctggcgcttgcgcggatggcaggaaagacgacgcagctgtgcggcagctacgcagatactcggtgacgacagcgccgaacgaggcgaacacggcggtggcggatggctgcccagacctcggcgacggaagcctccagacgacggcgctgaggacgaggccatcaatggagacgatggaggtgaggcggccgacgccgaagagggcctccccccccgcctccccatcctcgctccttggcacggccat

SEQ ID NO: 50511 - DNA, 1069 bp, Oryza sativa
  Clone ID: PAT_MRT4530_52991C.1
gcacgatggtcatggacaagtccagcctcccgccgccgccgccgcctcccgcctcttccgcttccgccgccgccgcctcttccgccctcaaagccctgaacaagtcatcctacaagatctccaagcagacctcctcgtcatctctggcttcgatgaaggcatcccaatcgccaccgccgccgccgccgcatcctcgccgcccttctcctcctccgctcccgccgccgccggctcctccttcgtccgcccccgccgcggttgaccacccgccgccgcaaccgcctgtgtacaacatcgacaagtccgacttccgggacgtcgtccagaagctcaccggctccccctgccacctcctcccgcctcaggctcagccgccggcccccgccgccgccgtctccatgctccctccccagcccccgcctcctaccatcatggcgcctccgcccccacccccgccgtcggccattccgacccgcctccaccgcatccggccgccgccgctggctccgccccgcccgccgcccatcctgcagccggcaccgcccgcgctctctccgcttccgccgctgccggccgtctgcatgacggcggagtcccccatctcggcctacatgcgccgcctccgcgggatgccgtcgccgatccacgtgcccacctcgccgctcgggttcgggtgcctgccctctccacggacgccgccatcgcccggtgtacccatgccggccaccagcccccgcgtccgcgacccgtgaccgagaaccagccatgggtgctcctgctgctgctgctgctgcttccaatgtgtagatatggccggtgtaggagagatctggcgaggcggcggcgacgacgaaaggaggaaggagcaatacaattacaatgtgttagcttcaccttaaaatcttagctcaattttttttagcatgttctacctaccttataatattttgttggtgtatatggcgatgaattgatcatgtttggctaattttgtaacaagcttatgcaatatgtagtagcaaaactcaaatctttatatgcaaaatttatttagaagaattttcatggg

SEQ ID NO: 50512 - DNA, 491 bp, Oryza sativa
  Clone ID: PAT_MRT4530_52992C.1
cccacgcgtccgtatgaattcattctgaagtgaagagctcagtaacagcagtctctgagtcagcatgccatgtgagtaaatcaacaaaaggacaagtaccaggatctagcaaattgggtcaactagctacacggagaaatttagagactgaagttttgcaaagtcagcaagttagcagcccagcgcaatctaagacaggatcttctgtacatgaagatggtggaaattgctgtaacaagcctatgaaaaatgaaatgctggatgtgaaactaaagctcaaacaagtggaactggatgtgctcaagcttcgttccaagcaggcacagataaacaatgtgaagcaaggtttcctatcatcaggtccccatgctaatctagatgaggatgctgactccagaactgttctcgtgacaaatgtacattttgcagcaacaaaggaagcattgtcagggcattttatgaagtgcggcactgtgcttaagataaatata

SEQ ID NO: 50513 - DNA, 642 bp, Oryza sativa
  Clone ID: PAT_MRT4530_52993C.1
atggagaccccgccacacgcagacacgggcagcacacacgaacagggagagaagaggcaggtggagtacctagtcagattcggaggcctcgccgtcgtccgccgcggcggcgagggatccgatccttgttggcccttgactgtatatctctgggtttgctctcttcggcttaaacgggcgccgatctgccaagtgaagggagggagggaagccgcgcatcaaactgctttactactctgctccccgacaccaacacatggccacgagctcccccgcgccggctcggcctcgccgccacctcccttctccttcgccgtctggcctcccacgcgccgcacgcgcgacgccgtggtgcgccgcctcgtcgccgtcctctccggcgacaccaccaccgccctccgcaagcgctaccgctacggcgccgtccccgccgccgacgccgagcgcgccgcgcgcgccgtcgaggcccaggccttcgacgccgcctccgcctcgtcatcctcctcgtcctccgtggaggacggcatcgagacgctgcagctctactccagggaggtgagcaaccgcctcctcgcgttcgtcaggtcccgctcctccgccgcaggcgcgcccccggcctccgcggcggccggagaggtggcc

SEQ ID NO: 50514 - DNA, 891 bp, Oryza sativa
  Clone ID: PAT_MRT4530_52994C.1
tttttttttttttttttttggatgcataaatattcatctttttattatgtaaattatgctgcttttacaaaattttctttcagaaaagaagaaaaataaactacccacaaagtagtaacatttacaactactggagctaacagagaattcatcattgaaaaatagaccccaaattgcagggtttagttcgattgtccactcgtggactacaacatgagtctccgtttgtcgacaaaccccctcaactattggccttcaatttctccccgaggattttgttcaacaaaacaggattagctttaccctttgatgctttcatcacctggccagcaaaaaatccttgcaatttagttttcccggaccgatactgctcaagttgctttggattatcagctaatacttgatctaccattgcctcaattgctgcaggatctgctatctgaaccaaatctttctcctctatcacagacttgacagttccacctttcgcaatgagttcaatcagaatctcctttccaacatccccccccgtagttccattctttatagatgcaatcaattcagaaagctccagaggtgttaatttaatttcatcaatggaaagtttttcatttttcaaataagcagcaatgtcacccatgatccagttggcagccagctttgcatccgcgccatgctcaagggtagaatcgaagaaccgagcaacattatcgtcattagcaaggaaaagaacatcttgcatgctgagtcccatattctcgaagcgcctacgctttgcttcaggaagctctggcattgagttttgaatttcatcaatgtactcactagtaagaacaacttcaggaagatcaggctcaggaaaatatctatagtcagcagtccccctcgtgc

SEQ ID NO: 50515 - DNA, 1124 bp, Oryza sativa
  Clone ID: PAT_MRT4530_52995C.1
atgaataaatataatttttccagaatttatcttctctgtttaggtcccctaaaaatccaaactaatttccaaagagcccctcttcttctaatttctcatctttggcttgctccacaccctgtgcatctcctccaacggaccagagagccgagactgagagagagatcggcgccggctgtgaacgatacgtggccacaacgtgtcgacgccatcaaactccctagtctagccttctcctcatcccagctgcatcgccacaccccattatccattcctaacccgaagaaaccgagaaggagagctccatctcccttatccatctcaacctcaccgccgaccgtgaagacgacgaccgcctccagcgccattacgccgcggtcgtttcctcttctcttgcgtcccattatcacctctccacgccgattccatccctctaagtttcaccccatttcatgcagtggtttggtgggaacgcaaacctcgccggcgatgctctggagcacgcaccgggcgccgccgtggcggcatcgtcgtcgttgccatcgatctagactgagccggagcgagccaccacgccaccagcttcacctcgaccgcctctccatttacccccaagaaacccatccaatggcgcagcgatcttggagatcgacatcgtcttctccaactccgttcaactgcttccatcatcgaatccattctctctggtgagcatcagtcaaattccattcatgcagagcttcgccgtcgctgtggctctgcagacaaccccagccttgtctagcatctcggtgagcaccctgcagcctatagaacatacatgcatgcacccaattaaccaatacatgattgtagaagcacatgcaccaccacccgaaaacatcctctactcggactcgccgctggcgctactccgatgtcccctaaccaagaaaatgtacaaactctgcagagttaaaattaatcgattagccgtgctcatggtcatgagcggcatgtggatatgtattgaatatagacttgtgtttattcttctaaatgctgaaatttaacttgaaaatgtgatgagatttgagaatgatctccttggtgccatggatggcaatgaggtgtatatttataca

SEQ ID NO: 50516 - DNA, 234 bp, Oryza sativa
  Clone ID: PAT_MRT4530_52996C.1
atgtcgcaaattgaggaaacagaagaaacttctgaggttgatttggatgacctgcaaatggatgaaactgaagatccttttgcggaagaattggataatcttgtgcttaacatcataactcgcaagtgcaatagctcagtagcacaattaaatagggaacaatttgcagagaataaggactcgcgttataagaaacgtcagcaatttgaagaatcttctccacataagaactaa

SEQ ID NO: 50517 - DNA, 1148 bp, Oryza sativa
  Clone ID: PAT_MRT4530_52997C.1
atgaataaatataatttttccagaatttatcctctctgtttaggtcttcttaaacttcaaacaaagttctatcgagcccatattcctctattttctccacttgggcttgtccactccttgtccatctcctccaactgaccagagacagccgaaagagaaagagattggcgccggctgggttcgacgcgtgtgcacgacgtgtcgacgcctcaaaacgccgagctccttctctactcctcttccatacgcgtcaccactcttcacccaccattccagtgccgatccaaccaagggaggaagctccagctctccctctccacctctctttcgtcgccggccgccaagaagagggacatcgccaaccgtcgtcgagccctctccatctctaactcatactcgttccattctcatctcaccatgccgaacaactttggttttgataccattccatttcatcttctacagcagtgggaaagccgccatgtcatggtcgctctagagcgcgctctgtgcaccgccgcagcgacatcatcgtcgttcccgcttatctggaccaagccgggccaagctgtcgcaccagcgtcttcgcctcaacctcctctccatttcccctaaagaacctcgaaggatggtgctacaagtgtggagatcgtccaccatcttctccacctccggtcaccgtcgccgttgccgaatccaccccctctgataattgcttaatcggtgaagaagtgaattaggtgctgacattttccagtttcaaggcaagtcccacctccctctctttgatcactttgaacctatgttttggaggttattgaaaatgtttgcaaatcttgcatgtcgattgtacactaataaactaaaattttgttaaacttgttagacaaactcctactacttgcattatcaccttaactccacatatatccatatccctcagtcctaaccttagtaaagtgtacaaactctgcagagtaaaaactaatcgattagccgtgctcgctatcatgagcggcgtgtggatatgtattgagtatagacttgtgattactcttctaaatgctgaaatttaccttcaaattgtgatgagatttgagaatgatctccttactgccatggatggcaatgaggtgcatatttacaca

SEQ ID NO: 50518 - DNA, 1558 bp, Oryza sativa
  Clone ID: PAT_MRT4530_52998C.1
tcacgttctccatgcacgatgaatgttggtgaagattgtggatatatatctaggcgccggcaacgcatccgcggcctcatcggtccgtgcgccggtgttggtgatgtagccttcatataggctccgcccaccctcgtcgctccgcctcatcagtcttgagcaacgtggtggagtagatggattgatcagcgactcgactggatgatgtcgatcagatgattggcacggcgactccgacgagggcagcaccatggctccgagggcagtgcgacaatctccatcgcccaatgatgtgtttggttgatgtagacgcgggagacttggcgacgtttccgacgactccgacgagacctcctcagtcgggcacgactcgacgacattcacgatgccgtgacaacatgctccggcgaggtagcgcgacgaggtcattcggccggtcatgacgacgtagaaaaacggcggcttgcctcccatggtacagaggttgttgatgcccatgatctgatgctgcctcttgttgtcggtgaggtctcctcccgtcgagctggtcccgctcccgttggcgtgaatatccggcagatcttgttttgcgagtttttcctccttgttaatcgtctgaagctttaaacagctctgaggtgtgaacttctctggctcaacgatcaactcagtcattccagtgccgatccatccgagggagagcatcctcgctgctcttctccactggttctccatcgccggccacgaagaagacaatggccgcaatcgttgatgagccgcggttgtttcctcttctcttgcgttccatactctcctcaccatgccgaatatttctccttttgatttcatcctctctggtgcagccaatcggcgggaacgctgccgtgcacaccggagctctggagcgcgctctgcgcaccgccgcagcgacatcgtcgccgttgccatcaatctagatcaagccggagcgagccaccacgccaccagcttcacctcaacctcctctccatttcccctcaagaatcttgaagaatggtgctacgagtgtggagatcgtccaccgtcttctccacctccggtcgccgtcgccattgtcgattccgcctcctccgttcgatgagtggatcgagccgttgccgtcttcccggagctctacaccgtcgccggaccatcttcttctccgctgccgctgtccagactttccggcgcctcgttcaaggttcggtgagcacccttgagcccataggattgcattcatgcatttcattcacttagaattgagcaccaactcaacatgcagtagcagcctaagcacagccgccgctcggactcgccgccggcgttactccgatgtccactgaccaagaaaatgtacaaactctgcagagttaaaactaatcgattagccgtgctcgcggtcatgagcggcgtgtggatatgtattgagtatagacttgtgtttactctcctaaatgctgaaatttaccttcaaattgtgatgagatttgagaatgatctccttgctgccatggatggcaataaggtgaatatttataca

SEQ ID NO: 50519 - DNA, 555 bp, Oryza sativa
  Clone ID: PAT_MRT4530_52999C.1
gggggggggggtttttttttttttttttttttttatttttttttatttttttttttttttttttttttttttttttttttttttttttttcaaacaagggcctaggatttatccttacaaaagcattttgttaaaactggcaggacatttttattgagattggtatcaccccgaggtttaaacttggcacacacgaggaggcaggactttttttttttttccgggcctactatacgggtacaattaaatcccagatccccccggcggggggaatgctacagggagcagggttgaagctggggtaaatcccgcatattgacgggttgtttagggccaacaaagctggggcttgagcttgactttgatcgaagaaaaccctagcaaactgttgtagccgtagttgctgcacaatagcctgaacactgttaagggcctggcagggaaactgttgggcaatcatcctgagctgtgggcagcactggtgctgcatgactgggcagtttttaatttaaaacacgggtaattggaaaaagggggttgccactgtgctgaact

SEQ ID NO: 50520 - DNA, 617 bp, Oryza sativa
  Clone ID: PAT_MRT4530_5299C.1
atgaacctaatactttgtgtttttgaagagctctcttttcagaaaaatgaaatattctgctaaggtcaagcttaagataatgaagaacaatattctattttgtttgggtattgttagggatatatcttttctggttaattatcttggttttccaatacatttaggaagctgactaacaagaattggaaattgttacgggaaagaattgagaaaagcctaagtagctggaaaggtaaacatatgtatgtgggtagaagattggtttatttaactttgtattaataagtctaattatgtttatgattttttttgtttgatattcttagaggagtgcttcaaaagattcattattatagatcaattttcttttggcaacggataaacttaagaaaaaaaatatagacttacaagatgagatgtcatctgtcaaccaaaagaatagggtggacttgggttttataacatagatattcaaaaccaatgtcttctaagtaaatggttgtttaagttaaaatacgaagatggagtatgacgagaaatgcctaggaggaagtaccttaataataagtcaataagtcaagtagtgaagaaaacgagtgacccacatttctattcaa

SEQ ID NO: 50521 - DNA, 236 bp, Oryza sativa
  unsure (1)..(236): unsure at all n locations
  Clone ID: PAT_MRT4530_529C.1
tatgcagatagatgaaggngaagtggataactgggcggaattcatctaagagttctggtcatggctctgctcaacggaacntggtgaagaacttggaagccaanacaaactaagtagcatcagttaatttacttggcatgagcttcatgcggacttaatttttatttgtttaattcaagtggctgaatagttattatacttcttccaaaaaaaaaaaaaaaaaaaaaaanaaaaaa

SEQ ID NO: 50522 - DNA, 4047 bp, Oryza sativa
  Clone ID: PAT_MRT4530_52C.1
atgccgaaaagcaccgggcagatctacccacagctcttcacgaaggccggccttgccgcgtcaggcatcgaggtggtcgacgccgccgctcctgccgatgcggcggacggtgagcacggccttgtacatgatgctcgaaccggtggcgctgaggatgtaggccgacgccttcagcagcatctccatctccagctcgctgtcgccgtcgacagtaaccagcgggagggaggagagacgccgtcggcagcgacgatcgggggccctgcagcgacatcgtcattggtgtggtgcttcatgcaggagctagtcgacagtgatcctcgtaccagcgtaccccaataccctctatatccggtctacgggtattccccgtcgtcagtggtgcaccaggtagggggacttgatgctcaaggttatactactatgacttcaagcctcgtcgacgacggcgtcaactccagcttcaaccaaggagcttcaacttcaacaatgctggtgtggactcaagtcggtgagattgtcttcccgatctacaccacgatgccgatctcgactggcccagtaatcaccgggagcgagaacaacgtggttatgaccctggtcgactccatgtcgaaagatcctcctgcagaagcggagaacagaacatcggcaacgtctacgcccgagaagtattctaacgcggctagttcttgtctttccgacaagaaacacgagccgacgaggacaacttctgaggcaacaaggacctggtgtcctattcacaagaccaaaaggaacgacttgcaagcttgctcgatttttctcgacgtacaagctgaaatccgttcctgcaaggaacgcggaattcaacgtacttctcccactcgtgatgttcattgtcccattcacaagacaagaactcacgacctctcgagctgtaaggtctttcttaatgccataaagacgtcacctcctacggtccaacagccacagatctctcctagagatgcggacaaggaacgaggagcgactactatctcagatcgattcgtcggggtaatcgatatcgatccccacgagccctctgtcttacacctgctcgaaggtgaggcctcatcatcaacgagtacaccacgtgacgtgtacactattggtgggaccagtacgtctgcgggtggcaacacagaagcggaggatcaattggctacaccggctcagcacatcaggatcatcaatgcaatactgatggaaaccccttatgatcctgtcctgaacgctgatctcgatcagtggacagaacggctacgggaatcagtagcaaacctcagcaacacgttcaaggaggccgctgccagggcttgcttcatcttcaaaaaggcacttacgaagcaactagcattggaaaagggcaagcaagtacgtgtagtcgagaaggccacagaagcagctactcaggactcagactcggcttacccagactccgacctccatgtttcacacatcttcggaggatccacggcgtactcctcaaagcgagagtacaagaaagtggaacgcgaaatttgttcaacatggcagggggctgcctccaagatgaagtggtcagagcagaagatcgaattctcagaagcagaccaccccaagactgctgttactccagggcgatatccgattgtggtcgagcccactattcggaacatcaagtcatcttccaagccattgggcaagattacgctgcctgtgactttcggccaagcaaacaacttccgaacggtgcagatcacctttgatgtcactgagtttgacacaatatataatgccatcatcgggagaactgcactcgcgaagttcatggccgcatctcattatgcgtatcaagtgctcaagatgcctggctcgaagggaacaatcactattcagggaaacgcgaagatagcggtgcagtgtgacaagcggagcctcaacatggtcgagcatactctgaacccgcccaccacagttgagccgcccaagaaaccgtccgacatgccgggggtccccagggaggtgattgagcacaaactcatggtgcgacccgatgccaagctagtaaagcaaaaactgcggagattcgcaccagatcggaagcaagccatacgagaagagctcaacaagcttctcaaagctagtttcatccgaaaagttctccatccagaatggctagccaatccagtcatggtacgcaaggccaacgagaagtggagaatctaccatcagatcagcatggcgaaagaggacgaggagaagacaacattcgtcatgccattcggtgtattttgctacgttaagatgccatttgcactgataatcgccggaaacaccttccagcgcacggtccaaggagcacttaacaaccagcttgggaacaatgtcgaggcctacgtcgacgacattgttgtcaagaccaagacaagcgactcattgatcgatgacctccgggaaatgttcgacgacctccgacaatatcgtctcatgctcaacccagagaagtgcacgttcggagtaccatcgggcaagcttatcggattcctcgtatctggcagagggatcgaagcaaatcccgagaagatcaaggcaatcgagaacatgaagtcgcccataaaactcaaggaagtccagaagctaactggatgcatggcggcattgagcagattggtcactaggatgggagaacgaggacaacccttcttcgctctgctgaagaaacaagacaaatttgtgtggacacaagaagccgaagatgctttcatcgcactcaaaccctacctttcaaatctccctgtacttgttcctccccaacctaatgaagaattatttctctatattgccgccacgccatattctatccaaaagctgctctatgcagtaattatgacatcaagaaagctacgccactactttcaagcccacagagtcacagttgtttcctccttccccctcagagaagtcatgagaaacacagacgttgtcgcccgcattgcgaaatgggtagttgagctaagccaatttgatgtttactttgtgccacgaacaaccatcaagtcccaggtcctcgccgatttcgtagctgactggactatgcttgacaacagatcacacaatcagaccgataacgagacgtggacaatggcgtttgacggcgcactcaatagccaaggagcaggggcagggttcatcttgacatcaccttcaggagatcagttcaagcatgcaattcacctcaacttcagggcaaccaacaacacagccgagtacgaaggactacttgctaggataagagcagcagctgcactaggagtcaagcgactaatcgtgaaaggggatttcgaactagtcgcgaaccaggacaatatcaaaccagacgacctagcacggcgtgcgtccaaacgagagccacttgaacctggtactttcctagacgtcctgacaaaaccatcggtgaaagaggccaacgatgaagatagcacagttacccccgacattagctcgggggctacagaggcagaatacgtcgttgccgacatcgagaccacagacggctggtggaccccactcatcatgttcctgagtagcgacgagttgcccgatgatgatgcagaagccgagaaaataacccgacaagcaacgatctatacaaaaaggcgccgaatggggtacttctcaaatgcatttcgtccgacgacggcaaacatctcctcctggacatacacaaagggatctgcgggtcacatgccgctggggctcgacatacttggaccattcccacgaggacagggcagctacatgttcctattcgtggcgatcaacaagttcaccaagtggattgaagcgacgcccacgggggaaatcaaggccgacaacgccatcaagttcatcaaagggatattctgcagatatggattgtctcaccgcatcataacagacaacggctcccagctcatcagtgccgactttcaggattacttcgtcggattgggagtcaagatttgctttgcctcagtttctcaccatcagagcaatggatag

SEQ ID NO: 50523 - DNA, 837 bp, Oryza sativa
  Clone ID: PAT_MRT4530_53000C.1
agttcccaggatgtgcactagattcacactttcatctcaagcatgattatacatagggagacacaaataagatgaaagcatctactttagttacattggccgaccggccaaataaataatagaacagcggaagcttgtctacccaatccacaagcacaccgactaggggtttaccccattatgttcaagtcctagaagaagcagtcgataacccgcatcactcaaagactaagtctaaatccttgaatcaggaaaatgtcagcacctaaatcacttcttcaccgattaagcaatcatcgagatgctagacatggctggggtagctaggttgatgacggcggctcgtgtaacggctcggcggcggcaagaacctccgggtgaacggcgatggctcaatcagctccaagaacggaggaggcggaatcgacaatggcgacggcgaccggaggtggagaagacggtggacgatctccacactcgtagcaccattcttgaagattcttgaggggaaatggagaggaggttgaggtgaagctggtggcgtggtggctcgctccggcttgatctagattgatggcaacggcgacgatgttgctgcggcggtgcgcagagcgcgctccagagcgaccatgacatggcggtgttcccgctgctgtagaagatgaaatggaatgggatcaaaaccaaagttgttcgtcatggtgagatgagaatggaacgagtatgagttagagatgaagagggctcgataacggttggcgatgtccctccccttggcggccggcgacgaaagagaggtggagagggagagctggagcttcctccctcggttggatc

SEQ ID NO: 50524 - DNA, 485 bp, Oryza sativa
  Clone ID: PAT_MRT4530_53001C.1
gctacccaatcaatttcgaatttgactttggccctgtaatagaattcctaaacatgcgcctaaataatgctggtgacccttttatggagtgcaactatggtatccattcaaaaaagtttgaaattgcagtgttagattggttcgctcggttgtgggaactccccaaagaccaatactggggctatgtcactagcggtggaacggaagggaacatgcacggacttcttgttgggagagaactttttccggaggggattatctatacatcatgtgattcacattattctattttcaaggctgctaaaatgtatagagtccagtgcatcaaaattgacactttgttttctggtactactatgaaaggcgcagttgatgatcttgatgaggttgtaatgattcttgaaaactgtggttttgcaaacagattttatatccattgtgacagtgctctagtaggccttatgatgccatttatcaaacaataa

SEQ ID NO: 50525 - DNA, 564 bp, Oryza sativa
  Clone ID: PAT_MRT4530_53002C.1
atgatttttgtttccaaggggtccactgtcagtgaaagatcaatatacaaaaagatccctgaggtttctaagaatcaacccgccgacctagcctcatatgtcagcggaagggtgctcaccgagatggtagacatggctggggtagctaggtttatgacggtggctcgtgtaacggctcggcggcggcaagaacctccgggtgaacggcgatggctcaatcagctccaagaactatcatgcatgtgtgtccatgaggttagagaggccccagagatgctactgatgcatggaattgggttggtactcaccggagggggtggattcggcaacggcgacggtgaccggaggtggagaagacggtggacgatctccacactcgtagcaccatccttcgagattcttgaggggaaatggagaggaggtcgaggcgaagacgctggcgcgacagcttggcccggcttggtccagataagcgggaacggcgatgatgtcgctgcggcggtgcacagagcgcgctctagagcgaccatgacatggcggcgttcccgctgctgtagaagatga

SEQ ID NO: 50526 - DNA, 1211 bp, Oryza sativa
  Clone ID: PAT_MRT4530_53003C.1
ttttttttttttttttttttttacaacatctcaaatattcttaactcatgtgaatctaattcccaagatgtgcactagattcacactttcatcttaagcatgaaaatacatagcaaaaatacacttaagacgaaaataatctaaatcacaactacttcatagttacataggccgaccggccaaataaatataaagaacagcggaagcttgactacccaatcctcaaacacaccgactaggggtttaccccattaagtttaagtcctagaagaagcagtcaatcacctgcatcactcaaagactaaatctaaaaccttgaatcaggaaaatgtcagcacctaaatcacttcttcaccatttaagcaatcatcgagcgtccaatgaaacttggcgaggtccagatagcgatgaccacgagcagaacgactcggcgacggcagggagcctcgctcgatgacgacgccggcttgatatggctgatgatcggagagggagaaatcgaaggtggagcttgacggccggaattggggaagacgatgccgatctccaagctcgctgcaccactggcaggggttcatgagggatttaagagaggacaccgaggagatgttgatggtgcggtggctcggctcggcttgctccggttcgacggcaacgaagacgatgtcccgatggcggcgcccagtgcgcgctccagagcatcgtcggcgaggtttgcgttcccaccaaaccactgcatgaaatgggatgaaacttaagagggatggaatcggcgtagagaggcgataatggaacgcaagagaagaggaaacgaccgcggcacaatggtgatggcgacggccatcgtcttcacggccggcgacaaggtcgagatgaaaaagaaaagctggagctctccccctcggtttgctcggctcaggagtggtaatggggaggaggcgatgcagctgggtggaggtgaagcctcggttcggcgctgccacgtcgaggccacgcgtcgacgccgtccagtgccggtcggcgccctcggtctctctctctctctcagctgtcagttcaatacaatctcggcgcatcgccaccctttttactttcgttttgtttcgacgagtttttgctttcgggttgagctgcatcggtttcgatcttcgacaagaggtaaaacttgttatgacggcttgcattctcaggattagtgcttccatcttcat

SEQ ID NO: 50527 - DNA, 184 bp, Oryza sativa
  Clone ID: PAT_MRT4530_53004C.1
actagctctagatcagatagagggtgctggggggggatatacaaaaaaccccatatacttatgtacacatagtgcgtagacctcttgtgcgatgtgcttataccccatcatatatgacagcgcagcagtaaatgacggcgtactcgtcgaggaggaactccatttttttcaagagggggggggg

SEQ ID NO: 50528 - DNA, 1130 bp, Oryza sativa
  Clone ID: PAT_MRT4530_53005C.1
atgaataaaaataatttttccagaatttatcttctctgtttaagtctcctaaaaattcgaactagtttccaaagaacccatattcctctaatttcttccctccgacttgcccttcctctgtgcaacttccctagccgaccgagaaacactgagagggagagatcgaacgccgactggctctggacgccgcgcgacgcgtggccacgacgtgtcgacgccctaaaaacgccgagctccatctctgcctctcccagacgcgtcgccactcttcacccaccattccagtgccaatccatccgagggagagcatcctcgctgctcttctccactggttctccatcgccggccgtgaagaagacgatggccgcaatcgttgatgagccgcggtcgtttccccttctcttgcgttccatactctcctcaccatgccgaatatttctccttttgatttcatcctctctggtgcagccaatcgacgggaacgctgccgtgcacaccggagctctggagcgcgctcagcgcaccgccgcagcgacatcgtcgccgttgccatcaatctagatcaagccggagcgagccaccacgccaccagcttcacctcaacctcctctccatttaccctcaagaaacccatccaatggcgcagcgatcttggaggtcgacatcgtcttttccaactccgttcaaccgcttccatcatcgattccattctctctggtgagcgtcagtcaaattccatgcatgcatggcctctctagatagcctttgacctcttgcatgcaccgtattggtgactccccttacagatcgagcatatagaacatacatgcatgcacccaattaaccaatacatgattgtagaagcacatgcatcaccacccgaaaacatcctcttttcagactcgccgctggcgttactccgatgtccactgaccaagaaaatgtacagactctgcagagttaaaactaatcgattagccatgctcgcggtcaagagcgatgtgtggatatgtattgagtatagacttgtgtttattcttcaaaatgctgaaatttaccttcaaattgtgatgagatttgagaatgatctccttgctaccatggaaggcaatgaggtgcatatttataca

SEQ ID NO: 50529 - DNA, 1162 bp, Oryza sativa
  Clone ID: PAT_MRT4530_53006C.1
tgtataaatatgcacctcattgccttccatggctgcaaggagatcattctcaaatctcatcacaatttgaagttaaatttcagcatttagaagaataaacacaagtctatactcaatacatatccacacgccgctcatgaccgcgagcacggctaatcgattagttttaactctgcagagtttgtacattttctcggttagtggacatcggagtaacgccggcggcgagtccgaaaggaggatgttttcgggtggtgatgcatgtgcttctacaatcatgtattggttaattgggtgcatgcatgtatgttctataggctgaagggtgctcaccgagatgctagacatggctggggtagctaggttgatgacggcggctcgtgtaacggctcggcggcggcaagaacctccgggtgaacggcgatggctcaatcagctccaagaacggagggggtggattcggcaacggcgacggtgacctgaggtggagaagacggtggacgatctccacactcgtagcaccatccttcgagattcttgaggggaaatggagaggaggtcgaggcgaagacgctggcgcgacagcttggcccggcttggtgcagataagcgggaacggcgatgatgtcactgcggcggtgcacagagcgcgctccagagctccggtgtgcactgcagcgtttccgtcgattggctgcaccagagaggatgaaatcaaaaggagaaatattcggcatggtgaggagagtatggaacgcaagagaagaggaaacgaccgcggctcatcaacgattgcggccatcgtcttcttcgcggccggcgatggagaaccagtggagaagagcagcgaggatgctctccctcggatggatcggcactggaatggtgggtgaagagtggcgacgcgtctgggagaggcagaaatggagctcgtcgtttttagggtgtcgacacgtcgtagccacgcgtcgcgcggcgtccagagccggtcggcgctcgatctctccctctcagtgtttctcggtcagctagggaagttgcacagaggaagggcaagccagagggaagaaattagaggaatatgggttctttggaaactagttcgaatttttaggagacctaaacagagaagataaattctggaaaaattatttttattcat

SEQ ID NO: 50530 - DNA, 1141 bp, Oryza sativa
  Clone ID: PAT_MRT4530_53007C.1
atgaataaaaataatttttccagaatttatcttctctgtttaggtctcctaaaaattcgaactagtttccaaagaacccatattcctctaatttctccactctggctcgtcctcaccctgtgcaaatcttccagccggaccaaagacagccgagagagagagattggcgccggctgtgtacgacgcgtggcctcgacgtggcagcgccgaaccgaggcttcacctccacccagctgcgtcgccattcttcacccaccatcccagtgccgatccaaccgagggaggaagctccagctctccctctccacctctctttcgtcgccggccgccaagaagagggacatcgccaaccgtcgtcgagccctcttcatctctaactcatactcgttccattctcatctcaccatgacgaacaactttggttttgatcccattccatttcatcttctacagcagcgggaacgccgccatgtcatggtcgctctagagcgcgctctgtgcaccgccgcagcgacatcatcgccgttcccgcttatctggaccaagccgggccaagctgtcgcgccagcgtcttcgcctcgacctcctctccatttcccctcaagaatctcgaaggatggtgctacgagtgtggagatcgtccaccgtcttctccacctccggtcaccgtcgccgttgccgaatccaccccctccgttcttggagctgattgagccatcgccgttcacccggaggttcttgccgccgccgagccgttacacgagccaccgtcataaacctagctaccccagccatgtctaccatctcggtgagcacccttcagcctatagaacatacatgcatgcacccaattaaccaatacatgattgtagaagcacatgcatcaccacccgaaaacatcctcctttcggactcgccgccggcgttactccgatgtccactgaccgagaaaatgtacaaactctgcagagttaaaactaatcgattagccgtgctcgcggtcatgagcggcgtgtggatatgtattgagtatagacttgtgtttattctcctaaatgctgaaatttaccttcaaattgtgatgagatttgagaatgatctccttgctgccatggatggcaatgaggtgaatatttataca

SEQ ID NO: 50531 - DNA, 327 bp, Oryza sativa
  Clone ID: PAT_MRT4530_53008C.1
atggaagttgcggtgcgggagattgctacgtactggtttgagaaccagcgagcgagtagaatcatctctcgaacaccaatggagggctgcaggcggcagatgctgatggcggcggcgcagcacgtgagcaggcggccactccggcagcatgcggtggaggcgtcggcggcggttccggtggcagcgcacaaaacagtcgacagaggcggccgcgagcaagcggcggctgtagctgcggcgcacgatccagctaagcaggaaatggctggagcggcgctgctcgggcggctcggctggcgctcgagaagacatgtttcacatggatag

SEQ ID NO: 50532 - DNA, 300 bp, Oryza sativa
  unsure (1)..(300): unsure at all n locations
  Clone ID: PAT_MRT4530_53009C.1
tttggcgttatcttagtcacccagagtagaaantatttcacccctgcaaaagatggatgttccgattcccacgagtcttgttactctggtggagtcctggaacttgcgatgccgtgtcatcgccgaatatttcgtttcaatttggggggtcccatcattgctttatttattcgctaagacgctgctaactcgcagtgtctcgtgtgcagcacgtgggtatccgtttgtaatgtttcgtgtcgctctcgaacgcgacctgatgtgaatggaataacagcaaattaaaaaaaaaaaaaaaaa

SEQ ID NO: 50533 - DNA, 794 bp, Oryza sativa
  unsure (1)..(794): unsure at all n locations
  Clone ID: PAT_MRT4530_5300C.1
tntttnntttttttattttttttttggaataaaccagtttgttttttttttacaggtacttcacaatgcaattacaagtagtatacattcagccacaaaagctatgatatacacagatcgacactttcagaaccacaaacttctcttttccaatattttgcgacgccgtaaccttgttagcatgacgggtttctgctgcaccagagataatataagatgctgatttataggtgaacaaagcgagaacatataacagtgaatattcagaaatcacgtggaatatgcatgtagagtttttctttgtcttgccactcttctatatattctctgtccgagaagaatgtgcctcactctaccttgttcttaagaagttggcatattcagaaatacatttaatagacatctagagcatatattgtctgtcccgagaagaatgtccctcacgctaccttgttcttacagtattccccaggctcctgaatattgtggagttgatgctgatgatctctacattgcgggaaatgctttttttgacatggaaaatgtagagaatctctaccttatgacctttgcagatgatgctgattgctggccttcaccaatctcactgttattcctttccatgaccatcttgaaaagatgctctcaccatatgaaacagaaaaggactcagaattgacactttctctatatcttgcagttcatcattggacattggtcggtcatgttgactgttgagtgcttcctgtatacagtgatcaacatttttccttgttacaggactaaatagtgct

SEQ ID NO: 50534 - DNA, 971 bp, Oryza sativa
  Clone ID: PAT_MRT4530_53010C.1
ccggccgggaaaccacgcgaccgagctagcaaaagacaactcaagccaaaaccatctcagagcttcagagaggaagacaatggccggtggaggagatgagctgaagctgctggggatgtgggcgagcccgttcgcgctgcgagcgaagctcgcgctcagcttcaagggcctgagctacgagtacgtcgaggaggatctcaagaacaagagcgagctgcttctcacctccaacccggtgcacaagaaggtacccgtgctcatccacaacggcaagcccgtctgcgagtcgcaggtcatcgtgcagtacatcgacgaggcgttccccgacgccggcgttcctctcctcccatccgacccctacgaccgtgccgtcgctcgcttctgggccgcctacatcgacgacaagctgttgaagtcatggctgcaggcgtcgatgtgcaagacggagcaggagaaggcggcggcgatgaaggagacgttcgcggcggtggcgaacctggaggcggcgttcaaggagtgctccaaggggaagcccttcttcggcggcgacgccgtcgggtacgtggacgtcacgctcggcgccgtgatcgggtttgtgcgcgtcggtgaagccgtgcacgggatgaggctgttcgatgcgagccggagcccgctccttgacgcgtggctggaccgcttcgccgcgctggacgctgccaaggcggtgttgccggacaccggtaggctggccgagtacgccaagatgaagcaggcagagtgggcagcagctgccaccaactgagccagcatggccacgtctggtactctcgtggggagatgaagttggtgttggtgtgccacccgtaccgtacgtagctagtcctgtcacacgatgtgacgactgtgtgaactttgctactatacgcaataaaattgtgaagtcgttaagttttcgtaagtacacaccggcaacgtgtaaaggaattatctct

SEQ ID NO: 50535 - DNA, 554 bp, Oryza sativa
  Clone ID: PAT_MRT4530_53011C.1
gccgccagtgtgattggtttctgcagacttcgccctttcgagcggccgcccgggcaggtacccctccctcttttttttttttttttttgcaggcaacaactttatttgtaacaaatacgtcaatccacaaacaaggtaactcccaagagtagcttggaataactagttcaggaaatttgaaaccgacattcaaacaagcaaactggtttgcacagaaagcttaggacatcttttcactcccagagaccaaaactaactctcaattactactacttatttgacctgtcaatcatctcgtacgcgcgacgcagccaggaaaccctaccctccttagtcttcaacgtcgcaaacacatcgcgatagcgtttctcaatcaacagttgtgtagcaaagaagtgctcgtcgctgccttctgcattaccatcatcaatgacagtctttaattgactagctatttcttcacggacagggtcactcttagttttgattgagctggcagtacgggtctcaaaagcttccactatcctcttcatatattcatccttcaaagcctt

SEQ ID NO: 50536 - DNA, 547 bp, Oryza sativa
  unsure (1)..(547): unsure at all n locations
  Clone ID: PAT_MRT4530_53012C.1
gcttccacctgtgggtggcngaggcatcgagtgcgagccgganctgncggatcggccccgcccgccccggtccccgggcgccgcggcctcgcgggtgggcccgggaccggtcgccgcccctccgcacccccgacagcccgcgagatcaaagttcacggtcaaggcgcaggtgctcagagagaccgagcccggcaagaagccgcgcgtcgcgagggagaaggaggaggccgaggcttcggcgcccgccctggccgcttcgaggtccgccgatggcgccgaggctgaaaagtccaaggatgtggccgacgaagctgcggcgaccggtgccaaggatgagttgtaaaggagatagtgtttttgcgagtgtggtctcgcctacatattttttggtgtctttcttttccttgttatcttagtgtgggggcaaatgcatctaaattatcaggtatttcgttgcagagggttcgggcagttccttgtatttggtcaccgggctatatattaaattatcaccctcactattatataaaaaaaaaaaaaaaaaaaa

SEQ ID NO: 50537 - DNA, 133 bp, Oryza sativa
  Clone ID: PAT_MRT4530_53013C.1
gggaggaggagtaagaagatgtcgcacaggaagttcgagcacccgaggcacggatccctcagcttcctcccgaggaagcgctgctcccgccaccgcggggaggggaagtgatgtgcgatggatgacggggacg

SEQ ID NO: 50538 - DNA, 147 bp, Oryza sativa
  Clone ID: PAT_MRT4530_53014C.1
atggggaaggaggaatcacataaagtatgctttccagtccaacccctcagtacagctcaagggttgactgacctgtccggcggtccagaagaatcgaaggcaaggtccaatggtgaaattgaaggtgcacgaggcgcgatgcggtga

SEQ ID NO: 50539 - DNA, 153 bp, Oryza sativa
  Clone ID: PAT_MRT4530_53015C.1
atggaggcccatgctgcggcccagcacaccgtgtccgaggcagccagtgacctcgcaaaccttcgcagccttgtctttttcccgcactgtattggccggtccgagtggcttctagaagcttctggaccaaatgaaggtcttctctactcctag

SEQ ID NO: 50540 - DNA, 153 bp, Oryza sativa
  Clone ID: PAT_MRT4530_53016C.1
tgtttgttaaaaacaaacactccctacctaccaccaggcattctttttattgtgggcgaatttatcaaacatgctttatatacacaccttgtgcgcatatagccggagcttacgttttcacaaaccactcacccaacgtataattgtatgtac

SEQ ID NO: 50541 - DNA, 1380 bp, Oryza sativa
  Clone ID: PAT_MRT4530_53017C.1
atgaagacctcgctctgcgtgctcctctgcatccttgtcatctcagaggtggtgggggtgccgcggtgcgcggcggcgctggggataaactacgggcaggtggggaacaacctgccgtcgccggcgcaggtggtgtcgctgctggcgtcgctgcggatcggcaaggtgcggatctacgacgccaacccgcaggtgctggcggcgttcgccggcaccgggatcgagctcatcgtcacggtgcccaacgacctggtgcggccgatggcggcgagccccggggaggcgctgcagtgggtgtcctccagcgtccgcccctacttcccggcgacgagggtgacgggcatcgccgtcggcaacgaggtgctcaccgacgacgacgaggcgctcaaggcggccctcgtgccggcgatgcggaacctgcacgccgcgctggcgcagctggggatggacggctacgtccacgtctccacggcgagctcgctcgccgtgctggccacgtcgtacccgccgtcgcagggggcgttcacggcggaggtggcgccgctgatggcgcagttcctgcggttcttggccgagacgaacgcgccgttctggatcaatgcgtacccttattttgcttacaagggtgaccctactagggtgtccttagactacgcattatcaaacccataccacgtgggcgccatcgacccctacaccaggctgcagtacactagcatgttgtatgcacaggtggatgcagtggcgtacgcgacatcgcagctaggatacaacaacatcccggtgtatgtgtcggagaccggatggccatcaaagggtgacactgacgaggtgggcgccaccgtggagaacgctcgggcctacaaccgcaacctattgctccggcaggcggccggcgagggcacgccactccggccacggcagcggctagaggtctacctgttcgcgcttttcaacgagaacatgaagcccgggccgacgtcggagcgtaactatgggttgtaccagcccgatggtaggacgatggtgtacaacgttggactcatgcagcagagcacatctgcggcatcgctctccctcgccgcctccccagcaaccaagacggatgccaagaagaactttgctggtctatgtttcctctcatccttggccatcctacagtgcccaaatgcaagctcagcacaaaggaagagcttttggcacaagcaaaatggcttgactattgtggaccaaaagcctctccaagaccaaaggggagatgcaccatttcaaggaggcaaaaggaaaattaaaggtagcagctgttgccaagaggaaaagctggaggaggccactttgggatgtggaaggcactatcttggggatggcacagagttgtaa

SEQ ID NO: 50542 - DNA, 259 bp, Oryza sativa
  unsure (1)..(259): unsure at all n locations
  Clone ID: PAT_MRT4530_53018C.1
gtcgccaccttcctcttcctctacatcaccatcctcaccgtcatgggggtctccaantccggctcgaagtgcgccaccgtcggcatccaattcatcgcctggtccttcngaggcatgatcttcgcgctcgtctactgcaccgccggcatctccggaggggacatcaacccatcatttacttttgggctgttcttggccaaaaagctttcccttacccagaccttcttctacatattgatataatgcctatgtgccattt

SEQ ID NO: 50543 - DNA, 394 bp, Oryza sativa
  unsure (1)..(394): unsure at all n locations
  Clone ID: PAT_MRT4530_53019C.1
cggacgcgtgggcggacgcgtgggtttggacaatgagagatgctcactgcttttcctgggggctgttgttattttcgatcttttccttttctaacaaaaaactgtaatgactgccttagctctaccatgtttccttgggaggggattagtctgtccaaaacgatgctagagattaggaataagtatttacgtatttctcttttcctcaaataaaatggggtcaccaaggaggaacatccaatcaatttaattatcaagaacattcccaaattttaattcaaagaggcctcaaactngtgtagtggggtactggagagtgtaccaacttccccagaatctttttaggaaattagtggcatgtacccaagtcccttaaaattttagaagtcttaat

SEQ ID NO: 50544 - DNA, 681 bp, Oryza sativa
  Clone ID: PAT_MRT4530_5301C.1
atggccggtcagaccgtgtgctacaccggtcagaccgtgcctaccatagccggtcagaccgtgccctattctggccagatcggacctcctgtggccggtctgaccgcaccgttgaccaccggtcagaccgggccatgggccggtcaaaccggttccctgggagtttctccagagattcctattgatgttgacaaaaagaaagggaaaagtgttgttattggagatcttcggcccaagaataggatcaataatgcaaaggccgaagatcataaggtgagaaaagaagccaaagctccggaggtcgttgttgtcaaggagtctcaagatgttcatgtacctactggagatgccgtggaaaccatgcaagcaaaggagatcgaagctgacgccgtgactgtcaacattggtggtctaaccgagacagctggccgccggtctgactgggcccagaggccgatcagaccgaggggcattaaagttgaggtaaatcttggctctctttggtatttcaagcacgacgacttgttggttgaagattacaagaccttgatgggaagcaattttgaagacgttatcgacaagcgtttgaagactttgaaggagatgaagacacttcaagacggcatgtttcgtgtttcctttagtatctatcccaagttggacgtggagaagggcctgtag

SEQ ID NO: 50545 - DNA, 6009 bp, Oryza sativa
  Clone ID: PAT_MRT4530_53020C.1
atggctgagcaagcaaaggcgcccgacctctctcccagtgtgagtggcgacgacggggagccgaacccacgccgtcgagctcgtactccaccgccccctccacgccaaagtcctaagcagggggaggcgctcgaaagggtcgaaagattcgcggcttcaccgatcgcgggcgatgggggagaacggcgagatggggaccgtcgcctcctcgtctacggcgatggcagcacgccccagggcgcgctccaagctgcgggcgcgctcttacgccacccgcctgtcgtccctgacccggagtctccagcccaacgatggctggacgatgtggccaaattggtcatgacggcacggcagcgcctagatgctggtgggcggtcctccgccaccaaggcctctggtgctgctaccaccggctccgcatcgtcaagacgaagggcacgacgagcggcagccgctgttcgccgttcggctgccactccttcgtcgactccttcgacccgggaagatctgcgtggggagcaggacgcccgcgccagcatcgagcgccggcgtaatgaccgaagtgctgcccacgcaacggagggcgcttcctcgtccagagtgtcacctcgacacggacgtgggaatcagccctccgtgcccccggttggtggtgtcggctgtagagcctttgtggcgagtcttcggaatgtccgttggcccccaaggttccggcccaccatcgccgaaaaatatgatggcagcgtcaaccccgccgagtttctccaggtctacacgaccgggattgaggccgccgggggagacgacagggtcatggcgaatttctttcccatggccccgaaggggcaagcgcggggttggctaatgaacttgccacccgcgtctgtccactcctgggaggatttgtgccagcagttcaccatgaacttccaaggcacgtatccgcgccccggtgaggaagcggacttgcacgccgtacagcgaagggacgatgagtcgcttcgatcggggggcgtgcggcacaaccgcatgctcgaaaagatcgcctccaaagagccccagactaccgcagagctttttcagctcgcggaccgagtggctcgcaaggaggaggcctggacttggaacccctccggttccggtgtggcagcttcggccgcccccggatccgccgctcaggcagggcggcgtgacaggaggaggaagaagaggtcagtccgttccgacgacgagggtcatgtcctcgccgtcgagggcgcttcgcgggccacccgaaaggggaggcctgcgagcgacaaaaagaaggaggccagcgttcccagcagggagcgccctaccggcaagtggtgcaccgtccacaacacctccctccatgaccttgcggactgtcgcgcagtcaaaagcttggcagagcggacaaggaagtgggaggaggagaggaggcaggagcgccgggaaggcaagtccccagcggttccttccggccgtcggcgaagtgaggccaagcagaaggcccccgccgaggacatcgatgatggcgatgatgacctaggtttccaagagcctggggccgccattgccaccgtcgatggaggagcgtgtgctcacgtttctcgccggagcctcaaggctatgaagcgagagcttctggccgcgacccctactcatgaggcgacgcgccgggcgcggtggtcggaagttgccctcactttcgaccagaccgaccacccgccgtgcgttgcccggggagggcagattgcgatggtggtttctcccaccgtttgcaacgtgaagttggggcgtgtcctcattgatggaggagcagccctcaacatcctttcccccgcagcctttgatgccatcaaggccccggggatgatgctccggccgtcccagccaatcatcggcgtgacgccggggcacacttggccgctaggtcatatcgacctcccggtcaccttcggtggacccgccaatttccgcacggagcgggtgaacttcgatgtggcggacctcagtctgccctacaacgcggtcctggggaggcccgcgttggtgaagttcatggcggcggtccactacgcctacctccagatgaagatgccgggccccaacggccccatctctgtccatggcgacctcaaagtcgcgctcgcttgtatagagcagcgtgcggaccgcctcgccgtcgtgtccaagcccgagggtggcgacgagaggcttggcacgtccgcccccgccgacccgaggcagcggatagtcacgtccgatgaggtcccggaagacgcgctcgtctccttcctgcgggcaaacgctgacgtcttcgcatggagaccggcggatatgcccggggtccccagggaggtgattgagcaccgtctcgccgtacggccgggcgcaaggccggtccggcagaaagtgcggcgccaggccccggaacgtcaagccttcatccgcgaggaggtggcgcgacttctggaggctggattcatccgcgaagttatccatccggagtggctggcgaacccggtggtcgttcccaaggcgaacggcaagcttcggatgtgcatcgactacaccgaccttaacaaggcatgtcctaaggatccttaccccctgcctcgcatagatcagatcgtcgactccacagcggggtgcgaccttttgtgttttctagatgcatactctggttaccatcagattcgcatggctagggaggatgaggaaaaaactgcgttcattactcccataggaacttattgttatacgacaatgcccttcgggttaaagaatgcaggtcctacttttcaacgtactactcgaatttctttgggtagccaattaggacgtaatgttgaggcttatgtcgatgacttggttgtaaagacgcgcaaccaggaaacgttactttcagatttagcggaaacttttgagagcctccgctccgcccgcataaaactgaaccccgataagtgtgtgtttggtgtacctgcgggcaagcttctcgggttcttggtctctgcccgaggcatcgaggccaaccccgagaagatacgagctatagagcggatgcgcccccccagtaaacttagggatgtgcaatgtgtcaccggttgcatggccgccctaagtcggttcatatcgaggctgggagagaaggcgctacccttatttaagctcctcaagcgctctgggccgtttacttggacggaggaagctgaacgcgccctcactcagttgaaagcatatctcagctctcctccggttctagtcgccccggagccaaatgagcccctgctactctacttagcggcgaccccccaagtagttagtgcagtgttggttgtggagcgcgatgtggacaatcctcattccgcgcacccccaccctgtgctgatttggcccgggagcgagcagggaggagaggcccccgagccgaacggtggcctaaggcccctgacgaccggagtcggccctctgcccgctcgtcagatggtgctgggcgcccccgaccctcaagaaggccccgaggccactgcgggaaggctgcatctatcgccctctgaccccgaggctaaccctgtaccgattcgacccgggagggagcagggagaagaggcccccgagtcgaacggtggcctaaggcccctgacgaccagagttggccctttgcccgtttgtccgacgacgccaggagcccccgacccccaggacggccccgaggccactgtgggaaggccgcccctgtcgtcctccgaccccgaggtcatcggcacagaagacgagtgcgccccgaagggccacttggacgagaagcgccccggggatatggcccttagcgaaggggatcggccccaccgaagggtgcagcggcctatctactttgttagcgaggccctccgggacgccaagacccgataccctcaggcccagaagatgctttatgctatcctgatggcatcgaggaaactgcgccattatttccaggcgcatcgggtcactgtggttacgtcttaccccctcggtcaaatcttgcataatcgggagggtacaggacgggtggtaaaatgggcaatcgagctttctgagttcgatttacactttgaaccacgccacgctatcaagagccaggccctcgccgattttgtggcagagtggaccccggctccagagaccgtttcagtctctgaagccagctcggacccctcgcagctgcctcacgccgcccactgggtgatgcagttcgacggctccctgtctcttcagggcgccggcgcgggggtcacgttgacctctccgaatggagacgtcctcaaatacttggtccgcctcgactttcgagcgaccaataatatggcagagtacgagggactccttgccggactcagagtggcagccggactggggatccgccgtctcttggtgttaggcgactcccagctagtcgttaaccaagtctgtaaggagtaccggtgctctgacccgcagatggacgcttacgtacgccaagtgaggcgtatggagcgccattatgacgggatagagcttcggcatgtgcccagacgggataacatgattgccgacgaactctcacggctcgcgtcctcgcgagcccagaccccaccgggcgtctttgaagaaaggcttgcccagccgtcggcgcgacccgaccccttaggggagacggacgcgcctgatcggtccccgaggcccgtcggagcccaggcctcgggacccgaggggagcgctccaagctcccttagattgattgcttggatctctgagatccaagcatacctcacagataagactctacctgaggaccgcgaagggagtgaacgcgtccaacgcatttccaaacgctacgtgctggtagaagggatcctctatcggcgcgcggctaacggaatcctcctgaagtgcattcctcgggaacaaggcgttgagcttcttgccgatatccatgaaggcgagtgcggagcccattctgcctcgcgcaccctggttggcaaggcctttcgtcaaggattctattggccgactgccctcaatgacgcggtcgacctggttcggcgatgcagagcgtgtcagttccacgccaagcaaatccatcagccggcccaggccctgcagatcataccactttcatggccatttgctgtctgggggctcgatatcctgggaccgtttaggcgggccccgggcgggtttgagtacctgtatgtcacgatcgacaagttcaccaagtggcccgaggcttatccggtcatcaagattgataagcactccgcacttaaattcattaagggcatcacggcccggtttggagtgcctaaccgtattattacggataacggcacccaattcactagtgaactcttcggcgactactgcgaagacatgggcatcaagctctgcttcgcctcacctgcccaccccagaagcaatggtcaagtggagcgcgccaatgcagaaatcctcaaaggccttaaaaccaagaccttcaacattctcaagaagcacggcgattcatggatcgaggagttgccagcggtgctctgggcgaaccgaaccacaccaagccgagcaaccggggaaacgcctttcttcctcgtctacggcgcagaagcggttctcccatccgagctcaccctgaggcctcctcgggccaccatgtactgcgaggttgatcaagatcaacttcgtagagatgacctcgactacttggaagaacgaaggcggcgtgcggccctccgagccgcacgctaccagcagagcctgcggcgctaccatcagcgccacgtccgggcccgatcactctgcgtcgacgacctcgtcttacgccgcgttcaaacgcgtgctggattgagcaagctctcaccaatgtgggagggtccgtatcgagtgatcggcgtcccccggccgggctccatacggctggccacgggcgatggcacagagttgcctaacccatggaacatcgagcaccttcgtcgcttctacccctga

SEQ ID NO: 50546 - DNA, 5511 bp, Oryza sativa
  Clone ID: PAT_MRT4530_53021C.1
atggctgagcaagcaaaggcgcccgacctctctcccagtgtgagtggcgacgacggggagccgaacccacgtcgtcgagctcgtactccaccgccccctccacgccaaagtcctaagcagggggaggcgctcgaaagggtcgaaagatccgcggcttcaccgatcgcgggcgatggaggagaacggcgagatggggaccgtcgcctcctcgtctacggcgacggcagcacgccccagggcgcgctccaagctgcgggcgcgctcttacgccacccgcctgtcgtccctgacccggagtctccagcccaacgatggctggacgatgtggccaaattggtcatgacggcacggcggcgcctagatgctggtggccggtcctccgccaccaaggcctctggtgctgctaccaccggctccgcgtcgtcaagacggagggcacgacgagcggcagccgctgttcgccgttcggctgccactccttcgtcgactccttcgacccgggaagatctgcatggggagcaggacgcccgcgccagcatcgagcgccggcgtaatgaccgaagtgctgcccacgcaacggagggcgcttcctcgtccagagtgtcacctcgacacggacgtgggaatcagccctccgtgcccccggttggtggtgtcggctgtagagcctttgtggcgagtcttcggaatgtccgttggcccccaaggttccggcccaccatcgccgaaaaatatgatggcagcgtcaatcccgccgagtttctccaggtctacacgaccgggattgaggccgccgggggtgacgacagggtccgcaataccataccatgcatccctgcacacgcggtaatctacgcgttcagggggggcgtgcggcacaaccgcatgctcgaaaagatcgcctccaaagagccccagactaccgcagagctttttcagctcgcggaccgagtggctcgcaaggaggaggcctggacttggaacccctccggttccggtgtggcagcttcggccgcccccggatccgccgctcaggcagggcggcgagacaggaggaggaaaaagaggtcagtccgttccgacggcgagggtcatgtcctcgccgtcgagggcgcttcgcgggccacccgaaaggggaggcctgcgagcgacaaaaagaaggaggccagcgttcccagcagggagcgccctaccggcaagtggtgcaccgtccacaacacctccctccatgaccttgcggactgtcgcgcagtcaaaagcttggcagagcggacaaggaagtgggaggaggagaggaggcaggagcgccgggaaggcaagtccccggcggttccttccggccgtcggcgaacctttgatgccatcaaggccccggggatgatgctccggccgtcccagccaatcatcggcgtgacgccggggcacacttggccgctaggtcatatcgacctcccggtcaccttcggtggacccgccaatttccgcacggagcgggtgaacttcgatgtggcggacctcagtctgccctacaacgcggtcctggggaggcccgcgttggtgaagttcatggcggcggtccactacgcctacctccagatgaagatgccgggccccgacggccccatctctgtccatggcgacctcaaagtcgcgctcgcttgtatggagcagcgtgcggaccgcctcgccgtcgtgtccaagcccgagggtggcgacgagaggcttggcgcatccgcccccgccgccccgaggcagcggatagtcacgtccgatgaggtcccggaagacgcgctcgtctccttcctgcgggcaaacgctgacgttttcgcatggagaccggcggatatgcccggggtccccagggaggtgattgagcaccgtctcgccgtacggccgggcgcaaggccggtccggcagaaagtgcggcgccaggccccggaacgtcaagccttcatccgcgaggaggtggcgagacttctggaggccggatttatccgtgaggtcatccatccggagtggctggcgaacccggtggtcgttcccaaggcgaacggcaagcttcggatgtgcatcgactacaccgaccttaacaaggcatgtcctaaggatccttaccccctgcctcgcatagatcagattgtcgactccaccgcggggtgcgaccttttgtgttttctagatgcatactctggttaccatcagattcgcatggctagggaggatgaggaaaaaactgcgttcattactcccataggaacttattgttatacgacaatgcccttcgggttaaagaatgcaggtcctacttttcaacgtactactcgaatttctttgggtagccaattaggacgtaatgttgaggcttatgtcgatgacttggttgtaaagacgcgcaaccaggaaacgttactttcagatttagcggaaacttttgagagcctccgctccgcccgcataaaactgaaccccgataagtgtgtgtttggtgtacctgcgggcaagcttctcgggttcttggtctctgcccgaggcatcgaggccaaccccgagaagatacgagctatagagcggatgcgcccccccagtaaacttagggatgtgcaatgtgtcaccggttgcatggccgccctaagtcggttcatatcgaggctgggagagaaggcgctacccttatttaagctcctcaagcgctttgggccgtttacttggacgaaggaagctgaacgcgccctcactcagttgaaagcatatctcagctctcctccggttctagtcgccccggagccaaatgagcccctgctactctacttagcggcgcccccccaagtagttagtgcagcgttggttgtggagcgcgatgaggacaatcctcattccgcgcacccccaccctgtgctgacttggcccgggagggagcagggagaagaggcccccgagccgaacggtggcctaaggcccctgacgaccggagtcggccctctgcccgctcgtcagatggtgctgggcacccccgaccctcaggaaggccccgaggccactgcgggaaggctgcatctatcgccctctgaccccgaggctaaccctgtaccgattcgacccgggagggagcagggagaagaggcccccgagccgaacggtggcctaaggcccctgacgaccagagttggccctttgcccgcttgtccgacgacgccaggagcccccgacccccagaacggccccaaggccactgtgggaaggccgcccctatcgtcctccgaccccgaggtcatcggcacagaagacgagtgcgccccgaggggccacttggacgaggagcgccccggggatatggcccttagcgaaggggatcggccccaccgaagggtgcagcggcctgtctactttgttagcgaggccctccgggacgccaagacccgataccctcaggcccagaagatgctttacgctattctgatggcctcgaggaaactgcgccattatttccaggcgcatcgggtcactgtggttacgtcttaccccctcggtcaaatcttgcataatcgggagggtacaggacaggtggtaaaatgggcaatcgagctttctgagttcgatttacactttgaaccacgccacgctatcaagagccaggccctcgccgattttgtggcagagtggaccccggctccagagaccgtttcagtctctgaagctagctcggacccctcgcagctgcctcacgccgcccactgggtgatgcagttcgacggctccttgtctcttcagggcgccggcgcgggggtcacgttgacctcttcgaatggagacgtcctcaaatacttggtccgcctcgactttcgagcgaccaattatatggcagagtacgagggactccttgccggactcagagtggcagccggactggggatccgtcgtctcttggtgttaggcgactcccagctagtcgttaaccaagtctgtaaggagtaccggtgctctgacccgcagatggacgcttacgtacgccaagtgcggcgtatggagcgccattatgacgggatagagcttcggcatgtgcccagacgggataacatgattgccgacgaactctcacggctcgcgtcctcgcgagcccagaccccaccgggcgtctttgaagaaaggcttgcccagccgtcggcgcgacccgaccccttaggggagacggacgcgcctgatcggtccccgaggcccgtcggagcccaggcctcgggacccgaggggagcgctccaagctcccttagattgattgcttggatctctgagatccaagcatacctcacagataagactctacctgaggaccgcgaagggagtgaacgcgtccaacgcatttccaaacgctacgtgctggtagaagggatcctctatcggcgcgcggctaacggaatcctcctgaagtgcattcctcgggaacaaggcgttgagcttcttgccgatatccatgaaggcgagtgcggagcccattctgcctcgcgcaccctggttggcaaggcctttcgtcaaggattctattggccgactgccctcaatgacgcggtcgacctggttcggcgatgcagagcgtgtcagttccacgccaagcaaatccatcagccggcccaggccctgcagatcataccactttcatggccatttgctgtctgggggctcgatatcctgggaccgtttaggcgggccccgggcgggtttgagtacctgtatgtcgcgatcgacaagttcaccaagtggcccgaggcttatccggtcatcaagatcgataagcactccgcacttaaattcattaagggcatcacggcccggtttggagtgcctaaccgtattattacggataacggcacccaattcactagtgaactcttcggcgactactgcgaagacatgggcatcaagctctgcttcgcctcacctgcccaccccagaagcaatggtcaagtggagcacgccaatgcagaaatcctcaaaggccttaaaaccaagaccttcaatattctcaagaagcacggcgattcatggatcgaggagttgccagcggtgctctgggcgaaccgaaccacaccaagccgagcaaccggggaaacgcctttcttcctcgtctacggcgcagaagaggttctcccatccgagctcaccctgaggtctcctcgggccaccatgtactgcgaggttgatcaagatcagcttcgtagagatgacctcgactacttggaagaacgaaggcggcgtgcggccctccgagccgcacgctaccagcagagcctgcggcgctaccatcagcgccacgtccgggcccgatcactctgcgtcgacgacctcgtcttacgccgcgttcaaacgcgtgctggattgagcaagctctcaccaatgtgggagggtccgtatcgagtgatcggcgtcccccggccgggctccatacggctggccacgggcgacggcacagagttgcctaacccatggaacatcgagcaccttcgtcgcttctacccctga

SEQ ID NO: 50547 - DNA, 6614 bp, Oryza sativa
  Clone ID: PAT_MRT4530_53022C.1
atggatggcttcgtggcagagctgggtcgtatggcgatcgcagtgggctaccctcataacccggagtacacacagcttcgcctcctcaatggcgagttcccgcaccaagtccgcttggaggtgcacgacattcccactgtcttgcccaacatggtagttactgctacaggaggcacctttgagcatgcttgccaggaggctgctttaaggatgatggccaggatgagggagctacacgaccacgacctccgcaacactgcttaccgctatcaccctcgccgtagcagtgacgccaacattagtaccttcagccgacgcgtggtggacaagaatgaccgatttgtgaccggtctgacactgctcatgtcgtcagcacacagccaccttcccacgacgtgcccgcctcaggcagaagtggagtttttcttgatcagcctcatggctgagcaagcaaaggcgcccgacctctctcccagtgtgagtggcgacgacggggagccgaacccacgtcgtcgagctcgtactccaccgccccctccacgccaaagtcctaagcagggggaggcgctcgaaagggtcgaaagatccgcggcttcaccgatcgcgggcgatggaggagaacggcgagatggggaccgtcgcctcctcgtctacggcgacggcagcacgccccagggcgcgctccaagctgcgggcgcgctcttacgccacccgcctgtcgtccctgacccggagtctccagcccaacgatggctggacgatgtggccaaattggtcatgacggcacggcggcgcctagatgctggtggccggtcctccgccaccaaggcctctggtgctgctaccaccggctccgcgtcgtcaagacggagggcacgacgagcggcagccgctgttcgccgttcggctgccactccttcgtcgactccttcgacccgggaagatctgcatggggagcaggacgcccgcgccagcatcgagcgccggcgtaatgaccgaagtgctgcccacgcaacggagggcgcttcctcgtccagagtgtcacctcgacacggacgtgggaatcagccctccgtgcccccggttggtggtgtcggctgtagagcctttgtggcgagtcttcggaatgtccgttggcccccaaggttccggcccaccatcgccgaaaaatatgatggcagcgtcaatcccgccgagtttctccaggtctacacgaccgggattgaggccgccgggggtgacgacagggtccgcaataccataccatgcatccctgcacacgcggtaatctacgcgttcagggggggcgtgcggcacaaccgcatgctcgaaaagatcgcctccaaagagccccagactaccgcagagctttttcagctcgcggaccgagtggctcgcaaggaggaggcctggacttggaacccctccggttccggtgtggcagcttcggccgcccccggatccgccgctcaggcagggcggcgagacaggaggaggaaaaagaggtcagtccgttccgacggcgagggtcatgtcctcgccgtcgagggcgcttcgcgggccacccgaaaggggaggcctgcgagcgacaaaaagaaggaggccagcgttcccagcagggagcgccctaccggcaagtggtgcaccgtccacaacacctccctccatgaccttgcggactgtcgcgcagtcaaaagcttggcagagcggacaaggaagtgggaggaggagaggaggcaggagcgccgggaaggcaagtccccggcggttccttccggccgtcggcgaagtgaggccaggcagaaggcccccgccgaggacatcgatgatggcgatgatgacctaggtttccaagaacctggggccaccattgccactgtcgatggaggagcgtgtgctcacgtttctcgccggagcctcaaggctatgaagcgagagcttctggctgcggcccctactcatgaggcgacgcgccgggcgcggtggtcggaagttgccctcacttttgaccagaccgaccacccgccgagcagccctcaacatcctttccccgcagcctttgatgccatcaaggccccggggatgatgctccggccgtcccagccaatcatcggcgtgacgccggggcacacttggccgctaggtcatatcgacctcccggtcaccttcggtggacccgccaatttccgcacggagcgggtgaacttcgatgtggcggacctcagtctgccctacaacgcggtcctggggaggcccgcgttggtgaagttcatggcggcggtccactacgcctacctccagatgaagatgccgggccccgacggccccatctctgtccatggcgacctcaaagtcgcgctcgcttgtatggagcagcgtgcggaccgcctcgccgtcgtgtccaagcccgagggtggcgacgagaggcttggcgcatccgcccccgccgccccgaggcagcggatagtcacgtccgatgaggtcccggaagacgcgctcgtctccttcctgcgggcaaacgctgacgttttcgcatggagaccggcggatatgcccggggtccccagggaggtgattgagcaccgtctcgccgtacggccgggcgcaaggccggtccggcagaaagtgcggcgccaggccccggaacgtcaagccttcatccgcgaggaggtggcgagacttctggaggccggatttatccgtgaggtcatccatccggagtggctggcgaacccggtggtcgttcccaaggcgaacggcaagcttcggatgtgcatcgactacaccgaccttaacaaggcatgtcctaaggatccttaccccctgcctcgcatagatcagattgtcgactccaccgcggggtgcgaccttttgtgttttctagatgcatactctggttaccatcagattcgcatggctagggaggatgaggaaaaaactgcgttcattactcccataggaacttattgttatacgacaatgcccttcgggttaaagaatgcaggtcctacttttcaacgtactactcgaatttctttgggtagccaattaggacgtaatgttgaggcttatgtcgatgacttggttgtaaagacgcgcaaccaggaaacgttactttcagatttagcggaaacttttgagagcctccgctccgcccgcataaaactgaaccccgataagtgtgtgtttggtgtacctgcgggcaagcttctcgggttcttggtctctgcccgaggcatcgaggccaaccccgagaagatacgagctatagagcggatgcgcccccccagtaaacttagggatgtgcaatgtgtcaccggttgcatggccgccctaagtcggttcatatcgaggctgggagagaaggcgctacccttatttaagctcctcaagcgctttgggccgtttacttggacgaaggaagctgaacgcgccctcactcagttgaaagcatatctcagctctcctccggttctagtcgccccggagccaaatgagcccctgctactctacttagcggcgcccccccaagtagttagtgcagcgttggttgtggagcgcgatgaggacaatcctcattccgcgcacccccaccctgtgctgacttggcccgggagggagcagggagaagaggcccccgagccgaacggtggcctaaggcccctgacgaccggagtcggccctctgcccgctcgtcagatggtgctgggcacccccgaccctcaggaaggccccgaggccactgcgggaaggctgcatctatcgccctctgaccccgaggctaaccctgtaccgattcgacccgggagggagcagggagaagaggcccccgagccgaacggtggcctaaggcccctgacgaccagagttggccctttgcccgcttgtccgacgacgccaggagcccccgacccccagaacggccccaaggccactgtgggaaggccgcccctatcgtcctccgaccccgaggtcatcggcacagaagacgagtgcgccccgaggggccacttggacgaggagcgccccggggatatggcccttagcgaaggggatcggccccaccgaagggtgcagcggcctgtctactttgttagcgaggccctccgggacgccaagacccgataccctcaggcccagaagatgctttacgctattctgatggcctcgaggaaactgcgccattatttccaggcgcatcgggtcactgtggttacgtcttaccccctcggtcaaatcttgcataatcgggagggtacaggacaggtggtaaaatgggcaatcgagctttctgagttcgatttacactttgaaccacgccacgctatcaagagccaggccctcgccgattttgtggcagagtggaccccggctccagagaccgtttcagtctctgaagctagctcggacccctcgcagctgcctcacgccgcccactgggtgatgcagttcgacggctccttgtctcttcagggcgccggcgcgggggtcacgttgacctcttcgaatggagacgtcctcaaatacttggtccgcctcgactttcgagcgaccaattatatggcagagtacgagggactccttgccggactcagagtggcagccggactggggatccgtcgtctcttggtgttaggcgactcccagctagtcgttaaccaagtctgtaaggagtaccggtgctctgacccgcagatggacgcttacgtacgccaagtgcggcgtatggagcgccattatgacgggatagagcttcggcatgtgcccagacgggataacatgattgccgacgaactctcacggctcgcgtcctcgcgagcccagaccccaccgggcgtctttgaagaaaggcttgcccagccgtcggcgcgacccgaccccttaggggagacggacgcgcctgatcggtccccgaggcccgtcggagcccaggcctcgggacccgaggggagcgctccaagctcccttagattgattgcttggatctctgagatccaagcatacctcacagataagactctacctgaggaccgcgaagggagtgaacgcgtccaacgcatttccaaacgctacgtgctggtagaagggatcctctatcggcgcgcggctaacggaatcctcctgaagtgcattcctcgggaacaaggcgttgagcttcttgccgatatccatgaaggcgagtgcggagcccattctgcctcgcgcaccctggttggcaaggcctttcgtcaaggattctattggccgactgccctcaatgacgcggtcgacctggttcggcgatgcagagcgtgtcagttccacgccaagcaaatccatcagccggcccaggccctgcagatcataccactttcatggccatttgctgtctgggggctcgatatcctgggaccgtttaggcgggccccgggcgggtttgagtacctgtatgtcgcgatcgacaagttcaccaagtggcccgaggcttatccggtcatcaagatcgataagcactccgcacttaaattcattaagggcatcacggcccggtttggagtgcctaaccgtattattacggataacggcacccaattcactagtgaactcttcggcgactactgcgaagacatgggcatcaagctttggttcgcctcacctgcccaccccagaagcaatggtcaagtggagcacgccaatgcagaaatcctcaaaggccttaaaaccaagaccttcaatattctcaagaagcacggcgattcatggatcgaggagttgccagcggtgctctgggcgaaccgaaccacaccaagccgagcaaccggggaaacgcctttcttcctcgtctacggcgcagaagaggttctcccatccgagctcaccctgaggtctcctcgggccaccatgtactgcgaggttgatcaagatcagcttcgtagagatgacctcgactacttggaagaacgaaggcggcgtgcggccctccgagccgcacgctaccagcagagcctgcggcgctaccatcagcgccacgtccgggcccgatcactctgcgtcgacgacctcgtcttacgccgcgttcaaacgcgtgctggattgagcaagctctcaccaatgtgggagggtccgtatcgagtgatcggcgtcccccggccgggctccatacggctggccacgggcgacggcacagagttgcctaacccatggaacatcgagcaccttcgtcgcttctacccctgagggggggtcgggtcggctaaaatcgccaaaaggggcccagaaccgagccatgccccggggcgtggtgaactccgggggggaatcggcaaaggcccacaatcgggtcatccataaccctcggtcaccacgctcccggcctggccagtctcgacacgtggatctccccaggcactagccttgacccgcgccgtttgaggccccaggatggccccgaggccactgcgggaaggccgcgcctgtcgccctctaaccccgaggtcgtcggcacagaagccgagtgcgccccgcgctgtctctcggatgaagagcgccctggagatgcggcccctagcgaagaggatcggccccgccgaaaggtgcagcggcccgtcgctcattattggcagccgagtaaccat

SEQ ID NO: 50548 - DNA, 5781 bp, Oryza sativa
  Clone ID: PAT_MRT4530_53023C.1
atggctgagcaagcaaaggcgcccgacctctctcccagtgtgagtggcgacgacggggagccgaacccacgccgtcgagctcgtactccaccgccccctccacgccaaagtcctaagcagggggaggcgctcgaaagggtcgaaagatccgcggcttcaccgatcgcgggcgatggaggagaacggcgagatggggaccgtcgcctcctcgtctacggcgacggcagcacgccccagggcgcgctccaagctgcgggcgcgctcttacgccacccgcctgtcgtccctgacccggagtctccagcccaacgatggcttgacgatgtggccaaattggtcatgacggcacggcagcgcctagatgctggtgggcggtcctccgccaccaaggcctctggtgctgctaccaccggctccgcgtcgtcaagacggagggcacgacgagcggcagcctctgttcgccgttcggcttccactccttcgtcgactccttcgacccgggtagatctgcatggggagcaggacgcccgcgccagcatcgagcgccggcgtaatgaccgaagtgctgcccacgcaacggagggcgcttcctcgtccagagtgtcacctcgacacggacgtgggagtcagccctccgtgcccccggttggtggtgtcggctgtagagcctttgtggcgagtcttcggaatgtccgttggcccccaaggttccggcccaccatcgccgaaaaatatgatggcagcgtcaaccccgccgagtttctccaggtctacacgaccgggattgaggccgccgggggtgacgacagggtcatggcgaatttctttcccatggccctgaaggggcaagcgcggggttggctaatgaacttgccacccgcgtctgtccactcctgggaggatttgtgccagcagttcaccatgaacttccaaggcacgtatccgcgccccggtgaggaagcggacttgcacgccgtacagcgaagggacgatgagtcgcttcgatcgtacattcagcggttctgtcaagtccgcaataccataccatgcatccctgcacacgcggtaatctacgcgttcagggggggcgtgcggcacaaccgtatgctcgaaaagatcgcctcaaaagagccccagactaccgcagagctttttcagctcgcggaccgagtggctcgcaaggaggaggcctggacttggaacccctccggttccggtgtggcagcttcggccgcccccggatccgccgctcaggcagggcggcgtgacaggaggaggaagaagaggtcagtccattccgacaacgagggtcatgtcctcgccgtcgagggcgcttcgcgggccacccgaaaggggaggcctgcgagcgacaaaaagaaggaggccagcgttcccagcagggagcgccctaccggcaagtggtgcaccgtccacaacacctccctccatgaccttgcggactgtcgtgcagtcaaaagcttggcagagcggacaaggaagtgggaggaggagaggaggcaggagcgccgggaaggcaagtccccggcggttccttccggccgtcggcgaagtgaggccaggcagaaggcccccgccgaggacatcgatgatggcgatgatgacctaggtttccaagagcctggggccaccattgccaccgtcgatggaggagcgtgtgctcacgtttctcgccggagcctcaaggctatgaagcgagagcttctggccgcggcccctactcatgaggcgacgcgccgggcgcggtggtcggaagttgccctcacttttgaccagaccgaccacccgccgtgtgttgcctggggagggcagattgcgatggtggtttctcccaccatttgcaacgtgaagttggggcgtgtcctcattgatggaggagcagcccttaacatcctttcccccgcagcctttgatgccatcaaggccccggggatgatgctccggccgtcccagccaatcatcggcgtgacgccggggcacacttggccgctaggtcatatcgacctcccggtcaccttcggtggacccgccaatttccgcacggagcgggtgaacttcgatgtggcggacctcagtctgccctacaacgcggtcctggggaggcccgcgttggtgaagttcatggcggcggtccactacgcctacctccagatgaagatgccgggccccgacggccccatctctgtccatggcgacctcaaagtcgcgctcgcttgtatggagcagcgtgcggaccgcctcgccgtcgtgtccaagcccgagggtggcgacgagaggcttggcacatccgcccccgccgccccgaggcagcggatagtcacgtccgatgaggtcccggaagacgcgctcgtctccttcctgcgggcaaacgctgacgtctttgcatggagaccggcggatatgcccggggtccccagggaggtgattgagcaccgtctcgccgtacggccgggtgcaaggccggtccggcagaaagtgcggcgccaggccccggaacgtcaagccttcatccgcgtggaggtggcgagacttctggaggccggatttatccgtgaggtcatccatccggagtggctggcgaacccggtggtcgttcccaaggcgaacggcaagcttcggatgtgcatcgactacactgaccttaacaaggcatgtcctaaggatccttaccccctgcctcgcatagatcagattgtcgactccaccgcggggtgcgaccttttgtgttttctagatgcatactctggttaccatcagattcgcatggctagggaggatgaggaaaaaactgcgttcattactcccataggaacttattgttatacgacaatgcccttcgggttaaagaatgcaggtcctacttttcaacgtactactcgaatttctttgggtagccaattaggacgtaatgttgaggcttatgtcgatgacttggttgtaaagacgcgcaaccaggaaacgttactttcagatttagcggaaacttttgagagcctccgctccgcccgcataaaactgaaccccgataagtgtgtgtttggtgtacctgcgggcaagcttctcgggttcttggtctctgcccgaggcatcgaggccaaccccgagaagatacgagctatagagcggatgcgcccccccagtaaacttagggatgtgcaatgtgtcaccggttgcatggccgccctaagtcggttcatatcgaggctgggagagaaggcgctacccttatttaagctcctcaagcgctctgggccgtttacttggacggaggaagctgaacgcgccctcactcagttgaaagcatatctcagctctcctccggttctagtcgccccggagccaaatgagcccctgctactctacttagcggcgaccccccaagtagttagtgcagcattggttgtggagcgcgatgaggacaatcctcattccgcgcacccccaccctgtgctgacttggcccgggagcgagcagggaggagaggcccccgagccgaacggtggcctaaggcccctgacgactggagtcggccctctgcccgctcgtcagatggtgctgggcgcccccgaccctcaggaaggccccgaggccactgcgggaaggctgcatctatcgccctctgactccgaggctaaccctgtaccgattcgacccgggagggagccgggagaagaggcccccgagccgaacggtggcctaaggcccctgacgaccagagttggccctttgcccgcttgtccgacgacgccaggagcccccgacccccagaacggccccgaggccactgtgggaaggccgcccctgtcgtcctccgaccccgaggtcatcggcacagaagacgagtgcgccccgaggggccacttggacgaggagcgccccggggatatggcccttagcgaaggggatcggccccaccgaagggtgcagcggcctgtctactttgttagcgaggccctccgggactccaagacccgataccctcaggcccagaagatgctttacgctattctgatggcctcgaggaaactgcgccattatttccaggcgcatcgggtcactgtggttacgtcttaccccctcggtcaaatcttgcataatcgggagggtacaggacgggtggtaaaatgggcaatcgagctttctgagttcgatttacactttgaaccacgccacgctatcaagagccaggccctcgccgattttgtggcagagtggaccccggctccagagaccgtttcagtctctgaagccagctcggacccctcgcagctgcctcacgccgcccactgggtgatgcagttcgacggctccttgtctcttcagggcgccggcgcgggggtcacgttgacctctccgaatggagacgtcctcaaatacttggtccgcctcgactttcgagcgaccaataatatggcagagtacgagggactccttgccggactcagagtggcagccggactggggatccgccgtctcttggtgttaggcgactcccagctagtcgttaaccaagtctgtaaggagtaccggtgctctgacccgcagatggacgcttacgtacgccaagtgcggcgtatggagcgccattatgacgggatagagcttcggcatgtgcccagacgggataacatgattgccgacgaactctcacggctcgcgtcctcgcgagcccagaccccaccgggcgtctttgaagaaaggcttgcccagccgtcggcgcgacccgaccccttaggggagacggacgcgcctgatcggtccccgaggcccgtcggagcccaggcctcgggacccgaggggagcgctccaagctcccttagattgattgcttggatctctgagatccaagtatacctcacagataagactctacctgaggaccgcgaagggagtgaacgcgtccaacgcatttccaaacgctacgtgctggtagaagggatcctctatcggcgcgcggctaacggaatcctcctgaagtgcattcctcgggaacaaggcgttgagcttcttgtcgatatccatgaaggcgagtgcggagcccattctgcctcgcgcaccctggttggcaaggcctttcgtcaaggattctattggccgactgccctcaatgacgcggtcgacctggttcggcgatgcagagcgtgtcagttccacgccaagcaaatccatcagccggcccaggccctgcagatcataccactttcatggccatttgctgtctgggggctcgatatcctgggaccgtttaggcgggccccgggcaggtttgagtacctgtatgtcgcgatcgacaagttcaccaagtggcccgaggcttatccggtcatcaagatcgtgaactcttcggcgactactgcgaagacatgggcatcaagctctgcttcgcctcacctgcccaccccagaagcaatgaagcacggcgattcatggatcgaggagttgccagcggtggtctgggcgaaccgaaccacaccaaggcgaggcaccgggggaacgcctttcttcctcgtctacggcgcagaagcggttctcccatccgagctcaccctgaggtctcctcgggccaccatgtactgcgaggttgatcaagatcagctccgtagagatgcctcgactacttggaagaacgaaggcgacgtgcggccctccgagccgcacgctaccagcagagcctgcggtgctaccatcagcgccacgtccgggcccgatcactctgcgttgacgacctcgtcttacgccgcgttcaaacgcgtgctggattga

SEQ ID NO: 50549 - DNA, 3029 bp, Oryza sativa
  Clone ID: PAT_MRT4530_53024C.1
gacgtaatgttgaggcttatgtcgatgacttggttgtaaagacgcgcaaccaggaaacgttgctttcagatttagcggaaacttttgagagcctccgctccgcccgcataaaactgaaccccgataagtgtgtgtttggtgtacctgcgggcaagcttctcgggttcttggtctctgcccgaggcattgaggccaaccccgagaagatacgagctatagagcggatgcgcccccctagtaaacttagggatgtgcaatgtgtcaccggttgcatggccgccctaagtcggttcatatcaaggctgggagagaaggcgctacccttatttaagctcctcaagcgctctgggccgtttacttggacggaggaagctgaacgcgccctcgctcagttgaaagcatatctcagctctcctccggttctagtcgccccggagccaaatgaacccctgctactctacttggcggcgaccccccaagtagttagtgcagcgttggttgtggagcgcgatgaggacaatcctcattccgcgcacccccaccctgtgctgacttggcccgggagcgagcagggaggagaggcccccgagccgaacggtggcctaaggcccctgacgaccggagtcggccctctgcccgctcgtcagatggtgctgggcgcccccgaccctcaggaaggccccgaggccactgcgggaaggctgcatctatcgccctctgaccccgaggctaaccctgtaccgattcgacccgggaaggagcagggagaagaggcccccgagccgaacggtggcctaaggcccctgacgaccagagttggccctttgcccgcttgtccgacgacgccaggagcccccgacccccaggacggccccgaggccactgtgggaaggccgcccctgtcgtcctccgaccccgaggtcatcggcacggaagacgagtgcgccccgaggggccacttggacgaggagcgccccggggatatggcccttagcgaagggaatcggccccaccgaagggtgcagcggcctgtctactttgttagcgaggccctccgggacgccaagacccgataccctcaggcccagaagatgctttacgctattctgatggcctcgaggaaactgcgccattatttccaggcgcatcgggtcactgtggttacgtcttaccccctcggtcaaatcttgcataatcgggagggtacaggacgggtggtaaaatgggcaatcgagctttctgagttcgatttacactttgaaccacgccacgctatcaagagccaggccctcgccgattttgtggcagagtggaccccggctccagagaccgtttcagtctctgaagccagctcagacccctcgcagctgcctcacgccgcccactgggtgatgcagttcgacggctccctgtctcttcagggcgccggcgcgggggtcacgttgacctctccgaatggagacgtcctcaaatacttggtctgcctcgactttagagcgaccaataatatggcagagtacgagggactccttgccggactcagagtggcagccggactggggatccgccgtctcttggtgttaggcgactcccagctagtcgttaaccaagtctgtaaggagtaccggtgctctgacccgcagatggacgcttacgtacgccaagttcggcgtatggagcgccattttgacgggatagagcttcggcatgtgcccagacgggataacatgattgccgacgaactctcacggctcgcgtcctcgcgagcccagaccccgccgggcgtctttgaagaaaggcttgcccagccgtcggcgcgacccgaccccttaggggagacggacgcgcctgatcggcccccgaggcccgtcggagcccaggcctcgggacccgaggggagcgctccaagctcccttagattgattgcttggatctctgagatccaagcatacctcacagataagactctacctgaggaccgcgaagggagcgagtgcggagcccattctgcctcgcgcaccctggttggcaaggcctttcgtcaaggattctattggccgactgccctcaatgacgcggtcgacctggttcggcgatgcagagcgtgtcagttccacgccaagcaaatccatcagccggcccaggcactgcagaccataccactttcatggccatttgctgtctgggggctcgatatcctgggaccgtttaggcgggccccgggcgggtttgagtacctgtatgtcgcgatcgacaagttcaccaagtggcccgaggcttatccggtcatcaagatcgataagcactccgcacttaaattcattaagggcatcacggcccggtttggagtgcctaaccgtattattacggataacggcacccaattcactagtgaactcttcggcgactactgcgaagacatgggcatcaagctctgcttcgcctcacctgcccaccccagaagcaatggtcaagtggagcgcgccaatgcagaaatcctcaaaggccttaaaaccaagaccttcaacattctcaagaagcacggcgattcatggatcgaggagttgccagcggtgctctgggcgaaccgaaccacaccaagccgagcaaccggggaaacgcctttcttcctcgtctacggcgcagaagcggttctcccatccgagctcaccctgaggtctcctcgggccaccatgtactgcgaggctgatcaagatcagcttcgcagagatgacctcgactacttggaagaacgaaggcggcgtgcggccctccgagccgcacgctaccagcagagcctgcggcgctaccatcagcgccacgtccaggcccgatctctctgcgtcgacgacctcgtcttacgccgcgtccaaacgcgtgctggattgagcaagctctcaccaatgtgggagggtccgtatcgagtgatcggtgtcccccggccgggctccatacggctggccacgggcgacggcacagagttgcctaacccgtggaacatcgagcaccttcgtcgcttctacccctga

SEQ ID NO: 50550 - DNA, 5652 bp, Oryza sativa
  Clone ID: PAT_MRT4530_53025C.1
ttaggggtagaagcgacgaaggtgttcgatgttccacgggttaggcagctctgtgccgtcgcccgtggccagccgaacggagcccggccgggggacgccgatcactcgatacggaccctcccacattggtgagagcttgctcaatccagcacgcgtttggacgcggcgtaggacgaggtcgtcgacgcagagtgatcgggcccggacgtggcgctgatggtagcgccgcaggctctgctggtagcgcgcggctcggagggccgcgcgccgccttcgctcctccaagtagtcgaggtcatctctgcgaagctgatcttgatcagcctcgcagtacatggtggcccgaggggacctcagggtgagctcggatgggagaaccgcttccgcgccgtagacgaggaagaaaggcgtttccccggttgctcggcttggtgtggttcggtttgcccagagcaccgctggcaactcctcgatccacgaatcgccgtgcttcttgaggatgttgaaggtcttggttttaaggcctttgaggatttccgcattggcgcgctccacttggccattgcttctggggtgggcgggtgaggcgaagcagagcttgatgcccatgtcttcgcagtagtcaccgaaaagctcactagtgaattgggtgccgttatccgtaataatacggttaggcaccccaaaccgggctgtgatgcccttaatgaatttaagtgcggagtgcttatcgatcttgacgaccggataagcctcgggccacttagtgaacttgtcgatcgcgacatacagatactcaaacccgcccggggcccgcctaaacggtcccaggatatcgagcccccagacagcaaatggccatgaaagtggtatgatctgcagggcctgggccggctgatggattttcttggcgtggaattgacacgctctgcatcgccggaccaggtcgaccgcatcattgagagccgtcggccaatagaaaccctggcgaaaggccttgccaaccaaggtgcgcgaggcggagtgggctccgcattcgccttcatggatatcggcaagaagctcgacgccttgttcccgaggaatgcacttcaggaggattccgttagccgcgcgccgatagagggtcccttctaccagcacgtagcgtttggagatgcgctggacgcgttcactcccttcgcggtcctcgggtagagtcttatctgtgaggtatgcttggatctcagcgatccaagcaatcaatctaagggagctgggagcgctcccctcgggtcccgaggcctggactccgacgggcctcgggggccggtcaggcgcgtccgtctcccctaaggggtcgggtcgcgccgacggctgggcaagcctttcttcaaaggcgcccggtggggtctgggctcgcgaggaagcgagccgtgagagttcgtcggcaatcgtgttatcccgtctgggcacgtgccgaagctctatcccgtcaaaatggcgctccatacgccgcacttggcgtacataagcatccatctgcgggtcagagcaccggtactccttacagacctggttaacgaccagctgggagtcgcctaacaccaggaggcggcggatccccagtccagctgccaccctgagtcccgcaaggagtccctcgtactctgccatattattggttgcctgaaagtcaaggcgaaccaggtatctgaggacgtctccgctcggcgaggtcaacgtgaccctcgcaccggcaccctgaagagacagggagccgtcgaactgcatcacccagtgggcggtgtgaggcgattgcgaaggatccgagctggcctcggagactgagacgggctcgggagctggggtccactctgccacaaaatcggcgagggcctggctcttgatagcgtggcgtgattcaaagtgcaaatcaaactcagaaagttcgattgcccatttcaccacccgtccagtaccctctcgattatgcaagatttggccgagggggtaagacgtaaccaccgtgacccgatgcgcctggaaataatggcgcagtttcctcgaagccatcagaatagcgtaaagcatcttctgggcctgagggtatcgggtcttggcgtcccggagggcctcactaacaaagtagacgggccgctgcacctttcggtggggccgaccctcttcgctaggggccgcatccctggggcgctcttcgtccaagcggcctcgcggggcgcactcgtcttctgtgccgacgacctcggggtcggaggacgacaggggcggcctccccatagtggcctcggggccgtcctgggggtcgggggctcctggcgtcgtcggacaagcgggcaaagggccaactccggtcgtcaggggccttaggcctccgttcggctcgggggcctcttctccctgctctctcccgggtcgagtcggcacagggttagcctcggggtcagagggcgataggtgcggccttcccgcagtggcccccgagccatcctgggggtcgggggcacctggcaccgtctgacaagcgggcagagggccagctccggtcgtcgggggccttgggccaccgttcggctcgggggcctctcttccctgctctctcccgggccaagccagcacagggtggggatgcgcggaatgaggattgtcctcatcgcgctccacaaccaacgccgcactaaccacttgcggggtcgccgctaagtagagtagcaagggttcatttggctccggggcgaccagaactgggggagagctgagatacgccttcaactgagtgagggcacgttcagcttcctccgtccaagtaaacggctcggagcgtttgaggagcttaaataagggtagcgccttctctcctagcctcgatatgaaccgacttagggcggccatgcaaccggtgacgcattgcacatccctaagtttgctgggggggcgaatccgctctatagctcgtatcttctcggggttggcctcgatgcctcgggcagagaccaagaacccgagaagcttgcccgcaggtacaccgaacacgcacttatcggggttcagttttatgcgggcggagcggagactctcaaaagtttccgctagatccgagagtaaggtctcttggttgcgcgtctttacaaccaagtcatcgacataagcctcaacattatgtcctatttggctacccaaagaaattcgagtagtacgttgaaaagtaggacctgcattctttaacccgaagggcattgtcgtataacaataggttcctatgggggtaatgaatgcagttttttcctcatcctccctagccatgcgaatctgatggtaaccagagtatgcatctagaaaacacaaaaggtcgcaccccgcggtggagtcgacaatctgatctatgcgaggcagggggtaagggtccttaggacatgccttgttaaggtcggtgtagtcgatgcacatccgaagcttgccgttcgccttgggaacgaccaccgggttcgccagccactccggatggatgacctcgcggatgaatccggcctccagaagtcgcgccacctcctcgcggatgaaggcttgacgttccggggcctgccgccgcactttctgccggaccggccttgcgcccggccgcacggcgagacggtgctcaatcacctccctggggaccccgggcatatccgccggtctccatgcgaagacgtcagcgtttgcccgcaggaaggaaacgagcgcgtcttccgggacctcgtcgcatgtgatcatccgctgcctcggggcggcggggacggaggtgccaagcctctcgtcgccaccctcgggcttggacgcggcggcgaggtggtccgcgcgctgctccatacaagcgagcgtgactttgaggtcgccatggacagagatggggccaccggggcccggcatcttcatctggaggtaggcgtagtggaccgccgccatgaacttcaccaacgcgggcctccctaggaccgcgttgtagggcagactgaggtccgccacatcaaagttcacccgctccgtgcggaagttggcggatccaccgaaggtgactgggaggtcgatatgacctagcggccaagtgtgccccggcgtcacaccgataatcggctgggacggccggagcaccatccccggggccttgatggcgtcaaaggctgcggggaaaggatgttgagggagtgggtggtcggtctggtcgaaggtgagggcaacctccgaccaccgcgcccggcgcgtcgcctcatgagtaggggccgcggccagaagctctcgcttcatggccttgaggctccggcgagaaacgtgagcacacgctcccccatcgacagtggcaatggtggccccaggctcttggaaacctaggtcatcatcgccgtcatcgatgtcctcggcgggggccttctgcttggcctcacttcgccgattgccggaaggaaccgccggggacttgccctctcggcgctcctgcctcctctcctcctcccacttcctcgtccgctcagccaaacttttgactgcacggcagtccgcgaggtcgtgaagggaggtgttgtggacggtacaccacttgccggttgggcgctccctactgggagcgccggcctccttctttttgtcgctcgcaggcctcccctttcgggtggcccgcgaagcgccctcgacggcgaggacatgaccctcgtcgtcggaatgggctgacctcttcttcctcctcctgtcacgccgccctgtccgagcagcgaatccgggggcggccgaagctgccacaccggaaccggaggggttccaggtccacgcctcctccttacgagccactcggtccgcgagctgaaaaagctccgcggtagtctggggctctttggaggcgatcttttcgagcatgcggttgtgccgcacaccccccctgaacgcgtagatcaccgcgtgtgcagggatgcatggtatggtgttgcggacttgacagaaccgctgaatgtatgagcgaagtgactcatcatcccttcgctgtactgcgtgcaagtccgcttcctctcctgggcgcggatatgtgccttgaaagttcatggtgaactgttggcacaaatcctcccaagagtggacggacgcgggtggcaagttcattaaccaaccccgcgcctgtcccttcagggccatgggaaagaaattcgccatgaccctgtcatcacccccggcagcctcgatcccggtcgtgtagacctggagaaactcggcggggttgacgctcccgtcatatttttcggcgatggtgggccggaaccttgggggccaacggacgttccgaaggctcgccacaaaggctctacagccgacaccaccaaccggggggacggagggctgatccccgcgtccgtgttgaggtgacactccggacgaggaggcgccctccgttgcgtggggagcacgtcgaccattacgccggcgctcgataccgatgcgggcatctggccccccacgctgatcttcccgggtcggaggcgctgacgagggagtggcagccgaatggcgagcaacagccgccgctcgccgcgccctccgccttgacgacacggagccggtggtagcagcgccagaggtcttggtggcggaggaccgcccaccagcacctaggtgctgccgtgccgtcat

SEQ ID NO: 50551 - DNA, 326 bp, Oryza sativa
  Clone ID: PAT_MRT4530_53026C.1
cgtggatcgaggagttgccagcggtgctctgggcgaaccgaaccacgccaagccgagcaaccggggaaacgcctttcttcgtcgtctacggcgcggaggcggttctcccatccgagctcaccctgagcacgctcgtgctcgatcctgccctcggtggcccgggccggctaaaatcgccaaacggggcccagaaccgagccgtgccccggggcgtggtgaactccgggggggaatcggcaaaggcccacaatcgggtcatccataaccctcggtcaccacgttcccggcctggccagtctcgacacgcggatctccccaggcactag

SEQ ID NO: 50552 - DNA, 1257 bp, Oryza sativa
  Clone ID: PAT_MRT4530_53027C.1
atggcgagccggtggagggagctgcacggcagcggccactgggacggcctgctcgacccgctggacgtcgacctccgccgctgcctcatcacctacggcgagatgatcatggccacgtacgaggcgttcatcggcgagcaccgttccccgaacgccggcatgtgcaggtaccgccacgccgacctgttccggcgcgtcgacgtgtcccatccgggctggtacgcggccacccggtacatctacgccacagccaacgccgacgtgcacggcaaggtgctgctccggccgctgtgccgggagggacgcgccacggagtgcaactggatggggtacgtcgccgtggccacggacgagggcgccgccgcgctcgggcggcgcgacatcgtggtggcgtggcgcggcacgcagcgcgcgctggagtgggtggccgacctcaagctcgcgcccgcatcggcggccgggatcctcggcccggagggcgccgacgggaccgacccgtcggtgcaccgcggctacctgtcgctgtacacctcggaggaccaatgctcggagctgaacaagcagagcgccaggatgcagaataaaaagttgggatttgatcctatgcgacaaactttgaaaaaagtattgacagagatagcgaggctgatggacaaatacaaggacgaggagaccagcatcaccgtcatcggccacagcctgggcgccaccctggccaccctgaacgccgccgacatcgccgccaactcgtacaacaggggatcctctagagtcgacctgcaggcatgcaccccggtcaccgccgtggtgttcggcagcccgcgcacgggcgaccgcggcttccgcgacgccttccaccggctccgggacctccggatgctccgcgtccgcaaccggccggaccgcatcccgcactacccgccggtgggctacgccgacgtcggcgtggagctgctgatcgacacgcggctgtcgccgttcctcaggcgccacggcagcgagtcgcagtcgcacgacctcgagtgccacctgcacggcgtcgccgggtggcacggcgaccaccgcgggttcgagctggtggtcgaccgggacgtggcgctggtgaacaagttcgacgactgcctggcggacgagtaccccgtgcccgtgcgatggaaggtgcaccacaacaagagcatggtgaagggtcccgacgggaggtgggtgttgcaagaccacgagcctgatgacgacgacgacgacgacgacgacgattga

SEQ ID NO: 50553 - DNA, 9638 bp, Oryza sativa
  Clone ID: PAT_MRT4530_53028C.1
atgttgtttgaagaagggcaagcatgcacgttgctaagccgacgcgtggtggacaagaatgaccgatttgtgaccggtctgacactgctcatgtcgtcagcacacagccgccttcccacgacgtgcccgcctcaggcagaagtggaggtagacacggagagcttgagatctcaccctgagcccccggccgaaccggcaaagggggggcctgtgcggtctcccggtgaggagcgccgcgctccgtcatctggcgcgccagtttttcttgatcagcctcatggctgagcaagcaaaggcgtccgacctctctcccagtgtgagtggcgacgacggggagccgaacccacgccgtcgagctcgtactccaccgccccctccacgccaaagtcctaagcagggggaggcgctcgaaagggtcgaaagatccgcggcttcaccgatcgcgggcgatggaggagaacggcgagatggggaccgtcgcctcctcgtctacggcgacggcagcacgccccagggcgcgctccaagctgcgggcgcgctcttacgccacccgcctgtcgtccctgacccggagtctccagcccaacgatggctggacgatgtggccaaattggtcatgacggcacggcagcgcctagatgctggtgggcggtcctccgccaccaaggcctctggtgctgctaccaccggctccgcgttgtcaagacggagggcacgacgagcggcagccgctgttcgccgttcggctgccactccttcgtcgactccttcgacccgggaagatctgcatggggagcaggacgcccgcgccagcatcgagcgccggcgtaatgaccgaagtgctgcccacgcaacggagggcgcttcctcgtccagagtgtcacctcgacatggacgtgggaatcagccctccgtgcccccggttggtggtgtcggctgtagagcctttgtggcgagtcttcggaatgtccgttggcccccaaggttccggcccaccatcgccgaaaaatatgatggcagcgtcaaccccgccgagtttctccaggtctacacgaccgggattgaggccgccgggggtgacgacagggtcatggcgaatttctttcccatggccctgaaggggcaagcgcggggttggctaatgaacttgccacccgcgtctgtccactcctgggaggatttgtgccagcagttcaccatgaacttccaaggcacgtatccgcgccccggtgaggaagcggacttgcacgccgtacagcgaagggacgatgagtcgcttcgatcgtacattcagcggttctgtcaagtccgcaataccataccatgcatccctgcacacgcggtaatctacgcgttcagggggggcgtgcggcacaaccgcatgctcgaaaagatcgcctccaaagagccccagactaccgcagagctttttcagctcgcggaccgagtggctcgcaaggaggaggcctggacttggaacccctccggttccggtgtggcagcttcggccgcccccggatccgccgctcaggcagggcggcgtgacaggaggaggaagaagaggtcagtccgttccgacgacgagggtcatgtcctcgccgtcgagggcgcttcgcgggccacccgaaaggggaggcctgcgagcgacaaaaagaaggaggccagcgttcccagcagggagcgccctaccggcaagtggtgcaccgtccacaacacctccctccatgaccttgtggactgtcgcgcagtcaaaagcttggcagagcggacaaggaagtgggaggaggagaggaggcaggagcgccgggaaggcaagtccccggcggttccttccggccgtcggcgaagtgaggccaggcagaaggcccccgccgaggacatcgatgatggcgatgatgacctgggtttccaagagcctggggccaccattgccaccgtcgatggaggagcgtgtgctcacgtttctcgccggagcctcaaggctatgaagcgagagcttctggccgcggcccctactcatgaggcgacgcgccgggcgcggtggtcggaagttgccctcacttttgaccagaccgaccacccgccgtgcgttgccaggggagggcagattgcgatggtggtttctcccaccgtttgcaacgtgaagttggggcgtgtcctcattgatggaggagcagccctcaacatcctttcccccgcagcctttgatgccatcaaggccccggggatgatgctccggccgtcccagccaatcatcggcgtgacgccggggcacacttggccgctaggtcatatcgacctcccggtcaccttcggtggacccgccaatttccgcacagagcgggtgaacttcgatgtggcggacctcagtctgccctacaacgcggtcctggggaggcccgcgttggtgaagttcatggcggcggtccactacgcctacctccagatgaagatgccgggccccgacggccccatctctgtccatggcgacctcaaagtcgcgctcgcttgtatggagcagcgtgcggaccgcctcgccgtcgtgtccaagcccgagggtggcgacgagaggcttggcacatccgcccccgccgccccgaggcagcggatagtcacgtccgatgaggtcccggaagacgcgctcgtctccttcctgcgggcaaacgctgacgtcttcgcatggagaccggcggatatgctcggggtccccagggaggtgattgagcaccgtctcgccgtgcggtcgggcgcaaggccggtccggcagaaagtgcggcgccaggccccggaacgtcaagccttcatccgcgaggaggtcgcgagacttctggaggccggatttatccgtgaggtcatctatccggagtggctggcgaacccggtggtcgttcccaaggcgaacggcaagcttcggatgtgcatcgactacaccgaccttaacaaggcatgtcctaaggatccttaccccctgcctcgcatagatcagattgtcgactccaccgcggggtgcgaccttttgtgttttctagatgcatactctggttaccatcagattcgcatggctagggaggatgaggaaaaaactgcgttcattactcccataggaacttattgttatacgacaatgcccttcgggttaaagaatgcaggtcctacttttcaacgtactactcgaatttctttgggtagccaattaggacgtaatgttgaggcttatgtcgatgacttggttgtaaagacgcgcaaccaggaaacgttactttcagatttagcggaaacttttgagagcctccgctccgcccgcataaaactgaaccccgataagtgtgtgtttggtgtacctgcgggcaagcttctcgggttcttggtctctgcccgaggcatcgaggccaaccccgagaagatacgagctatagagcggatgcgcccccccagtaaacttagggatgtgcaatgtgtcaccggttgcatggccgccctaagtcggttcatatcgaggctgggagagaaggcgctacccttatttaagctcctcaagcgctttgggccgtttacttggacggaggaagctgaacgcgccctcactcagttgaaagcatatctcagctctcctccggttctagtcgccccggagccaaatgagcccctgctactctacttagcggcgaccccccaagtagttagtgcagcgttggttgtggagcgcgatgaggacgatcctcattccgtgcacccccaccctgtgctgacttggcccgggagcgagcagggaggagaggcccccgagccgaacggtggcctaaggcccctgacgaccggagtcggccctctgcccgctcgtcagatggtgctgggcgcccccgaccctcaggaaggccccgaggccactgcgggaaggctgcatctatcgccctctgaccccgaggctaaccctgtaccgattcgacccgggagggagcagggagaagaggcccccgagccgaacggtggcctaaggcccctgacgaccagagttggccctttgcccgcttgtccgacgacgccaggagcccacgacccccagaacggccccgaggccactgtgggaaggccgcccctgtcgtcctccgaccccgaggtcatcggcacagaagacgagtgcgccccgaggggccacttggacgaggagcgccccggggatatggcccttagcgaaggggatcggccccaccgaagggtgcagcggcctgtctactttgttagcgaggccctccgggacgccaagacccgataccctcaggcccagaagatgctttacgctattctgatggcctcgaggaaactgcgccattatttccaggcgcatcgggtcactgtggttacgtcttaccccctcggtcaaatcttgcataatcgggagggtacaggacgggtggtaaaatgggcaatcgagctttctgagttcgatttacactttgaaccacgccatgctatcaagagccaggccctcgccgattttgtggcagagtggaccccggctccagagaccgtttcagtctctgaagccagctcggacccctcgcagctgcctcacgccgcccactgggtgatgcagttcgacggctccttgtctcttcagggcgccggcgcgggggtcacgttgacctctccgaatggagacgtccttaaatacttggtccgcctcgactttcgagcgaccaataatatggcagagtacgagggactccttgccggactcagagtggcagccggactggggatccgccgtctcttggtgttaggcgactcccagctagtcgttaaccaagtctgtaaggagtaccggtgctctgacccgcagatggacgcttacgtacgccaagtgcggcgtatggagcgccattatgacgggatagagcttcggcatgtgcccagatgggataacatgattgccgacgaactctcacggctcgcgtcctcgcgagcccagaccccaccgggcgtctttgaagaaaggcttgcccagccgtcggcgcgacccgaccccttaggggagacggacgcgcctgatcggtccccgaggcctgtcggagcccaggcctcgggacccgaggggagcgctccaagctcccttagattgattgcttggatctctgagatccaagcatacctcacagataagactctacctgaggaccgcgaagggagtgaacgcgtccaacgcatttccaaacgctacgtgctggtagaagggatcctctatcggcgcgcggctaacggaatcctcctgaagtgcattcctcgggaacaaggcgttgagcttcttgccgatatccatgaaggcgagtgcggagcccattctgcctcgcgcaccctggttggcaaggcctttcgtcaaggattctattggccgactacccccaatgacgcggtcgacctggttcggcgatgcagagcgtgtcagttccacgccaagcaaatccatcagccggcccaggccctgcagatcataccactttcatggccatttgctgtctgggggctcgatatcctgggaccgtttaggcgggccccgggcgggtttgagtacctgtatgtcgcgatcgacaagttcaccaagtggcccgaggcttatccggtcatcaagatcgataagcactccgcacttaaattcattaagggcatcacggcccggtttggagtgcctaaccgtattattacggataacggcacccaattcacttgtgaactcttcggcgactactgcgaagacatgggcatcaagctctgcttcgcctcacctgcccaccccagaagcaatggtcaagtggagcgcgccaatgcagaaatcctcaaaggccttaaaaccaagaccttcaatattctcaaaaagcacggcgattcatggatcgaggagttgccagcggtgctctgggcgaaccgaaccacaccaagccgagcaaccggggaaacgcctttcttcctcgtctacggcgcagaagcggttctcccatccgagctcaccctgaggtctcctcgggtcaccatgtactgcgaggttgatcaagatcagcttcgtagagatgacctcgactacttggaagaacgaaggcggcgtgcggccctccgagccgcacgctaccagcagagcctgcggcgctaccatcagcgccacgtccgggcccgatcactctgcgtcgacgacctcgtcttacgccgcgttcaaacgcatgctggattgagcaagctctcaccaatgtgggagggtccgtatcgagtgatcggcgtcccccggccgggctccatacggctggccacgggcgacggcacagagttgcctaacccatggaacatcgagcaccttcgtcgcttctacccctgagggggggcggtcagctaaaatcgccaaacggggcccagaaccgagccgtgccccggggcgtggtgaactccggggggggaatcggcaaaaacccacaatcgggtcacccataaccctcggtcaccacgttcccggcctggccagtctcgacatgcggatctccccaggcactagccccgacccgcgccttttgaggactgggacctgggcacgaaccctgcgcgcgcgcgcggtcctcggtcccaggagggaactcatccagcgccatccatggagagaaattggggtccctggcctggtaactcgccaggacgagctccaccgctccttgggcgaggtccctcgaggatgacttatttgtcttctcgagctcctcggggagccgttggagagccccggccatcttcgagaggcgctgggtaagacctccgtggttggcggcgtactttacggtccgccctctccagaggcccacttgccgaccggcgcaatctaggcgggagacggcgtcccaaagcatgccgggcccaacctcgcctgccaagcggagggcttcgacttccccggcggatgagtccagcgcgccctgcagatcggcgatggtgtgttcggcagctgcgaggcgggcggctaagtcgctttcgcccgcggccgccccgccgctgcgcgccctcgcgtccagctccttcgcccgcgcctcgagttcagcggcccgttggttcagtgcggccctctcggcgcgggcaccttccagattacggcgcgcctgctcctcctgcgctgcctcgcggagggacagattgtccgccagctgttgcgccgcggcctcggccccctcgagagctcgctcccgctcggtgtgcgcgtcctcgcggaggcggagcgcgagctcttcttcggcgcaggcagcctcgtgcgccgctagcgttgcttcccggatggtgacggcggcctcgcggtccgccagatccctctccacgacgcaagcgcgctcttccagcgccatggcgcgcgcctcaagggcctcttcgcgcccccgggacgccgcttcggtctccgccgcccgctgttctcgggcagcggcagcgtcaagcaccccctgggcagcgtcgagcttcttccctagctccgcctcccagctcccgtattgaaggcggagggtgtcctgcgcctcgttcatcacggtggtggcaatgagggcagccccccgctcctcctccacttccttggcgatctccgccagcaccttcttacgggtttcaagctccgagacgtgccggcggtgagccttacggcccacctccaccatggcctccaccgagcgtcgcccctcttcgacacgcgcccacgcggcgtcgagctccgcccgctctgcctgtagggcctccacctgggcacttaacccatccaacaccgtggtgtttgcggcggccaaggcctgcagaaggggctctgcgttcagtggagcgatagaaggcgtggggaagagccgccttggagaggaggccacgcggctcgggccgccgatggaagtgccggactcggggatgtcccccggacccgtttggtcctgagcgtcgcccgagggagtgggcccaagcgacgcgcccgcagcctcgtcgccagctgccccggaagttgtcgcctgagcgtcgcccgagggagtgggcccaagcgacgcgcccgcggcctcgtcgcgagctgcctcggaagtcgccatcgcctcgtcctggcgaaatccggttttctcccgagcggcttcctcggcctggtgggcccgggcggcttcctcccgagcggcttcctcggcctggcgggcccgggcggcctcctcccgagcggtttcctcggcctggcgagcccgggcggcctcctgggcggcctcctcggcttcccgtaggcgatccgcggcctctcgccggtcagattcccgcctccgggcctctgcggccgccggatcctcggcctcagactggccggacttggaatggcgggagggacgcaacgggatctcgctgcgagggggtcggttaaacgaccactttggaggggaaatgaggtttccccgagatggttctgtctcccccgtcttgcggagccgcttcttcttgcgctccctctcgggctgcgatgtcggcgcggccccctccgggcgcctgctgctggcacgcaccgccccgccccctcggggaggagatgggggaggtgttcctccctgcttgctcttcccccgggcgtcggcaaggcggctactccccgggcccctgtcgcgggacccagaagcacgaccccctcccggggtagattgttcccccctgcggctcccgcctgcgccgtcgtggccctttggagctcgctcctctgaggccccgaccgccatcataatggtcaggatggaggcgcggtctggatcgctgcagagggggaggattccttgaggaatgagggacgcctccacggagttgagattcagcacccgttggaccaatatcttgaagtcctcaggagcccagtcccatctcactccctggtgggtcctcataaagtcttcggacccggtgtactcccaggcgccccgagcgcgccgctggagcggcgcaatccgacgacggaggtagtcgccgtacaccatggcccctgtgagcccctgggatcgcaggcccgccaggcggtcgaggacggcgtcatagccatcccccagatctaccgacgcccgccagctagaggcctgcgccgggggctggctcggaagtcggaggcgcgcttcgtcggcaaggggggtgtagaaccagtcgctcttccagtcgtcccacttcttgcggagggcgcaggggatgtagcggttcagcaccggcccccgtggctggaagtagcagccaccaactaccgatggcggcgacaccgactgtacggtgaagaaccaccggaacagccgaagagatgggcgcaccccaatgaacatctcgcacagatgcgcgaagatggccaaagtcatcaccgcattgggggtgaggtgcgccatctggagatcgtagaactccagaacatccatgaagaaagaagaaaatggcggaaccagccctgccattgcaaaggggagaaagaagacggaccgccccgggtagtctggcgccgggcgtccctcgcccagcgtgactatctcccggccggtggcagatcccggcatgaaacggcgcgccagcccagcctgcctctcgctcacaatgcgggaaggcggcagcacgctaccatcgagcagagcggagccccgtgccat

SEQ ID NO: 50554 - DNA, 185 bp, Oryza sativa
  Clone ID: PAT_MRT4530_53029C.1
tttgactgctcattagttggactttgatcccttctatgacgtagcagattgcattgcatacatgtacgcactgaaaagctgcatggcgatcgaatagcagtcgaatacgggatctcgcatatggatgggggatacgcgaatagagttataccccatttgtaggactacatctgcgataattagct

SEQ ID NO: 50555 - DNA, 228 bp, Oryza sativa
  unsure (1)..(228): unsure at all n locations
  Clone ID: PAT_MRT4530_5302C.1
cccgaggtccgtatgtgtccccacgtgggcgagcccacccagtgtgtgtcagaaggtgcccgagagagtatcgcaggccggcgtaacaacgantgtggggtggtgtgtccgtgtgtcgtagagtccagtcccaagtgtgtcaagcggaaaagtagttgggtagtcgtggtagtccccagtagagtcngtggtcacgggtgttgtgttcattaattcgctcgctttggt

SEQ ID NO: 50556 - DNA, 479 bp, Oryza sativa
  Clone ID: PAT_MRT4530_53030C.1
ccggccgggaacctatccaattcccgaacaagcatggcaccaaattccctcaccatggatcaccgcctcctcctacctcggcctcctcctcctctccccggcggtggccgccgtctcagtccccggcgaggaggagccgttgatccggcaggtggtcggcggcggagactacaacgagctggagctgaacgcggagcgccacttctgcagcttagtccagaggttctataaggcctaccgtgacgccgacgatcactcataccgtgtctccgggttcaaggacaacctccgccgagcgcgccgccaccagctgctcgacccctccgcggagcacaggcgtgaacaagttgtccgaccccaccccggccgagttccgccgtgcctacctcgacctcatcacgttgagccgcgctttattgcgagggctcggaagactgcgtccacgaggatcgcgttctcatcaccgacggcctattcta

SEQ ID NO: 50557 - DNA, 1722 bp, Oryza sativa
  Clone ID: PAT_MRT4530_53031C.1
tcaacatggcgcacttcgcggacgtgctcgcggacacgtccggggcagacgaacagagcattggattggctaggaaaagttaacgagtcccaagttattcggaggactaggttttcgagatattagatgttttaatcaagccctacttacttagcagacatggagattgatcgatactccagaaaacttgtgtgctcgggtactgaaggagaaatattatccaaatggatcattaactgatacaacttacggtacttactcttctgatgcatcgccaacctgaaaaggtattgaatatgggctagaattgctgaacaagggtttgatatggagagtaggagatgggcgccaaaccaaaatctggaggagccaatggattgcacatggggaaaaaccaaagatcttgcagaagaagacctggaatcgtcttatatatgtacacaagctcatgaatcctgacaccaaaacatggaatgaaccttgaattagacatgtagtcaaggaaaatgatgcatctgaaatcctaaaagatcaaaatacccgaaagggagatgcctgatttcccagcatggcaccttgagaagataggaatattcactgtcaggagtgcttacaagttagcgtagaatctagccggaaagatatgcattgaatattcatctagctcggcaacagatggagagacgaagatctagaagaatatatgacaaacaaatgtccaacgaaaagtgtgaattttcgcctggaagctagcccaagacagactgctcacttggggaaacaagagaaaacaaaagatataacagagtggcatttgcccgatctatggtctgacagaagcaaatggtgtccatgctacggtggagtgtactgtggctagaggtttacaggagacaatgagagcacactgggtattgccggaagaaaggagtttcaaatggacagggcctgattggttgctagtgatgctggatagtttgaacagattggtgaaggcacatgttctgtatttactttgaagagcctagcacctgcgaaatgttgtgatccatggtaaaggaaatgcatcaatagttgactcggttagcttcctagtaagctatgaagtcaactattgccaatctgacaaagggaagatgaccacaaagggaagggccctttgtccttgcatcactatggctctgctgcccaggctgaatgacttcgagcgacggttgaactgatccacattccaattgtgatggagatggataatgtagaaatagccaaagacttaaaacagcaggttccttgaaatcggcttggcgatgacgattgaagagattaaaggaataatgcagtgttttcaacaagtgcaagtgcataagataaagagagaagcaaatatggtagcacatgttttagcccaaatggtaatgatcttgtgcatgcggagtgaaggctgtgtactcccacaagaatcctagacttaatgaaccaagaagtgctgcagggccgcaccacaccgctgcagcgtcaccgtcggtgcagcacacgccgccccgccacccgcgcgcacatcggtgacagcatcagctcacctcggtagctattaaaatccatcccccttctccacctcacctctcctccctcccagacaggctccattttccactctcccctcctggcctcccacctcccatccggatctcgccgcttgtgctatttgaatctggagtttct

SEQ ID NO: 50558 - DNA, 1153 bp, Oryza sativa
  Clone ID: PAT_MRT4530_53032C.1
atggcgtggaggagagggttcggccgggaggaggaggacgcggcggcggcgggggagagcggcctcgagctctgccttggcctccccgcctacttctcctcctcctcctcctccaagccatcggagggatcaaccgctgctcctgcttttgctctccgatccaatggaaccaatgcctccaagccaagcggggcagcggcggcggcgccggttgtggggtggccgccggtgcggtcgttccggcggaacctcgcctcgtcgtcgtcatcgtcgtccaagcaggcgccgccgccgccgtcgtcgtcgccgcagaacggcgacaaggcgagcaaagacggcggcgcggagaagggcatgttcgtgaagatcaacatggacggcgtcccgatcgggaggaaggtcgacctcgcggcgtacggcggctacgcccagctctccgccgccgtcgacaagctcttccgcggcctcctagccgctcagagcgctgccgctgacggcgaggccgacgcggccgccgccggagagatggtcggcggcggcgagtacacgctcgtctacgaggacgacgagggcgaccggatgctcgtcggcgacgttccctggcagatgttcatcgccaccgcgaagaggctgcgcgtgctcaagagctccgacctgccgccgccgtcgctgatgagggcggcagggagcaggaagagggcagcagctgacagctgaactaatcactgtcaatttcagctgctgctgccgatgatgatgaattgatcatggtgtggtgcttggattgagatcctctgcagtcaaatacacggtcctttgtcattgataggtgggcctagggattatcgggcctatatgttaatgataacgtcacgtgattttaactgcagaggattttgatctgtggtgcttggctttatggccattttgatgtctttgggctgcataattatatgtatacttacgagagatcatgacggtattagtggtcatgattagtagtacgatcgagtagcatggaacagtgttgttaattactagtagctgggtgattaagctaatctatggcacctttggtggtgtaattttggacgcaggcaggcctcgggcaaattagttatgtgttttgttaattaaaaaaaaaaaaaaaaaa

SEQ ID NO: 50559 - DNA, 709 bp, Oryza sativa
  Clone ID: PAT_MRT4530_53033C.1
gatgcaccctcctactcactccccacaggcggcggcggcagctccgacgacggttctcgggcgacggcgcgcggtggctccagcagcggcttgtggcggcgacggtgacaaaacgcgagcgcacgtcggttctcaagatggctgcgtacgagctccgacgacggttctcgggcgacggcgcgcggtggctccagcagcggcttgtggcggcgacggtgacaaaacgcgagcgcacgtcggttctcaagcggcagcgcgcggcggcgacggtgacggaaggcaagtgcgcggtagcgcacgggggcggcggcgcaaggaaggaggtgcggcagtggcgcggggaaggaagcggcggtggttctcgacaacgagatgcggatctggcgccggcgagcctcgggagagtggatccgccgccgcctgtcctcgggagaggcacggggggaggggccagtggcggcgctcggcggcaccggcgcgtgggaggggcggtggggagcagagccggcgccggcgagcggatccgctgccggccatccacgccctcccttgggagcaacgaatccatcctcacctcttaatctttgtgatgtaatatttttgtgctcgatctgtgatgcctcacctcttaatctttgtgatgtaaaatttttgtgctcgatctgtgatgtggaatttgtgttgtgatgtgaaaaaaaaaaaaaaaaaa

SEQ ID NO: 50560 - DNA, 556 bp, Oryza sativa
  Clone ID: PAT_MRT4530_53034C.1
atggctcgccactcctcctcctgcccttcgctggccctagctcatcttcctactctctacttcctgttgtggctccatgttcctgacgtagccccccgcttcccatcggtgaggtacctggtacctaggtacggacacggcgagagagggggtgtggtttcatggatttggtcgaggatctggaggtggaggtactatcaaccccaccgtcgtatggatgtggagatggtggtggtggaagttgggattcctgatggccatgggtggcgatcaagttctcggagcccatggggacgggatgtggtgttctcccccacgatgatggtagacaagggcctcaccccttccttcttcgaaatgaccatatctggagctttgattggctatcaatgtggtggtatagccatcatgctccttgccaacccgttttgctgcttgtcagtgttgtgtgcagcctgcgatggtggccctgctcttggcaccaggccgcgtttgtttggatggcgctggacttgtgaggagaaagtagaagcgcaggatgatgtcaacaccataa

SEQ ID NO: 50561 - DNA, 200 bp, Oryza sativa
  unsure (1)..(200): unsure at all n locations
  Clone ID: PAT_MRT4530_53035C.1
ggagacccgagatggcggggagcggttngagnaggntccntgcggtgaggaggccgcccaatttcgcgcccgtcctcggttctgcctcnggatcgnncttcntccgncggcacccttngcgnttngnccaggngaagaaatcnaaggcggnttttactttaggtcacccacaatntntacttctgactttnanaattntt

SEQ ID NO: 50562 - DNA, 233 bp, Oryza sativa
  Clone ID: PAT_MRT4530_53036C.1
cccggcccgaattccccgggcgaaccacacgaaacgcggccgcgggggcaacgtttcttattaaaaacctaccgaggaggcaggggggaaaaacgacccggcctcaccggaggaggggtttcaattcccggccagaccaaggaaaaagcgcaccggccagcttggcattggtttgaatggaggaaaacccggagaaccggggcaatcggtcgaacccagctacccccccgggg

SEQ ID NO: 50563 - DNA, 211 bp, Oryza sativa
  Clone ID: PAT_MRT4530_53037C.1
tcgttttaaactaaatgaagaatcaaacacacggaggcgcaaattaaaaaaggagtggcattttctaaaatggccaaagaactgtgtatggtaattccagagaccaacccacaaaatcttagattcaaacagaacctcataagttggttaaaatcaacatttgcccgacccgaaaagccctgagggaacaaacccgatgcctaaatagctc

SEQ ID NO: 50564 - DNA, 1534 bp, Oryza sativa
  Clone ID: PAT_MRT4530_53038C.1
ccggccgggaaccgaccgatccgtcgttcgtcatcaggtttttcctcccgagctcgagaggcgcaacaaaagccatctctccttttcccccgccgccgccgccgcctctctccgtctgaaaacacccaaaaacccaaccaaaccctagatccgccgcctccccgctcctccgtctccgactccggcgacgcccgcgcggccacgatgccgaacctcgagtgccggatgtacgagccgcggttcccggaggtggacgcggcggtgatgatccaggtgaagcacatcgccgacatgggcgcctacgtctccctcctcgagtacaacaacatcgagggcatgatcctcttctccgagctctcccgccgccgcatccgctccatctcctccctcatcaaggtcggccgccaggagcccgccatcgtgctccgcgtcgaccgcgacaagggctacatcgacctctccaagcgcagggtctccgaggaggaggcgcacgcctgcgaggacaggtacaacaagtccaagctcgtccactcgatcatgcgccacgtcgccgagaccctcgggatcgacctcgagccgctctaccagcgcatcggatggccgctgtaccgcaagtacggccatgccttcgaggccttcaagctcatcgtcgccgaccccgatgccatcctcgactcactcacctacgaggagaaggagaccggcgctgacggacaggaggtgactaaggtggtgcctgctgtcacccctgaggttaaggatgccctagttaagaatataaggaggaggatgacaccacagccacttaagatccgtgctgatgttgagatgaaatgtttccaatttgatggggtgcttcacattaagcaagccatgaggaaggctgaagctgctggtaatgataattgtccagtgaagattaagctagttgcacctccactttatgtgctgaccacacaaactcttgacaaggaccaaggcatttcagttctcactgatgcaattaaagcttgcacagctgagatcgagaagcacaagggaaagttgatagttaaggaagcaccgagagctgtgagtgagagagaagataaactgttcaatgagcacatagaaacccttaacgagcaaaatgcggaggttgatggtgatgctgacagtgaagaggaggaagatacaggaatgggtgacatcgaccttacaaattccggtgtcaacgcggattaaagttccgctatttgatttggatgagttttgttgtatagcaccagccaatcttaagtcgtcctatttgaaaagagttcgttaggttctggtggctgtgacccctttgaattcactgatgcgcgttgtctggggtgtttgcgttttggggttgaggtcgtgttggagaattgctcgagtagcatctaattttttcttgggatcgaaacataattctgttgctatacatcgtctttgattggccacttctaaaaaaaaaaaaaaaaaattcaaaatatcattactgatgattactaaaaaaaaaaaaaaaaaa

SEQ ID NO: 50565 - DNA, 128 bp, Oryza sativa
  Clone ID: PAT_MRT4530_53039C.1
ccgacgcgtgcgcgaccccctgggcgaccggctcatccagcgcgcgatgcagcggacctggttcatgggctgcttctgggtcggtgcctgacgacttgaatagccacatgcttagctaaactcatatc

SEQ ID NO: 50566 - DNA, 1005 bp, Oryza sativa
  Clone ID: PAT_MRT4530_5303C.1
atgagctatatggccggatttaatcaaggaatttcttcatcaactataacgagcgggaacgggttcaacaatattgctacacaatacattaggactgatcaaggcgtcatgagaggaaatgtcccgctacctcaagttgtaatttcatcaaaggtaacctccgattcgcccaacccgtcctttgctattcaaaacattaataatcattgtgtagatgcatatactacttctagttttgctcctatacaatatgcttataatgctatgggggggtcagcgggtgtttatacggccgattacacagaaatcggctataggcaaaacctagataacggtatgactggtcatggcaccggtctaacagcatcctatgccggtcagaccgtgcccaccatggccgccaaactaagtgacggttcggattgtatcacaagcgaaagtgaaatagcattgtcacctaagaccgaatcacaaatcggtcatgtggatgttggaaaagatgatgacaatgtcttgcgggatagtggtgaaatagaatccaaagtagctatgcatacatatcaaaggccgtatcctgaacatgtagattcggtcccatacccgcaaggatttgaggtgcccaacttcatgaaattcacaggtgagaatgctatgactacaatggagcatatcggccactttattgatcaatgtaatgcgagcttgatggagcaaagaccgattgatacttcatcggtcacttgtgaaactatttcggttacatctatgcctaagaccggaattgttagtgatcctttccctgttagttctattgatgttgacaaaaagaaagggaaacgtgttattattggggatcctcggcccaagaataggatcaacaatgcgaaggccgaagatcataaagttgtaaaggatgagttatctagtatccaaaggaccaaaaagccgaagctcacttttgagatgcttatggctaaatacaagaaaggattagccggtcaatga

SEQ ID NO: 50567 - DNA, 340 bp, Oryza sativa
  Clone ID: PAT_MRT4530_53040C.1
gccggcgggattgaggccggtcaccggtggcctcgccctcccctcccccagatccggctggaggggaagcggcgagatgggtggccggccggcggcgggatgggaggtcggccgtggcatcctcgtcgtgccggcggctgggggcacgggaagcagtggccatgcgaacatggggacggtggagctcgtcggcgcgagcggcacacaggtgaaagagtggcggctagagggaggggagtcgacggcgttcgtggaggtggtggccagtcacaaaggcgaggcggcggcgggtcacggaggtggcgtccagtcgcggaggctaggcggcatccggatctaa

SEQ ID NO: 50568 - DNA, 687 bp, Oryza sativa
  Clone ID: PAT_MRT4530_53041C.1
atggacgccgccagtgaagatgtaggtatcttcgctggcggtccacgtcaccacaccgccagcgaagatatggtcgggcatctcagcgctgaagcagttggcgctgaggtccctgccacgtcggcacgaggaggcgctcggctgccacgctggcacgacgtccgcgccaggccctttggcgttgggcagagcaatgatgggctgcagcagccgcacgacaggaagaggatggattcgaaccccgggcccaacctttctacgttccaactcgactcgacttcgatctctaggagactacggggattatattatatatatggtggcgctctcgccggccgccgctgcgatcgtacgatctctaaactgaacatcgagaggcgcgtgatgatgagcgacgacgtcctcacgccggcgatcgatgacgaggtggctgcggcgctgaaggtgatcgatggctacgacgtcgaccccgcgctgaagactgtttgcaagctggcgttggaggtgatggccggtgtcgagcccgtggcggagactctccgcaaggcagaggcgatccttcgcatgaagaagatgaagcctcctccggcgaaggagaaggccgccgacgccatcaacaagatccgcgccgaggacgcaaggataatagaggagtacaagcgtacgggtgaagcctactactattag

SEQ ID NO: 50569 - DNA, 249 bp, Oryza sativa
  Clone ID: PAT_MRT4530_53042C.1
aattgaaggttcaataaaatatgggttactgaattcaaattgggaagcaaattttagaaagtgagtgacataaatgctaagacaacatgtaggaaggataacagtaataacggggcaaaaggggcataaaggaacttgagtaagccataacagacaaaggataatatcagaactaccaagtgggaaccaggcaacggaaggtgggcggatagcggggtagaataaaaccgtcggaggggtggacctaaa

SEQ ID NO: 50570 - DNA, 252 bp, Oryza sativa
  Clone ID: PAT_MRT4530_53043C.1
cttactcttgggcgagggcccccgcgccccgcggggggccatatcgggagcccgcgttcctgacggtcacaccgacgacgatgccccggccgcgaacgaggaaggcgcagatgatgaccaaggaggagaatggacatggcaactggaggcatcagtgaagacccgcatggagaaaacggtatcctttatttttaaaccatgttgagatacatttgtccacgagggctcctaaatacaactccgtaatggcca

SEQ ID NO: 50571 - DNA, 316 bp, Oryza sativa
  Clone ID: PAT_MRT4530_53044C.1
tttcaactgtgcgagtgagcgcgcggatatatgcgttgccatcgggacagcctgctcgaagcgtatggactgagacgtgtggcgttctcctcgtgagccggacggcgcgcccgtcagacggactataggcggtcggcataaccgttcttcgtcgtcgtcacctgcctcatggccgactaccgcgggcgtatctttggctacgacatcggaatctccagtggagtgacggcgattgactccttcctggcggccttctcgccgggtgtgcaacctcggatggcggctgctcgtgtgtacgagtactgcgtctacgaca

SEQ ID NO: 50572 - DNA, 1807 bp, Oryza sativa
  Clone ID: PAT_MRT4530_53045C.1
atggaggacgtggcggtggcggcggcgctcgctcctgcgccggcgacggctccggtttttagccccgccgcggcggggctcacgctgatcgccgccgcggccgcggacccgatcgcggccgtggtggcgggggccatggacggggtggtgaccgtgccgccggtcaggacggcgtcggcggtggaggacgatgcggtggcaccggggaggggggaggaagggggggaggcgtcggcggtggggagcccgtgctcggtgaccagcgactgcagcagcgtggccagcgcggacttcgagggggttggcctgggattcttcggggcggcggcggatggcggcgccgctatggtgttcgaggattcggcggcgtcggcggccacggtcgaggcagaggcacgcgtcgcggccggggcgaggagcgtcttcgccgtcgagtgcgtgcccctgtgggggcacaagtcgatttgtggccgccggccagaaatggaggacgccgtcgtcgccgtgtccagattcttcgacatcccgctatggatgctcaccggcaactccgtcgtcgacggcctcgaccccatgtcgttccgcctcccagcacacttcttcggtgtctacgacggccacggtggcgcgcaggttgcaaattactgtcgggagcggctccacgctgcgttggtggaggagctgagcaggatagaggggtctgtgtccggtgctaacttgggatctgtggagttcaagaagaagtgggaacaggcgtttgtggactgcttctcgagggtggacgaggaggtgggaggcaatgcgagcaggggagaagctgtagcacccgagaccgtgggatctacggctgtagtcgctgtgatctgctcctcgcacatcatcgttgctaattgtggagactcacgggcagtgctctgtcgtggcaagcagcctgtgccgctatcagtggatcataaacctaacagggaggatgaatatgcaaggatcgaggcagaaggtggcaaggttatacagtggaatggctatcgagtttttggtgttcttgccatgtcgcgatcaataggtgacagatatctcaagccatggataattccagtccccgagatcactattgttcctcgagcaaaggatgacgaatgtctcgttcttgctagtgatggtctctgggacgtcatgtcaaacgaagaggtatgcgatgttgctcgcaagcgaatactgctgtggcacaagaagaatggcacaaacccagcatcagccccgcgaagcggtgactcgtcagatccggcagctgaagcagctgctgagtgcttgtcgaagcttgctctccagaaggggagcaaggacaacattagcgtcattgtcgttgacctcaaggcacataggaagttcaagagcaaaagctaacatcttcttgatgaacagcaacagtgacagaatttctagggatctacagagatttggagaatccaaattcgatcgatttagaggactcctttttagtacattacttagcccagttctccctcttattttcttttaccatttgaccctcccaagggctgtattcatgtatacggtacagattgcaaaatccgcaccggggtctatgtttcctgatggcggtggatcatccccgttttctgttcttctttcgttgttgcccccttattctatttgttaagctgggccatcatgtatctggcaaatgtatatttgagcctgtaaggtacaaagaaactgagtggtataaaggatgatgtactgccttctcaactatgaactggggtccggattaacttctgtttcc

SEQ ID NO: 50573 - DNA, 1425 bp, Oryza sativa
  Clone ID: PAT_MRT4530_53046C.1
atggagcaaatgtccactcctaacagtcctgaagatattaaacgtccaataggaacaaaaactgctaaggcgcaacgtaatggtaaaggcagacgcaaaaggaaggcaaaggtttatctatcagatactgatgatgaaattgacaagcttaaagaagttcaggagatggcaaataaaggtcgtgatgaactactagagactcagaggcgtgttgctagtgataaccttgaatcaaaaaagttagcgcaccttgcagccatggagcacaaggaggctgttatgttggaaacatatcggtctctcatgttacaagatacaaaagatattcctgatgatgttagatccgagcatttgatggcattgaagtatgattctggtgaattagatccttccaaaattatagaccaatacattgttgagcagaacctcatagattcttttgcaagaagggtcatggaaaagatcaagaccaagcttagaattggaaaaatcagaaggaagagtgtgacaaggaagacaatcaagagggatcacacagcagcacatcatcgtctcatagctgactactttagtgaagaccctctttaccctgagagcatgttccgtacaagatttcgtatgggaagacccctttttcttcgcatagtgagtgcccttggaaggtggtctccttactttacactaaaggtagattgcagtggtcgccaagggctctcacctttacagaagtgcacagctgcaatgcgcatgctagcgtatggcagccctgctgatagcctagatgagtaccttaagattggcaagagcacgtccttgcagtgcttggatatgtgcgcacgaggggtgattgaggtatttggttcagagtatttgcgacgtcccacatatgaggatgtggagcgtatacttcaagttaatgagtctaggggcttccctgggatgctaggcagtattgattgcatgcattggaggtgggaaaaatgcccaacagcatggagagggcagtttacccgcggtgactatggagtgccaacaattatcctcgaagcggttgctactcgtgacctccgcatatggcatgctttcttcggtgtcacggggtcaaataatgacatcaatgtgctgaaccaatccccactatttcttgatgtgctgaaaggggaagctcctagagtaaagttttctgtcaatgggacaatggaaaactttggtgctagctttttggtgctttctgctatggttttgagagccgggtggcttaagtggtcggcggcaccttcgctgctctctggcgcgacgacgacaacacaagctgcgcggcagcgcgggcctcgcatcctcgggtttggctggagtgcccgcgacggcgacacaagccacgggcctcgcatcctcgtgtcgatggagtggccggcggcggtttaa

SEQ ID NO: 50574 - DNA, 3576 bp, Oryza sativa
  Clone ID: PAT_MRT4530_53047C.1
atggcggcgaacttctctgcctgcctcgtccccgtcgccgtcctcgcgctcttctacctggtcatcttccccaacgacttgagccagctcaagtcggcgcttgccccatgcgacgccgccagcaagagcgtcgcggcggcggcggcggcggacgacgacgtcgacttccgcatgttcttcggcatcctcacccgccccgacttctacgagcggcgcgcgctgctccgcatggcgtacgcgctccagccgccgccgcggcgcgccgccatcgacgtccgcttcgtgatgtgcagcctggacaaggaggaggacgccgtgctggtggcgatggagatcatcacccacggcgacatcctcgtgctcaactgcaccgagaacatgaacgacggcaagacgtacgactacttctcggccctcccgcgcctgttccccgccggcgccgagccgcgctacgacttcgccggcaagatcgacgacgacacgtactaccgcctgggcgcgctcgccgacacgctgcgccgcaagccgcgccgcgacatgtaccacgggttcctgaacccgtgccacatcgacccggcgtggcagtacatgtccgggatggggtacatcgtgtcgtgggacgtggcggagtggatcgcggcgtcgccggagctgcggggccgggagatcgggtacgaggacgacgtgttcggccggtggttgcgcggggcaggcaaggggaagaacaggttcggcgaggagccgcggatgtacgactacctggacagggagatgtacggcgccgacgtcaactgcttccgccacgagctcatcgccgacacggtggccgtgcacaagctcaaggaccgcctcaagtgggcgcgcacgctccgcttcttcaacgccaccgatgggctcaagccttccaagatgtaccatctcggcatgagcaacaagatggatggagtaggcgtggagacgatgcaggagccgatgccgtcgacaaagaacatgctttcttggccttttgcatcccatgctccatggctcatcccttctctgtatatttggcgtggtgcctggcaaggttcggcgccaccgcagccgccgctccctttgctctacgcgtacgacgccgctgcttctgcttttcccatggcccaaatgaagcaaggattggatcatagtgccattgaattgtcagatctgcaagaacgtggtatggactttcatccgcctggagcacaacaacctgtcaacattgatagtggtgatgaagaagcccccactgttaggactgagaagcggttgacatggtcaacagaggaggacataagactagtgagtgcttggctaaacaactcgaatgattcgatcagtggtaattttaagaaaaatgatcgttattggggagatgttactgctgagtataatagcaccactcccaaaaacaggacaaggcaagaaaaacaaatcaaagaccgttttcataaaattaagaaaaatgttggtcgtttctgttgtgtttataaagaggttaaatccatatatgttagtggacaaaatgatatgcaactcagggaaaaggctgaagcaacatatcaagcagattacaaggaaggcccattttcatttctgcattgttggaacattcttcgtgaccaaccaaagtggcatgcttacttggaggaacttgagaagccaaacaaaccaaagatggatgatgaagtggaagtgatggagcaaatgtccactcctaacagtcctgaagatattaaacgtccaataggaacaaaaactgctaaggcgcaacgtaatggtaaaggcaaacgcaaaaggaaggcaaaggtttatctatcagatactgatgatgaaattgacaagcttaaagaagttcaggagatggcaaataaaggtcgtgatgaactactagagactcagaggcgtgttgctagtgataaccttgaatcaaaaaagttagcgcaccttgcagccatggagcacaaggaggctgttatgttggaaacatatcagtctctcatgttacaaaatacaaaagatatgcctgatgatgttagatccgagcatttgatggcattgaaggtcatggaaaagatcaagaccaagcttagaattggaaaaatcagaaggaagagtgcgacaaggaagacaatcaagagggatcacacagcagcacatcatcgtctcatagctgactacttcagtgaagaccctctttaccttgagagcattggtcgccaagggctctcacctttacagaagtgcacagctgcaatgcgcatgctagcgtatggcagccctgctgatagcctagatgagtaccttaagattggcaagagcacgtccttgcagtgcttggatatgttcgcacgaggggtgattgaggtatttggttcagagtatttgcgacgtcccacatatgaggatgtggagcgtatgcttcaagttaatgagtctaggggctttcctgggatgctaggcagtattgattgcatgcattggaggtgggaaaaatgcccaacaacatggagagggcagtttacccgcggtgactatggagtgccaacaattatcctcgaagcggttgctactcgtgacctccgcatatggcatgctttcttcggtgtcgcggggattgattgggcgattatgatggccatgaagaagtcgttttctctactgtttttcctacctttccttctcctcgccatcatctacttcgttatcttccccaacgaattcaggctccaatcctcgctcgcggcgtgcggcgacagcgcgccggcgacggcggccgacgcggtggcgaaggcggccccggacatccgcgtgctcctcggcgtgctcacccgcgccgacaagtacgagcggcgcgcgctggtccgcctcgcctacgcgctccagccggcgcccgcccgcgccgtggtccacgtccggttcgtcgtgtgcaacctcaccgccgaggaggacgcggcgctggtggggctggagatcgccgcgtacggcgacatcatcgtgctcgactgcacggagaacatggacaacggcaagacgtacacctacttctcggccgtcccgcggctgttcgccggcgagccctacgactacgtcggcaagacggacgacgacacctactaccgcctgggcgcgctcgccgacgcgctccgggacaagccgcggcgcgacgcgtactacgggttcctgacgccgtgccacgccgacccgaggacgcagtacatgtccggcatggggtacgtcgtgtcgtgggacgtggcggcgtgggtggcggcgacgccggagctccagaacgacctgaaggggccggaggacaagctgttcggccgttggctgcggtggggtggcagggggaggaacgtgttcggcgcggagccgcggatgtacgactacctcgacggcgggatgcggcacgggccgacgtgcttccgccacctgctccaggcggacacggtcgccgtccacaagctcaaggacaacctgaaatgggcgcgaacgctcaacttcttcaacgccaccgagggccacaaggcttccccgctgttccatgtggaccactaa

SEQ ID NO: 50575 - DNA, 247 bp, Oryza sativa
  Clone ID: PAT_MRT4530_53048C.1
tttttcgcctttgttttttttttttttttttttttttttttttttttaaaaatttttaaaaattggggcttcaaattcatatgccatagttcaatagattagtcgattgaagtagacaaaacatacatgcccagatgcataaaacattaccagattacacagcagcagcatacaaaaaatctaaggcatttctcgtgcaggagctgctgttctaaacgcaggagtcgatgcatctagccagttgcag

SEQ ID NO: 50576 - DNA, 1227 bp, Oryza sativa
  Clone ID: PAT_MRT4530_53049C.1
atgtctccagatgattctggtgaattagatccttccaaaattatagaccaatacattgttgagcagaacctcatagattcttttgcaagaagggtcatggaaaagatcaagaccaagcttagaattggaaaaatcagaaggaagagtgtgacaaggaagacaatcaagacggatcacacagtagcacatcattgtctcatagctgactacttcagtgaagaccctctttaccctgagagcatgttccgtacaagatttcgtatgggaagacccctttttcttcgcatagtgagtgcccttggaaggtggtctccttactttacactaaaggtagattgcagtggtcgccaagggctctcacctttacagaagtgcacaactacaatgcgcatgctagcgtatggcagccctgctgatagcctagatgagtaccttaagattggcaagagcacgtccttgcagtgcttggatatgtttgcacgaggggtgattgaagtatttggttcagagtatttgcgacgtcccacatatgaggatgtggagcgtatacttcaagttaatgagtctaggggcttccctgggatgctaggcagtattgattgcatgcattggaggtgggaaaaatgcccaacagcatggagagggcagtttacccgcggtgactatggagtgccaacaattatcctcgaagcggttgctactcgtgacctccgcatatggcatgctttcttcggtgtcgcggggtcaaataatgacatcaatgtgctgaaccaatccccactatttcttgatgtgctgaaaggggaagctcctagagtaaagttttctgtcaatggtaatgagtataacacaggatactaccttgctgatggaatatatccagaatgggctacctttgtgaagtcaatagctgctccacaaacagggaagcacaagctatatgcacagtatcaagaaggggcaaggaaagacgtggagtgtgcatttggggtcctgcagtcccatttcaatattgtgcgccacccagcacggtcatggaaacggaagagtgttgggagaatcatgaaagcttgtattattctccataatatgatagttgaaaatgaaagagggggggggacaatggaaaactttggtgctagctttttggtgctttctgctatggttttgggaggtagtgaaggtgctcaatttggcaggttggcagcttgttttggttctgcttga

SEQ ID NO: 50577 - DNA, 1323 bp, Oryza sativa
  Clone ID: PAT_MRT4530_5304C.1
atgatgagcgggaacgagatcatgccgatctcattggatgatttcgaaggagaagaccgcaagtccatgcctgatggccggtcagaccgcgacttcgccgtcggtccaaccggccaaacggccggtctgaccgggtattaccccggcagtcagatcgggactcaggccggtccgaccgcgcctctggatgtcggtcagaccaggctctggaccggtcagaccggcgcaatcataccgattcaggggatagatccaatgaccaatgctagttatttgtatcatcttagaacatttgatcctcctgtatctactgctgcaactaatccccaagttcccccacatgtttctaatgcttataatgatgttgctagggccgctaccggctgccctcgtcgcctcctcgcccgccccggtcgtcgtcgtcgtcgtcctctcgtcgttcccggttgtcgtggcgttcgtccctccgtcgagccgttctcgtccgtcgtccgtgtccgtcaagcgagccgcggcagccccgtcgtcgtcttcgtcctcggctccgcgtcgtcaagcctcgtgccggccgcgtctcgacttcgtccaaggatcgccgccgaagtcgttccctcgccgttcgcctccgtcgtccccgagccgtctccgccgcgctcgttcgtcgttgtcgttcccacgcctcgtcgcgtggtgcttctgtcgttccggaggttcccgaagcgtggttcgcggtcgtcgccgaagtctggttataaacaaaagtacacggatggagatggacgaagtcgggggccgaaggacatctctaggacaaatgaaggctacacgagctgcggcccggtagtcgagatgtcatggcacagggctggtgtcctgctgccaggggctcagtcctgcctacctgtcccggaggttccggccgtaggtggggttgggtcggtgaaaaaggtgaagaaggtgtgggtgagaaaagaagccaaagctccggaggtcgttgttgtcaaggaggagtctcaagatgttcatgtacctactggagatgccgtggaaaccatgcaagcaaaggacatcgaagctgacgccataactgtcaacattggcggtctaaccgagacagctggccgatctaaccgcctgtctacagccagtctgaccgaccctcctggccggtctgaccgacggcttgcaaccggtttgaccgggcccagaggccgatcagaccaaggggcattaaagctcctggaaaacaaccacagccgaagtggataccttctggcttatctcgctctcaaaagaagaggctacaacgtcttcgggccatag

SEQ ID NO: 50578 - DNA, 135 bp, Oryza sativa
  Clone ID: PAT_MRT4530_53050C.1
atggccgcctggctgggggcactggccggcgccgcggtttcacatcggccgcgagcccacgagatgaacatcctgacgtcgatcgggcatggaagcgtcgggctgcagcagctacgagaccaccaacatgtctag

SEQ ID NO: 50579 - DNA, 623 bp, Oryza sativa
  Clone ID: PAT_MRT4530_53051C.1
atggtggggaaggaggatccttccccttcctccctcgtcttcctctctccatctcctccccccttcgtcggcgctgcggggatggcgcgccgtcgtggcgttgggggtcgccatcctggagggcccacacctagcttgtcgtcgtcgccgccaacgatgtcactgttagcctcaccgctgcttggtccatacccatctcatcccacgtctgcagcgtcgttggcccaatcgagcggcgtcggcgcgtggcgcttgacggagcccacggggacggggtggtcgcagacctccacggcgccgcagcccacggcgagctgagccgccttccccaactgcgccggcgcagcgcacagctcctccttggtcttcgccggcgagcacgtctcctccttatctgtaaccctgatagtagcccctaacttctgcttaaatgaactcatgtaaccgatcgcgacttctgatgttggagttgttgtcattctcgactggtcgatctcgatgtgagaaccgtagagacaaggagtggtcgacaacaccatgcgaagttcaactgttatgagtaaatttaaattgaagtccaaaaaccgcctcgcgtaacggacccagaaatttccggcggccat

SEQ ID NO: 50580 - DNA, 339 bp, Oryza sativa
  Clone ID: PAT_MRT4530_53052C.1
atggcgttgggcggcaacggcgacgcggcaaggaacctagtgctgcgaatgggtcggtggcgtggatcggggcacgacgacgagctcagcgaaacagcgacgaaaatgaggggcgtcgcatggggccacgccctcgcccaacgcatcgcccaactcatgcctcgacctgccctgacaaactcagacgaagaatgggtgtctcactttggctacgtggtcttcatgttggtagcggcagatgcggacgtgttgcgaatctctgatgtggcaggccagggccgaacgccaaataagcacactgtgaatggccttatctttgatatttcatcatattcatga

SEQ ID NO: 50581 - DNA, 143 bp, Oryza sativa
  Clone ID: PAT_MRT4530_53053C.1
gcacgaggggcagtggaaaatagatcatgtccttgttgtttaaattccagttatttctggaatactgcaacacgtttgtatataaccatttgttggatcaaactggaatgagtttaaatgaaaattgtcaagctacatgatgc

SEQ ID NO: 50582 - DNA, 375 bp, Oryza sativa
  Clone ID: PAT_MRT4530_53054C.1
atgtcagaccgtatgatgtcaaacgagtacgcaacaagatacatccagcatgtatctacaaagaacgatctcgacaaatgcagagtcgtcgtgccatacctaccaacgaagaccgacaacctatctcatagcaccggccatagctgcgctattcgagaaaaggtgattgagagactcctacttcttgttcttgaaccagtaggacgtagcgatctctcacgccttaacttccagtggtcgaggtacgactacagcaatagcgtagcggtccttgcaccacgacctcaaatggtcgactcaatcatagcaatctctcgtacatttacttcaagtggtcgagttaaggctagacctggttctcgaccagcggtgtag

SEQ ID NO: 50583 - DNA, 465 bp, Oryza sativa
  Clone ID: PAT_MRT4530_53055C.1
atgggctcacagagctgttgccatgttaaagcactattcaacagaatgaagcccagatgccttcaagaggagcagcagcataacaagaccagaacagtcaaggcagaaataaggcaaaacactcttcaagacatcttgtattctcctcagagctttcagggggaggcaattggagccccatcacctcggaggcactctccaaaggtttgcccaattaacccggattgttcttatgaaaataattctcctaacatccgggacagcttctccatcgatagaatctctattaggagccaaaacagcatgaggagagttagcttcagattacctgatgaatctgacatattcatcattcccgcacgcgaagatcctgaaagttgctccactgatgacgaatctgttgaacatgtaagtgaacaagacattgatgcaaggaaaatccgttatgctaaaaccagatactag

SEQ ID NO: 50584 - DNA, 406 bp, Oryza sativa
  Clone ID: PAT_MRT4530_53056C.1
cccacgcgtccggttacggtttgttccacctcttctgagatttctggttattgccaagtatctggtctgttatattatggggaaacgttgactgtagttgtgttttcataccatgttctttcttaaacacgaacctagagtaatgtatttctgcaatcataatgtacttgcattggctggcatctgcatctacattttgatgcagtctacctgcatctgctatggcttttctttattacaacgaggcttgctcaagggacagactttatctacagactataatgatcgatactgtgctgaaatttaacatactgacctgtacaatactcaatatctcaaaccttggacagacccattaatatcaccatgttgagtggattcaaagaagactgggcgcccagccaat

SEQ ID NO: 50585 - DNA, 285 bp, Oryza sativa
  Clone ID: PAT_MRT4530_53057C.1
atggcgcgtgctgcgccccgcgggaaaggcaaggtgggggcagacagcgccgtcgtgtcccgcgagccacgaccagccctgtcgccccgccaaagccgtcgtcacgtcgatcgatccatcggtattacttctacgcgcctgcgctgcaggccaggccagcggaaagtcagcgacgtactactacccctacgtgccgacgtcaccccggcccgagaggatgggtgggaggacggcaaggggaagagcttgttggctaaggtgtggaggtgggcaaggaagacgtag

SEQ ID NO: 50586 - DNA, 2060 bp, Oryza sativa
  Clone ID: PAT_MRT4530_53058C.1
atgtcgtcctccgccagcccgtccgtcgcgccattagccaaatacgcggagcatttgtccaatctggtagcgattccaagtctgtcacatgagaaccattattttctcggtccgattggcaatcttgaccctactgaattcatcatcgccgaaaccaacagaatcccctttagattagccaaccctaacctgggccactggaaaaacacattcaaatcttggccatctcttgagaaaacctccctcgagaaaagctgggccgtgtggtataagcgtgtgtcggctagcaagcaagttcactgggacgaacttggaattagccaggcacttgcccacaccatagcaaagttggctaaggatgaacccttgatggccgcagccacctatttctggtccaataccatcaatgccttccttttcaaccaagggccgatgatccccactttacttgacattaccatgatcaccggtttggacgtgacctcatcggctaaccccatgagcttaaacaccaagaaccagttcgacttcagaactaagagcataggtggctggtccggctatgtagcaacatatatgggaaaaggatttgtcacctcctgagaactcgaagccttccttctgatgtggcttgagaagtttctcttttgtggatcaagttgcggccccacaaccaactggcaatttttagccgaagccctggaaacaaagaggcaatttcctttaggcaagatcctcctcggctatttgtatcaaacactgaacaacgcatcggctaagattgctatcggctcagttattagtgcaagcgggccatggtggttgtcgcaaacttgactaaacctgatagccatgaaagctgtcaaccggccacctgtgacagaagctgaattcccaagattagagccgactacaaatgatgatggagaagagcgcacccatcgcaaatgtatgtcctatggagaatatgcatccacaccagccgatgctggagcaaaattatcggctgagctactcaaggattggttctgcagcttttatgaaggctttcagaaagaacctcaggtttggttcccttatgaagactcattgaatcttgatctcccatcggactttagatttgaagatatcaatcatgagagatatcagaaatccagagaagtcttctcagctgcgatcagcccatgcatccttcgtgttggcatccaccaaggaagaaatatacaagtgtccaacgaattctaccatccgatgagctcagccaggcaatttggaatgggacagctaccaatcggcatgttctttgccgataaaatccaatgccgaggagatatttcatcaaccctgatgatggatcggctactcaacatcccaagacctcctttgggcatcattgaaaacatagagctggcaaagttcaggagcaggaacttcgatagatggtggggagaatggaaacaacacatattccatcagtcggcttccatgtatatgacagatctgttccctgatgttatccctccgacaacagaatcttctcctccccacaaaaggaacagcggcagggatatagagtatgctccaggcctcttgccaactggtggtggattaacccctccaggcctctgcttcaatggcaaatgagagaaccaaccgatgttggcaggaaaagaaagatcaagacactggcaattgatccatcggccctagctcctaagaagaaagctaagaagccaaaacccaagccatccgatgacctacctaccttagatccatctgtcaggtacgccatgatcgaggaagtcgcccacacgataaccgaaaccacgatgatcgtgatcggcgagggccagacaacactagtcacggccgtcgccgtaacgacgaagatggaggagatcggcgtcgagacaacaacgagagacgaagacaagattcccgagatccaggtcgtcaccctcgtaatcgcacgccggaaccaagcgacccatcgtcatcatcatcatcctccgcgtcctcttcatcgtcagaccgacatccacgaaggtcacgcgaccacc

SEQ ID NO: 50587 - DNA, 4695 bp, Oryza sativa
  Clone ID: PAT_MRT4530_53059C.1
atggccggcggcagcgagtttgatatccaggaagccgcggcgtcggcgtcggcgtcggcatcggcgtcggcgtcggcgtcggcgacggcggcggcggcgccgttgctggagaagaagatcacgtactgggaaggttgccctggctgcgccgtcgagcggaggaaggcggagaatcccggcgtcccctacctgcagttcttccacatctggatcatcatcctcgtctcctgtttgccaataacatttatatatcccttcctgtatttcatggcgcttgacaacctggtatcgggatctcgtcgatcctcggcgtccgccgccgccgcgcctttccctaccaccgccgcacccgcgtctcccgaccccgcacccatcaaccctagtccaccacccatcactgccaacaccagtccaccttccccgtcatcctcgtcatccgtcgcctccaactccggtgacatgggtgacaacggcgacctcaaggccgcgatcgacgccctcaccaagaacgtcgccgccatgcagtcgtctatccaggccaacgccaaggcgatcgagaacatcaccgcatcatcctcaggctccggcccacggcaccactccggcgagcaacccccagatcgcccccccaagcattggcgcccggagatgccgcgctacgatggcaagactgatcctctcaccttcatcaacaagtgcgaatcctttttcttgcagcagcggattatgccggaggagcgcgtctggatggcttcgtacaacctccacgacgacgcccagctgtggttcatgcaaattcaggaggatgagggcactccgacatggccatgcttcaaggacctcatcaatctgcggttcgggccaccgctccgctcgactccgctcttcgagctctcggcctgccgccggaccgggacggtcgcggagtactcgtcgcagtggcaggcgctgctgccccgcgcgggcaaactggaggaggcccagaagatccagctctacaccggcgggctcctgccaccgcttagcctccaagtccagatgcagaacccccagtccgtggcgtccgccatgagtctggcacggcagttcaagctcatggccgaatacacgaccgcgccggccaaggctccgggccgcggcgtcctgggcgccccacaagcgcgtccggctctgccggcacccccgccgcaccctgacaagacaccggcggtcaccaaccagggcgagggccgccaggcgaagcgcctcaccaaggaggaacaggcggaacgccgccgccttggcctctgctacaactgcaacgagagctacacccgggggcacaaccgtgtttgccggcgcatcttccacattgccggggtggagctcgacgacgacgccgccgccgacgctcatgaggagccgaccacggaatcgccggtcttctccctgcacgcggtggccggcgtaccgcgcggcgggacgctgcagatcgcagtcaccatcggcggtgcgccactcgtcgccctcctcgacagtgggtcgacccacaacttcatctctgccagcgccgcgccacgcacgaggcttccggtggagtccagaccgcggctcacggcggtcgtcgccaacggcgagcgcgtcgcgtgtccgggcgtcatccgcgccgcgccagtcgtcatcgacggcaccaacttcgacatcgacttgtttgtaatgcctcttgcagggtacgatttggtgctgggcacccagtggatggccacccttggcgagatagtctgggacttcgccacgccgtctatggcgttccacctccacgggcacgccttccgctggaccggggtgacgtctgctgctgcaccatcgctcctctctacggtggccagcgcgtccctcctcgacgagctgctggcgtcgttcgcggacgtcttcgccgaacccgtgggcctaccacccccccgcggccgcgatcacggcatagtcctcaagccggacgcggcgccggtggccgtccgaccataccggtacccggcggcccacaaggacgagctggagcggcaatgtgccgccatgatccaccagggcatcgttcgccgcagcgactccgcgttctcatcgccggtcctcctcgtcaagaaagccgacggcacctggcgcttctgcgttgactaccgcgccctgaacgccctcaccgtcaaggacgcgttccccatccccgtcgtcgacgagctcctggacgagcttcatggggcgcgcttcttcaccaagctcgaccttcggtcggggtaccaccaggtgcggatgcgaccggaggacatccacaagacggcgttccgcacccatgacggcctctatgagttcctggtcatgccgtttgggttgtgcaacgccccggcaaccttccaggcgctcatgaacgacgtcctccgcgatcacctccgccggtttgtacttgtcttcttcgatgacatattgatttacagcaatacttgggccgatcaccttcgccacctccgcgtcgtcctcaccatcctgcgccagcatcgcctgttcgtgaagaagaccaagtgctcgttcggagtcaactccgtcgggtacctgggccacaccatctcggcgtcgggtgtggcattggaccccgctaaggtccaggccatccacgagtggccacagccccgctccgcgcgtgccgtgcgcggcttcctcggcctggcgggctattaccggaagttcgtccacaacttcggctccatcgccgctcccctcaccgcgctcctgaagaaggacgggttcacatggactgccgacgccgcggcagccttcctcgccctcaaggaggccgtgacgaccgcgcctgtgctggcgctcccggacttcgccaagcccttcatcgtggaatgtgacgcgtccacgtatggcttcggggcggtcctcatccaggacggccacccgatcgcgttcttcagtcggccggtggcgccccgccatcgctccttggcagcctatgagcgcgagctcattggtctcgttctcgccgtccgccactggcggccatacttgtgggggcgccgcttctacgtcaagacggaccactacagcctaaaatacctcctcgaccagcgcctcgccacgattccccagcaccactgggtgggcaagctgctgggatttgatttcaccgtggagtacaagtccggcgcgacgaacacggtggctgacgccctgtcccgccgggacaccgaggaggcttccctgagcacgatcatggcggtctcgggaccccgcttcgacttcatcgaccgcctccgccaagctcaagccagggacccggctctggtggcgatccacgacgaaatcgtcgctggcacacgggcggcgccgtgggcgatcacggacggcctcatcacctacgacggccgcctctacataccgccaacatctccgctgttgccagagatcgtggcagcggtccacgacgatgggcatgaaggggtccagcgcacactacatcgcctccaccgcgatttccattttccaaacatgcgtcgatgtgtgcaggacttcgttcgggagtgcatcacgtgccagagatataagacggagcacctccaccccgccggactactgctgccgctgcccgttcccaccgtcgtctgggctgacatcgggctcgacttcgtggaggcgctgcccaggtccatggtctcggaccgtgacccggtgttcacctcgctgttttggcgcgagttgatgaggctgatgggcgccaagttgcacatgacgtccgccttccaccctcaagcagacggccagacggaatcggcaaaccgcgtcatcgtcatgtacttacggtgtttcaccggcgaccgcccccggcagtggctccggtggcttccctgggccgagtacgtctacaacacggcgtaccagacttcactccgggagactccgttccgcgtcgtctacggccgcgacccacccaccctccgttcatacgagccgggcgaaacccgggtggctgccgtggcacgtgacatggaggaacgagaagccttcctcgccgacgtccgatatcgcctggagcaggcgcagttggtgcacaagcgccactatgaccgtcagcatcgccacgtttcgtaccaggtgggtgattgggcgttgctgcgtcttcgccagcgcaccatgtcttcactgccacaagctacctccggcaagctcaagccgcgcttcatcgggccgtacctcgtcacggagttgatcaatgacgtcgccgtccggttggctcttcctccccaggcgcgcatccacgacgttttccatatcagcgttctcaagaagttcgtcggcgtccctccagcagcgctgccagagctgccccccatccaccacggcgtggtcacgccggagccggctcgcgtggaacgggcccatctagcgcgcggcgttcgtcaacttctcgtgcactggcgtggcgaaccggccgaatcagctacttgggaagacctcgacgccttccgcgagcagtatcctcagttccagctcgaggacgagctgattcgcgaggaggggagagatgtcatgtggggcacggcctatacacggcgtcgccgggcgcgagatgtgcggagagctgcggagcgagccgcagcgcgtgtcgcggcgcagagcgcgatcaccgtgaccgtggatggcaaggacgggctcagtggctag

SEQ ID NO: 50588 - DNA, 1269 bp, Oryza sativa
  Clone ID: PAT_MRT4530_5305C.1
atggccgtgctgtcgaggcggtggcggcggctgcccggccttctcccgcggctggtcatcgacgcccgggagttcgagcccgccgctctccgcgccggctggcacgcgaggacgaagcgggccatggagcgcgtcgccggcgcggtggagagccttcttcccggagaccgcgccatcgagcggctgcggctcgacgcgtacctgctcagggacgagtcctacaccgtccgccgcgtcgtcgagcgcctcaacgacgccgtcgacagcggcaaggtcgcggccggcgggctggagctcgtgttcagggccaccggcggaggcggcgcgcccgatcaggatcagccgagcaagcggcaggcgcggcggctggcgcgcctcctggccgcggccgcctcgccgagcctgctgccctccgtcgccgagctttccctcgtcaacctgcggttcacgtcgccggcgctcgcgtccctcctcggccgctgcaccggcctggaggagctcggaatgtaccagtccgacgcggggttcggcgcggtgttggacgtggggcacgcgcggctgaggcgcctcgccgtgcacgccgtggacgaggccatgtacaagaaactgcgggtgtcgtcggcgccgaggctggagcgcgtcgtcgtcgccaactggttctgccgctacgcccccgtctcgttcggccacgtcccgtgcctcagggagctgcacttgaagaacaaagccgtttactaccaggaaccagtaagactaagcaaaatgttggccagcacaccgcacctcgagtctctgacattggggttctcatcttggagggtttgcatcgaaccagaggctcccaaacaacttgaaccgatgttcagcaagctgaagtccctcgttctgacaggaattttccgtgggtgcgacctctcgtggacattgttcttcctccaagcagcgccggttttggaggaatttatactcgaggtggacaaacctttagatgccaaggcaccgagtgatatttatggcgaaatgccgaagaccgacgatgtgacatggcagttcagtggcttcaatgaagaagaaatgcactggaggatagtggagcttgtcaaggagagagctgtgaacctgcagagcattgctctggatgacggatgccaagcctgcgatgttgtggcgaatgaatatgttctctccggtgggatcaaaaacaagaaaccggtgttgttatcagtgtcccagatcacaggatctcctcctattctcacccttgtatag

SEQ ID NO: 50589 - DNA, 271 bp, Oryza sativa
  Clone ID: PAT_MRT4530_53060C.1
gcttttataggtcatagactgccctcacagggcaacacaagtcttttcggcgcactttgtgcttactcatgtgcactcgggaagaatttcccgatcggtcacccatccctaaattgctctaggccaagcacgcttaacctcggagttctttagagatcagcttccggaaaagaagttgcaacctgttgatatgagtattctattaatcctattaagccctaggccgggatgttacattaatcaaaagatgcgggattttttttcttctaag

SEQ ID NO: 50590 - DNA, 544 bp, Oryza sativa
  Clone ID: PAT_MRT4530_53061C.1
atacgagtacataattgtcggtgagtgtgagcctcgggtaccaagcttaaagggaagaagccgcacccaacatccatgtggcgttcccccctagggggtcgggcctgtggatgggtggcatctatcccttccgagcccaaggggtcgggctgccccgacccctcctggcggtcaccacgtggccaccatgtaagtgaggttaggtggacactccccaacgcccacctaactgtatttaacgcaggcagaacgagcgcacaacgtcgcattaaatgtggcgtgttgcgcgtctgaccagcctgtgaccgatacgtgaccggccgaataacagatgggatggtggcaagccacgcacgccctagccgtatgtcaggcggcatgcggcaggtatgccccgtcccgtcacgatgataagaggctctacgcctttcaaccgtccggaatcgtcttgaccactctgtacgtgcccgagatcgtgttcacggtgcatgcgcgtccccaagtcctcctccattaaatggtgaatgacgagggctttccccgt

SEQ ID NO: 50591 - DNA, 218 bp, Oryza sativa
  Clone ID: PAT_MRT4530_53062C.1
tcgcccacgcgtccgaacaatgatgctgatgttcatacactcaatataggattgcgtctgttctaattcaacaatgcatagccgtagctaattcatttactcgcttttgcaccttatacaaattgtgacgtgggtttgtttcctagtgtactaggcttccctagaacgagtgtaactggccctttttgcgttggccggctccgtatggacaaccttct

SEQ ID NO: 50592 - DNA, 528 bp, Oryza sativa
  Clone ID: PAT_MRT4530_53063C.1
atggcgaacctcccctccaccgccgccgccgccgccgcagacgcctccgggttcaagctcttcgggaaggtgatccagcccgacggacagcggggcgtggaagagagcgcggcggcgcaggcgccacctcatccgcatccgcctgcgccgccggtgatggaggcggcggcggcggcggcggggacgtcgcagactctgcaggcggcgggcggtggcggtggcggaggagggggaggagggggagagccgctgccgtgcccgcggtgcgggagcagggagaccaagttctgctacttcaacaactacaacgtgcggcagccgcgccacctctgccgctcctgccgccgctactggacggccggcggcgcgctccgccgcgtcgcctcggcgtccccgggaaggcgcaggccccgccccagcgccgcccgatcggccgccgccgccgccgcctccgcctccgcggcgtctccccccgccgccgtccccgccgcctccgagggggcggagagcgttgactcgcggtcgtag

SEQ ID NO: 50593 - DNA, 103 bp, Oryza sativa
  Clone ID: PAT_MRT4530_53064C.1
atggcacctaggcaacgtaacagtcgacaacgaggcgcccgtggtgactttgtcaatctccaagatggatttgccagcacagtcttcgaagatgctcataggg

SEQ ID NO: 50594 - DNA, 155 bp, Oryza sativa
  Clone ID: PAT_MRT4530_53065C.1
tcggcacgaggccagaatccaccatggaacacgttgaccagaactgagcgcgctttccagaagcaggacggtgtcttcctcgccagcaagaagtttgccggcaagaagaacggcccgcgctggtaccaggaagtcggccttggcttcaagacgcc

SEQ ID NO: 50595 - DNA, 915 bp, Oryza sativa
  Clone ID: PAT_MRT4530_53066C.1
atggcgcagcagcactcgccgcctccacctcctgccccgccgtcacctccgcccgcgctgccgtgtgatccgatgccgccgccgccgcgccatgacgacaccacgctcacgctgtcgctcgcgccgcccgccgccgctcgcccgctgcaggccatggtggcgcgggccaagtgctcgtcgccgaccggggacgcgccgccgtgcaccgagtgcggcaggcagttcctctcgtggaaggcgctgttcggccacatgcgctgccaccccgagcgccactggcgcgggatcacgccccctggcggtggcggcgcaggcgcggcgtcgtctaccgccgccagccagttcacgctcagggagcgcgaggtcgccgccagcctcctcatgctgtccggcgctcaccccgcccgctccggcgccggcaagggcaagggcaagaagcgccttctcgcccccgccgccgccgctgctcctcatcattccccggcaacctgcgccgaccacaagtgcgccgtctgccaccgcgggttcgccaccggccaggcgctcggcggccacaagcggtgccactggccggatcgttcctgtgccgatcaggcgatatcgatgctcgccgtctccaccgccggcagcagtagtaccactaccacgtcggcatcacctccgccggcgccggcgaccgccgccaccgcgctggacctcaacctgaacctgccgcctccattggcgctttggtgtatattgcttttgctagatttgtgtttgttaaattccattcgaggcataagcggctctctggaatggaaatctctgcaagttcttagctttggttacgtgtgcctggttcagataagagcgtttctaatcgttctgaacacagagataggtgtgctgattgatcagaagagcgctttctaa

SEQ ID NO: 50596 - DNA, 600 bp, Oryza sativa
  Clone ID: PAT_MRT4530_53067C.1
atgggcagcgtcaaaggtgagcggctgaccggtgtggagctctctgcacaagtgtcaagacgaggcaacaaggccgtggctagggttggggattccagcggctatgatggccagaggccagggcggattgagagaggaggctgtgtgcacgacggtggcgaagtatcccccgtagtggaacggctaattgtgccagcggcaaggaccgtcaaagaggaggacgcgctcgcctgctctgtcgttcttcttgctgtccacccacccgtccaccatctcgcctcctccaccattctcctcgccgcgcacccacccgtccaccaccgctcctcgccgcccacctgcctgtccaccactgtctcacctcctcccccgttctcctcgccgcccacctgcccatatgccgcctcgcctcctccgtcgttctcctcgccgcccacctgcccgtctacgcagatccagccttgctcctatgatctcgaggttgagggtgctatcgatcccacgctgggggtgggagagcgcaaccttcttgtgcgtgatgaggaagggcgcgtcggtggcggtggtggcggagagaagggcggcgacagcgaggagtga

SEQ ID NO: 50597 - DNA, 591 bp, Oryza sativa
  Clone ID: PAT_MRT4530_53068C.1
atggcgatgcgcgctctggtctccaagctgagggtccccgcggctgcttcccgccgggctcttccgccgtttcgatccttctccgccgcctctcaggataaggttggcggaactactgcacgcgctgccgctaaagaagggactccaatttctgataatagcaggaaggtcgagaagttctacaggaagctgcgatggaagattgaggaaattactatgactgacagactgaatgagttctacatcccaccaaaaactcagattgatttatcctatatcataatttaccgaaaaataagtgcattcgattctatttcatttactgcccggcctcctctgccaagtgacattgtttggaatcccgctactggccgcgacatatctctacttcttcagatcccatcactgaagagatcgagcatgctggtttcagaaaataatcaacaatggtgcttgcctattaatttatgtctacgtcacctgtttgggcctacaattgccatgctttacagggagcttcaagatcatgagaccttggattctcaagaatcgatccatgaagctgaagaacaccagcacagaatcggctga

SEQ ID NO: 50598 - DNA, 518 bp, Oryza sativa
  Clone ID: PAT_MRT4530_53069C.1
cacaaaaaactcaagaaatacttatattttgggatgaaagagtacacaaattccatatgatttgtacatagagatggattcagagggagacaaggacaaccaaaaaaatcacagggggcaacacagcccacagaactaataattaagcaagcaaggtggcgtgtggacggcggaataattttggacgctgcaaaaagccctcccctttgaaccacaatcatatcccaacacgccacaaaaacacaagtggccaaagaagatacaattttgtacacaaactactacaaagactcatgtcgaccgtgtagagcttctctggaccaccaccggttgcggactcggcgaaaattatcatctcacaaacacacagaaaatgattgactttgcactataaaattcccagctaggactctagctaggaggcttaaatcacaagtgataagctctggctgctgtgcagaggaattttgtaatgagttggttcgcttgtttctgaagccagaccggattaccaggat

SEQ ID NO: 50599 - DNA, 1988 bp, Oryza sativa
  Clone ID: PAT_MRT4530_5306C.1
gctgtcgcggaggcggatcccgaggcggcgacggcgactgtcggcggcggcggtttggtttccctcttgtttgtattttaatccgtcgtgggtgggtgatggaggtggagcgtcgtggtggtggggaggtgaacggggtggtggagatggaggacgcggtggggatactggtggactacctggtgcggccggcgctgcggaaggggagcaggatgacgccggagaaccaggccgacgtcgcgcgccaggttcatatggcagtcattctgtataactattaccaccggaagcagttcccacagcttgcttttgctgatgcaatgaggttcttcaaatgtgcatctcttactcttggtgacagtttgctcgcgtactccaatatggtccaccaacatgagaagagttctggaagtcctggggagggtgtgaatctctctgtgactgacaaagcagtcgtggatgcgtgtggaattgctgaagccctcgacgcaaaccaagactctccagacatggccatgtggccaatttcaaaggtcgctgtgcttcttcttgattcaactaggaaaagatgtctgctggagagtggttctgtcggtaaaaatgttcgctcccttttggagaaagagattgacacatctagcactagtgagcatggcagcaacaagccagaaggacaagatttagaaaatgaagagactggaccatatgtcctccaaaagttagcattttcagaggtggagcgtagaacagagattaagcggtcaagcttgcgtcttcttgatgagcatttagcatactcattgactaaaaaagggacaactacaaagctgttcatcttacagtacgagcaaactgcaaaaggcaacttcgcggaaatgcctattgaagaattgatcaagaggatgattggtcctgtagttgaaaaacatccataccctacaacaacagttgttgctgagagctatcacatactcccatataaggatattctgtttgactgcctgcacaggaaatggcattttgattcttcgctgagcatgccaaaggaagaaacacgtcgaaatggaaagtcttcatcgcattctgaaatagatgaaaattcaaaagagcaagaatataatataaaagggtcaactcaaaagaaaattaaacgagatataaaagtacttggcagtagtgacaagaactacagctgtaccagtagaaacaaaagaagcagtaacgtgaacagcaaaagaaaatctgaagtcttcagggccacagctgctgacggtgcagagggtcttgacagtgagatacccagagttaaaaatgcactgcctcctgttgtagatgtgtcaactatgaagttcgtgagctgttcagttaatgtaaaagaaacagcagcagcaaatgcaggatttgtggatatggaagcagattttcatcaaggtggcggtgctaaggacaacaaggatctgaagtttgcttccttcaagtcatatctgaaaaaacgggatgatcttcatcgcaagcaacgcatgattgaagatgaaactgttcaatttgatatggacatccagtcagtctttgctggaggggagtggacaccagaagcgatgtcactactagaaaaatatggaattcttgtcgatagcttagatatggtggaagttaatggttcatcctattctggagatggatatgaaaccttaaccattgagaggaagaaattgacagtggaaagactcctccgcaataaatgccagttgatgcaggagttggatgaggtctgccgtgagaataattggattcttccgagatataaagttatgccatcactaacagatggcatgtacgtggccaatgtagatattgcatgcctggagttcagccaaatgacatttggcgatccaaagacgaaccctcgtgatgcacgggagtctgcagctgccaacctgctggctgagcttcttaagaaggccgatgccaacagggagcacacctga

SEQ ID NO: 50600 - DNA, 495 bp, Oryza sativa
  Clone ID: PAT_MRT4530_53070C.1
atggtgggggccgaggggtggaggcggctgaggaggtgcagttcctaccgcggctgctcgtcatcgaccaacggtggaggagggcgaggtgttggcggatgtgtggtccttgcgcagaaagcgaccgcctacgcgcgggtcacacgtgtcggggacgacggcatggatgagacgctgctctccaacctcccctacaactccgactacggatacagcagtggcggcaatagctgttctacaagcgagcggctggcacggccggctgtacaagtgagcagggccggtcaggcacctgccaaagcttgcggtccgaatctagctgcaagaaattggcttggatttactggggctataccaagtttcttgactgtatatgtttgcaagatcaattccaaatatctctcagggctttcatcaaacaaaaagatggttggaaaagaaacaacaggtcaaatagctttggatgatattacaccaatggatatggctttgtaa

SEQ ID NO: 50601 - DNA, 213 bp, Oryza sativa
  Clone ID: PAT_MRT4530_53071C.1
cggacgcgtgggcagacataacgagcgttgtcagccaggaatgggctactccgatgtacttcctgtcacgctgtcgggcggtggtgaagcgccagacgcgtgggccaccagcacacccgaccagcgccgtggacgagcaagtgcagcgtgactgctgccagtaggtcgccgcggtcgactactgctggtgcaggtgcttggagctaaaccaca

SEQ ID NO: 50602 - DNA, 642 bp, Oryza sativa
  Clone ID: PAT_MRT4530_53072C.1
atggcaggcggacctagcgggtggcggcgctctggcgcggcgggcggtggctctcgggcgttggtggcggtgctaaggctcgggcggggaggcgccgccgctgggccgcaggaggccggatccgccgccgctgggccgtggggacgcgggatccgcaaccgccgggccacgacgacgacgacgaccacggcgaccatgacgacaggccaggccgcgggcggcggatgtgcggcggcaggagggggcggagggcctcctcctcctcccctctcccacctctctcccctcctccttccctgcgccccctctagcaacgatgaccatggcgaccaccacgacaacaatgacaacgacgggctgggccatgacaacgatgatgaccatggcgactgggcggcgacggccacctcggcggcgatgcgctgcacgtccgccctcgccgcattgggatggttggggcgctgcacattgatggcggttcagcctgggtctccgccccactcactccccccaccacgtggcggttcgggcgagggcctcggggcgaggcagcgcgagaacccgaggggtctgacgtggcaccccgaggccccttggctgcctctgcgtcgtccgaggtgcggggggagagccaggctgtag

SEQ ID NO: 50603 - DNA, 1237 bp, Oryza sativa
  unsure (1)..(1237): unsure at all n locations
  Clone ID: PAT_MRT4530_53073C.1
gggggnttggccngnggacttttcctggcaaccgaaagctccntttgncccggaaatttcccnaattattccaaagccttttattcccgaaattaccccgtccnnaaccctggcctttttttggaaaccaaaattgttccttnggaagggaaatttttggaagaaaagggggtgnaaataggaataaaaaaaaancttgaaaagccctaacncaacaccttgaaatggaanggaaaagggttgagnnattttatnccnncaccttcccanaanggaaaaagggggaaaggaaggaaaaaaanaaattcccgttgcctcccaaaanggccgccattggcctttgggngaaaccattttaaaggttttgaatttgtgggggaaatntggtttncctnnnnatagcaaaggaattgttttgnaccantaaacaaccctcccnttggccnttggaaattgnccctttttnnacaaaaattttgccttggggggnaagatttttttcctttaaacccccnccnatnggaanggaanaaaaccattttgnaaangccnccntggtttcccccattttgnnattgnaaagccnccccattcggggngggaggaattgaattttnanccccnnccccccaaggggcttnncnngggaagccattnntngggaattgccngttccctttcttgaattaatttaatttggcttggaaaaagactttttcccatacccaaannttcccttcccaaattttattcctttnccccccccncgnttttatngggtttcccnncgccctnccaagaaaaaaatttcccnccntttgnaattccttcccccgggaanaaaaaatttaaatatttgggncccggncccnaaaaaangggccgntttttttgggttggntaaaaannggccccccccccncnaaaaaaatttttntaattnaaaagggtttggcccccccccgggggaanttgccctnnccttnccncnggaaaacccaaaacnattggccttccnnnttncccaaaagtttattnggttttttttcctncccctttggggcntnccnanccntnngtttttggggttttctttngggttncccccngggggnnnaaaangaaaaaccnttnccccccccccctttngggnanttttatttnggggtnccccncccccnnngggncttccccnncccnnncccnnnnccnnttttgggggggttttccttccccc

SEQ ID NO: 50604 - DNA, 453 bp, Oryza sativa
  Clone ID: PAT_MRT4530_53074C.1
atgccgccaaacatcgacatcagagataagcctagacaaatccaatatggtgcctacggaggccgacaagagggatctagcgccatctctaatcacgatgagttcgtactcgagaaggaagactaccctgtcgtcgactacgtgttggttatctatgccgccaagtcggcgacagctagcacacgcaaaaatcaatctagggtttgcctcctactctgtgctgcgccgtcgctcgtagattacaccatcctgctcgccggcgtgcacctgcgatcgggagagcaactctccggaacctttgccttcgacgtcctgcaccgggagaaagcggcaataaggagagacgaaagcgctatctctgatctcgccgggcacggattcgaggagaaaggctaccctgttgtcgactacgagtcagatcgtcagaccgccatgtcgacaacagttagatag

SEQ ID NO: 50605 - DNA, 2647 bp, Oryza sativa
  unsure (1)..(2647): unsure at all n locations
  Clone ID: PAT_MRT4530_53075C.1
cccacgcgtccggagcgagcgagctagccagccagtgttagagcttgagctgcttgttcttcttctacctcctgcactcgcgtgctgcacaagtagctcagctagatagagcgtcagaaatggccagcaacaactcgagaacaaactccagggcgaactactccaacgagatccacgatctctccacggtgcagaacggcaccatgcctaccatgtactacggcgagaaggccatcgccgacttcttccctcctcacctcctcaagaaggtcgtgtcggaggtggtggccacgttcctgctggtgttcatgacgtgtggggcggcagggatcagcggcagcgacctgtctcgcatatcgcagctgggacagtcgatcgccggtggcctcatcgtgacggtgatgatctacgccgtcggccacatctccggcgcccacatgaaccccgccgtgacgctcgcgttcgccgtgttcaggcatttcccctggattcaggttccgttctactgggcggcgcagttcaccggagcgatatgcgcgtcgttcgtgctcaaggcggtgatccacccggtggatgtgatcggaaccaccacgcccgtggggccgcactggcactcgctcgtcgtcgaggtcatcgtgacgttcaacatgatgttcgtcacgctcgccgtcgccacggacacgagagcggtgggtgagttggccgggttggcggttggttccgcggtttgcattacgtccatcttcgcaggggcaatttcaggtggatcgatgaacccggcaaggacgctggggccggcgctggcgagcaacaagttcgacggcctgtggatctacttcctgggcccagtcatgggcacgctctcgggagcatggacctacaccttcatccgcttcgaggacacccccaaggaaggctcctcccagaagctctcctccttcaagctgcgccgcttgcggagccagcagtccatcgccgccgacgacgtcgacgagatggagaacatccaagtgtgataggacgacgagatgtcgtcgatcgtgtcctcttactcggaaaattaccagtcgatctcggtctcgtcatcactagctacgtctttgtgtgtgttttgtgtcgtgtcactgctgcttcgtacacgccggagagagttacataaaacgcgcgcgcgtgcacgggggagtggcgctagctttggttgcttggtggttcgtgtggggtacgtagattgctcgctctgttaattccggggctggagcctgctaattttgggcgtgtgcgtgtgccgcttgtgcatcagtctctgccgtcaaattgtgcgtgtgtgccaggtgtactatctctccagcagttgcttgttccacttcaattcacccccaaagtaattaaaaggatgtcacgttctctcccctatataaaacatctgcgactttatatggcagcgtgactgtgatgatctactctcccngccacatcttctatgcacacatgaaccgtgccgggtcgctcgcgttcggcggtgtgcgtcattatgtacaaagtgaaggtgctaattactgtgcacgtcagcttcaaatgtgggttcacggagaccaactacacgcaggtgacggagctctatcagaaacacaggggagagatagggagagggatttcgatttttttttctccacggcgaaatccgcgaggcggaggaggaggaggagggcgagatgggggcggcggaatccgtgccggagacctccatacacgaattcaccgtcaaggattgcaacggcaaggaggtgagcctggagatgtacaaggggaaggtgctaatcgtcgtcaacgtcgcctccaaatgtgggttcacggagaccaactacacgcagctgacggagctctatcagaaacacagggacaaagattttgagattctagcatttccctgcaatcagttcttgcgacaagagccaggatctgaccagcaaataaaggattttgcttgcacaagatttaaagctgaatatcccgtttttcagaaggtgcgtgtaaatggtcctgatgctgcaccactttacaaatttttgaaagctagcaagcctggcttgtttggatctagaatcaagtggaactttaccaaatttcttattgataagaatggcaaagtcattaacagatactcgactgcgaccagtcccttgtcttttgagaaagacatcctgaaggcgctcgaggattagatctcgtaccctcccccatccttcatttgcagaagtaggcaaagtatctggttgtaatatctagacctatgggatgctcaatagtgaatttttgcaatatattccttcttttgtgtagtgtatttgttgtctttatatattattatattgtaagtagaggttggctggttgggtaggcactgttttgtctatactggttttatatggcttggcttgaaaatttgtttagaaacctaagacattattatcaacgtgtaatatcgacaagttgaaattgtatgtagcgtaaggtttgtgtttgcactgtatttgttccaaaaagtggttaaaaaagaaaaaaatctgcaaagttctaaatcagataaaatttaggacaatcacatcaacatctgtaccacttttcaaatttttgaaagctagcaatc

SEQ ID NO: 50606 - DNA, 357 bp, Oryza sativa
  unsure (1)..(357): unsure at all n locations
  Clone ID: PAT_MRT4530_53076C.1
gccttnaccgcancaggcagnttgccgncaactgcantngtctccagggnttccttgtgttcaacgctgttggaggaggaacgggctccggtctcggttcccttctnctngagngtntctctgtggactatggcaagaagtccaagntcgggctaaccgggtaccngtcccctnaggtctccacctgtgtggttgagccatacaacagtgtccnntccanccantncctngttgagcacaccgatgtcgctntgctgctcgacaatnaggccatctatgacatctgccgccgctgcntngacattnagcgnccaacctncagccacctcaacaggcttgtnttccaggtnatntcct

SEQ ID NO: 50607 - DNA, 1098 bp, Oryza sativa
  Clone ID: PAT_MRT4530_53077C.1
atgaagacgatagcaccagttggcgtcacacgaggtggccggtcggagaaaatgcggagacaccagtcggcggcggcgaaggcagccgacggtgaagacgtagacgcccaaaacaacagcggcataataggccagccgtgcaggcggagacaccagtcggtggcggcgaaggcagctggcggtgaagacgtagacgcccaacgacggcggcataataggccagccgtgcaggcggagacaccagtcggcggcggcgaaggcaagccggcggagacaccagttggcggcggcgaaggcaagccggtcggtgaagatgtagacgcccaacgacggcggcataataggccagccgtgcaggcggagacaccagtcggcggcagacgaggcgaccggtcggtgaagtcgatgacgccgaacaacgccgtgcaggcgaagacaccagtcggcggcggcgaaggcaagccggtcggtgaagacgtagacgcccatgaacagtggcggagactccagtcggcggcggcgaaggcaagctggtgggcaaagacaccagtcggtggcggcaaaggcaagccggtcggtgaagacgttgatgcccaacgacggcggcataatagactagccgtgcaggcgaagacaccagtcggcggcggcaaaggcaagccgacgcccaacgacgacggcataataggccagccgtgcaagcggagacaccagtcagcggcggcgaaggcagccgacggtgaagacgtagacgcccaaaacaacggcggcataataggccagccgtgcaggcggagacaccagtcagcggcggcgaaggcagccggcggtaaagacatagacgcccaacaacggcggcataataggccagccgtgcaggcggagacaccagttggcggcggcgaaggcaagccggtggcagagacaccagtaggcggcagcaaaggcaagcctgtcggtgaagacgtggacgcccatgaacggtggcggagactccagtcggcggcggcgaaggcaagccgatcggtgaagatgatgtcgccatcagtaacagtggtgcaggccaaccatgaggatgggaccagtcggcaacaatag

SEQ ID NO: 50608 - DNA, 458 bp, Oryza sativa
  Clone ID: PAT_MRT4530_53078C.1
tcactcccttagctcatcttttccccacttgcttgcttcctgaaattttccttttccctctctccttcctgcgtcgccgccggtcacctgagtcgcctcggtgtacttcccttccagcttattgtggggaaaccttgaagggctccctggggtcagatccgtttgctcatggatcggaggtgtgcggcactggggatattgatgtgcgacgaaccgtcgtcggtatcggaggaccttcggcacagcaagggtcctttgacgaagcatctcgtttgctgtccatgattggagcagtggctcatggtttcagtgtgaagctggcagtcttccgttggggatatcattaggattgattcatttgtctcttttattgaaggaaaagtgtactgctctttgacgcactccatcaaaaatattttacatcaagaagtttatcttctcaaaaaaaaaaaaaaaaa

SEQ ID NO: 50609 - DNA, 603 bp, Oryza sativa
  Clone ID: PAT_MRT4530_53079C.1
ctaaacggcaagtctattatgccgccgtcgttgggcgtctacgtcttcaccgaccggcttgcctttgccgccgccgactagtgtcttcgcctgcatgactggtctattatgccgtcgttgttgggcgtcaacgctttcaccgactggcttgccttcgccactgccgactggtgtctccgcctgcacggctggcctattatgccaccgttgttgggcgtctacgtcttcaccgaccggcttgccttcgccgccgccgactggtatctccgcttgcacggctggcctattatgcgccgtttgttgggcgtctacgctttcaccgaccggcttgccttcgccgccgccgactggtatctccgcctgtacggctggcctattatgcgccgtttgttgggcgtctacgctttcaccgaccgacttgccttcgccgccgccgactggtatctccgcctgcacggctagcctattatgccgccgttgttgggcgtctacgtcttcactgctggctgccttcgccgccaccgactggtatctccgcatcttctccgaccggccacctcgtatgacgccaactagtgctatcgtctccacggctggccacat

SEQ ID NO: 50610 - DNA, 2163 bp, Oryza sativa
  Clone ID: PAT_MRT4530_5307C.1
atggggatcaagcccaagcttggcccgagtagtggtggcggatgggacggagtcggagtagcggcagtggatggtggcggcggatgtggacggagcccgagcgccacccttccgtcgtcgttgtccctccgcgagcgtaggcattgggggaccgcctcagcaccgcgatggcgaaggctccgtcggcgctgccccttcgctgtcgccgcggatcgacgcggccgctgcttactggatctccgcctctatggcgagtgcggcgtgacccctggtgagggcggtggagttggcgcgagcgccggcggagggccgaggaggacacggtggatgcgagaaatttcttcatcaactatgacgagcgggaacgggttcaacaatactactacacaatacattaggaccgatcaaggcgtcatcccgctacctcaagttgtaatttcaccaaagggggggtcaatgggtgattatacagccgattatacaggaatcggctatatgcaaaacctagctaacggtatgactggtcatggcaccggtctaaccgcatcctatgccgccgaaccaagtggtggttcggattgtgttgatagcttagagaatagcatcattgaagatatagccgaactagatgatggttcggattgcatcacaagtgaaagtgaaatagcattatcacctaagaccgaatcacaaatcggtcatgtcgatgttggaaaagataataacaatgtcttgcgagatagtggtgaaatagaatccaaagtagctatgcatacatatcaaaggccgtatcctgaacatgtagattcggtcccatacccgcaaggatttgaagtgcccaacttcacgaaattcacaggtgaggatgctagaacaacaatggagtatatcggccaatttattgaacaatgtggtaaggtcggtagtgatgatttgcttaagttaaagttgtttcctctttctttgtcaaactttgcatctacatggtatagtatacctgctcctaattcaatttctacatggtcacaaatggagcatgagtttcatggttatttcaaagatgtaagcttaatggagcaaagaccgattgatacttcatcggtcacttgtgaaactatttcggttacatctatgcctaagactggaattgttagtgattctctccctgttagtcctattgatgttgacaaaaagaaagggaaaagtgttattattggggatcttcggcccaagaataggataaaaaatacgaaggccgaagatcataaagttgcaaagaatgagtcatctagttcccaaaagactaaaaagccgaagctcacttttgagatgcttatggctaagtacaataaaggatcagccggtcaacgacttgataatcaaactagtaattcaaaaagaccaagatcatcttgtaggaagggatttggtcaaacaccaaagcaatcggagccatcaactatgccaactccatacaaccctccgaatcggtccggtagatctaaggtgaaaaaggtgaagaaggtgtgggtgaggaaagaagccaaagctccggaggtcattgctatcaaggagaaatctcaagatgttcaagtacctactgaagatgcggcgaaaactatacaagcggagaagactgaagccgacgccgttgctgtcgacatcggcagtctgaccgagccagccggccggccaatgcttgatttcaaaagtttggacgaaattggcaaagtcatagaccaagggtggtctgaccggcattgcacggccggtctgaccggtggtacccgcggtctgactggatctgcatggccggtaggccgaagccgtgccgctcgagaatattacttgtacggagttgaggtaaatcttggctctcttcggtatttcaagcaagacgacttgacggttgaagattacaagactttgatggaaagcaatttggaagacgtcatcgacaagcgtttgaagactttgaaggagatgaagacacttcaagacggtgtttttagagagcaattaatgggagatagcttgaagaaatacttccccagcatttggctagatcgaggtggttggcgactccatatcatcgcaaggcgtttaggtgttgcgattgtgcttgtcgacttgtcaaaaaagttgccaacacactcgatctag

SEQ ID NO: 50611 - DNA, 3027 bp, Oryza sativa
  Clone ID: PAT_MRT4530_53080C.1
atgagacaactagatcgtcagatctataatacacccggcggattcaaatccccaaacaagagtctcgtgcgctactctcttttattattgccgaattcatgtttcgacagttggcgcgccaggtaggggttgcatcgagtttccgtcgacaagtgcgatggaatcaactgggattaatctcaacaagtattgatatataatcacaattgattttctggtatttttcccccttggttacatgcgccgccgcgctgtgaattcctccgatcactgcggggtgaagaaaagataagccatggagaaaactggcggagtttccatcggatcgtcatatcaattgtgtccacgcatgcacagggagtgattaactttagtcaaaagccttttgcgtttacatccaaacgtgcaggcgtgttgcatgcatataccaatataagaaacatatgtttttgttaattctgtataccttgccgctactaatcagactgatttgtttacatgcatgtattatcggagctgtcatattacgttgtggcgtcggactttaccgagttaggaccacgcgtgaagcctccgactgagatttcatccagactcgggtccgcgatctgtacacacgcatggatcgtcactactcttgccgagtggtgtttccgtctgcacggctggcctactatgccatggcctattatgccgccgttgttgggcgtctacgacttcaccgccggcacgcctccgtcgctaccgactggtgtcctcgcctatacggttggttagtcacaccaccgttcgtgggcgtctacattttcacccaccggcctgccttcgccgccgccgactggtgtctccgcctacacggcaggcccattatgccgccgttgttgggcgtccacgacttcaccactggcctgcctccgtcgccgccgactggtgtcctcgcctatacggttggttggtcacaccaccgttcatgggcgtccacgtcttcatcgaccggcttgcctttgccgctgccgactggtgtcttcgcctacacggctggcctattatgccgccgttgttggcgtctatgacttcaacgccggcctgccttcgtcgccgccgactggtgtcttcattgttattaatggacgagccaactcccggtgcttgggggctatgactagtcgggtagagtgtttaaacgtaaggagtcatctgctcggggaaatcaaacttatctcctacgcttcagggatggatcagtcagaacatcaccaccggcttgcctttgccgccgccgactggtgtctccgcctatacagctggtctattatgccgccgtcgttaggtgtctacgtcttcaccgatcggcttgcctttgccgccgccgactggtgtcttcgcctgcacgactggtctattatgccgccgttgttgagcatctacactttcaccgaccggcttgccttcgccgccgccgactggtgtctccgcctacacggctggcctattatgccgccgtcgttgggcgtctacatcttcaccgaccggcttgccttcgccgccgccgactggtgtctccgcctgcacggctggcctattatgccatcattgttgggcgtctacgtcttcaccgccggctgccttcgccgccgctgactggtgttttcgcctaaacggcaagtctattatgccgccgtcgttgggcgtctacgtcttcaccgaccggcttgcctttgccgccgccgactagtgtcttcgcctgcatgactggtctattatgccgtcgttgttgggcgtcaacgctttcaccgactggcttgccttcgccactgccgactggtgtctccgcctgcacggctggcctattatgccaccgttgttgggcgtctacgtcttcaccgaccggcttgccttcgccgccgccgactggtatctccgcttgcacggctggcctattatgcgccgtttgttgggcgtctacgctttcaccgaccggcttgccttcgccgccgccgactggtatctccgcctgtacggctggcctattatgcgccgtttgttgggcgtctacgctttcaccgaccgacttgccttcgccgccgccgactggtatctccgcctgcacggctagcctattatgccgccgttgttgggcgtctacgtcttcactgctggctgccttcgccgccaccgactggtatctccgcctgcacggctggcctattatgccgccgttgtttggcttttacgtcttcaccgccggctgccttcgccgccgccgactggtgtctccgcctgcatggctagcctattatgccgccgttgttttgggcgtctacgtcttcaccgtcggctgccttcgccgccgccgactggtttctccgcctgcacggctggcctattatgccgccgttgtttggcgtctacgtcttcaccgccggctcaccttcgccgctcaactggtgtctccgcctacacggctggtttattatgacgccaactagtgctatcgtctccacggctggccacatcgccgccaccgcaattaggcgtcatcaccttcaacgcaagctgtctacgtctactgccgactggtttcttcacttccatggctgcatgattctgccagtgttgattggccttatcgtcttcaccgccgctaccactaccgatggacgtcattttcttccgtcgccgactggttatgccgcggccgattggtgtttttatcttcacaactattcatcttcactaccggtttgcttctgttgccgccgactcgtgttcacttcatcacggctatgtaactttgtcaccatggtggagcaacctcatctttattatcttcggcattggcaaactctattgcctctacttcgcaagctttgctacttcgccgaccacgacatctacaggagcctcgacatctcggcatgcgtcaacaagtataatgctatgttattttactacaagtggtgttccaatattcaagatttctactcggacatcttctttgcgtatattcactcaagcaatgactac

SEQ ID NO: 50612 - DNA, 364 bp, Oryza sativa
  Clone ID: PAT_MRT4530_53081C.1
gcacgaggcgtatgtcttgaaacctacctattaggatcttgcagcagtattttcgtttacggtgggtatgcaacatactgtgtgtggattaggaatgccaaatatgctcaaagtatgtcttcaacaatgtgttctattgtcttgaacctacctattaggatctttgcagcagtattttcgtttacggtgggtatgcaacatactgtgtgtggattaggaatgccaaatatgctcaaagtagctagtaactttgggaggaaatattcaaattgatagaaaggccaaaaatattgagtgataaatattttcatagctcagaagcaccctagatttcgggtgagaacattttaatgggtttactcca

SEQ ID NO: 50613 - DNA, 773 bp, Oryza sativa
  unsure (1)..(773): unsure at all n locations
  Clone ID: PAT_MRT4530_53082C.1
atcgatctcgagtcgaaactccttcacactcgttcttcctcctcatctctcgtcatgaagttccagtctgtctgcctcgccttggcctcggccaacatggctctcgccaacaacctcctggcaaacctcgctgactcttggatccgcaacaaccacgagactcagcggccttactggtacggccgtgctgtcgtctttgagggttacgaagctgccattgagttgaccaagaaccagaccctggttgactggtaccgtggccagatggatctcgttgtcgctgacaacggaaccatcatcaactacgacatgtcgaagcactcgcttgacaactaccgcatcggaatgaacctgatctggtggtacaagcgcaccggcgaggagaagtacaagcaggctgccgactttatccgtgacaggataaaccagcaccccagaactcccactggcggtttctggcaccgcgagcccacttaccccgaccagatgtggctcgacggtatctttatggctgatagcttctacgctgtctggaccaaggagtttgatgctaagaacaccaccgcctgggacgancttgtcctccagtgggacaagatccaggaggtcaccatcgacnaggagaccggtcttcccgtacacggatttgacgagagcaagattgctgtctgggccgaccccgagactggtgcctctcccatcgtcgggagccgcgctgttggctggtacttctggccccctcacgaaggttctcgacgtcttccccaagtctc

SEQ ID NO: 50614 - DNA, 321 bp, Oryza sativa
  unsure (1)..(321): unsure at all n locations
  Clone ID: PAT_MRT4530_53083C.1
ggtcaggacgcatggcntgcagtggtgccccggcatgcggttcaagatggcgttcgagacagaggactcgtcgcggatcagctggttcatgggcactgtcgccggcgtccaggcctccgaccccgtccgttggccgcagtcgccatggcgtctccttcaggtacacctacacggcaccaacatgagacaaccccaactcgatcacgatagagtcgtagagttcttgatcaattggcctcctcgcaggtgacctgggacgagccggagctcctacagaacgtaaagcgcgtgtgnccgtggctnggtggagctcgtggtcga

SEQ ID NO: 50615 - DNA, 1140 bp, Oryza sativa
  Clone ID: PAT_MRT4530_53084C.1
atggcgaagcctcgcaagaactccaccactaccaacaccagcagcagcggtgtcgccgccgccgccgccgcggcggcggtgaagccgaagcgcacgcggaagagcgtcccccgcgagtccccctcccagcgcagctccgtctaccgcggcgtcacccggcaccggtggacggggcggttcgaggcgcacctgtgggacaagaacagctggaacgagtcccagaacaagaagggcaagcaagtttacctcggggcgtatgacgacgaggaggcagcggcgagggcgtacgatctggcggcattgaagtactggggacccgacaccatcctcaacttcccgttgtctgcatatgaaggtgagttgaaagaaatggaggggcaatcaagggaagagtatattggatccctaaggaggaaaagcagtgggttctcaagaggagtatcgaagtaccgaggcgttgcaagacaccatcacaatgggagatgggaggcccggattggccgtgtttttggcaacaagtacctctatctcggtacttacgcgacgcaggaggaggcggcaatggcgtacgacatggcggccatcgagtatcggggcctgaacgccgtcaccaacttcgacctcagccggtacatcaagtggctccggcccggcgccgacggcgcgggcgctccccagaatcctcaccccatgctgggtgctctgtcggcgcaggatctcccggcgatcgacctcgacgccatggcgtcgtcgttccagcacgacggccatggcgccgcggcggcggcggcacagctgatcccggcaagacattcgctcggccacacgccgacaacgtcggcgctcagcctgctgctgcagtcgcccaagttcaaggagatgatcgagcggacgtcggcggcggagaccaccaccaccagcagcacaaccacctcctcctcgtccccgtcgccgccgcaggcgaccaaggacgacggcgcctcgccgcagtgcagcttcccggaggacatccagacctacttcggctgcgccgccgaggacggcgccgccggcgcgggatacgccgacgtggacggcctgttcttcggcgacctcgccgcgtacgcgtcgccggcgttccacttcgagctggacttgtga

SEQ ID NO: 50616 - DNA, 241 bp, Oryza sativa
  Clone ID: PAT_MRT4530_53085C.1
ggaaattcaactgctgatgagttctagcagttaaaaataccatgaaaattcacaataccaagcagcattacatgtctatagagcgacacaattgtcgtactcgtacaattatctggcaaagagcttgtggcggtattaatattcaacgggcagagagagaagtatttcttcagaattataacattgcatatttgtgattcagacagacaaaactttcatgtcttttagaaaagctcaggtg

SEQ ID NO: 50617 - DNA, 243 bp, Oryza sativa
  unsure (1)..(243): unsure at all n locations
  Clone ID: PAT_MRT4530_53086C.1
gcacagaagaggttggctcatcgtatcacataaagatgattttcaaaggctttctttctcgtattggtgccaatgagaactaggtcaggtgactgtagatgttacgcaggtgcttcatcaaggcagtttgtagatgtgatcaagtttatctcggtgtcttgcattcacctgttgaagactgttattcttgtaggctgtagttgtgttcattggttaaaacagcttnttaacaggcaatgagct

SEQ ID NO: 50618 - DNA, 1108 bp, Oryza sativa
  Clone ID: PAT_MRT4530_53087C.1
gaggggggggctaccgatcgctaccagatcggtagggcgatcgatcgcccattagaactccccaaggaagatgcctggaaggaaaacaaagaaggagaaagcatcaaaaccacccaagttcaaaacccacctcaaagccaaactcctagccaaaaccaaaatacagctcaaactcaaaatcctaacataacacagaatcaagttcaagctcaattctcaatttatagctcaaatccaattcaaacacaactttctctccaaaaccaacttcccattaaaacacacattcccattcaaccacatatttccgttcaaacctaagttcccacccaaatacaataccctgaaacacaatcccatcaaacctatcccccaatcccatgcacagaacaatcaaatccatatcccgcaaatacaaatcccacaaagtgacatcccacaaacacattttccacaaaatgacataacacaaatacaaattcctcaaaaatagaataccccaagttcaggaatcccaacccacctttgcacatatgcaagtgccaaatactcaagcaactcaaaaccataaccaacattcccaaggtttttccccttttcgtgtacaagaaccagaaatagtacttgaacaaggatacatcccacaaatggccaatcacatacaacacaggtcaaataccaaaccaagctttccaattccaatccacgcaacattactttgaacctaccagagcaatagactctaaaaaccctctaagaaatttgcaaatggcacccttggccagcaaattttcaagttatcaaacattacaaaatacaaaaggagatacagacccccatgaagtttttgaggggggtggaaccagcaggttgaagcagaacggggggaatgataccaaaaaaagctaaaaggcttctgaccatgttggaagtagggggtttgtgttgggatatttacatgccccctgacatttactcgagggaagctatgagggacactttgtagcaggggtgttggaaacttgaagaacctaagaagggggaagttttggttcccttgaaaccattatttggcgagtttttataagtttctttggcattgttttat

SEQ ID NO: 50619 - DNA, 1728 bp, Oryza sativa
  Clone ID: PAT_MRT4530_53088C.1
atgcgccgcccgcgccgcgccgccgccggctgcggctgcggccgccgcctccggccgctgctcatgctcctccccttcgccgcgctcctctccgtcgccaccttctcgctccactccccggtcggcctcgtcgtgcccgccgcggtcaccgtcgccacatccaccgacaccgacaccgacaccgcgtcgtcccaccaccaccaccacgggctcgtcggcgacgccgtctcggggatcgacatccgggmgctcaacgcgacgccgccgctccacgccgcggccgtccgagcgttccgctcagggggccgcctcctccgcgaggccttcctccccggcgccgcgccgccgcccgcggttggcggcggtcccgacccttcgccgccgcggtgcccgcctttcgtggcgttgtccggcgcggagctccgtggcgcgggggatgccctcgcgctgccctgcggcctcgggctggggtcgcacgtcacggtggtgggctcgccgcggcgggtcgccgcgaacgccgtggcgcagttcgccgtcgaggtgcggggcggaggggacggggacggggacgaggcggccaggatcctccatttcaacccgcgcctccgtggggactggagcggccggccggtgatcgagcagaacacccgattccgcggccagtggggacccgcgctccggtgcgagggctggcggtcgcgccccgacgaggagactgttgatggattggtgaaatgtgagcaatggggtggaaactatggcagcaaactcaatgagttgaagaaaatgtggtttcttaaccgtgttgctggacagaggaacagaggttcaatggattggccatacccttttgtagaggacgaattgtttgttctaacactaagcactggtttagaaggctaccatgttcaagtcgatgggaggcatgtcgcttcttttccttaccgtgttggttatagccttgaggatgctgctatcttgtcagtgaatggcgatgttgacattcaatcaatagttgctggttcattacctatggcttatcctagaaatgcacagagaaatttggagttgcttacagaactgaaagctccacctctgcctgaagaacctatagagttgttcataggcattctttcagcaggaagccatttcacagagcgcatggctgtgaggagatcatggatgtcttcagtacgaaattcatctggtgccatggctcgattttttgttgccttgacacgtgtcatttccgccaagtatatcatgaagtgcgatgatgatacatttgtcagacttgattcagtgatggctgacgttaggaaaatcccatatggtaaaagcttctatcttgggaacattaactactaccatcgaccactgagagaaggaaaatgggcagtctcatttgaggagtggcccagagaagcgtacccgccctatgccaatggtcctggctacattgtttcttctgacattgcaaacttcgtcgtgtctgaaatggagaagggcagactaaatctgttcaagatggaggatgtgagcatgggcatgtgggtggggcagttcgtcgacacggtgaaggccgtggactatatccacagcctccggttctgccagttcggctgcgtcgacgactacctcaccgcgcactaccagtcaccggggcagatggcctgcctttgggacaagctggcacaaggaaggccgcagtgctgcaacccaagatga

SEQ ID NO: 50620 - DNA, 1329 bp, Oryza sativa
  Clone ID: PAT_MRT4530_53089C.1
atggcgcgcccgtcggagtccggcggccgcccgtcgatgttcctcgccgccacctcctggcactgcgtgcacccgccctccccaacagtctccactcactgggacgccgcgagccacgaggcgcgaggcgccgcggccgcgagctcgccgaccagcccacgcgctgcgtccacgaacccgccgtcggcgacgtcggcggagccgttgcacacctgcgtgttctcaggcagcgtggccgggccgtcgaggcaggcggcgctctcgtacctcacgacgcagccgtcgaggatggcgcgcccgctgttggcggcgccgcacctggcgcggaggcgcgacgcggcggccggcgtcgaagcacgcgacgcagtccgctcccgcgacgtacgggcggcactacgccatggccaacgccggcgcgtcggcgagtggctccgccgccaccaccaccgctggatgacaggttggcgaggagcacggcgaagcagttcggggcttcctggtgccagaccgcagtggtcgaagggagctctacgcccagatttgcggcggcggcgacaaggacctgctcgtctgcgttcgccgcgttggcgagtccgtggtcgggtcggggccccgcttcgtcgcgtcgaggcgcgcggcaggcgcggtggcgaggctttgctgtcgctgcgtggtccgccagcggccgatggtggcggggctctgccgctgcatgttcgcccagcggtcgagggtgaccaggctcgactgccgcgtgttcgcccagcggttgaggacgccgagggtggcggggctccgccgctgccgctgcagctgcatgttcgcccagcggtcgagggagctgttgaggacgtcgagggtggcggggctctgccgctgcgtgttcgcccagcggttgtggagggtggcgtgggcgtcggcgctgagccgcaggccttggtggcgggagtcggcgacgcggcgcagggtggcgaggccgtcgtcgtcgcggtcgcggacgacaagtcagccgcgcgggagtcggcgtcaattgaactgggagtggtgtaccagcaaatggaggccgtatgggttaagatcgagcgagaggttgaagaacgaagaaagaacagagaaatagccaagaagacgcgggactgggcatctgcaattgattccacaaaacgcagcgaggccaagattgacgatctgatcaagcaatatgattctcattcgagacgggcgtccgaactgcggttgaagatggtgaacttgcagacgagacccatctcccctcccccccggctgcgtcgacacccgtctcatcttttgcctcgcaaaggaggctaa

SEQ ID NO: 50621 - DNA, 570 bp, Oryza sativa
  Clone ID: PAT_MRT4530_5308C.1
ttttctttatctttgtccggtactgcttttacatggtttacttctttaccggcaaattctatttatacttgggctcaattagaacaaaaatttcatgattattttcacactaatgaaactgagcttaagttatttgattgaaagccgagtggatgacaatagcttacaagctagtttagatgaaaatgcaatatcatgtgtagccaaaccaagcgatggttcggattgtgttaataatttgtgcaatgatgccataataagtatagctgaaccaaatgttggttcgaattgtcttactagcttggataataatgcaacaaccattatagccgaaccaagtgttggttcggattgtgttactagtttagacaacgatggaatagccgaaccaagtggtgattcggattgtgttgctagcttagagaataacatcattgaagatatagccgatctaaatgacggttcggattgtattacaagcaaagatgaaatagcattgtcaccggggatcctctagagtcgacctgcaggcatgcaagcttgagtattctatagtgtcacctaaatagc

SEQ ID NO: 50622 - DNA, 309 bp, Oryza sativa
  Clone ID: PAT_MRT4530_53090C.1
ccggtcgccacgcgtccgggactgagtttttgagcacagaaggacatcatctaaatttggctgttgactcagaaagcaaaacgaggcatggcgagcaaattactcctacatgaatcaagggcggccatggcagcgtgctccggcaggcgcggcggagctcggcagcaccggcgaacggcgcggcagagctcggcggtggggcagcccaagcgcggcgccgcctctcctcctccaaccgggtggagcggcccacgcggcgacgagcagcagatctggcggcgtccagcggcgcggcggaaagacggcggc

SEQ ID NO: 50623 - DNA, 1263 bp, Oryza sativa
  Clone ID: PAT_MRT4530_53091C.1
gaagggcggctaatgctaatctgaatctcctctcgccctatcggttccgcttctcctctcccctcgccatgtcgcttgccgtggccactcccgcctccgcccgcctctccccgctcaccacctcctcccccgaaccctgccgccgccgccgcctcctcctctccgcagccgcccctctccggcgcacccgtctccggcgccgcatcgccgtcgtcgcgtccgtccccgaccccgcggcgcggccggcggagtacacgccctggctcatcgctggcctcggcaaccccggcagcaagtaccacggcacgcgtcacaacgtggggtttgagatggtcgatcgcatcgcgcgagacgaggggatcaccatgaacacgatccagtccaagtcgctgctcggaataggttcgattggggaagtgcctgtcttgttggtaaagccacaatcatatatcaactacagtggggaggcaattggacctcttgctgcctattatcaagtaccattgcggcatatccttgtgatgtatgatgagatgagtctacccaatggtgtattgcgtcttcaacggaaaggtggtcatggtcgccataatggcctgcagaacgtaatggaatgtttggacagttcccgtgaacttcctcgtttatctataggcattggtagcccacccggcaaaatggacacgcgtgcttttcttctgcagaagttcagttcagaggaacagctgcagattgacactgctttggagcaaggggtggatgctgtgagaactcttgtgttgaagggttttagtggaagtattgagagattcaatctggttcagaagtacaagttccacagtgtttgagaattattaagaggcttggatatacttgctgaggacgcataaatacgcatcatcaatatcattggaagtgtcggacgtggtactttgcacaatctacgtaagtgcactaagttgcttctgcagtatcctataattttgaggatgctaagaaacttgcagggtgtatataggtagagtacttttgcattctttccttagagcaagtttcattagagaggtagttgtgacctctaattttgttcatatgtaagctacttattaagtataagaggtagcatatacaatacaccacctctacactagctttattacactaaccccaataatctaaaagtattttcattttatttgtttgtttaaaaaaaaaaaaaaaaaaaaaaaaaaaaaaaaagggcctcgtgccgaattcctgcag

SEQ ID NO: 50624 - DNA, 2600 bp, Oryza sativa
  Clone ID: PAT_MRT4530_53092C.1
acaaagggagctctaatggcagtagctctacacagctttatgagctgagaatggctaaaaattttattattacagtaggaagatgaattaactatgatatatagctagcataaacaacagtatataatttgaaaagttccatatatatgaattgaacagcccataccctcccaaaagaacatcgaattattaaacctcaattggaacatcaaaagagaaaaagctgggtaaattcgacttacttacccagctttgaaataatcttgacatgaacatcatcatcaggcagttcttgtcgaacgatcgatgagtaccccacgaacaaaatttgtttggatttgcttgcatgattcattcgctattcatccatggctgatccgaggggtactaacagcatgccatggctcgttgctccggttgcccggagcccgaagagttgctctagctatgccatggcttgttgctgtggtggtggtggtcgtacggcgccgccgacgacgccgacgtcgtcgacatgcagggatcgaagccggccatgctcattatgttgccgtgggagaaggctcggagacccaagaagtccctggtgaggccgtcgttgccggctccggcgacgccattgccggtgtcacgatcggacctggcgcccctgctgctctcgtctgctgcgatgaagtgggacgcttcgaaggcgagcccgtagccgccggcgccgacgcaagtgctcgacacgttgctggtaggaggaggagggggagcattggtggtggcggcgctgctgctgctgttgtgcgtgctcgccgccgccgccgccgccatgtgggcgtggctcgacgggcggctcagcgtcgcgcccatctgcgccgccttctgcagcagcgcggtggcggacatgtgcgccgaggaggcggcggggtgcggcggcgcggatgacgtcgacgagaacccgaagctgaggccggcctgctgcgcgccgccgctctccggcgtggagctcccgatgaactcctggtccagcctcgccgacccgtacatcgccgccggattccccgcgccggccatcgcctccagctgctgctgctgctgctgcgccgtgagccacgacggcgcgaactgctgctgctgctgctgctgctccctcttgaggcacagctcttgcatcagcccatgcccccccatcgccatcgccgcctggtgatcaagcacatccgccacctgcgagaagagcatcccgccgccatgctgctgctgccccgccaccgccgccgccgccgtgaccgccctcgcgctctcctccgccagcgcgtcgcagaacgccctgtgcgtgatgaagctgtcccgccgggagaagagggtgccgcaatcgcagcggtactcgcgggtgccgcagaccttggagtgggccttccagtcggagtggacggcgtagcgcttggagcacttgtcgcacttccacttcttctcgccatgctggcggctgaagtgcttcttgatgccggtgaggtcgccgagggcgcgcgccgggtcgtggtggacgcagccggcctccgggcacacgtacaccttcttcctcaccacctccttggggttccgctgcttcagcttccatggcaggttgtgccctcgccggtgcagctgcaggttctggtctcgctggaaccctttcccgcagatctcgcacacgtacctgttcgtcgccatcagcgtcctcggcgacagcgcgatcacctccgcctcaggatctgggttgccggggaggctgcgcttcttcttggcgggaggaggagcggggtgggacgagacgctggcctggtcgccggacgccgacgtcaggttccacatggcgcggcgtcccggggagcagcttcgctgctgctgagcggaggctgcggctgcgccggcggccggcccggcctgggccgcccgcgcccgccccgcgctcggccgtcccggacgacgtctcgacctcctttcgggacgcatgctctatcgatcggcccggggcagcggctaccactcctcccggtgccggtgctgctcgcgtccacgtaccacgtgcctcgtgcaccgatcgctcgcggaccgcgttgccggcccgggcgacgccgtggtcgcctcaccctgctaccgcggccccgcgccatccaccggtgtgcgccgcgccgtgcaaccgccgcggcggaggctgccgctgcgccgggtgggtcatctcagcaagaggcgggggcgtgatcgaacgatctcaaattctcaattgccgccggggagcccgctccctccatccgagaatctttcttttgcagaagttccgtggacgcgggtaccactcccgccgatgctgctgctactagcgtccaagaagctagctgcctcgagcataaaagctcgcgtcacgcctttgcaacgcaggccggacggtgggggcgacaccgagctaccggtcaccgcggcaaccaccggtcgtggacgcggcgagcaaacgaggcggcggcggctgctgctgctgcgtgtgggagaagccaaggtgaggaagtggcggagctgggcggagaccgggagataagaaagggagccaagagcggtgcattcggacgcgtggg

SEQ ID NO: 50625 - DNA, 741 bp, Oryza sativa
  Clone ID: PAT_MRT4530_53093C.1
ataactaacaacatttctattagagatcgtttacatccccgaacatgcattacaagtgatcagatctacttttaaaaacaaaattttgagttttttttcaaatggacatggatggatacatgccccatatcaaagggatagaactcaaccagatttacaacattataattgaaaatattttcatttcacaaagtttacatgttcaaaatacaggttataaagtgagatatattttgaaaaatgaaattttgaattcttcaaagttcaaacacatcggatgaagatattttctatgtaaaagttataaaacacgatgagatctataactatttagttgataatattttcatttgaagtcatttagggtgttaaatatatttaaatgattcagacaagcatagacaaaataataacattgggtgagtagtcaatatgtgctgagtaggtgagttggtaagggagctctttatggaggttgaggtctggagttcaaatctcacatgtagcatgcaggctatattgcatgaaaaattgtgaatttatggaaggttgaggtctggagttcaaatctcatatgtagcatgcaggctatattgcgtgaaaaattgtgaatttgtaggtagtgatgtgtaacgatgtataggatggctagtaaaattcaaaatatttttttgacgttttttcattgcgtttaaaattcaaaaattgtatttccttgctttgccatcagtgacgggtcgt

SEQ ID NO: 50626 - DNA, 483 bp, Oryza sativa
  Clone ID: PAT_MRT4530_53094C.1
cccacgcgtccgcccacgcgtccgcccacgcgtccggttgtcatatctcccctgttacgtggaatgcttaacatagttcattttgatagttcgagttcatgtcttccaatccatgtatccaacttgtttcatcacatttgagatttgtctgtaattctttgtgttagtatggtctaatgctactgcactcttccttcttattttgtgatagtctcattattgtttatgatttctatgtcactcatcagttaatagaatgtagatcttgtttttctaacaacttctttgctcttccatttcatggttccagaatcaggaaaatacacggatctggaaacctgtaaagttgaagcagaagaatgtgatacctatgaggaaaataatgaggaacctgtagctatgatagaagaatctccaccagatattggacaagatggtgaggatggagacagctgcgattcatcctggagtatggagtgtacc

SEQ ID NO: 50627 - DNA, 1503 bp, Oryza sativa
  Clone ID: PAT_MRT4530_53095C.1
atggccaccgccgcctgcggcgagagcccttcgcggttgggctccgcctccgccatcgtcgccgacacggagaccaggtaccacctcctcaagatcggctgctactcgcgcaccaaggcgacgacccccaccggctccttcctcagttccggccagttcaccgtcggcggccaccgctggcgcatcaattactaccccaatggggaaagcgccgactccgcggattacatatcgctttacctcttgctagacgacaaggccaccaatagcagtgtgaaggtgcaggcacagttcaagttccagattagttccaccgaccaggtgaagaacacaccttcattggcatccacgaatgtaaatacatatggtgaggattctagctggtcttggggtcacagaaagttcatcaaacgggaagatttcgagaagtccaatgatctcagggacgactccttcaccatccggtgcgacgtagcggttatcggagagatccgaactgagaagacgaccgagatcccatcagccacaacattcgtcactgtacccccgtctgacctgaaccagcagctcgtcgacctgctggagaccgagaagggcgccgacgtggtgtttgaggtcagcggtgagacgttcgcggcgcacagatgcttgctagcagcccggtcgccggtattcagcgcggagctctacggcttgatgaaggagggcgacaccgccggagtcgtgcgtatcgaagacatggaggcgcaggtgttcaagctgttgctccgcttcatgtacaccgactcgttaccaaagatggaggaggaagacgtcatgtggcaacatctgcttgtcgcggcagatcggcatgatctacagaggctcaagctgatctgcgaggacaggttgtgcaactacattggcgtcagcacggtgttgaacatcctggtgcttgctgatcagcatcactgcgacgggctgaagaaggcgtgttttagttttcttggctcactggagaacctgagtgctgttgtcaccggcgatggcttggagcatctgagcaggagctacccctctcttatgaaagaactatttgttgtgatggcacttccaccgaatcatgcttagaacctttctcatcaggtatactatgaaaaccaaaacttcaatgttttactgcttttgatcaagaatagtgacttgactggagttaatttgaagaaaacaggctggcagggcccgtcacttgtgtctgaatatgatgtatcatattcttcaggggatccaggaaaattgccaccaatcgagcgtgtgactgtggagaatgctcaaggggtggatcactgccccgtttcagcttccggcagagagtggtgctcagcttgtggactggtggctgatggcaaggagcgtaatgcccggatcttcgagcagagatcgcgcacagcaggtcagctatttagtggcatcagagagatcatgatctggaaggaggctggaatttttcggcaatgtgattag

SEQ ID NO: 50628 - DNA, 749 bp, Oryza sativa
  Clone ID: PAT_MRT4530_53096C.1
atggaggaggcgacgggcgccggagatgtgggggcgtctgatggtgctccaccgccggtggtgaagatgacgacggaaggtgggaatgcggcggcgggcgacaggggaggagcagcgcgcgggcggcgggagaggagctgggcggccggcgacgagcggcagggtggcgtggcgacgcggcggcggcgggccgggcgcagaggtggactcacgagccttgccgccgctctcggtggactcgaggccgtcctcatcgtagcaaggagtgacgatagctcccgtcatcatcctccttccgccgccgcattcgtcgtcttcccccacggcggcgcgcgtgcccggagggtggtgcggccggcgacggcggctcccgaggaggccatcgaggcaccgttgaagaggaaggagacggcctcgccgccaccgccgccagatggattggtgacaaacaaacctcctgggatgaggtttacagcgagaagaaacatgcgtgggcctgacggcctgtcgatcaccttcacaattccaacagctttgatgccatttcggtgtcaggttcagatgggagctcagggagatttaccgtaaaaaataatgcaagtatgcaggacagccgcctctcctccacctgtttcagcacgcagaccacctccaccgcgtcgggcagactgagggtggcgaggctgcggggcggaggaaggtggcggggcccggaggacagcatcggcgacggacccgtaggtggatag

SEQ ID NO: 50629 - DNA, 906 bp, Oryza sativa
  Clone ID: PAT_MRT4530_53097C.1
cgagttgggagggatggaggaggcgacgggcgccggagatgtggcggcgtctgatggtgcttcaccgccggtggtgaagatgacgacggaaggtgggaatgcggcggcgggcgacaggggaggagcagcgcgcgggaggcgggagaggagctgggcagccggcgacgagcggcagggtggtatggcgacgaggcggcggcgggccgggcgcagaggtggactctcgagccttgccgccgctctcggcggactcgaggccgtcctcatcgtagcaaggagtgacaatagctcccgtcctcatcctccttccgccgccgcattcgtcggcttcccccacggcggcgcgcacgcccggagggtggtgcggccggcgacggcggctcccgaggaggccatcgaggcaccgttgaagaggaaggagacggcctcgccgccaccgccgctggtgaggacgcggatggacacgctcccggcggtgcccatccgcacgagccgcctctcctgctccatcctgcgcagcacctgctccggcaattgccatgctgaactgttcgagatcagaatttctcttgctgaacttgaatcatgggagctcagggagaccagctccaccgtgtcgggcagccgcctctcctccacctgcttcagcacgcagaccagctccaccgcgtcgggcagagtgagggtggcgaggctgcagggcggaggaaggtggcggggcccggcggacggcatcggcgatgagatagggattgggaagggcggtgaggtagtcggcgtcgtgggagtaaccggggaggaggaggcgcgcacgcctgccgccgccgccgcatcgccggccggccgtcggacctcctcgcccggcgacctcctccccaccgccggccggccttcccagagagaaga

SEQ ID NO: 50630 - DNA, 457 bp, Oryza sativa
  Clone ID: PAT_MRT4530_53098C.1
ttttttttttttttttttttttttttttttttttttttttttttttttttttttaaaattaaaaaattttggttgtggttttttttttttatttaattttttttttttttttttaaaaaaaaaaaacacgggaaggggggggggggtaaaaattaatgttcgggcaaaaaaacaaaaaaaattaagggaaaaaaatttattgactgtgaaaattgtgacgggaaggaaagcgcaaaaaaaataaaggggtaaaaataaatcgctggggggaacaaaataaaaaggggaggggtgggtactttcaagggacaaaaatggaggttgttgggcacacctttctaaagattgggtgggggaatttttcaaaaagaattttgagagggcctcctccggggttttttggattgggaaaaaatccctaataaaaaaatatttctggggggccttttttagatcc

SEQ ID NO: 50631 - DNA, 468 bp, Oryza sativa
  Clone ID: PAT_MRT4530_53099C.1
atgcactccgatcttcacaaggcatccaaggctctcaacgacaataagcttgcgaagatagccagcttgcaggatgaggtggctcgcctcaagaagaagaacgccattctgcggaagcgtctagcaccaggtgggctcaggatccgcagcatgcctaggaagtctaccacaacacccatgtgcatccagttggtgcacaggaacccgtctccaccacctccagctctagagccgcttccccgctttgtgccaccctcacctccaactccacctctaccttcaccaacgccagctccagctccctctccaactccagcactaaccttcgctccagtgtcagcttcagtgtctaatggtagcggtggttggctgttcgccacgtccagcaatagcagcggtagctctagcttcgagcctgacagttatgacacctacttgagtgactccaggagctgttctgagcattag

SEQ ID NO: 50632 - DNA, 2553 bp, Oryza sativa
  Clone ID: PAT_MRT4530_5309C.1
atgggccgtcatgctagtccacatatccctaatgcctacaatgatattaataggggatatcctcccgatactaggtatggccaatataacaatattgtgccgcaacaaccaccttttaggccaccaagtctaccaccagatccaccaaggcctgaaactgtggaggattggtttagaaatactatcagggagaatttcgcaaagctaaggaatcgtgctagggagtaccaaaagccgtatcctgatttttatgatattatcccatatcctcgtggttataaaattcctgaatttaccaagtttagtggtgaggatagtaggaccacatgggagcatatagatcaatttttagcgcaatgtggtgaggctaattgggatacatgtaaattgtgcttgttttctttatctttgtccagtactgcgtttgcatggtttacttctttaccggcatattctattttttccttggctcaattagaacaaaaatttcatgattatttccacactagtgagactgagcttaggttgtctgatttaacatcagttaggcataaatacaatgaatctgttgctgattatactaaaaggtttagagatattaaaagccgatgttttagtttgaaaataactgacaaagatttggccaacattgcatatgatggattgcttggttctattaaagagagattgaatggccaaatatttcttgatgttgatcatgtgttgcataaagctctggctcaggagagccgagtggatgacaatagcttaaatgctagtttaaatgatagtgcaatatcatgtatagccaaaccaatcaatggttcggattgtgttaataatttgtgcaatgatgccataacaattatagccgaaccaaatgttggttcggattgtcttgctagcttggataatgatgcaacaaccattatggccgaaccaagcgacggtttggattgtgttattagtttagacaatgatggaatagccgaaccaagtgatggctcggattgtgtttctagtttagacaatgacatcattgaaattatagccgaactaagtgactgttcggattatatcacaagcgaaagtgaaatagcattgtcacctaagaccgagtcacaaatcggtcatgtggatgttggaaaagatgatgacaatgtcttgcaggatagtggtgaaatagaatccaaagtagctatacatacatatcaaaggccgtatcctgaacatatagattcggtcccgtacccgcaaggatttgaagtgcccaacttcacaaaattcacaggtgaggatgctagaataacaatggagcatatcggtcaatttattgaacaatgtggtaaggccgatagtgatgatttgcttaagttaaagttgtttcctctttctttgtcaaactttgcatctacatggtatagtttacttgctcccaattcaatttctacatggtcgcaaatggagcatgaatttcatgattattttaaagatgcaagcttgatggagcaaagaccgattgatacttcatcggtcacgtgtgaaactatttcggttacacctatgcctaagaccggaattgttagtaattttctccctattagtcctattgatgttgacaaaaagaaagggaaaagtgttattattggggatcctcggcccaagaataggatcaaaaatgcgaaggccgaagatcataaagttgcaaagaatgagttatctagtatccaaaggaccaaaaaaccgaagctcacttttgagatgcttatggctaaatacaagaaaggattaccgccacctatgccgtattaccaagagtggaaggaatcacctaggtcagcatcaagtcattcatctaactcaagacaagaccgtttcctacaaaataatcggtccggtggatcaaaggtcaaaaaggtgaaaaaggtgtgggtgaggaaagaagccaaagctccggaggtcattgctatcaatgaggaatatcaagatgttcatgtacctactagagatgcggcaaaaactatacaagcggagaagactaaagccgacgccgttgttgtcgacatcagcggtctgaccaagccagctggccggtctaaccgccagacaacggccagtctgaccgaccctcctggccgaaaaccgattttgcttggggggcaagacattaatatgctcatgaagaaatcaagagagatgaacggcgatggatacaacatcacatctttgagccgccgtttattggatgctaaggcaagtttggacgaaattggcaaagtcatagaccaggggaggtctgaccggcaatgcacgaccggtctgaccggtggtaccgtcgttgaggtaaatcttggctcttttcggtatttcaagcaagacgacttgtcggttgaagattacaagaccttgatggggagcaattttgaagacgtcatcgacaagcgtttgaagactttgaaggagatgaagacacttcaagacagtgttttcagagagcaattaatgggagatagcttgaagaaatacttcctgagcatttggcaagatgcttag

SEQ ID NO: 50633 - DNA, 2901 bp, Oryza sativa
  Clone ID: PAT_MRT4530_530C.1
atgccggcgaaccccaagctcgcggcgaagccctcgccgtcgccgccgaccgccgccgcagccgcctcccggccgaaagccacagccaaacctcccctcggtgccggataccgcgacaacgacgacgacgacgacgatttccagagccctccccgtgccagcagccgcgccgcccgcgcgttgaagccctccggtaatggcgcggcctcgcgccgccccagcaagaggttgaagccgtcgtcctcgtgttgctccgggaaggagaaccgtccagccgccgccggtagtggcagggctcccgctgggagggccgcctcgaagggcgcgggggttggcgaaaccctaggtgtcgtctcgagggttagcagcggcgttccaggcggggacaaagcgaggggcggaggaatttgcggcctattgaggtgcggatctgatgactttagttcagtttctaatgggaagaaaggattggatagatattggcgtcgcgatggaggtttgcattctcgccccaatccgatggattccacggtttcgatgccggatgccacatgtgatttggaaaatgggggttctcaagtggcgcaaatgctcagctccaatgaccgtatctcagttcagttggaggggaacgctaaggtggagttgggaaagtctgaatctgaccctacgactatgcggaaggaacggaatggctctggggcttgtgaaagtgatcatcctgcaagattgatcgagccgaggcttctgacattggttacaaattgtgattttggaggtgcagactccatggattcaaaagagcttggttcagcgattcatccctctgtttccaaagataggaatgtggagaacgaatctgggggggcatctgtatgtacatttgcacttcataacaggaattgccactcgagttgtgttgaatccgaacttgagatgttgaatgcgaagtatgatttgggtcctcgtgattgcaaggaaagccaagagggtccgggactttgtagcttgatttctgaagagaggacagttgcggcagaaggtgatgcaactttcacattcgaggaaagggggaacacatcaagtggacttgaggcttgtaaggggagtcactgcttggatccagttgaaccaaagcttatggactcatgtgcaacacatgcacttgaaggtgatggttgtgatgattttgagatcggaacacaacttaatgagctcataaacttgtgcatggaggattacacggagggtcctttgagcaacaaggtggcttgccttgaagggaatggaatggattgtgggagttttaattcatcttgtgaagtgcaatgccctttgtgtggatcaaatatttctgacttaagtgaagagctccggctggtgcatactaacagttgccttgatggagataaacctgctaaggaaccgaattccgataaccaaaatgaaccctgcggtgaaagcaatgttgaaaagaggcgtgttatggaatggttaaggaatctggggctatccaagtatgaggagatttttatcaaagaagaagttgactgggaaaccttgcaatggctcacagaagaggatcttctaggtatggggataacctctcttggtccaagaaagaaaattgcccatgctctatgcgagttacggaagaaaaacaatgatgccaatgatttggctgctgatatgttaaatttggagaataccaagaaggctaaaattccaatgaatggaaacaaattaattacggagtactttcggtgtccatcatctgatcaaagacaaaagaaagcatgtaaagtcaacacaccatctaatttgaatagccagaaaaaatccaatgctaaggccactggtggaaggcgtactgttaaaggaaaggttaaagatacacctatttggtgttgtatcccagggaccccttttcgagtggatgcttttcgctacttgagaggagattgctgccactggtttctgacacactttcatgtagaccattaccaaggcttgacaaaaagtttttgtcatgggaaaatatattgttcatcagttacagctaatcttgtacattataagattggtatcccatgggatcgattacatgtattgccactcaatgaaaagattactatcgcaggagttaatttaacatgttttgatgccaatcattgtcctggagcagttattattctctttgagccatctaatggtaaagctgttctacacactggagatttccggttttcttctgagatggcaaacaatcgtgttttgcagtcttctcctatccacactctaatacttgacacaacctactgtaatccacgatacgacttcccaactcaagagattgtaatacagtttgttatcgaggctatccaagctgaagctttcaatccaaagacactttttttgattggcagctatacaattggtaaagaaagactgtatatggaggttgctcgtttgcttcagaagaaaatatatgttggagctgcaaagttgcaaatattaaagcacttggggcttcctcaggaaatcatgcactggtttacagccaatgaagctgaaagtcacatacatgttgttcctatgtggactctggcaagcttcaagcggatgaagtatttgtccactcaatatgctgatcggtttgaccttatagttgcattttgtccaactggttggtcatttggtaaagggaagaaaaggacaccaggcagaaaatggcaacaaggagcaataatcagatatgaagtgccctacagtgaacatagcagcttcacagaactccgggagtttgttaggttcatctcaccagagcacataattcctagtgtaaacaatgatggccctgatagtgcaaatgccatgctggcccaattgttgaatgattag

SEQ ID NO: 50634 - DNA, 1382 bp, Oryza sativa
  Clone ID: PAT_MRT4530_53100C.1
atggaggcggagcgcgacggcgaggagcagcgccgccccctcctctcctcctcctctccgccgccaccgtcgccaggtaggcgtactgccaccgccttcgccgtccgccctcgttctctccccgatcccccatttcaggctccgtctcgtgatcgtctcaccctgcctgcctcgtttcgtcgaattccgttccctgcagcggcggaacatcagcatcagcaccagcagcagtaccagtacctgggccgcagcagctcgtcggcgctgcgcggcggcggtggcggaggaggaggaggagcgggctggggcgtggggccggaggtcagcgccgcggaggtcagctgtgtccgtgaccctaacatcagttggttataccttgcaggaggattagcaattgttcctcaagggccgtacccgtatggcggcgaataccagccttctcatgatggcagaagggatgtactggatgaggtagagatccggcagctccttattgatcatgttgggcatcggtgctgctggggaagtaggcctgctcgcacatggaaaattacctctattgaggattgcaatgtatatgttggaactttggaaactttcatcgaggaaagggacactgtaactaacaaggaaccctatgatggtgggaaaatagatggaagagacaagggtcctgtgcttgcagtgtgggaacttgatctgaggaagacactgtcagcaagaaaagtgagcgcaactaggggagctgcctctgtgcctgacgaagtattccacagagcccaggggattcagctatgcaacatacaggcgtaccagtgcactcctgcattcttcgccgattcgtaccagctcaaccagttctcctcagaagtcgtagctagccggcttccagttccaccgtccgcgagggtcatttccgagaggcacatcatctccgtcgtgcctgtgatccgtgtcacaatggctcatcgcaagcaatgtttcagcttctacgtcgtcggctacaatagggatgttttcataagagattatccttcgaaattctgctggggcctctgctgttgctttgagtggctgcggaactagttatttcttgccatgtgacaaaaatcgagtgtgcagtatttgatagtattacatacggagtaaggcttgtataattatagcaaaaccgaagattaaagagggttgaataaataagcataaccctgtgtgttatgcattttttacattacagaagctgtatcctcgtattctattactagggcttcgtccatgtagatcatatctgtaacaactgctcgggcatgaatcaaatcagttgtgaagactttcccttaaaaaaaaaaaaaaaaaaaaaaaaaatggtcaagaaccctcac

SEQ ID NO: 50635 - DNA, 154 bp, Oryza sativa
  Clone ID: PAT_MRT4530_53101C.1
cggccgcgggcctcgccggaaccctcgccccgccgcccctctcccctcctttccccgctcgcccgattcggtggtcggggtgctggactccgacgccgagatgcccatgtccagcgccgcggacgactgctggactgaccgacggacctactta

SEQ ID NO: 50636 - DNA, 1656 bp, Oryza sativa
  Clone ID: PAT_MRT4530_53102C.1
gtttttttttgttttttttgaataacgtttcgctgtttgaaatggttttccgcttgcggtttaaagcaaatctcttttgggagttgggacgtcttcactaacgaataagaggaagaaacatgacacgattttcagacgagtattacagcactataggcaccaattgtttatcagggaagcatcgtctccaaatctttacaagaaactaaagacagattattcatgtgataccaacactggccagctgacaattttattgcacaccgcgatggaagattaatggccatcaggtcctagagataccgtcactctttgcagcagaatttttctctgcagcagaagtaaaagaaacgggcagctttgattcggttttcacggtcaggctcagcacctcgggtcgtgcatagtgtcccacgacgtcgaaatcaaacttagctcgagcaatttctccaaggtccaagtcagctgtgaggaggccctcgccttcatagtttggacctgccagaactgttccagatggtgagacgatggaacttcctccaggccaaataacagattctggggatggctcttcatcaaggccaccaaaagtatattcaggcgctggtggatagttctttctgcgacaaaactggtttgcagaaagtacaaagcatcccccttcaacggcaatatgcgtcatggaggcctgccaactaggcgagaaatcagcagttggagcacagtatatctgaacacctttagcgtacattgctgtcctgagaagtggcattctgttttcccagcaaatgacggcaccaatcttccctattggagtatcataaacaggtatagtagatccatccccaaaccccctaaacactcgttccagtccagtaggcatgaccttgcggtgtttcccgaggtatttccccagaggatcaaagaagagcactgtattatatagtgtgtaccctaccctttcaaccacccccatcaccaagaaaatcttgtattttccagccaatgcagctaagcgggtcacctctggaccaggcacatctatagcagctgcatgatatttatggaagtcttcctttcccttggcagatcgattgccaatagtcagtccaaaggtagatccatgagggtaaccaccaacaaagacttctggaaatagaactatctgtgaaccatatccagctgcttcagctaccagtttctctgctttatcgagagtcgcaggggtgtcgtagaacacggtgcaggcctgcacgacggtggcacgcacggtgccggtggcaccctggtcggcgccggcgttcatctccacctccgtaaccaccggcccactgcccgagctcgcgggggccaaagccatcgctcccccacccctcccaagaaattgagcgggaaggggatctcgttggggggagggggggaggccgtgtgctacttgtcgtacttccttttgaggtaatcgcggacgaactggtcgcgggcgagcgtgcgcgcccgctggggctcgacgtgggcgtaggagaggtggacgccgtaggcgaggaggcctgcgccgaaggcgaagagagcgacggtggagaggagccgacgaggagtggacggggagcacaaccccatccgcgagatgtgtttttggtggggggacccctcgtgccg

SEQ ID NO: 50637 - DNA, 331 bp, Oryza sativa
  Clone ID: PAT_MRT4530_53103C.1
ttccgggtcgacgccacacgcgcgcttttaggatcgtgagcgaccgacattacatggggctacttttaaaataacgaggggccggaccatgtgccaggattacaagaacgacaacatgctaccaaaaggtgagtatccgacagaattgtttgtgctgtaacgggtacaggccttggaacctaagctaacctactgcctgattttcaatttgttgcactaactgtgctacgcgatgtcacagaacagcaatgtcacctacgaacgggagggaatctagatatgatttgtctcatgcgttatgtgctgggtcaaaaagaacccatttgaggcc

SEQ ID NO: 50638 - DNA, 524 bp, Oryza sativa
  Clone ID: PAT_MRT4530_53104C.1
cggacgcgtgggtgctgggctggtggtatgagccctacaccgacgcggtggcagatgcagctgctgcaatcaggatgaatgaattccatattggatggtttatgtctccatgacaatattacccgcataggagcaagataggcgctcgggtggtagccataggaaatgactggtcgcagaaggacattggaggcgtcgcggcatggaggtggtcgtattagctcctccatggcactggctagcaaccggatctgaaaatgtacttggttgtattcacatgagcataatgtactctgctataccagcgccgctgagggtgcagcagcaccaaatccccccgttctccagtcaggcctggcaggactagtcgctggcgcctacagcaatgcgatcgacgagcactgtctgtccacgggcagtggcggacctgcaagcagcaacctacacctctgcctgggtctctgctatgcttggacagcccaatggtcgtcgcttccccccagatcaggcgagtcccgagccta

SEQ ID NO: 50639 - DNA, 250 bp, Oryza sativa
  Clone ID: PAT_MRT4530_53105C.1
atggttcagccaaaccactgttgtggcctttcgggctcaaccttggcagggaggttcccaccgaccccaggaggccatttagaccaggaggttcccaccgaccctaggagtgcattcaggtctacgcgactgaagatgttagatccaagggtcgatcgaactcctagttcagctgaactgacatcggctcccctcgccatctgctgccacgtgggggactacgatgctctcccaatgatggttgtggatg

SEQ ID NO: 50640 - DNA, 603 bp, Oryza sativa
  Clone ID: PAT_MRT4530_53106C.1
atgcagctcaacccgaaatcaagaactcgtcgaaataaaactaaagcaaaaagggcggcgatgcgccgagattgtgttgaacgtaacaccatcggccgcctcttcttgtccttccgatggagcagcatcggtgatttggccgacatccgttccgccttctcctcctcctcctgcccgccgccgctccccaccgccactgctcccctccgccttgtccccaccgccaccgctccggagaaagagataagggagagagacggggaggaagaagggaaggagagggaggatgacatgtccaagtccaaggcgttaaaaggaaaggaaaaaaaaactctccaccccgcgcggcgcggatcaagccggagtttgagcatgggagtgcgtgccgagtcttctgagacgaccgcgataattgtagccgggagggccggaaaaaaggcagaccagatgacaataatctcatctcatctggagcaaatggtcaagcagacatactccatggagagagagaaagcgcaaaggaagaagaaacagcccagacgaaggaagcggggtaaaaaggaagaagaagagcagccgtccacgtggtggggccgacgttga

SEQ ID NO: 50641 - DNA, 754 bp, Oryza sativa
  Clone ID: PAT_MRT4530_53107C.1
gcatgcgtgctgatacatatataacagccattccattcgattgtccgtagataactaattaaacaaaccctttaatctcctagttaattaaacaaagggcttcgagtttgaccaacacaaaattaacccgctaataattaggagtaattaacacgaaacagagattaactattattagatcaattgattaattgatcatcccctcctgcaagcatggaccatggatgcatggatgctgtcttcgattctcatcatgcgtgtaatttgttgtggaagcaaaggaagcaacgctagcggaggaggctgcggatgatgtcggcctgagggctgttgctgtccatggtcgccatgagctccgacagccgctcgctcaggtcgtccacttcccggtgcaggctcttgatgtagctgcacatctccttcagcagcttcgtcgccggcgaccgggaggtggcgccgcggcggcgagaggactccgggaggagggactgcagcttggagatgagctcgttgatctcgtcgtcggtgatcctgcccgatgctcgccgccccgacatcttcgagattttaagctagctgtgcaactaataattcgtgattgatcttctgtgagctaaaacgactcagggcgatcgatttgagggagaggttattgttgtagtagcaaaggaaaggtgaaagggtctgcaaaaagtagcagaggagcaaataagtcctagactacagggagagtgagtgaggtcgaacgcgtggg

SEQ ID NO: 50642 - DNA, 408 bp, Oryza sativa
  Clone ID: PAT_MRT4530_53108C.1
atggagaagcagcagtcggcggcggcggcgaggccgcactggagacggcgggagccctcagacggcgaagtgtacgtggtccaccccacccacttccgcaccgtcgtccagcagctcaccgtcgaaaacagttgtttaattttatttctcctttcacaaatcatgtcatcaatatcatggcaatatggcgctcatgtctccacatgccgcatctcaattaccttcccaaagccatcggccgagcagagcacggcgcggctaggcccgggcgagggcgacctagcggcggccaggggaggagcggtggatctccggcgaagccccgcaggcggccaaggcactcggcggcgcggggacgatcgacgcgacatggccgtcatggccaagcctttggttgcaaccggctag

SEQ ID NO: 50643 - DNA, 1574 bp, Oryza sativa
  Clone ID: PAT_MRT4530_53109C.1
gaaaaataaccagaacggagtactagcactatacttcatcaaaatgattagcttaagagtcatcagcccatacgcaatctcaccaaccttgtacgagtacgacaccgccataactgccgagacgatcccagccgtccaaatccacatcgacggctcagtcttccttttacccaaccaaatgccgaagttttttttaaaaaaaaattcccagaaagccgaaaagctttgcgttagaaagaaaaagaaaaaaaaaaagaaaaacccaactccgaaccctttcttttgctccaagcgcgcgcgccgccacgggactaccgcaccaccaccaccggccgatcgagcgcggcggcggctgcggcgaggccggcggaggaggcgagatgaggaagcgggagagggagaacccctgcgagatctgcgggcactaccacaacagcgaggaaggggagcggtgcggggtctgcggccaccggtcggggccgatggccggggagcccccggcgacgctggacccggccttccccaccgaggtcctcaaggacttcctcttcctcggcagctacaacaacgcctcccgctccgaggtcctcaagacgctcagcatcacccacatcctcaacactgtgccagattgtcagaatctctaccggaattctttcacttatcactgcattcaggatgagaggagcttggattttgatggtgcaaacaggtttttagaacagtgtgaaagggagacatcacgtgttcttgtccattgcatgtctggaaaaaacaggtgtgatagcagtgttgtgagcattcatgttgttagcattgttgtgaatgatcgattaatacttctctggtacaaaatttccaggtctgcagctattgtaataggctacttgatgaaatctaggggatggagactttcacagtcttaccaatgggtgaaagaccggcgaccacaggtgcaactgacagatgcttcacagaatcagctcgttgagtatgaacagaagcttttcggacccaatgttggcgcacctgctcaatcgtcggttccaactgaatcatttcgtcctcttggatttggtttcccaaaaccggcaggtgacatccaagcgcccgtattcaaccagcagcccgtgccgtccatcttcgagcgagtcaacccaagtaatattcctagtaattttacttttggagcaatggaggccaacactcctatggacgacaatggcgcgcccgcaccaacttcaggtgataacccgatggacagctcataacaagtcataactcataagaggacctgacatgttcaatctcctctgtagtgattagtgaatggatattactgccaggcatatctgatatgcaaaatgggatgttatttagatggtctctagaattgatgaatggttctggcaaatgatggcaattgatcagggttatatgcactgactgccaatcatggcaaatggacctgtgggtttatatgcaatagactaagttaatcatgatggcacgctttttcagtcccaaaaaaaaaaaaaaaaaaaaaaaaaaaaaaaaaaaaaaaaaaaaaaaaa

SEQ ID NO: 50644 - DNA, 315 bp, Oryza sativa
  Clone ID: PAT_MRT4530_5310C.1
atgcagtccatcagtattgataatcactacccattcagcaacaacaagcagagtgaactaggagacctcgtcggcgaccgcgtcgaatgtcgtcctgcccctggacctgcgcacgcacaaatctggacgggcgccccccaaaccctagcccgtacaaacctgggcgggcgcgaggtcgactccggcagcgcggtggatggggagagaggagcgaggtggcggcacgccgcggcggaggaggaggccgcgcgccgcggcggtggatttggcggaggaggcggtgcgcggtggaagggggagaaatggcggcgcgcg

SEQ ID NO: 50645 - DNA, 1041 bp, Oryza sativa
  Clone ID: PAT_MRT4530_53110C.1
gcacgaggggtcatttgaatgtgacctactctcccctcaccccttcatcaattcggctcagaggctgctcctcctcagtcctgagtctcctgtcctcatctccattttgttttctcctcctcctcctctctctctctctctctctctctctctctctctgtctctctggtggagtgcagtgcagagattcaagaagttcaagatcgaacaggcctgctgatcatgccttgtgctgcggccgagctcgccaatggcgaggcggcggcagcagcagcatgcgcggtgaaggtcggcacgaccggcaccatcggctcgctgatgacgagggagctggaggccatcaaggccgcgccgccgcacgccacagccgcggcgacgacgccgcggcggctgaggcggcagagcagcccggtgtcggtgccatgcggagccagcccgaggaagatcgccgcgctgaggaagagctcgtccagcctctccaccaccagcagcggcggcggcagcgggcggcgcactgaccgcgtgagcgccgaggagtcgtcggcgtgcaagacggcggcgtgcaggaggagctctagtaccacgccggccagctccccgatgctcgcggcggacgtcgaccggagcggcggcggcggcaaggcgaagaaggcggcggcgagggggcgccgcggcgtcggcggcgtggaggtggtggacgtgaggtgcgggaacccgatgagcagccggctgaggaggctgggattctccaagctgtcggagacgttcgcgtgagcagaatcagatcgtcttcagtcctgacggcgagctgtgtcgcgaattgcaattcggaattgcattatgtttgctatagtaattatattgttgttattaaaattttcttttgctggtttctctcgtgtatgggtatgaccaaattaagttaatttatgagaagcgttttgccatcgtcgcaatgcaaaaaaaaaaaggtgatgtgtatgatgtacccgtaattgcgtattttaacttttggcaggtgtgatgttttcctcttttttt

SEQ ID NO: 50646 - DNA, 559 bp, Oryza sativa
  Clone ID: PAT_MRT4530_53111C.1
ggcagaggaagcaaggggagggaaagcgggcggggggaaaggcgcggggagcggggcgggcgggggaagggcgggaacggaggcaagcagcaacaaagcgcgacgcacggacgacagggcgaggggggcccggcagaaaagcggagaacaggagggaggagaagggagcgcggagaggaggggggcgaacaagacgagggaggaagaagggcgaggaggagaggcaaaggcggccagacaggagaagagaaaccgaagccacggagcggcgagggagtgcaagaaggaagagaagagaaaggcacaggagacgagggaacggcaagccgagcagaagaaacaggcagcaggggagaagaaaaggagaggccgcgaaaaagataggagaagaagccgcaagaacccggggacagggcgcgatggacaaccaacggaggccaaggtggcgagatcccttatattaggggacgaagggagtagcatatatgaaataattatttcttttcccaattcctacctcctcttcagctgcttccagtcctccttgtacccagaataa

SEQ ID NO: 50647 - DNA, 295 bp, Oryza sativa
  Clone ID: PAT_MRT4530_53112C.1
gcgggactgcggtggatgcgggtggtgatggaggggaggatgggaagaggcggaggaggaggtggacaccctcgcttggccaccctgttttggtggcgctgcgggcgcctctttttcgtcctgcgctctctctggcgtcccctgcgtgccgttggtgtttcccctggggttgcgtccggtcttcgcggctggttttgccttcttttttttgccgttcctctctctctctgccccgcgctctgtttcggcggccggctccgccccccccccccgctccccttgcttggtccttgcc

SEQ ID NO: 50648 - DNA, 1023 bp, Oryza sativa
  Clone ID: PAT_MRT4530_53113C.1
atgagcaacccctcctcgccggccacgtccaccgccgccggggagcagcagctgcacgatcaggatcaccgggacgaggcggcgctgcagcaagaacacgccgccgccggcattattcccgacgacgaggacaagctgtcgccgccgaggtgcgaatgggagtttcgcctggcggccaccgtgccgtcgccggcgctcgcgggcgcgtccgactccatcggcagcctcgacttcgaccccaccggccgccacctcgccaccggcggcatcgcccggaagatccggatttacagggtcgccgagccgtctagccccgccgcctgcatctgcgtcccggccaagctgagcagcgtgcggtggcgccctggcggcggcgaggcggtggcggcgtcgcacgtggggtgcggcgactacgacggcgtcgtgacggagtacgacgtggagcgcggcgtgccggtctgggagcgcgacgagcacgaggggcggcgggtgtgggcgctctactacgcccgcggcggcggcgcggcgacgatggtggcgtccgggtcggacgaccggacagcccacgtgtgggacccgcgcgccccggctggcgcggcggggtcgtgggcgacggcgcgcgccggcggcgccgtgctgtgcgtggagttcgaccccgccggggggccccagctgacgacggcggcgagggaggtgcggtcgtacagcggccacgtcagcgggcgaagcttcgtggggatgggggtgtggcgtggcgcggggctgatcgccagcggctccgagtccggccacgtcttcgtctacgacctccgctggtccaagcccatctgggtccacccattctcccacgccgacgccttcgtcagcgcggtcgcatggcgccagctcgccggcgacgacagcgacggccagctcgtcgccggcggctccgacggcgtgctcaagctcttcaccacccaccgccgtctcacccccgacgtcgccggcgtcgggggcgacgacgacgacgacgtggctgcatga

SEQ ID NO: 50649 - DNA, 178 bp, Oryza sativa
  Clone ID: PAT_MRT4530_53114C.1
gttgacaatttatgctgtttccctaaaacagagcactaaggtgacaatggatgtccacacaaaacactaattaaggacgctgatgcataaacgtgtagggtcataactttcatgttcgtaagagcctgaagcttaaacagacgacttgctcataggcgaaatacttctcacgcttctc

SEQ ID NO: 50650 - DNA, 1215 bp, Oryza sativa
  Clone ID: PAT_MRT4530_53115C.1
atgagcaacccctcctcgccggccacgtccaccgccgccggggagcagcagctgcacgatcaggatcaccgggacgaggcggcgctgcagcaagaacacgccgccgccggcattattcccgacgacgaggacaagctgtcgccgccgaggtgcgaatgggagtttcgcctggcggccaccgtgccgtcgccggcgctcgcgggcgcgtccgactccatcggcagcctcgacttcgaccccaccggccgccacctcgccaccggcggcatcgcccggaagatccggatttacagggtcgccgagccgtctagccccgccgcctgcatctgcgtcccggccaagctgagcagcgtgcggtggcgccctggcggcggcgaggcggtggcggcgtcgcacgtggggtgcggcgactacgacggcgtcgtgacggagtacgacgtggagcgcggcgtgccggtctgggagcgcgacgagcacgaggggcggcgggtgtgggcgctcgactacgcccgcggcggcggcgcggcgacgatggtggcgtccgggtcggacgaccggacagcccacgtgtgggacccgcgcgccccggctggcgcggcggggtcgtgggcgacggcgcgcgccggcggcgccgtgctgtgcgtggagttcgaccccgccggcgggccgcagctggcggtgggctccgccgaccgccgcgccgcggtgcacgacgtgcgcgcgctggggcgcggcgcggtggcgtccatggacggccacggccgcgccgtgacgtacgtccggtgggcggcgacggcgcggcgggtggtgacgtcggcggcggacggcacccaccgtctgtgggcgctgccggcgccggcggcggcggagacggcggcgagggaggtgcggtcgtacagcggccacgtcagcgggcgaagcttcgtggggatgggggtgtggcgtggcgcggggctgatcgccagcggctccgagtccggccacgtcttcgtctacgacctccgctggtccaagcccatctgggtccacccattctcccacgccgacgccttcgtcagcgcggtcgcatggcgccagctcgccggcgacgacagcgacggccagctcgtcgccggcggctccgacggcgtgctcaagctcttcaccacccaccgccgtctcacccccgacgtcgccggcgtcgggggcgacgacgacgacgacgtggctgcatga

SEQ ID NO: 50651 - DNA, 395 bp, Oryza sativa
  Clone ID: PAT_MRT4530_53116C.1
aggacaagacacaagcccaagcccacagggttttattattgattaagaaatggggattttttttcgatacaagcattacttagtctaggaggtggcatatattaaagattaattttttgggcaagggtgcatattcccatacaagcttgtatcagcatacttagggggattggtggcatttgaaacaggggggggcaaagcccgagaacaatacttaagggttttttatccagctggtatacagggggaaaaaatccatcatcatccatggggggtttacttgggggtgtacttgggccccccgggtatatggaacctggagaaaaaggcctcccaaacaaggggctttggggcgaagttgaaccattcatcgtcttggggggtgctggtttttc

SEQ ID NO: 50652 - DNA, 418 bp, Oryza sativa
  unsure (1)..(418): unsure at all n locations
  Clone ID: PAT_MRT4530_53117C.1
gattttggcagtgcgattcagggtgttgacacagggggtgccttttgttctgatacgtgggtgtaaactagtgtagtagtgttctaatataatgtggattatgtgtacaatgctttgtaggtgcagcagaaaactagctaaatacccatgcacagattttctaataaatatatcatcagttcgaaactcaaaaagtgagcatatttatcctgagaatcatatgtaatttgcaagacgcataaccataaagaagtggcggtgggatttcagactcaccataaccaccattcctaggttcttttgtattagtagaaataaacatgacattaaccttcatgactagtgcaatatnccgtcttaattgtattttatatgcaaattttgggatgggaacttccacacgcccgtatgggacact

SEQ ID NO: 50653 - DNA, 156 bp, Oryza sativa
  unsure (1)..(156): unsure at all n locations
  Clone ID: PAT_MRT4530_53118C.1
gggatcatgtgtacttcttgaagatatcgtatatnctgtagttggtatacatctccgtattcctatttgtttcgttctgttttggagatactactacgctacagccaaggaaaancnncacagntcagtcgngcactctgctcctctgcagagatc

SEQ ID NO: 50654 - DNA, 762 bp, Oryza sativa
  Clone ID: PAT_MRT4530_53119C.1
atgaccgatgatgggggcggcagaaaccggcgacggcgaggcgcggaggcggcggggtcggcggggttggcgacggcaaggcgcggggttgccgacagcaaggcgcgggtaaccatccaaccccttatccccgaaatttttggatcatccactcagccggcgaacgcctcaccctgccgtcaagatggccagaccagctgggatgcggtgaagaaggagcggctagtgcagtcagcacagctaggggtcgccaaactccacatcggagtggcgttagaggacctgccgttgagggggagccgccgtcatccgatcagatctggagccaccgtcgccatggctctccaccgcggaggcctaggcagccaaggacacgaggtgactgccaagctcctccaacgcctgccgcagcgccgtccacccctcccgccatcggcgatgttcatgaaggaaacgggatgtaacccgatccgctgggaccagcgccggtggcaccaggagagccgcgacaggtccggggcatcaggcatggcttcctcctccttgctcatcacggaccagcgctgtatcggtgagacctggcggctggaggctggccgtccctgtgctatgcgtggattccaggcagatttggcgctgatggctgacattgcctgcgcaggggccacacctgctgctcattgccggcacccaaagacagccgaggacttcctgaagctgagccccggccgcaaggttaatttttctctagacgcatcttga

SEQ ID NO: 50655 - DNA, 2361 bp, Oryza sativa
  Clone ID: PAT_MRT4530_5311C.1
ctattctacttcttctatggcttgggcatcttgagcgtcggttccagggataactttcagagacttggtcagatcagcaacatgcttgatagccgatttgagtcttgctttctgttcttcaatagtatttgggagatcggctagttttttgtgctccatatccagctcagcgttgcattcttcaagttgtgctaagagttcaatcttgcgagcctcgagccgatcaatgttggacttgattgggccttcagatagttgatcaagcttggacttcttttccagagttttcttcacatcatcagataaagaggctaaggctttgcttgtggtatcttcttctccttcatcaagataatctctgatgttaaaagagaaaagatcggctaatactgggacagcaggagcagttggttgttcttcttcctcaacgtgatgactccccacagccgaaggagtctggtcacttgacgattgtggtggagctagtttagatgttgttgcagccgatttcttcttcactgcagtcttctttttccttgtaaagtgaacgggggcagaaggagttgggggcgtttgcttgggtgaagccgatggtgttctttctgtgtcactcatttcggctacagcctggtcaacatcttcgccaatttcctcttcatctaaggcttgttcaataaatggatccaaggcgggcagatcatcagccggcttatcagtcggtttggttttcttgaacttggcctttttctttggagccaagaccaaggtattcacggctgatggtctggttttccttttttggcctgcatcggctagttccctagttaggccgtgaaggagagttgaagtcttgggggcatgatagccgataacagggggagatagcccacctccattcagaattaaacccgaagcatactcaatattcttgccactattactttgatgaggaggggaggactctgttgtctggggtatgacgtcggggaacagatctgtcatatacatcgtagccgattgatgaaacagatgcagcttccattcaccccaccatctgtcaaagtttttgcttctaaatcctgccaactcaatattttcaatgctgcccagaggaggcccaggtaggttaagtagccgatccatcattagagtggatgtgatttgtcctcggcactgaatcttgtcggcaaaaaataagccgattgggagttggcccaatccaagttgtctggccgagctcattgggtgataaaactcgtaggagtcttggatgtttctcccttgatgaatgccgacaggaaggatgcatgggttgattgcggctataaaaacttctctggatttttggaatttcttgtgattaatatcttcgaatctaaaatctgatggaagttcgaggtctgcggagtcttcataagggaaccagattcgtgcatctttcttaaaaccttcgtagaagctacagaaccagtccttaagcagctcggccgataactttgctcctgcatcggttggtgtggatgcatattctccatacgacatgcacctgcgatgggtgcgctcttctccgtcatcttccacgatcggccctggcagtgtgaattcagcttctgttatagagggccgattgacaaccttcataactatcaggtttaaccaagtttgcagcagccaccagggtccacctgctccaaccactgagccgacggctattctagccgatgcattgttcaacatctgatacagatagccgagaaggattttgcccaaagggaattctttctttgattctaaggcttcagctacgaactgccaattggttgtagggccacaactggatccacagaagaggaacttttccagccacatgagcaaaaaggctacgtgctctcgaggggtaacagatccttggcccatgtatgccgccacatagccgaaccaaccacctatgctcttggtcttcaagtcaaattggttcttgatatttatgctcatggggttagccgatgaagtcacatctaatccggtaatcatggtgatgtcgattaaagttggagtcatcggcccctggttgaataagaaagcgttgatggtgttcgaccagaagtaggtggcggcagccattagaggttcatccttagcagaattggctatggtgagagcaagtgcttggccgattccaatctcgtcccaatgaactttcttactagccgcgttgataccaagtagaccagctcttatcaggtgtgagtttttcgagagatggccaagacttaaaggtattcttccagtgacccaagttagggttggctcagtgtactcggttgatggcgcatcagatgggttggtggaagacgacat

SEQ ID NO: 50656 - DNA, 390 bp, Oryza sativa
  Clone ID: PAT_MRT4530_53120C.1
atggccgtcgtagtgcggaggctacacagcgtgcaccgcgtcacgctcagccactccagcgccgatcactccggcagccgtcactgcagccccacagcctcctacctctccccgtcgctggcccgtagcctcctactccccgcgcaccgtagcccctgccgaccgccgccgtggcctcctgcgcgtagccgccggcctcccctcttcaccgtgcgcccgccgccgcaacttcctgcctgcctctgcggcctcctgcccgtcgccctcccggccgagccgccgccgccgggtttcctaaacgccaccggagcctcctgcccgtcgccgcctgctgcaacctgcaagccgggacgccgccgccagggatgggggattgaggattggagataa

SEQ ID NO: 50657 - DNA, 1095 bp, Oryza sativa
  unsure (1)..(1095): unsure at all n locations
  Clone ID: PAT_MRT4530_53121C.1
atgaccgatgatgggggcggcagaaaccggcgacggcgaggcgcggaggcggcggggtcggcggggttggcgacggcaaggcgcggggttgccgacagcaaggcgcgggtaaccatccaaccccttatccccgaaatttttggatcatccactcagccggcgaacgcctcaccctgccgtcaagatggccagaccagctgggatgcggtgaagaaggagcggctagtgcagtcagcacagctaggggtcgccaaactccacatcggagtggcgttagaggacctgccgttgagggggagccgccgtcatccgatcagatctggagccaccgtcgccatggctctccaccgcggaggcctaggcagccaaggacacgaggtgactgccaagctcctccaacgcctgccgcagcgccgtccacccctcccgccatcggcgatgttcatgaaggaaacgggatgtaacccgatccgctgggaccagcgccggtggcaccaggagagccgcgacaggtccggggcatcaggcatggcttcctcctccttgctcatcacggaccagcgctgtatcggtgagacctggcggctggaggctggccgtccctgtgctatgcgtggattccaggcagatttggcgctgatggctgacattgcctgcgcagggccacacctgctgctcgtcaatttcttccctatctacaagctgggtcctcaccaacacctgcgacacttctcatattgccggcacccaaagacagccgaggacttcctgaagctgagccccggccgcaaggttaatttttctctagacgcatcttgattggtatatgtattcgtgttaatcctgagtaacatgaccacagaagaaataatctgcagctgtggttggtattcacactccactatgattgatggaactgatggtttgggtgttgctgatttgggagttggtgacattgaaacaaccactgattgcacaaacacatcaaatatatgtataagttttatgagtctattagtatatgttctttaggttatntttttttgtactagtcttgtatctgacattctgaattgctgacaaatacatgtatga

SEQ ID NO: 50658 - DNA, 1515 bp, Oryza sativa
  Clone ID: PAT_MRT4530_53122C.1
tttcgcatgcgtttggactccaccgccgtggcggccgctctagaactagtggatcccccgggctgcaggaattcggcacgagggtcgaattcggatacaaatctgatcagttcgatttcgatcgaatttcacccaaagtccacacaaactttcgattcgatttctccgatctcgcagcggtggcggccatggcgcagaggacgctggagctgacgctgatctcggccaaggatctcaaggacgtgaacctcctctccaagatggaggtctacgccgtcgtctcgctctccggcgaccgccgctcgcggcagcggatcgccaccgaccgcgccggtggccgcaacccggcgtggaacgccgccccgctccggttcaccgtcccggcctccggcgcgggttccctccacgtcctcctccgcgccgagcgcgccctcggcgaccgcgacgtcggcgaggtccacatccccctctcggagctcctctccggcgcccccgacggcgccgtccccgccaagttcgtctcctaccaggtccgcaagatctcctccgggaagccacagggcgtcctcaatttctcctacaagatcggcgaggtaacccaatccggctcctaccctggtgcctctcctccggtcgcgtacggccaagctccaccggcgccagcttacccgccctccgccgccgccgccgcggcctacccgccccaatccacctacccaccaccgaccgcctacccaacggcagcgaaggccgatgggtcagccgccgcggcctacccaccccagtccgcctacccaccaccgggcaagggaaacgagccatcgacggcttacccacctcccgccggctacccgccggcgaccggaagtagtaagccggcgaaggcgggtgagccggtgacggcgtacccagccgccgcggggccgagcaccgccgcgccatacggcacggcgccaccgccgcagtacggctacgggtacccggcccagccgccgccgccgcaagccggctacggctacccacccccgccgccgcaagccggctacggcggcggctacggctacccgccgcaggctgggtacggcggctaccagcagcaggccgtgaagccggcgaagaagaacaacttcgggatgggactcggagccgggctgctcggcggcgcgctcggcggcctcctcatcggagacgccatctccgacgcgtcggcgtatgacgccggctacgacgcagggttcgacgacggcggtggcttcgatttctagatgacacagatcgatgcaatgggtgatcttcgtataatctcgtattggtttttgttttgaattttgtttactgccaggaccaaattatggatgatgtaaataggagtttaattgacaccatatatatgtggtgaagctatgtgatggagtacaaatatgagtcaactgttgttttttttgtttttgtttttttgaatgaattaagcgcctaatcggaatttttcccccccaaaaattaaaaaaaccccaa

SEQ ID NO: 50659 - DNA, 498 bp, Oryza sativa
  Clone ID: PAT_MRT4530_53123C.1
cgtcttttttttttttgggcaataccttttgatatataatagcaagcaccaactaaaatcgagtcttttacaatgaataataggtaaaaacggcctgcattctataccactcaaggcaacaaggatacaaaatgattaactttaacagaccattcactctgcacattcttatgcacaaaaaaacactgtggattctcaaacctcttgcaaaggtgatgcacataccacttgcgtatcctcaaattgaccaaattccccaacctaagcttggcttgtccattttgaacaatgccaaagtcatagtgataaaatggcctttaaaccaatgcaaaaagttcattccaattttctgtgggacttaatatatggggcgcttccttctggcggtcttattcttggaaaacactgctggaccattcagatgagcgttagtgctttctctccaccaaacttttaagccaatccttgccttagtgctatcggttgcagcagcgccat

SEQ ID NO: 50660 - DNA, 393 bp, Oryza sativa
  Clone ID: PAT_MRT4530_53124C.1
atgcatggaagcatcgggtgctgcaaagtgcgaatccaacgacgaactacgggcagatcggtcacgtacacgatagatgcagatgcaggtggtatctggggtgctctgaactgccgcctgccggcggcttggcttgccgcgtcgcgagccgaccggttgccatccaggggagccgccgccgccgccgccgatccttctcctcccacctcgcccgcgccgatggagcagctcaacgccaagctctacgacaagtacaccgccctcaagaagcggaagctgctcgacgaggggctggaccagaagcgggctgccgacatcaaggagctccagcaagccatgaaagattgggtcgccgacctccagggcgagaacgagcgcctcattgccaagctg

SEQ ID NO: 50661 - DNA, 340 bp, Oryza sativa
  Clone ID: PAT_MRT4530_53125C.1
tgaaagtgctagatctatcacacactgcaattacttccattccagaatgtgataaattggttgcattgcagcatctcgacctgtcatacacacatattatgagattacctgagcgcctatggttattgaaagagttgaggcatctggacctcagtgtgactgttgcacttgaagatactttgaataactgctcaaagttacacaagttgagagtgctgaatctcttccgcagccattacgggattcgtgatgttgatgacctgaatctggattcactgagggatctattggttcttggtatcactatttattcacaagatgtgcttaaagaaatgaacga

SEQ ID NO: 50662 - DNA, 195 bp, Oryza sativa
  Clone ID: PAT_MRT4530_53126C.1
atggtgacgtgtgcatcatgggcacatgatgacgcggtgacatgggaggtggcagaggtggcggcgcgaggtacggcggtgccctccgctagatctggccggaggcagagcggcagcaggaggcaggtcgtggtgggagggaaggccgcggtggtggcttcggacggaggaggcggcgacaaaagaatcgggtaa

SEQ ID NO: 50663 - DNA, 2028 bp, Oryza sativa
  Clone ID: PAT_MRT4530_53127C.1
atggcggaggagagagaaagctttgagagtaaatgggctccctccgatgtaacagaggagaacttgaaggagatggtggcgcacggtgttcttccggcgaaggaaatcatcggctggcatcctgcgtgtggtgaggcattcccgaccccggacacgcatgaggtcgtggtattttcccatttcttctatggtggtgtttctcttccaacttcgaaattcttcagggtgattcttgagttttatgggattagtttgcatcatctcaaccccaattccgtagttcatattgcaaactttgttcacgcctgtgaggcttttctgggaattaagccgcattttgccctgttccgtcgcatcttcttcctgaagccccagccaaacaagagcaaaccgtgtgttgttgggggagccggttttcaactgaggggcactttaagccagaaatacttttcaatgcctttcaaaacatccaataagggttggcaagcaaattggttctatgtgcaaaatcctgagccagcgcttcccgagtactattgtcttcctccaacatatcaagatacatggaactcgcttccaatgggagatgaagctgctcaggccctcacattgctggatcgcatgctgaagcttaaggaacaagatccagagtccctcgaattcaagattatgaaggagagaatttataagattttctcgtctggcattgtagtcagctattcacacatactgccagtggtgccatataacgctttcaaccctcctcctctgccgctcagcgccgttctcctcgccgataacccggtcaggcaagcgggggtccaaaaatccagccgactgctcaatcaagcagcccaaagccgactgatcaaccaggccccaggaaaaggaaaatggaaaccgtctgacattgatccatctggaaaaaatcctaaatcgactaataaagaggctggtgctgctactgccagtgagaccaagcctgctgaagaagactgcccgactggtagtcagtcggcaaccggcaatgtagaaaccgagaacgagcccccgactggaaaccagtcggtagatgctgaaaccggcgctaaccaggagctcctgactggagaccagccgggtgatgagcaaaataaagacatctctgagacagaggggcaagccagcagccctcccttaaacgatactaatgctggtccagaagccagtacttttgataaggtagaggggcctgctcgtccaccgctgaagatcataacaggcccaatgattggcgatgaagaagagattcttcggatccgatcagctgaagactctcgaccacctatcttagtcaaatggtgggatgacgagatgcaaccgcagggcatagtaataaataagcagaaagaagacgaggaagtgtctttgctaataaggacgcttaaccaagccacccgtcttgtgaatagaatttatcttcgaaatgaagcaaagaccgcaaccctcgagaagctggtccctcatcttggaactgcggaagaaaccagagctaaactccacgaaaccagggagctggctaggaaaacagaacatgatctcagggaccgggttgctaagcttcaagaagccaactatgaactgagtggttcgtcgaaagtccaagctgccaagatcactgagttggagaggcgagttaaagctctcgaaaaggataagagtgatcttataaaggaaagagacttggccatcaaagatgtcgaagatcacaaaattaaatcccaggctcagtttgaggtcttagtcaacaagattgaaaaacttgaaggggctagagatgaagtcgccaatgctgctacgccgcttattcaagccatgttctataataacaatgacggaacaagtgaagaagatgcccttgatctcattaatgatgcccagaaggctgcggacaagattgctgtagacgttgtagaaagatttcaagacaccaatcttggtccgactggatctaatgaatccgatgatgagaaaactgagtctggttga

SEQ ID NO: 50664 - DNA, 390 bp, Oryza sativa
  Clone ID: PAT_MRT4530_53128C.1
ccggcccgggacccccacaaagcaaatcaagctacaacaaagatcttggcatctcgcccttggtcactatagctaggtaggtaggtaggtaggtaggtagcgagagatgtccatggagaacggcgactccagatttgttagggatttggtgtcgccgatgcctggaccgccgctactgccgacgcaacaagcgctgagggcactgtcatctttgcagattatccaggggcttagagtggcatcgccagagcggttgccacaaccatcaagcggccagcgtcgtatcttgccgatggccccacaggcacgacggtggcgtgctgatggcagcacaactatgtctgtggcatcgttgccgctaaaccaggtccgtgctattgggttgtttct

SEQ ID NO: 50665 - DNA, 440 bp, Oryza sativa
  Clone ID: PAT_MRT4530_53129C.1
tcggttagaatgacttatattgcgaaacggagggagtagttaatcgttaaacttcacttctagtctctaccattagtcccaaaataacttcatttctatcctcttacggttttacctaccctcggttcaaaaatcgatgagctttattcttcaataagccttaccaactccttacctaaccatccacccaccaatactaccttttctatctctacctttttttgcacacccaaaactaaaaatgaagttattttgggatggagggagtactgtttgcattattagtcttggattgattctgtattgtttttagtttgatctgcaaagttgtattctctaatatgggcccactagtgtacattgaagattcactcgagattctgagtcctaagaattccacctgaaatgctggatttatgtttttttgggaggcttatttt

SEQ ID NO: 50666 - DNA, 1863 bp, Oryza sativa
  Clone ID: PAT_MRT4530_5312C.1
atgatgagcgggaacgagatcatgccggtcacattggatgatttcgaaggagaagaccgcaagtccatggaggagtacatcaaggagatcacacaggaggcgttgatgagggcgtgcactaggactcgtcaaggcgtgatcatcaagcccgggccacttcctaagctcgctcccaatttggtaagcaatgacgagtggaaccgatggagcggcgcatctagccggtccgaccgggtattaccccggcggtcagaccgagactcaggccggtctgaccgcgcctctggatgtcggtcaaaccaggccctgggccgggggtatcctcccgatactagacaaggccaatataaccatattgcgccgcaaacacaacctattaggacaccaaatccaccaccaaatcaacataggcctgataatatggaggaaataattagtgggattattagggataaattcggtattgaaactaggaatcgtgctaaggtttaccaaaagtcgtatcctgactattatgataatgtgccgtttcctcgtaattatagagttcccgaatttaccaaatttagtgctgaggatagtaggaccacatgggagcatataggtcaatttttagcgcaatgtgacaatgacaccattgagagtatagctgaactaaatgacggttcggattgtattacaagcgaaaatgaaatagcattgtcacctaagaccgaatcaaaaattggtcatgtggatattggaaaagatgatgacaatgtcttgcgggatagtggtgagatagaatccaaagtagctatacatacatatcaaagaccgtatcctgaacatatagatttggtcacatacccgcaaggatttgaggtgctcaacttcacgaaattcacaggtgagaatgctatgactacaatggagcatatcggccgctttattgatcaatgtggtaaggccggtagcgatgatttgcttaagttgaagttgtttcccttttctttgtcaaactttgcatctacatggtatagtttgtttgctcctagttcaatttctacatggtcacaaatggagcatgagtttcatgattattttaaagatgcgagcttaatggagcaaagaccgattgatacttcatcggtcacttgtgaaactatttcggttacatctatgcctaagaccgaaattgttagtgatcctctccctgttagtactattgatgttgacaaaaagaaagggaaacgtgttattattggggatgctcggcccaagaataggataaaaaatacgaaggccaaagatcataaagttgtaaaggatgggtcatctaattcccaaaagaccaaaaagccgaggctcacttttgagatgcttatggctaaatacaagaaaggattagctggtcaacgatttgataaccaaactagtgattcgaaaagaccaagatcatctcgtaggaagagatttggtcaaacatcaaagcaatcggagccatcaaccataccaactccatacaaacctccgaatcggtccggtggatcaaaggtgaaaaaagtgaagaaggtgtgggtgaggaaagaagccaaagctctaaaggtcgttgctatcaatgaagaatctcaagatgttcatgtacctactggagatgcggcgaaaactatacaagcggagaaaactgaagccgacgccgttattgtcaacatcggcggcctgaccaaaacagctggctggtcaaaacgccagacaacggccggtctaaccgaccatcctagccggtctgaccgacggcttgtggccggtctgaccgggcccagaggccggtttgaccgaggggcattggagaagagtgagaaaattgagagcaacacatga

SEQ ID NO: 50667 - DNA, 429 bp, Oryza sativa
  Clone ID: PAT_MRT4530_53130C.1
cagtgaaaaaacgctttgccaaatggaaaagttctagaagattgatgctcagttgtggtactagcggacatctgtgagatgtacaagcttgatctcctcctggaaaaaaaaaatcatctttacttcttcactaccgacatttttcaggttggcagccttgtattgtaccgtagtatgcaaatggaacagtaagtaatcattcagaaaactgtacaacattgcattcagggcttcaggccaccgttttgtaataaaggttggccaccggatggatgccagtatggctgcacatgagatagatccaaagcatgttgacgatctgcagtgcacacgagtcagagtcatgctcttgtcttgcacactgttttcttcagaatgttcagttgattccatccaatggatttgttcgtttctgcagaccaacctgcc

SEQ ID NO: 50668 - DNA, 1812 bp, Oryza sativa
  Clone ID: PAT_MRT4530_53131C.1
atgtcgtcggacgacgacgacgatgggtcggggcgcaccaagctgatcatcgccgccgtggtcatgctgctcgccatcgtgctcggcacggtggcctacgtggtggtggaccgcgccggcgacgacgacggcctgagcaagcgcggcatgaagtcgacgatgcgcagcgtggacctcttctgcgcgcccacggactaccgcgtggcgtgcaaggacaccctggagcgcgtcctggcgcggtcgtcggacccggccgaccacccgcacgccgccgccgccgcggcgatcacggcggtggagcgggagctggcgcgcgggttcgaccggtcgtcggtgctggaggcggtgcgggcgagcaacgacagccgggtcgccgaggccctccgcgactgccggacgctgctcggcgactgccgtggcgacgtgagccgggcgctcaccagcatcgcgtggcgcggcgtggacgccgtgtcgcaggacctccaggcgtggctcagcgcggtgatcacgttccagggctcctgcgtcgacatgttcccgcagggccccatcaaggaccaggtgagggaggccatggagaaggcccgcgagatctccagcaacgccatcgccatcatccagcagggcgccgccttcgccgccatgctcgacctccacgccagcgagagccacgccgccgaaggcgaggagctcgacgtcgaccacgacatccagcaccacgtggaccgccacctcgaggatcagtcgttaccaccagtcccgccgtggttgtccgacgaggaccggaggatgctcaccagcggcgaggagttcgtcgccgggctgaccccgaacgtgacggtggccaaggacggcagcggcgacttcaccaacatctcggcggcgctggacgccctgccggaggcgtacgccgggaagtacatcatctacgtgaaggaaggcgtgtacgacgagacggtgaacgtcaccagccggatggccaacatcaccatgtacggcgacggctccaagaaatccatcgtcaccggcagcaagaacatcgccgacggcgtcaggatgtggaagacagccaccttcgcggtggacggcgaccggttcacggcgatgaggctggggatacggaacacggcgggggaggagaagcagcaggcgctggcgctgcgggtgaaggcggacaagagcatcttcttcaactgccggatcgagggcaaccaggacacgctgttcgcgcaggcctaccgccagttctaccggagctgcgtcatctccggcaccgtcgacttcatcttcggcgacgcggccgccatgttccagcgctgcatcatcctcgtcaagccgccgctcccggggaagcccgccgtggtgaccgcgcacgggcggcgcgaccggcagcagaccacggggttcgtgctgcaccacagccaggtggtcgccgacgaggacttcgccggcgccggcggcgggagcagcaacacgtcgtcgtcgtcgggggcggcgccgaggctggcgtacctggggcggccgtggaaggagcacgcgaggacgatcgtgatggagtcggtgatcggagggttcgtgcacgcgcaggggtacatgccgtgggaggggaaggacaacctgggcgaggcgttctacggggagtacggcaacagcgggcaaggcgccaactcgacggggaggatggagatgcgggggttccacgtgctggacagggagaaggccatgcagttcacggtgggccgcttcctgcacggcgccgactggatcccggagaccggcacgcccgtcacgataggcctcttcggtggctag

SEQ ID NO: 50669 - DNA, 162 bp, Oryza sativa
  Clone ID: PAT_MRT4530_53132C.1
atgtcagccacagtaatgcagagaatctcgttccagtggacacacattgacacatactacgtacaacacatggccaaggcgatccagatcccgacgaacccgccgtgcgacgagagaagaaccaagcacgggatcgtcaccgccgctacgccgacctgcaat

SEQ ID NO: 50670 - DNA, 347 bp, Oryza sativa
  Clone ID: PAT_MRT4530_53133C.1
tggttcttgacactcagctgtatggagaaggtgaaggtaggctccagccacggcttcccagactctccgccgccacattcgcgccacaactcatgacctgcaagacctactatctctgctaggtccatggggacactaccatcactgaggatgagcaaggaccaggacccacaggcatctcggcagcagacatacatcgggctgcatccacatagcgatgatgatgcaagacaacgcactacactcatgctgaacggagggcgggctgagctgctgccgactgcgatcaggaatgcatcggtggtgctgatgctggaggcgcgcgactgactgactgcagaccgact

SEQ ID NO: 50671 - DNA, 113 bp, Oryza sativa
  unsure (1)..(113): unsure at all n locations
  Clone ID: PAT_MRT4530_53134C.1
tctccgtgcaggacctcgtcctggctgtgcgcgcccacacgctgggcttgtcccgctgcaccaacttccgcgaccgcctctacaacgagacggncacgctcgacgacctcctc

SEQ ID NO: 50672 - DNA, 269 bp, Oryza sativa
  Clone ID: PAT_MRT4530_53135C.1
ttttagggtgataggcagaaatacatgcagatattaaggatgaatggaagcaatgcttcattcctatattattataatgataaacagacaagctaccatgctcgtgtgacacatgcgcacatgggagccgtagacccatggacgaagagcagatgaactagctaacaacttaacacactcacacacgcactgctgacatgacaacataatattgaaatgcttacatgcatccacagagctacatacatacatacgcttgtcggcttgcc

SEQ ID NO: 50673 - DNA, 404 bp, Oryza sativa
  Clone ID: PAT_MRT4530_53136C.1
ctggattaacggcgaattttgctccgcttcagcatacgagcgaatagcgtgctctccagctccatcatatacacaccgcggatcgatgcggctgatagatcagaggaagcttccactcaaggaggactacatctacgtcacatgctccggcgatggatggaacgcattgacatacatgggtgtccggggcgctcttgcgagggccatagcagcggctatggctctggctctccaggttactgggttggaggatttcaccggaacacctgcaaaggcagcacgttccgtccaccagaaattggactatcttgtgtctggccgcccaactggagtgaacctatctggtgctgcaacccagcataagatgcaaatcaaggccaccgcatacttagaaagatgccaaa

SEQ ID NO: 50674 - DNA, 195 bp, Oryza sativa
  Clone ID: PAT_MRT4530_53137C.1
atggctcggccacggcggggtggccgtggcggcgcatcgccggggttcaccaccgacggcgatgatgcacggcagcatcccagtgcacagatgaggtcggcaaagcttgtgggcgttgtcttcttcatggccggtgagggatttgagggcgacgaagagattgagggcttcctctctcggtttgatcgacactag

SEQ ID NO: 50675 - DNA, 2361 bp, Oryza sativa
  Clone ID: PAT_MRT4530_53138C.1
atgcgcctccactcgtcgctctgctgcttcctcctgatcatccctcgctgccgccgcagcacgccgcttctgctccccggcaagccgcgtccaaacaggacaagcatcctgtcggtatcgccgtgcgactagcggcatatctatggcttcaatccgcagttgggcctgcaggtggagcgtgggaagcggcacaagacgtcctactcgccttcctgtctcgagtcgctgataaacatcgcggagccgccggtcgtacctgtgtgtaagaccctggattatgtgcaggtgctatctagcatccagaagaagctcgagcaatgtgtgccgagcgggcgaccagggctgtagttgatacagaccggggtgttcactggatttggggtggagaatttgcgccagacggggattggtaccgcagtgcggtgcatgaccgctgtacctgagaacattgtgttcttgcccttgctgggtttcccagagagaacgggggtggtgataatggagatccgagagacatgttggaggtattgcaaaaaatttgggccacttaagatagcagctcggattattgtggaagagagcgaactatttgagatttgcgaattgggacccagttggaacgattccgtgtttgccccttcagatatcgtggaggcagtactgatgggatagtcacgaggagaaagaagcaattgcagagctaacctagggcgattgcattcaaagctgacctccacctattgcatcttcgcgcggcgttccacgagcatatcggggatgtccccagcgctcttcgcgactgtcgagccgccctttctctggatccaaatcaccaagaaatgctggagcttcagaaacgcgtgaacagccaagagccctaacaaaaaattgtggtgccacttggtgcattgcataccatgatttttgcgctcataggtgcgcctcatgacagcccttgactccatccaattttcttcatttctttgttaattactgtaatatgatgtattcagcaagaaaggaaaaatgaaagcactagttctttggaagccatcatcgatgaatcttagcactcgatgactgctggcttttgtaaaagtaatgcctaatcactgaactgttgtctcctggaaatgaaaatcaccgtgcatgatgtaactttcaggccccggtcatgtgtattccattgctggtcttgctagaattgctggtacaagaggtagaaagggtttggcttatgagaagctcagttcggtcataacatcaagtgtaccactaggatggatgtatatggagagatctctgtattcagagggtgataaaaagttgggtgaccttgacaaagcaactgagctggatccaactctcacttacccttacatgtatcgagctgcatccttgatgagaaaaaaggatgcaagacttgccttagaggaaatcaaccgactattgggtttcaagctagcattggaatgcttggagctccggatttgtctatatcttgctctcgaagactacaaatctgcaatttgtgatatccatgctatccttacactttctcctgagtaccgaatgttggaaggtcgtgtagctgcttccaaaataggcactcttcttggggcacatgtcgagcagtggaatacagctgagtgttggcttcagctgtatgaacgctggtcatcagtggatgatattggttccctttcagtgatttaccggatgcttgagtcagatgcagcaaaaggtgttgatccttcttattctgcgactgttatatcgcttcttgaagatgcactaaagtgcccttcagaccggcttcggaagggtcaggctttgaacaatcttggtggtgtttatgttgattgtgagaagttagacgcagcagctgattgctacacgagtgctttgaagatccgacacactagggcacatcaaggtcttgcccgtgttcattttctcaggaataacagggatgctgcatatgaagaaatgacaaagttgatagagaaagctaaaaacaatgcttcagcttatgagaaacgttcggaatattgtgaacgagagcaaactatgacagatttgcaaatagtgacccagttggatccattacgtgtttacccgtacagataccgtgcagcagtactgatggatagtcacaaggagaaagaagcaattgcagagctaaccagggcgattgcattcaaagctgacctccacctattgcatcttcgcgcggcgttccacgagcatatcggggatgtccccagcgctcttcgcgactgtcgagccgccctttctctggatccaaatcaccaagaaatgctggagcttcagaaacgcgtgaacagccaagagccctaa

SEQ ID NO: 50676 - DNA, 297 bp, Oryza sativa
  Clone ID: PAT_MRT4530_53139C.1
cttgtttacaacaacgcggagtggctccctcactgtgacgtgccccgcatcaaagcatgggtagaaaaaatggcagcgtcgtccatccctttcttcgcaacgccgggcgtgggtcgtggcgaggagcgccccacgtcgcgccgcgccggagccccggagcgccagcgccgcaagggattttttttttgccctctcttcacattctcatttgtgtgcgggttcgccgagcccgcgtcgcggctgcagctaggggagggtggctacgacggctgttcatggagattaactgcagcttga

SEQ ID NO: 50677 - DNA, 2625 bp, Oryza sativa
  Clone ID: PAT_MRT4530_5313C.1
ttaggcatcctgagcgtcggttccaaggataactttcagagacttggtcagatcagcaacatgcttgatagccgatttgagtcttgctttctgttcttcaatagattttgggagatcggctagttttttgtgttccatgtccagctcagcgttgcattcttcaagttgtgctaagagttcaatcttgtgagcctcgagccgatcaatattagacttgattgggccttcagatagttgatcaagcttggatttctcttcatgcacaagttgtcgattagcttggatagtggcctcaatatccttgcgctctcgccgttcagccagtcttaatttggctttttccagtttgaattggtgttgctcaaggtaaacggctagggtgaggatatcggttaactcatctgggattagagcctgaatctcatgtagccaagccctgattgagccacaatcaaccaccaggctatctagcgatgatgcttctagccgatccaagatacttcctagagtttttgggatagcaggagcagctggttgttcttcttcctcgacgtgatgactccccacagctgaaggggtcttgtcacttgatgtttgttgtacaggaggagaaggaggaggggaaggtggtggagctggtttagatgttgttgcaaccgatttctttttcaccgcagtcttcttttttcttgaaaagaggactggagtagagggagttggaggcgtttgcttgggcgaagctgatggtgttttttcagtatcgcttacttcggctgcagcctgatcaacttcatcttcaattatctcttcatccagagcttgttcaatggatgggtctagggtaggcaggtcatcggctggcttggttttccttgtctttttcttcttagttgggactgcgatgtttacagccgatgatctggttttcctctttttgccggcatcggctggttctttgatgagcccttgaagaagagctgaggtcttgggggcatcatagccaataaccggaggggatggcccacctccattaggaattaagcctggggcataatggatatccttgccactgttgctctgacgaggaggagaagattctgttgtttgagggacaacatctggaaagaggtctgtcatatacattgaagctggttggtggaatagatgcagcttccattcaccccaccatctatcaaagtttcttcttctgaacattgccagttctatgttttcaatactgcccagagggggtcctagaaggttgagcagtcgatccatcatcaaggttgatgaaatttctcctcggcattggatcttgtcagcaaaaaataagccgattaggagttgacccattccaagttgtctagctgagctcattggatgatagaattcataagaaacttggatgtttcttccttgatgaataccgacgggaaggatgcatgggctgattgcagctgagaaaatttccctagacgattggtatatctcatggttaatgtcttcgaatctaaagtccgatgggagctcaaggtcagccgaatcttcataaagaaaccatactcgagcatctttctgaaagccttcatagaagttgcagaactaatccttgagcagctcagctgatagttttgctccggcatcggttggtgtggatgcatattctccgtatgacatacatctgcgatgagtgcgctcttctccatcatcttctacaatcggctctagtcttggtaactcggattctgacacggttggccgattgacaactttcatgactatcaaatttagccaagtttggagcaaccatggtcagcctgctccaactactgcgccgacagctatcttagccgatgcattgttcagcatctggtataaatagccgaggaggattttacccaagagaaattgtctctttgtttctagagcttcagctataaactgccagttggttgtagggccacagcttgatccacaaaagaggaatttctctagccacattaacaagaaagccacatgttctcggggggtgaccgaaccttggcccatatatactgctacataacttgaccagccgcctatgctcttggtcttgaagtcatattggttctttatgttcaagctcatagggttagccgatgaggtgatatccagacccgtgatcatgacgatatctaggagagttggggtcatcggcccttggttgaataagaaggcattgatagtgttggaccagaaataagaggcagctgccatgagaggttcatccttggctgagtttgctatggttaggtcaagttcttggctgattccaatttcgtcccagtgaactcttttgctagccgacatacgcatgaaccatgtagtccaacttttctcgagggaagttttttctagagacggccaagatttaaaggtgtttttccagtgacctggatctggattggttaatcttaacggaatcctattggtttcacagataatgaactcggttggatcaggattgccgattgggccgagaaagtagtggttttcatgcgataagctaggaatcgcaactaggttggagaggtgctcagcgtactcggctgatggcgcatcagatgggccggcggaagacgacat

SEQ ID NO: 50678 - DNA, 195 bp, Oryza sativa
  Clone ID: PAT_MRT4530_53140C.1
atggatctaggttttggcaagaacgtccaggattgcatcccaatgacggttggaggcgtggtgtctagattacgggatatcattatttggggttatatattgcggatgagaggtgggccgctgatggtgatagctcagtacgggaactcggcagtcaggggtggcttctcgaagtaccaggagggcatcggatag

SEQ ID NO: 50679 - DNA, 569 bp, Oryza sativa
  Clone ID: PAT_MRT4530_53141C.1
tgaattataccccacctacttcaatggtctaaatagtggcctgcctaatacggctatgggaaggcatttttttcttgcgaggactatcaatcgtttcagtgagttctaattacttgttctaactcgaccattcggattctgctgcagctgtgcaaacaaccatgatattgataaaaaatatatctatatccaaaactaattgagcgattcagtcaaaaaaatagaggatttctaataatcttgctttgttagttctataatataacgacacacaaacctattaaagatagagaatccggttcgcagtctacctgtttatgagggatgtatatctatagctttcataggctaataccttattttgactgtatcgcactatgtgtcattccagatctcaagaaaataaagactgtaccttcagttcatatcgaaattcaatccaaatggataaatgaccaggatatttagagttctacggagctcgggaacagagtgttctatatccactcttttttctaggagtatatctatgcacttgcttatgatcatggcctaaactgattaaatat

SEQ ID NO: 50680 - DNA, 226 bp, Oryza sativa
  Clone ID: PAT_MRT4530_53142C.1
ggttttgacccataaaagaactgacagacacacctttattattgcataatggagtttacaaggcgcactcaacacgctgcttccatccaactagaaaactaaaatgtctctacaacctggctctatttacagaacacccttccctttttagtcctactgaagggagtctataaggccatttgtcttgcaatatatgagattccccctatcaccactaggctcgcta

SEQ ID NO: 50681 - DNA, 196 bp, Oryza sativa
  Clone ID: PAT_MRT4530_53143C.1
cacgaggagtggatcagccatccggaggaaggaagggtcacgaggccatcaagccatcgcgtgcctcttctcccctctcatctccagaccactaccgccttcctcttcctctccctatcctcggtgagctaccagactccggtttggggtcattggacactcgactggtctcggcctcccccctggtggactccga

SEQ ID NO: 50682 - DNA, 498 bp, Oryza sativa
  Clone ID: PAT_MRT4530_53144C.1
atggcggcggaggcagcggcgcgcggagagggccacgacgacggctacttccccattctcgaggtgcgtattctggatgaggcgtggctgcgagggggcttgtggtggaggagggggatccggggggagcaggggttagccatggcgatggcgcagcagccaggcaatgtcaatgtggctgggttcttgcaggcttcgaggaggctgaggaatcgggtgatcatgatgttgtggatgcgtatgcttctcaggcagctggtcgtgagatggtggctgcgcgtgcatttcaggcggttcatgtgggtgtggcatctgcgggttcttcgggctcgggttcgtctgtttctttggaggattcggcatgaccaccttgtctacatcttggacaccatcatggttttggcatacgtcgtattcaagatcaatgccagcttcataggctacatcgaattcgttaaacttaattgctcatctgcttcattggttggcgatgagtag

SEQ ID NO: 50683 - DNA, 359 bp, Oryza sativa
  Clone ID: PAT_MRT4530_53145C.1
gatagcgagacacccgttataaccttgggcatattaagacaggcgagggaatgaacatgcactgctcattatgctcgttcacacacactctcatttaagggggtccccagatcaaccgatgactggcctgttcacaccggtattcaataaacattgaaactatgtatataactaggcaccatattgcatagtaagccatgaccacgaactctgctcttaatagttgggtgaacgttatctaattgtatggaaaccttctgtccatgccttaagatgttgataggaatcaccgatggaagtgccttgcactagcgcacacttgctcagcttgcctaataggcttggtcaggaaatagctt

SEQ ID NO: 50684 - DNA, 1092 bp, Oryza sativa
  Clone ID: PAT_MRT4530_53146C.1
atgcacatggcgacgggggcgaaggaggtggtggtggtggaggcgtacgagtacgagttcgacctcgagaacccgttcaccagccccgccgacgcgccgcccgccagcctcctggacgccgagggccccaactcccggtccgtctccgccgccgcctccggcgcgcgcggtgagacagccgggttcctctccccgtcggggtagggcgccgcggtggacgtgcaccccggcgtcgcctacgtcgcgctcgactacgtggatagccagccctgcaagcgcatgttgccctgcgagcgcaacccatggtcgcggcgggtgcgcgcgctcagctgcctcgccctcggcgcctggccgcagcgcgccgccgccctccccgccgccgacatccagatggtcgaggccttcatgttcgacgtggcgagattccagcgcaaggggcagatggtgctcaggtcgctggcattgcgaacgcgctccgtgatggcgttcgccttcctcggcttctttctctccgcgtgcttcccgcagccgcggcacccggcgctgctcgacgccatcaaggcccgcgccgtcgacctcctcctccgcgtccagccgggtacgtccaagccgccgccacgcccaatgccaccgtcctcgccgttagattcagcgagcgctcaccttttgcctccggtgcatttcgcagaggtgaagatggcggagttctccccctccgtggcggccgccgcggccctcctcgcggccgccggagaggtcgccggcgcccacctcctcggcttcgaagctggcgtcgccgcttgcccctttgtaaatagcgagaagttgcgggagtgcggcgaggtgatggcggcggcctgcggcgtcgggcccagctgggcggcggcggcgacgagcgccgagacgccggtgacggtgctcggccaccaccggagcgcgagctccgagagcgagcgcaccaccaccgtcggatcggcggccaacagcgccgatgcgaagaggcgctgcatgggcccacctcggcagtggggggctagttttgtttttgttcagaagtactggatgttaagggcgatgaatatattgtggtga

SEQ ID NO: 50685 - DNA, 2754 bp, Oryza sativa
  Clone ID: PAT_MRT4530_53147C.1
atggtgaagacaagggacgatccccgtgactccaacgacgccagtggcagcgaagagcagaccgatggagctcatgtcagtggtgcatctggcagcagatcatctccaccgcccgaaaacccaacagtcactcaaatgatgacaatgatgatgcaacagatgcagcaacattaccatcagatgttgcagcaggcgcaacagaaccagcagtttggtcctccaccatcacacgtgtccaaactgttagactttcttcgtatccagccacccactttctcaagcaccaccaacccaatggaggccaacgactggcttcgtgctattgagaagaagctgatccttctgcaatgtaacgaccgagagaaggttgcttttgctacacatcagttgcaaggtcctgcttctgcttggtgggatcactacgtggtgacccgtccagatgcaacggaggttacttgggcagagttttgtcaaagcttcaggaaggcacagattcccgaagggattatggcacaacagaagagagagttccgtgcattgcaacaaggaaccagaacggttacagagtacctgcacgagttcaaccgcctcgcgcgctacgctcccgaggacgtgcgcaccgatgctgagaagcaggagaagtttttgtttgggctcgatgatgaattgaccaaccaactaatctccggagtctatgaggactttgagaagcttgtggacaaggctatccgccaggaagagcaacgcaacaaaatagaccgaaaaagaaagacagctcagatcagctttcctcaggggaacaatcagaagcctcgtttcatgacgggacagctaggtgggccttccaccctgatcgtctgtcagcaccgtccctatcgcccgagtaacttcaacaacgattacaatggtggcagtcacaacaacagtaagcagcacaaccacaactcgactccacccccactaatggcaccagctcagtcagatccgccagctgtgtcagttcagttagaacaacccaagaagggggctgtaggaaagccaggaccctgcttcaactgtggcaagcacggccactttgctggcaagtgtccgaagctgaatcgcactggacccaggttcatccaggcccgcgccaatcatgtgtctgcagaggaagcacaggcagcaccagaggtcgtgttgggcacgtttccagtgaactcatatccagcaacagttctctttgattcaggtgcctcgcattctttcatttccaaaagatttgctgggacacatggattatcggtagtggaacttaaaataccgatgcaggttcatacccctggaaatgatatgaggacagcacactactgcccctcggtgactatagagatcaaaagatcaccgtttctatccaacctcatccttctcgaatctaaagacctggatgtcattcttggaatggattggttgaccagaaacaagggagtgattgactgcgcaagccgcaccatcaccctaaccaacgacaaaggggagaagatcaccttccgttccccagcgtcgcagaagtccgtagcgagtctgaatcaggctgctattgagggtcagacagaaacagtggagaaaagtcccaggaagttggaggatattcctatagtacaagagtatcctgaggtgttcccagaagacctcactacaatgccaccgaagagagaaatcgagttccggatcgatttggcacccgggactgctccaatttacaagaggccgtacagaatggcagctaatgagctagcagaggtcaagaagcaggttgacgaacagctgcagaaagggtacatccgaccgagtacttcaccttggggtgctccggttatctttgtggagaagaaagacaagaccaagaggatgtgcgtggattatcacgcccttaatgaggtcacaatcaagaacaaatatccgttgccaagaattgatgacctgtttgatcagctaaaaggagctaaggagcaccagctatatgccaagtttagcaagtgtgacttctggttatcggaggtcaaatttctgggtcacatcatttctgctcaaggcgtggcagtggatccatcaaatgtggagtcagttacaaagtggaccccaccaaagacagtttctcagatccggagttttcttggacttgcgggctattaccgtcggttcatcgaaaatttctctaagattgccaggcccatgacacagttgctaaagaaagatgaaaaattcaaatggtcagctgagtgcaaccaaagttttgaagaactcaagaagaagttagtctccgcaccagttctaattctgccagatcagacgaaagacttccagttgcgtccacatgaggccaattatcccactcatgaccttgagttggcagcagtggttcatgctctgaaaatctggcggcactatcttattggcaaccgctgtgaagtttacactgatcataagagcctgaagtacatcttcacccagcccgacttaaatctccggcaacgaagatggctggagttgattaaagattatgacatggggatacactatcatccaggcaaagcaaatgtggtagcagatgctctgagcagaaagagctattgcaatgcagtatgtaccgaaggcatgtgtgacaaattgcagcaagatcttgagcacctaaatttgggcatcgtagaacacggatacgtagctgccctagaggcccggcctacgctcgtggatcaagtcagagcagctcag

SEQ ID NO: 50686 - DNA, 788 bp, Oryza sativa
  unsure (1)..(788): unsure at all n locations
  Clone ID: PAT_MRT4530_53148C.1
ctacacagatccctccactggcacctcgtcgtcggggcgggcgatgccggtgtgcgtggcgagcgcccagagcatggtgatgacctcgatgcccttcaccagccccgcctcgtgcgccctcgcgtgctcctccacgctcgacggcgccatgtacgcgacgagctccacccacacgcccgccaccatctcccacacggcggcgcgcccccccgcggccgccttgtcgtcgccgtcggcttcctccaccagcaacttccccagcacggcgcccttctccagcaccgtcaggctcgcgtacgccgccgcgctgctgtcacggtggatctccgtcgccgtcagcctgtcggcgatcttgcgcaccgcgtcgagccggccccactccgacgtcaggtagacgtggtagccgagctgtccggcgccgaccgccaccttcatctgctcgttcatcacgtcgccgtagacgagctgcgtgccttccttgttgtccggcaggagctccggctggaaggcgacgaggtaggcgcagtacctggacagcctcgccgccgtcttccggctccgccgctcctccgccacatgctccgtggggtgcgggggcccatggtgcgcctccaggagggtggtggcgatgtgccagacaggatgatctccgcgacgccgccgccgccgccgccctggcacgcccacgcgaaccgcgagaacggctccgtcgacaacgccngccgggctgttcttgctcagaggaacggcggcgcccgccggcccgccgtcctgcggcggcctggcgt

SEQ ID NO: 50687 - DNA, 5112 bp, Oryza sativa
  Clone ID: PAT_MRT4530_53149C.1
atggtgaagacaaggaatgatccccgtgactccagcgacgccaggggcagcgaagagcagaccgatggagctcatgtcagtggtgcatctgacagcagttcatctccaccgctcgggaacccaacggtcactcaaatgatgacaatgatgatgcaacagatgcagcaacatcaccatcaggtgttgcaacaggtgcagcagaaccagcggtttgctcctccaccatcacacctgtccaaactgttagactttcttcgtatccagccacccactttctcaagcaccaccaacccaatggaggccaacgactggctccgtgttgttgagaagaagctgaaccttttgcaatgcaacgaccgagagaaggttgcttttgctacacatcaattgcaaggtcctgcttctgcctggtgggataactacgtggtgacccgtccagatgcaacgaaggttacttgggtagagttttgtcaaaactttaggaaggcacagattcctgaagggattatggcacaacagaagagggagttccgtgcattgcaacaaggaaccagaacggttacagagtacctgcacgagttcaaccgcctcgcgcactacgctcctgaggacgtgcgcaccgatgctgagaagcaggagaagtttttgtttgggctcgacgatgaattgaccaaccagctaatctccggagtctatgaggactttgagaagcttgtggacaaggctatccaccaggaagagcaacgcaacaaaatggaccgaaaaagaaaggcagctcagatcagctttcctcaggggaacaatcagaagcctcgcttcatgacgggacagctaggtgggccttccaccctgatcgtctgtcagcaccgtccctatcacccgagtaacttcaacaacgattacaacggtggcagtcacaacaacagtaagcagcacaaccacaactcgactccacccccactaatggcaccagctcagtcagatccgccagctgtgtcagctcagtcagaacaacccaagaagggggctgtaggaaagccaggaccctgcttcaactgtggcaagcacggccactttgctagcaagtgttcgaagctgaatcgcactagacccaggttcatccaggcccgcgccaatcatgtgtctgcagaggaagcacaggcagcatcagatgtcgtgctgggcacgtttccagtgaactcatatccagcaacagttctttttgattcgggtgcctcgcattctttcatttccaagagatttgctgggacacatggattatcggtaatggaacttaaaataccgatgcaggttcatacctctggaaatgacatgaagacatcacactattgcccctcagtgactatagagatcaagaggtcacaatttctatccaacctcatccttctcgaatccaaagacctggatgtcattctcggaatggattggttgaccagacacaagggggtgattgactgcgcaggccgcaccatcaccctaaccaacgacaaaggggagaagatcaccttccgttctccagtgtcacagaagtccgtagcgagtctgaatcaggctgctattgagggtcagacagaaacagtggagaaaagtcccaggaagttggaggatattcctatagtacaagaatatcctgaggtatttcctgaagacctcactacaatgccaccgaagagagaaatcgagttccgaattgatctggcacccggaactgctccaatttacaagaggccgtacagaatggcagctaatgagctagcagaggtcaaaaagcaagttgatgaacagctgcagaaagggtacattcgaccgagtacttcaccttggggtgctccggttatctttgtggagaagaaagacaagactaagaggatgtgcgttgattatcgggcccttaatgaggtcacaatcaagaacaaatatccgttgccaagaattgatgacctgtttgatcagctaaaaggagctaaggtgttttccaagatagacctgcgattaggctatcatcagttgagaattcgggaagaggatattcccaagacagccttcatcactcggtatgggttgtttgagtgcacggttatgtcatttggactcaccaatgcaccggctttcttcatgaacttgatgaacaaagtgtttatggagtttcttgacaagtttgtcgtggtattcattgacgacatacttgtgtattcaaaatcagaagaggaacatgagcatcatcttcgtctggtactcgagaaattgaaggagcaccagttatatgccaagtttagcaagtgtgacttctggttatcggaggtcaaatttctgggtcacgtcatttctgctcaaggcgtggcagtggatccatcaaatgtggaatcagttacaaagtggaccccaccaaagacagtttctcaaatccggagttttcttggacttgcgggctattaccgtcggttcatcgaaaatttctccaagattgccaggcccatgacacagttgctaaagaaagatgaaaaattcaagtggtcagctgagtgcaaccaaagttttgaagaactcaagaagaggttagtctctgcaccagttctaattttgccagatcagacaaaagacttccaagtctactgtgatgcatctcgccaagggttgggatgtgtgttgatgcaagaaggcagagtggtcgcatacgcttcgcgacagttgcgtccacaagagaccaattaccccactcatgaccttgagttggcagcagtggttcatgctctgaaaatctggcggcactatcttattggcaaccgctgtgaagtatacactgatcacaagagtctgaagtacatcttcactcagcctgacttgaatctccgacagcgaagatggctggagttaattaaagattatgacatggggatacattatcatccaggcaaagcaaatgtggtagcagatgctttgagcaggaaaagctattgcaatgccttatgcactgaagacatgtgtggcaaattgcagcaagatcttgagcacctaaatttgggcatcgtggaacacgggtacgtagctgccctagaggcacggcctacgctcgtggatcaagtcagagcagctcaagtaaatgatcctgaaatagctgagctgaaaaagaatatgagggttggaaaagctcgagatttccatgaggatgagcatggcacaatctggttgggagaaagattgtgtgtgcctgacgacaaagaactgaaggatctcatactcacagaagctcatcaaactcagtattcaattcatcccggcagtactaaaatgtaccaggacctcaaagagaaattctggtgggtcagcatgagaagagagatagccgaattcgtcgcactttgcgatgtttgtcagcgagtcaaagcagaacatcagaggcccgcaggactgctacaaccccttcagatcccggaatggaaatgggaagaaatcggaatggatttcataacaggtttgcccaggacatcgtcggggcacgattcaatctgggtggtcgtggatcgactcaccaaagttgctcatttcattccagtacacactacctatactggaaaaaggttggcagagctttatctttcaagaatcatgtgtttgcatggggtacctaagaagattgtatctgatcgaggaagtcaattcacttcaaagttctggcagaaactgcaagaagaattggggactcgtttgaatttcagcacggcttatcatccgcaaacagatggtcagaccgagcgagtaaatcaaatcttggaagatatgttgagagcttgtgcacttgactttggtggagcctgggataaaagtctaccgtatgcggaattctcttacaacaacagctatcagtccagtttgcaaatggcaccgtttgaagcattgtacggacgaaagtgctgcacaccacttttctgggatcaaacaggtgagcgccaactgtttgggacagaagtgttaaccgaagcagaggagaaagtcaggaccgtcagggaaagactgcgaatcgcccagtctcggcagaagagttatgctgataaccgccgaagagagcttactttcgaagcaggggattatgtgtaccttcgtgtcactccgctccggggagtacaccggttccagacgaaaggcaaattggcaccacgctttgtgggaccatacaggattttggaacgcagaggtgaagtcgcttaccagctagagcttccatctaatatggttggtatccacgatgtgtttcatgtatctcaattgaagaagtgtttgagggtacctaaggaacaagctagctcagagcacattgacatccaggaagatctgacttatgtggagaagccgattcgtatcctcgagaccagtgagagaaggaccagaaacaaggtgatcaggttttgcaaagttcagtggagccaccactcggaagaagaggccacctgggaaagagccgctcatccgcacctctttgccaactcttccgaatctcggggtcgagattccgtttaaggggggtaggtttgtctcgccctgaagttcccctcccttgctctcccctccccgaagtccatcccacctcccctctcctcccgggtgccgacaggtggggcccacctgtcggtcgtccctaacctccggcagccgccaccatccgccgccgaaaccgccgcccacgccgccgcttcctccgcatccgcgccctactccgcgcccacacgtccccacgtcgccgccccacgccctgccctctcccgtccgcgcgcgcgtccgcacggacgggattcgatttgaatcctctccccctctctctcctcctccacctctccacgtcgtcgccgcggaaccgccgctcccggccacgtccggcctccccacctctatataaccgaccaccgcgcctctctccacctttttccctctttcgccgtccgcccccgagctccctatcgcccccgccatcggcgccgccgcgtccgccatcccgaggtccacctcgtccgccgttctcccgtccaattccatcgccggagctcgcatctcctcgcactccggtgagcttccaccatagctgccgccgtcggccat

SEQ ID NO: 50688 - DNA, 2400 bp, Oryza sativa
  Clone ID: PAT_MRT4530_5314C.1
atgacgagcgggaacgagatcaacaagatctcattggaggatcttgatgtggaagcacgcaagattacggaggagtgcatcaaagcgatcacgcaggaggcgctaatgagatcgtgctttaggacccaccaaggtgtggttctcaagcctgaaccgttgatcaaacctagttttgatatgcataggcctgagaatatggaagagttaactagtatcattattagggataaatttgggattgaagcgatggatcgtgctagggagtaccaaaagtcgtatcctgattattatgacaatatcccataccctcgtggttatagagttcctgaatttaccaactttagtggtgaggatagtaggaccacatgggagtatgtagccgaactaaatgatggttcggattgtatcacaagcgaaagtgaaatagtattgtcacctaagatcgagtcacaaatcaatcatgtggatgttggaaaaggtgatgacaatgtcttgcggtatagtagtgaaatagaatccaaagtagctatgcatacatatcaaaggccgtatcctgaacgcatagatttggtcccatacccgcaaggatttgaggtgcccaacttcacgaaattcacaggtgaggatgctagaacaacaatggagcatatctgccaatttattgaacaatctggtaagaccggtagtaatgatttgcttaagttaaaattgttttctctttctttgtcaaactttgcatctatatggtatagtttacttgctcccaattcaatttctacatggtcgcaaatggagcatgagtttcatgattattttaaagatgcaagcttgatggagcaaaatccgattgataattcatcggtcacttgtgatactatttcggttataccttttgctaagaccagaattgttagtaatcctctccctattagtcctattgatttagataacgagaaagtagtgattcggcctagtcaagccgaatccacaaaagggaaatgtgttattattggggatcttcggcctaagactaggatcaataatacaaaagccgacgatcataaagttgtaaaggatgagtcatctagtttccaaaagaccaaaaagctgaacctcacttttgagatgcttatggctaagtacaagaaaggattagctggtcaacaattcgataatcagactagtgatttgaaaagaccaagatcatatcgtaggaagagatttggtcaaacaccaaagcaatcggagccatcaactataccaactccatacaaacctccgattgtgatgccatggtatccatatccaatgtcactatatggttatccttttatgtattatatgccatggatgcctcaaccatatatgccgtttcatcaagaatggaagcaatcatctaggtcagtaccaagtcattcatttaactctagtcaagaccgtttcccacaaaagagtcggtccggtggatcaaaggtgaaacaggtgaagaaggtgtgggtgagaaaagaagccaaagctccggaggtcgtcactatcaaggaggaatctcaagacgttcaagtacctactagagatgcggtgaaaactatacaagcgaagaagactgaagccgacgccgtgactgccaaaagtggtggtctgatcgagacagctggctggtctgaccgacggcttgcaaccggtctaaccgggcccagaggctggtctgaccggggggcattggagaagagtgggaaatgcggtattcatcttgcctttgaaatcgtgcaatcaagaaagccgattttgctcggggggcaagacattaatatgctcatgaagaaatcaaaagagatgaacaacgatgggtacaacatcacatctttgagccgccgtttgttggatgctaagacaaggttgctatgggagaagtacatgaagggatttgtggaactcatcaattggcccgggcagcggttcgtgctaatcgcaacggattacttcatcaagtgggccgaagccgtgccgctcaagaatattacttacacggaggctaatggacaagccgagtcgagtaataaaacattgttgaaattagtcgaaaaggagattgaagaacaccaaaagaagtggcatgaggtgctttcggaagcattatggactcataggatatttaaacatggtgttaccaaagtcacttcttttgaattggtctgtggacaagaagccgttttgccaattgaggtaaatcttggctatcttcggtatttcaagcaagacgacttgtcggttgaagattacaagatattgatgggaggcaattttgaagacgtcatcgataagcgtttgaagactttgaaagagatggatgcacttcaagaaaacaatccatgggaaatacttgaagaaatacttccctag

SEQ ID NO: 50689 - DNA, 4896 bp, Oryza sativa
  Clone ID: PAT_MRT4530_53150C.1
atggagtgggcgacggtgcagcacctggatctccgccacgcggggggccgccggggggcctccgcccgcccgctgcagccgcacgctgccgccttccgcgcgtcgcaggccatcgtcgccgtcgccatcggcacgcacgtcgtcgaatttgatgcattgactggaagcaagatagcttcgattgaccttggagctcgtgttgttcgtatggcatatagccctactgctagtcacattgtcattgctattcttgaggatgctacaatcagatcctgtgattttgccactgagcagacgcttgtgctgcactcaccagagaaaaaaaccgatcatgtttcaatagacacggaagttcatcttgcattgacacctcttgagcctattgtatttttcggttttcacaaaagaatgagtgtgacagttgttgggactgttgaaggagggaggccgccaacaaaaataaagactgatcttaaaaagcctgttgttaacctggcttgccatcctcgccttcctgtcctgtatgtagcttacgctgaaggattgatacgcgcttataacatccagacatatgttgttcactacaccttgcaacttgctgttgacagtacaattaagcttgtcggagcgggtgcttttggatttcatccaaccctagagtggatatttattggtgatagaggtggcactctcttggcatgggatgtatcaacggagagaccaagtatgattggaattacacaggctggttcccagcctatcacatctgtttcctggcttccgacactacggttacttgttacaatttcaaaggatggggcacttcaagtatggaaaacacgagttataattaatcctaacagacaacctatggaaactcatttctttgagcatgcagctattgaaacaatggatatcacgaagatactcactcttcaaggtggagaagcagtgtaccctttacctcgaataagaaacttggcagtgcaccccaagtttaatttggctgcagatatgtctgggacagaagctgcaaagaacaaggctgcatacacaagagaagggaggagacaactttttgctgttcttcagggagccaggggatcgactgctgctgttctgaaggagaaacttttagccctgggttcatctggaattttagctgagcaccagctccaggctcagctgcaagagcagcacttgaagggccagagtcagctaactatttcagacattgcaaggaaggcttttcttcacagtcatttcatggagggacatgctaaaagtggtccaatctctcgtttaccactcattacaatttctgattctggtaaccttttgcgagatgttccggtttgtcagccattccatctggagctgaatttcttcaaccaggagaaccgcgtggttcaatatccagttagagctttctatttggatggatttaacctaatggcccacaatcggaagaaagttatcaaattgaaaccaaacgagtccgttctccaggttcactggcaaacaactctaagaggtcctgttgtaggaatattgacaacccagagggtaatgatagcctctgctgatcttgacatactttcaagcagctcaacaaaatatgaccggggtcttccatcatatcgctcaatgttgtgggttggaccagcacttatcttctctagtgcaactgcaataagtatgcttggatgggacaacaaagttcgatctatcctttctactagcttccctcgttctgtgttgcttggtgccttgaaccacaaaggaagctcttgaaaataatgctgcagtgcttgaagaaaacacatttgctgataatgttaccaatccgacagagcgccagggtcctatgcagtttacttttgaatcagaggttgatcgcatattttctgctccactaggttcactggcaaacaactctaagaggtcctgttgtaggaatattgacaacccagaggcacttatcttctctagtgcaactgcaataagtatgcttggatggaacaaccaggatcaatatcccatttctactagcttccctcgttctgtgttgcttggtgccttgaacgaccgcctgctgcttgtaaatccaacagatataaatccaagacagaaaaagggagtggaaataagaagctgtctaatagggcttcttgaacctcttcttattggatttgctacgatgcagcaatactttgagcaaaaacttgatctttcagaggtgctatatcagataacctcaaggtttgatagtttacgtgtcactccaaggtcactggacatattagctaaaggaccccctgtttgtggagatcttgctgtatcactatcccaagcaggccctcagtttacccaaatcatgcggtgcaattacgcaatcaaagccctccggttctctactgctctttcgatcttgaaagatgagttcctgcgttccagagattatcctcaatgccctccaacttctcatctgttccagcgtttccgggagttgggatatgcatgcataaagtatggtgcaggagaggtcatgccctacatgaagactaccgatgctggtattccatctgtcactgcagatcatattggtgtttacttgggcgtgatgatgcgacgcctttcacaagtggaagtaagttaaaagagcttggttaaagctattgcagcagccagtggcgataatgcgagaccagcatcttctgaatcaacacagaagaatgtggcaaatgctgggggtgattcagttggtgatactctggccaggcagctagggggtccaaattgcttcatgcagatgaacaggcaaaagcagcagaggagttcaaaaagactttatatggtgttgttgatggtggaagtagttgctggtattccatctgtcactgcagatcatattggtgtttacttgggcgtgatgaaaggccgaggtaccgtagtggaagtaagtgaaaagagcttggttaaagctattgcagcagccagtggcgataatgcgagaccagcatcttctgaatcaacacagaagaatgtggcaaatgctgggggtggttccctgggtgctactctgccgcgggagcagcaattccaaatgctgcagttgatctaacaggcaacagcggcagaggagttcaaaaagactttatatggtgttgttgatggtggaagtagtgatgaagatgagtctacatcaaagactaaaaagatacacatcaggatacgtgataagcctgctgcatctactgttgatgttaacaaactgaaagaagccactaaacagctaggtttaggtcctccaatcactaggacaagatcgttatcagggacgcctcaagagttgaaccaggctcctatgcagacgccaggtctcgaccacccgcatggttgcaaaaggcacagtttcctcagcgaccaggcatgcctatggaccctattagtctacctgatggtgggtggagcccacagagccaaccttggtcctctgaaccccacggctgtacttcaccctcacatggctttcaagctgctaattccgccatggcgcctcccagtgatcttactgctcccgggaataattctgtcacgaattgctcaacctgctcctggaatgagtgcagttcggcctgtccataatcaaaacatgatggctaatgttggtcttccagatggtggggtcccaccacaggcaccgatgcaacaggcacagtttcctcagcaaccaggcatgcctatggaccctattagtctacctgatggtggtgttcccccacagagccaacctcttccctcgcaaccccaggctcttcctccacagccacatggctttcaacctgctattcctgccatgtcgcaaccaattgatcttagtgctcttgaaggtccaggacagggaaagcaggctcctcgcccccctgcacctactgctgtgcggcctggacaggttccacgtggtgctcctgcagcagagtgctacaagatgggtcttgctcatcttgagcaaaatcagcttacggatgctttatcttgtttggatgaagcattcttggcccttgcaaaggaccagtcacgtgaagctgatatcaaagcgcaggccactatttgtgcacagtataagatagctgttgctttgctacaggaaattgctcgcctacaaagggttcaaggagctggtgcgctcagtgcaaaggaggaaatggccaggctatctcgccaccttgcttccctacctatccaagctaagcaccggattaactgcatcagaactgccatcaagcgaaacatggaggtccagaactttgcctatgccaagcaaatgctcgatctcctatattccaaggcgcccccatcgaagcaggatgagctcaagagtctgatcgacatgtgtgtccagagggggctgacaaacaaatctatcgacccattcgaagacccctctcagttttgcgccgtcaccctcagccgcctctcaaccatcggtcatgatgtttgcgatctctgtggtgccaaattctccgctctttctgcaccagggtgtgtcatctgtggtatggggagcatcaagagatctgacgcacttgctggacctgtgccttccccgtttggctaaacggcgcttcctgtgtcccaacgttgttctgatttttgtatctatagtgtgcagttaacattcttcgcatttcattgttgtagctgtcgtagtattgttggagatatagtacgtcttgggatttggatgagttgtaaccacccttttgatcgtgatgtgatttatacggacggtttttagcattgtaattaggttcggcatttatacatttcccatttacattacgttttgggtttaaatgaatatggtttatgaggtacaataaacttacatct

SEQ ID NO: 50690 - DNA, 394 bp, Oryza sativa
  Clone ID: PAT_MRT4530_53151C.1
aaagaaaagccataaactacattacaaggggatccaagctactcaggtttgtaaaaaccaccacaaagtttaaacattttcaccaacacgggggatcctatttagggcataggccttccccccacatacaaatactttcttgaacaaaacaaaagggcgccagggacacacaattaaatgcggtttaaagttcaaaacaaaaaaaaacaatttcacataatgctcaacaattggtgtttttttaaaaaaagcaacattatttgggggctgttttatgcaagtattcacaaagcctttgacaaaaaagggttgtttcaaaagaaattttttttttaattgggaaacctgtacagttggtttttgcctgaaaaatgctttaaaatgaggacctgtg

SEQ ID NO: 50691 - DNA, 4353 bp, Oryza sativa
  Clone ID: PAT_MRT4530_53152C.1
atggtgaagacaagggacgatccccgtgactccaacgacgccagtggcagcgaagagcagaccgatggagctcatgtcagtggtgcatctggcagcagatcatctccaccgcccgaaaacccaacagtcactcaaatgatgacaatgatgatgcaacagatgcagcaacattaccatcagatgttgcagcaggcgcaacagaaccagcagtttggtcctccaccatcacacgtgtccaaactgttagactttcttcgtatccagccacccactttctcaagcaccaccaacccaatggaggccaacgactggcttcgtgctattgagaagaagctgatccttctgcaatgtaacgaccgagagaaggttgcttttgctacacatcagttgcaaggtcctgcttctgcttggtgggatcactacgtggtgacccgtccagatgcaacggaggttacttgggcagagttttgtcaaagcttcaggaaggcacagattcccgaagggattatggcacaacagaagagagagttccgtgcattgcaacaaggaaccagaacggttacagagtacctgcacgagttcaaccgcctcgcgcgctacgctcccgaggacgtgcgcaccgatgctgagaagcaggagaagtttttgtttgggctcgatgatgaattgaccaaccaactaatctccggagtctatgaggactttgagaagcttgtggacaaggctatccgccaggaagagcaacgcaacaaaatagaccgaaaaagaaagacagctcagatcagctttcctcaggggaacaatcagaagcctcgtttcatgacgggacagctaggtgggccttccaccctgatcgtctgtcagcaccgtccctatcgcccgagtaacttcaacaacgattacaatggtggcagtcacaacaacagtaagcagcacaaccacaactcgactccacccccactaatggcaccagctcagtcagatccgccagctgtgtcagttcagttagaacaacccaagaagggggctgtaggaaagccaggaccctgcttcaactgtggcaagcacggccactttgctggcaagtgtccgaagctgaatcgcactggacccaggttcatccaggcccgcgccaatcatgtgtctgcagaggaagcacaggcagcaccagaggtcgtgttgggcacgtttccagtgaactcatatccagcaacagttctctttgattcaggtgcctcgcattctttcatttccaaaagatttgctgggacacatggattatcggtagtggaacttaaaataccgatgcaggttcatacccctggaaatgatatgaggacagcacactactgcccctcggtgactatagagatcaaaagatcaccgtttctatccaacctcatccttctcgaatctaaagacctggatgtcattcttggaatggattggttgaccagaaacaagggagtgattgactgcgcaagccgcaccatcaccctaaccaacgacaaaggggagaagatcaccttccgttccccagcgtcgcagaagtccgtagcgagtctgaatcaggctgctattgagggtcagacagaaacagtggagaaaagtcccaggaagttggaggatattcctatagtacaagagtatcctgaggtgttcccagaagacctcactacaatgccaccgaagagagaaatcgagttccggatcgatttggcacccgggactgctccaatttacaagaggccgtacagaatggcagctaatgagctagcagaggtcaagaagcaggttgacgaacagctgcagaaagggtacatccgaccgagtacttcaccttggggtgctccggttatctttgtggagaagaaagacaagaccaagaggatgtgcgtggattatcacgcccttaatgaggtcacaatcaagaacaaatatccgttgccaagaattgatgacctgtttgatcagctaaaaggagctaaggtgttttccaagatagacctacgatcaggctatcatcagttgagaattcgggaagaggatattcccaagacagccttcaccactcggtatgggttgtttgagtgcacggttatgtcctttggactcaccaatgcaccggctttcttcatgaacttgatgaacaaagtgtttatggagtttcttgacaagtttgtcgtggtattcattgacgacatacttatttattcaaaatcagaagaggaacatgagcagcatctccgcctggtactcgagattttgaaggagcaccagctatatgccaagtttagcaagtgtgacttctggttatcggaggtcaaatttctgggtcacatcatttctgctcaaggcgtggcagtggatccatcaaatgtggagtcagttacaaagtggaccccaccaaagacagtttctcagatccggagttttcttggacttgcgggctattaccgtcggttcatcgaaaatttctctaagattgccaggcccatgacacagttgctaaagaaagatgaaaaattcaaatggtcagctgagtgcaaccaaagttttgaagaactcaagaagaagttagtctccgcaccagttctaattctgccagatcagacgaaagacttccaggtctactgtgatgcatctcgccaaggattgggatgtgtgttgatgcaagaaggcagagtggttgcatatgcttcgcgacagttgcgtccacatgaggccaattatcccactcatgaccttgagttggcagcagtggttcatgctctgaaaatctggcggcactatcttattggcaaccgctgtgaagtttacactgatcataagagcctgaagtacatcttcacccagcccgacttaaatctccggcaacgaagatggctggagttgattaaagattatgacatggggatacactatcatccaggcaaagcaaatgtggtagcagatgctctgagcagaaagagctattgcaatgcagtatgtaccgaaggcatgtgtgacaaattgcagcaagatcttgagcacctaaatttgggcatcgtagaacacggatacgtagctgccctagaggcccggcctacgctcgtggatcaagtcagagcagctcaggtaaatgatcctgaaatagctgagctaaaaaaaaatatgagggtcggaaaagcccgagatttccatgaggatgagcatggcacaatctggttgggagaaagattgtgtgtgcctgacgacaaagaactgaaggatctcatactcacagaagctcatcaaactcagtattcaattcatcccggcagtactaaaatgtaccaggacctcaaagagaaattctggtgggtcagcatgagaagagagatagccgaattcgtcgcactctgcgatgtttgtcagcgagtcaaagcagaacatcagaggcccgcaggactgctacaaccccttcagatcccggaatggaaatgggaagaaatcggaatggatttcataacaggtttgcccagaacatcgtcggggcacgattcaatctgggtggtcgtggatcgactcaccaaagttgctcattttattccagtacacactacctatactgggaaaaggttggcagagctttatctttcaagaatcatgtgtttgcatggggtacctaagaagattgtatctgatcgaggaagtcaattcacttcaaagttttggcagaaactgcaagaagaattggggactcgtttgaatttcagcacggcttatcatccacaaacagatggtgagcgccaactgtttgggacagaagtgttaaccgaagcagaggagaaagtcaggaccgtcaggaaaagactgcgaatcgcccagtctcggcaaaagagttatgctgataaccgccgaagagagcttactttcgaagcaggggattatgtgtatcttcgtgtcactccgctccggggagtacatcgttttcagacgaaaggcaagttggcaccacgcttcgtgggaccatacaaaatcttggaacgaaggggagaagttgcttatcagctagaacttccatccaacatgatcggcatccatgacgtgttccacgtgtcccaattaaagaagtgtttaagggtacctgaagaacaggctgattcggaacacattaatatccaggaggacctaacttatgtggagaagccggttcgcatacttgataccagcgaaaggagaaccagaaacaaggttacccggttttgccgagttcagtggagtcatcattcggaagaggaagcaacctgggaaagggaagatgagttgaaagccgcccatccgcatctcttcaccagctcctccgaatctcggggccgagattccgtttaa

SEQ ID NO: 50692 - DNA, 4347 bp, Oryza sativa
  Clone ID: PAT_MRT4530_53153C.1
atggtgaagacaaggaatgatccccgtgactccaacgacgccagtggcagcgaagagcagacagatgaagctcataccagtggtgcacctggcagcagttcatctccgccgcccgagaacccaacagtcactcagatgatgacaatgatgatgcaacagatgcagcaacattaccatcagatgttgcagcaggcgcatcagaaccagcagtttggtcctccaccatcacacgtgtccaaactgttagactttcttcgtattcagccacccactttctcaagcaccaccaacccaatggaggccaacgactggctccgtgctattgagaagaagctgaacctactacaatgcaacgaccaagagaaagttgcttttgctacacaccagttgcaaggtcccgcttctgcctggtgggataactacgtggtgacccgtccagatgcaacgaaggttacttgggcagagttttgtcaaaactttaggaaggtacagattcctgaagggattatggcacaacagaagagagagttccgtgcattgcaacaaggaaccagaacggttacagagtatctgcacgagttcaaccgcctcgcgcgctacgctcctgaggacgtgcgcaccgatgctgagaagcaggagaagtttttttttgggctcgatgatgaattgaccaaccagctaatctccggagtctatgaggactttgagaagcttgtggacaaggctatccgccaggaagagcaacgcaacaaaatggaccgaaaaagaaaggcagctcagatcagctttcctcaggggaacaatcagaagcctcgcttcatgacgggacagctaggtgggcctcccaccctgatcgtctgtcagcaccgtccctatcacccgagtaacttcaacaacgattacaacggtggcagtcacaacaacagtaagcagcacaaccacaactcgactccacccccactaatggcaccagctcagtcagatccgccagctgtgtcagctcagtcagaacaacccaagaagggggctgtaggaaagccaggaccatgcttcaactgtggcaagcacggccactttgctggcaagtgtccgaagctgaatcgcactagacccaggttcatccaggcccgcgccaatcatgtgtctgcagaggaagcacaggcagcaccagaggtcgtgttgggcacgtttccagtgaactcatatccagcaacagttctctttgattcaggtgcctcgcattctttcatttccaaaagatttgctgggacacatggattatcggtagtggaacttaaaataccgatgcaggttcatacccctggaaatgacatgagggcagcacattattgcccctcggtgactatagagatcaaaagatcaccgtttctatccaacctcatccttctcgaatctaaagacctagatgtcgttctcggaatggattggttgaccagaaacaagggagtgattgactgcgcaagccgcaccatcaccctaaccaacgacaaaggggagaagatcaccttccattccccagcatcgcagaagtccgtagcgagtctgaatcaggctgctattgagggtcagacagaaacagtggagaaaagtcccaggaagttggaggatattcctatagtacaagagtatcctgaggtgttcccagaagacctcactacaatgccaccgaagagagaaatcgagttccggatcgatttggcacccgggactgctccaatctacaagaggccgtacagaatggcagctaacgagctagcagaagtcaaaaagcaagttgacgaacagctgcagaaagggtacatccgaccgagtacttcaccttggggtgctccggtgatctttgtggagaagaaagacaagactaagaggatgtgcgtggattatcgcgcccttaatgaggtcacaatcaagaacaaatatccgttgcccagaattgatgacctgtttgatcagctaaaaggagctaaggtgttttccaagatagacctgcgatcaggctatcatcagttgagaattcgggaagaggatattcccaagacagccttcaccactcggtatgggttgtttgagtgcacggttatgtcctttggactcaccaatgcaccggctttcttcatgaacttgatgaacaaagtgtttatggagtttcttgacaagtttgtcgtggtattcattgacgacatacttatttattcaaaatcagaagaggaacatgagcagcatctccgtctggtactcgagaaattgaaggagcaccagctatatgccaagtttagcaagtgtgacttctggttatcggaggtcaaatttctgggtcacgtcatttctgctcaaggcatggcagtggatccatcaaatgtggaatcagttacaaagtggaccccaccaaagacagtttctcaaatccggagttttcttggacttgcgggttattaccgtcggttcatcgaaaatttctctaagattgccaggcccatgacacagttgctaaagaaagatgaaaaattcaaatggtcagctgagtgcaaccaaagttttgaagaactcaagaagaggttagtctctgcaccagttctagttctgccagatcagacaaaagatttccaagtctactgtgatgcatcccgccaaggattgggatgtgtgttgatgcaagaaggcagagtggtcgcatatgcttcgcgacagttgcgcccacacgagaccaattatcccactcatgaccttgagttggcagcagtggttcatgctctgaaaatctggcggcactatcttattttcaaccgctgtgaagtttacactgatcataagagcctgaagtacatcttcacccagcccgacttgaatctccggcaacgaagatggctagagttgattaaagattatgacatggggatacactatcatccaggcaaagcaaatgtggtagcagacgctctaagcagaaagagctattgcaatgcagtatgtattgaagacatgtgtgacaaattgcagcaagatcttgagcacctaaatttgggcatcgtggaacacgggttcgtagctgccctagaggcacggcctacgctcgtggatcaagtcagagcagctcaggtaaatgatcctgaaatagctgagctaaaaaagaatatgagggttggaaaagcccgagatttccatgaggatgaacatggcacaatctggttgggagaaagattgtgtgtgcctgacgacaaagaactgaaggatctcatactcacagaagctcatcaaactcattattcaattcatcccggtagtactaaaatgtaccaggacctcaaagagaaattctggtgggtcagcatgagaaaggaaatagccgaattcgtcgcactctgcgatgtttgccagttggcagagctttacctttcaagaatcatgtgtttgcatggggtacctaagaagattgtatctgatcgaggaagtcaattcacttcaaagttctggcagaaactgcaagaagaattggggactcgtttgaatttcagcacggcttatcatccgcaaacagatggtcagaccgagcgagtaaatcaaatcttggaagatatgttgagagcttgtgcacttgactttggtggagcctgggataaaagtctaccgtatgcggaattctcttacaacaacagctatcagtccagtttgcaaatggcaccgtttgaagcattgtacggacgaaagtgccgcaccccacttttctgggatcaaacaggtgagcgccaactgtttgggacagaagtgttaaccgaagcagaggagaaagtcaggaccgtcagggaaagactgcgaatcgcccagtctcggcagaagagttatgctgataaccgccgaagagagcttactttcgaagcaggggattatgtgtaccttcgtgtcactccgcttcggggagtacaccgcttccaaaccaaaggcaagttggcaccacgctttgtgggaccatacaggatcttggaacgcagaggtgaagtcgcataccagctagagcttccatctaatatggttggtatccacgatgtgtttcatgtgtctcaactgaagaagtgtttgagggtacctgaggaacaagctagctcagagcacattgacatccaagaagatttgacctacgtggagaagccagttcgtatccttgagaccagtgagagaaggaccagaaacaaggtgatcaggttttgcaaagtccagtggagccaccactccgaggaagaggccacctgggaaagagaagatgaattgaaggccgctcatccgcacctcttcgccagctcttccgaatctcggggtcgagattccgtttaa

SEQ ID NO: 50693 - DNA, 4275 bp, Oryza sativa
  Clone ID: PAT_MRT4530_53154C.1
atggtgaagacaaggaatgatctccgtaactccaacgacgccagtggtagcgaagagcagacagatgaagctcataccagtggtgcacctggcagcagttcatctccgccgcctgagaacccaacagtcactcagatgatgacaatgatgatgcaacagatgcagcaacattaccatcagatgttgcagcaggcgcaacagaaccagcagtttggtcctccaccatcacacgccaacgactggctccgtgctattgagaagaagctgaacctactgcaatgcaacgatcaggagaaagttgcttttgctacacaccagttgcaaggtcccgcttctgcctggtgggataactacgtggtgacccgtccagatgcaacgaaggttacttgggcagagttttgtcaaaactttaggaaggcacagattcctgaagggattatggcacaacagaagagagagttccgtgcattgcaacaaggaaccagaacggttatagagtacctgcacgagttcaaccgccttgcgcgctacgctcctgaggacgtgcgctccgataccgagaagcaggagaagtttttgtttgggctcgatgatgaattgaccaaccagctaatctccggagtctatgaggactttgagaagcttgtggacaaggctatccgccaggaagagcaacgcaacaaaatggaccgaaaaagaaaggcagctcagatcagctttcctcaggggaacaatcagaagcctcgcttcatgatgggacagctaggtgggccttccaccctgatcgtctgtcagcaccgtccctatcacccgagtaacttcaacaacgattacaacggtggcagtcacaacaaccgtaagcagcacaaccacaactcgactccacccccactaatggcaccagctcagtcagatccgccagctgtgtcagctcagtcagaacaacccaagaagggggctgtaggaaagccaggaccctgcttcaactgtggcaagcacggccactttgctagcaagtgtccgaagctgaatcgcactagacccaggttcatccaggcccgcgccaatcatgtgtctgcagaggaagcacaggcagcaccagaggtcgtgttgggcacgtttccaatgaactcatatccagcaacagttctctttgattcaggtgcctcgcattctttcatttccaaaagatttgctgggacacatggattatcggtagtggaacttaaaataccgatgcaggtacatacccctggaaatgatatgaggacagcacactactgcccctcggtgactatagagatcaaaagatcaccgtttctatccaacctcatccttctcgaatctaaagacctagatgtcattctcggaatggattggttgaccagaaacaagggagtgattgactgcgcaagccgcaccatcaccctaaccaacgacaaaggggagaagatcaccttccgttccccagcgtcgcagaagcccgtagcgagtctgaatcaggctgctattgagggtcagacagaaacagtggagaaaagtcccaggaagttggaggatattcctatagtacaagagtatcctgaggtgttcccagaagacctcactacaatgccaccgaagagagaaatcgagttccggatcgatttggtacccgggactgctccaatttacaagaggccgtacagaatggcagctaatgagctagcagatgtcaagaagcaggttgacgaacagctgcagaaagggtacatccgaccgagtacttcaccttggggtgctccggtgatctttgtggagaagaaagacaggaccaagagaatgtgcgtggattatcgcgcccttaatgaggtcacaatcaagaacaaatatccgttgccaagaattgatgacctgtttgatcagctaaaaggagctaaggtgttttccaagatagacctacgatcaggctatcatcagttgagaattcgggaagaggatattcccaagacagccttcaccactcggtatgggttgtttgagtgcacggttatgtcctttggactcaccaatgcaccggctttcttcatgaacttgatgaacaaagtgtttatggagtttcttgacaagtttgtcgtggtgttcattgacgacatacttatctattcaaagtctgaaaaacaacatgagcaacatcttcgtctggtactcgagaaattgaaagagcaccagttatatgccaagtttagcaagtgtgacttctggttatcggaggtcaaatttctgggtcacatcatttctgctcaaggcgtggcagtggatccatcaaatgtggagtcagttacaaagtggaccccaccaaagacagtttctcagatccggagttttcttggacttgcgggctattaccgtcggttcatcgaaaatttctccaagattgccaggcccatgacacagttgctaaagaaagatgaaaaattcaagtggtcagctgagtgcaaccaaagttttgaagaactcaagaataggttagtctctgcaccagttctaattttgccagatcagacaaaagacttccaagtctactgtgatgcatctcgccaagggttgggatgtgtgttgatgcaagaaggcagagtggtcgcatacgcttcgcgacagttgcgtccacacgagaccaattatcccactcatgaccttgagttagcagcagtggttcatgctctgaaaatctggcggcactatcttattggcaaccgctgtgaagtatacactgatcacaagagtctgaagtacatcttcactcagcctgacttgaatctccgacagcgaagatggctggagttaattaaagattatgacatggggatacattatcatccaggcaaagcaaatgtggtagcagacgctttgagcagaaaaagctgttgcaatgccttatgccctgaagacatgtgtggcaaattgcagcaagatcttgagcacctaaatttgggcatcgtggaacacgggtacgtagctgccctagaggcacggcctacgctcgtggatcaagtcagagcagctcaggaaaatgatcctgaaatagctgagctaaaaaaaaatatgagggtcggaaaagcccgagatttccatgaggatgagcatggcacaatctggttgggagaaagattgtgtgtgcctgacgacaaagaactgaaggatctcatactcacagaagctcatcaaactcagtattcaattcatcccagcagtactaaaatgtaccaagacctcaaagagaaattctggtgggccagcatgagaagagaaatagccgaattcgtcgcactctgcgatgtttgtcagcgagtcaaagcagaacatcagaggcccgcaggactgctacaacctcttcagatcccggaatggaaatgggaagaaatcggaatggatttcatcactggtttgcccaggacatcgtcagggcatgattcaatttgggtagtcgtggatcgcctcacgaaagttgctcatttcattccggtgcacactacctatacggggaaaaggttggcagagctgtacttagcaaggatcatgtgtctgcatggggtacctaagaagatagtatctgatcgagggagtcagttcacttcaaaattttggcagaaactgcaagaagaattggggactcgtttgaatttcagcacggcttatcatccgcaaacagatggtcagaccgagcgagtaaatcaaatcttggaagatatgttgagagcttgtgcacttgactttggtggagcctgggataaaagtctaccgtatgcggaattctcttacaacaacagctatcagtccagtttgcaaatggcaccgtttgaagcattgtacggacgaaagtgccgcacaccacttttctgggatcaaacaggtgagcgccaactgtttgggacagaagtgttaaccgaagcagaggagaaagttaggaccgtcagggaaagactgcgaatcgcccagtctcggcagaagagttatgctgataaccgccgaagagagcttactttcgaagcaggggattatgtgtaccttcgtgtcactccgctccggggagtacaccggttccaaacgaaaggcaaattggcaccacgctttgtgggaccatacaggattttggaacgccgaggtgaagtcgcttaccagcttgagctcccatctaatatggttggaatccacgatgtgtttcatgtatctcaattgaagaagtgtttgagggtacctgaggaacaagctagctcagagcacattgacatctag

SEQ ID NO: 50694 - DNA, 520 bp, Oryza sativa
  Clone ID: PAT_MRT4530_53155C.1
gcacgaggacaagcaaagaaacacacgtacacatggccaaaaacgtaatagcgcgtcgtcgcaatactagccatgccacaacaactaatagtgctgctgctgctgttccatgctacggcggcgccggcgggtgggcagcgggcggggtgcccgagcaagtgcggcgaggtagacatccccttccctttcggcgtccgcgtcgactgcgccttgccgggcttaaacgtctcatgcaaccatagctttgcccctcccagaccctacatcgccgatgacaatgagttcatcgacgtctcgctggagaccggggagacacgcgtgtacactcccgtgctgcaaaactgcttcgactatgtccaacaccagcagcagctccgacgcactctggcaggggctcgacctcaccgggacgcccttccttgtgtcgccggacaggaacgagttcaccgccaccggctgcgacgcgctggggctgatatacggcaggcaggacgtgagcttcttcaccggctgcgtcacg

SEQ ID NO: 50695 - DNA, 2409 bp, Oryza sativa
  Clone ID: PAT_MRT4530_53156C.1
atgccggtcccgtgcttgccggaccagtcggcggcgctgctccggttgaagcgctccttcaccatcacaaacgactcccagtgcaccctcgcgtcgtggcgggccggcacggactgctgccgctgggagggcgtccgctgcggcggcgccaacggcgacggccgcgtgagaagcctcgatctggcaaggtgtttcttggagagtgcagcaattgaccctgcacttttcgatctaacttcactcaggtatcttaacctcgcacgtaatgacttcaatggctcggagctcccagctactgggtttgagccaggggcgggcccactatgtattcatgggtattcagatgtatacccaagatttttgagaaaaaatagacatttagtttgtaggattgtagaactatctagcagaactaatttgaaaagtctagcagaactatctatgatgcttatcaaaacagagagggttcgtcggtgtatgaacattttttttaccccttcctatttcgaatacccaagtttaaaaagctgggcccgccactggtttgagcgcctcaagcatctcacccatctcaacctgtccgatgcgagcatccaaggcaagataccagttgggataaggcacctgaccaatttggtatctcttgacctctccacaacattttatcttatagatcaggacgactattacctctcattcggtacatggtcagatccttcttggtgggtcgtagaaccaaacattgggtcgctagtagcaaatctcagcagtttgagagagctttatctcggcagggtggacttgtctgacaacggtgaagattggtgcactgccttaacaaactccagtactcctcaactccaggttctgagtttacggcattgcagactctttggtcccatctgcacatctctctctagcatacattcactcactgagattaatctacagtataatgacctgtatggtccagttccagactccttcgctgatttgcacttcttacgcgttcttgatcttgctgataatgatcttgaaggattgtttccaaaaagaatattacaaaacaggaacttaacaactgttcatatcagctataataccaacatctacggttctttgcccaatttctcaccagacagtagcttgacaactttgattgttagcagcacaaacttctctggtcctattcccagttccataggcaatctcaaatcgttgaacgagttgggcgttgcatcaaatgactttagacaagagcttccctcttcaattggacaactcacatccttaaaattattagaggcaacaggagctggtatagtaggaactataccatcttggatcgcaaatttaacctccttggtacttctccggttctctaattgtggtctatctggaccgataccttcttcaatagtgagaaagagagaggtgtgtgtgcgagtgagtgtttgggctgacaagtggtatcagaacctcgttcgagagatgccgaagatcggcgatggcagcaaggctgttgccggcgacgacgacaacagcaagctagtggtgcagcaagtgaaggaggcaggggtgacgctacgttaccccatgctcggggagaacaactacggcatttgggcggtgaaaatgaaaattttcatgcacgcacaaggggtgtgggctgctgtggagggcgacgcagccgatgagaagatcgaccaaatggctctcgccgccattgtccaagctgtgccggaggccgtggtgatggccatatccgagaaggagacggcgaaggaggcgtgggatgccctcaagcagatgaacatgggtgaagagcgtgtcaagaaggctcgagtacaaaccctcaagagggagcttgatggtatgtacatgagtaattctgagaaaattaatgattttgctttaaaggttaccacgatcgtgaacgagattcgctctctcggcacgaaagtggaggagaccacggtggtggagaagctcttgcattccgttcccgacaagttccaacccctcataagcaccatcgagcaatggggggatgtgtcggagatgacggtgacggagacgatcgggcgtttgcgggcgttcgaggagtcttcaaaggggcaacgacgtgacaaagagggggagcagcagttgttggccgcgtgtgccgagccacggctgacgcgtgctgagtgggaggcgaaggttgctgaagagagcagtggtggctccggtagcaacggtgttggtgagaagaagtttcgcggcaagttcgacaagtcgaagattgagtgtcacaggtgtggcaagttcggacacttcgccgacgagtgtgacgagccgcggaaaatgaccaaggcagtggtgcagcttgctattgccgacgcagatgatgaacccactttgctgtga

SEQ ID NO: 50696 - DNA, 4551 bp, Oryza sativa
  Clone ID: PAT_MRT4530_53157C.1
atgatgaagacaaggaatgatccccgtgactccaacgacgccagtggcagcgaagagcagaccgatggagctcatgtcagtggtgcatctggcagcagatcatctccaccgcccgaaaacccaacagtcactcaaatgatgacaatgatgatgcaacagatgcagcaacattaccatcagatgttgcagcaggcgcaacagaaccagcagtttggtcctccaccatcacacgtgtccaaactgttagactttcttcgtatccagccacccactttctcaagcaccaccaacccaatggaggccaatgactggctccgtgctattgagaagaagctgaacctattgcaatgcaacgaccgagagaaagttgcttttgctacacaccagttgcaaggtcccgcttctgcctggtgggataactacgtggcgacccgtctagatgcaacggaggttacttgggcagagttttgtcaaagcttcaggaaggcacagattcctgaagggattatggcacaacagaagagagagttccgtgcattgcaacaaggaaccagaacggttacagagtacctgcacgagttcaaccgcctcgcgcgctacgctcctgaggacgtgcgcaccgatgctgagaagcaggagaagtttttgtttgggctcgacgatgaattgaccaaccagctaatctccggagtctatgaggactttgagaagcttgtggacaaggctatccgccaggaagagcaacgcaacaaaatggaccgaaaaagaaaggcagctcagatcagctttcctcaggggaacaatcagaagcctcgcttcatgacgggacagctaggtgggccttccaccctgatcgtctgtcagcaccgtccctatcacccgagtaacttcaacaacgactacaacggtggcagtcacaacaacagtaagcagcacaaccacaactcgactccacccccactaatggcaccagctcagtcagatccgccagctgtgtcagttcagtcagaacaacccaagaagggggctgtaggaaagccaggaccctgcttcaactgtggcaagcacggccactttgctggtaagtgtccgaagctgaatcgcactagacccaggttcatccaggcccgcgccaatcatgtgtctgcagaggaagcacaggcagcaccagaggtcgtgttgggcacgtttccagtgaactcatatccagcaacagttctctttgattcaggtgcctcgcattctttcatttccaaaagatttgctgggatgcatggattatcggtagtggaacttaaaataccgatgcaggttcatacccctggaaatgatatgaggacagcacactactgcccctcggtgactatagagatcaaaagatccccgtttctatccaacctcatccttctcgaatctaaagacctagatgtcattctcggaatggattggttgaccagaaacaagggagtgattgactgcgcaagccgcaccatcaccctaaccaacgacaaaggggagaagatcaccttccgttctccagtgtcgcagaagtccgtagcgagtctgaatcaggctgctattgagggtcagacagaaacagtggagaaaagtcccaggaagttggaggatattcctatagtacaagagtatcctgaggtgttcccagaagacctcactacaatgccaccgaagagagaaatcgagttccggatcgatttggcacccgggactgctccaatttacaagaggccgtacagaatggcagctaatgagctagcagaggtcaagaagcaggttgacgaacagctgcagaaagggtacatccgaccgagtacttcaccttggggtgctccggttatctttgtggagaagaaagacaagactaagaggatgtgcgttgattatcgggcccttaatgaggtcacaatcaagaacaaatatccgttgccaagaattgatgacctgtttgatcagctaaaaggagctaaggtgttctccaagatagacctgcgatcaggctatcaccagttgagaattcgggaagaggatattcccaagacagccttcaccactcggtatgggttgtttgagtgcacggttatgtcctttggactcaccaatgcaccggctttcttcatgaacttgatgaacaaagtgtttatggagtttcttgacaagtttgtcgtggtgttcattgacgacatacttatctattccaagtctgaaaaacaacatgagcaacatcttcgtctggtactcgagaaattgaaggagcaccagttatatgccaagtttagcaagtgtgacttctggttatcggaggtcaaatttctgggtcacgtcatttctgctcaaggcgtggcagtggatccatcaaatgtggaatcagttaccaagtggaccccaccaaagacagtttctcaaatccggagttttcttggacttgcgggctattaccgtcggttcatcgaaaatttctccaagattgccaggcccatgacacagttgctaaagaaagatgaaaaattcaagtggtcggctgagtgcaaccaaagttttgaagaactcaagaagaagttagtctctgcaccagttctaattctgccagatcagacaaaagacttccaggtatactgtgatgcatctcgccaaggattgggatgtgtgttgatgcaagaaggcagagtggtcgcatatgcttcgcgacagttgcgtccacatgagaccaattatcccactcatgaccttgagttggcagcagtggttcatgctctgaaaatctggcggcactatcttattggcaaccgctgtgaagtttacactgatcataagagcctgaagtacatcttcacccagcccgacttaaatctccggcaacgaagatggctggagttgattaaagattatgacatggggatacactatcatccaggcaaagcaaatgtggtagcagatgctctgagcagaaagagctattgcaatgcagtatgtaccgaaggcatgtgtgacaaattgcagcaagatcttgagcacctaaatttgggcatcgtggaacacgggttcgtagctgccctagaggcacggcctacactcgtggatcaagtcagagcagctcaagtaaatgatcctgaaatagctgagctgaaaaagaatatgagggttggaaaagctcgagatttccatgaggatgagcatggcacaatctggttgggagagagattgtgtgtgcctgacgacaaagaactgaaggatctcatactaacagaagctcatcaaactcagtattcaattcatcccggcagtactaaaatgtaccaggacctcaaagagaaattctggtgggtcagcatgagaagagagatagccgaattcgtcgcactctgcgatgtttgtcagcgagtcaaagcagaacatcagaggcccgcaggactgctacaaccccttcagatcccggaatggaaatgggaagaaatcggaatggatttcataacaggtttgcccaggacatcgtcggggcacgattcaatctgggtggtcgtggatcgactcaccaaagttgctcatttcattccagtacacactacctatacggggaaaaggttggcagagctgtacttagcaaggatcatgtgtctgcatggggtacctaagaagatagtatctgatcgggggagtcagttcacttcaaaattttggcagaaactgcaagaagaattggggactcgtttgaatttcagcacggcttatcatccgcaaactgatggtcagaccgaaagggtcaatcagatcttggaagatatgctgcgagcgtgtgcgctcgattttggtggagcatgggataaaagtctgccttatgcggaattctcttacaacaacagttatcaagccagtttgcaaatggcaccgtttgaagcgttgtacggacggaaatgccgcactccgctcttctgggatcaaactggagaacgccaattgtttgggacggaagtattaactgaagcagaggagaaagtcagaaccatcagagaaaggctaagaattgcccagtctcggcagaagagttatgctgataaccgccgaagagagcttactttcgaagcaggggattatgtgtaccttcgtgtcactccgctccgaggagtacaccgttttcagacgaaaggcaagctggcaccacgcttcgtgggaccatacaaaattttggaacgaaggggagaagttgcttatcagctagaacttccatccaacatgatcggcatccatgacgtgttccacgtttcccaactaaagaagtgcttaagggtacctgaggaacaggctgattcggaacacatcgatatccaggaggacctgacctatgtggagaagccggttcgcatacttgacaccagcgaaaggagaaccagaaacaaggtcaccaggttttgccgagttcagtggagtcatcattcggaagaggaagcaacctgggaaagggaagatgagttgaaagccgcccatccgcacctcttcaccagctcctccgaatctcggggccgagattccgtttaa

SEQ ID NO: 50697 - DNA, 2250 bp, Oryza sativa
  Clone ID: PAT_MRT4530_53158C.1
atgtgggcacttcgtggttgtactggacgatggaatcccaagaagttggaggatatacctatagtacaagagtatcctgaggtgttcccagaagacctcactacaatgccaccgaagagagaaatcgagttccagattgatctggcacccggaactgctccaatctacaagaggccgtacagaatggcagctaatgagctagcaaaagtcaaaaagcaggttgacgaacagctgcagaaagggtacatccgaccgagtacttcaccttggggtgctccggttatctttgtggaaaagaaagacaagaccaagaggatgtgcgttgattatcgcgcccttaatgaggtcacaatcaagaacaaatatccgttgccaagaattgatgatctgtttgatcagcttaaaggagctaagatggtgaagacagggaatgatccccgtgcctccaatgacgctaggggcagcgaagagcagaccgatggagctcatatcagtggtgcatctgacagcagttcatctccaccgcccgagaacccaacggccaacgactggctccgtgcgattgagaagaagctgaaccttctgcaatgcaatgaccaagagaaggttgcttttgctacacatcagttgcaaggtcccgcttctgcttggtgggataactacgtggtgacccgtccagattcaacggaggttacttgggcagagttttgtcaaagcttcaggaaggcacaaattcctgaggggattatggcacaaaagaaaagagagttccgcgcactgcatcaagaaaccaggatagttacagagtacttgcatgagttcaaccgccttgcgcgctacgctcctaaggatgtgcgcaccgatgccgagaagcaggagaagtttttgtttggtctcgatgataaattgaccaaccagctgatctccggagtctatgatgactttgagaagctcgtggacaaggctatccgtcaggaagagcaacgcaacaaaatggaccgaaatagaaagctaggtgagccttccaccctgatcatccgtcagcaccatccttaccacccgagtaacttcaacaacgactacaacggtggcagtcacaacaacatcagatccgccagctatgtcagctcagtcagacagctcaagaaggagtctgcaggaaagccaagaccctgcttcaactgtggcaagcacggccactttgctggcaagtgtccgaagctaaagcgcgttggacctaggttcgtccaggcccgcgtcaatcatgcgtctgcagagaaagcacaggcatcaccagaggtcgtgctgggcacgtttccggtgaactcatatccagcaacagttctctttgattctggtgcctcgcattcttttatatccaagagatttgctggggcacatggattatcggtagtggaacttaaaatactgatgcaggttcatacccctggaaatgacatgaggacagcacactactgcccctcagtgactatagagatcaagaggtcacggtttctatccaacctcatccttctcgaatccaaagacctagatgtcattctcggaatggattggttgaccagacacaagggagtgatcgactgcgcaagtcgcactatcaccctaagcaacgacaaaggggagaagatcaccttccgttctccagtgtcacagaagtccgtagcgagtctgaatcaggctgttattgaggatcagacagaaatagcggaaaaaaatcccaagaagttggaggatatacctatagtacaagagtatcctgaggtgttcccagaaggcctcactacaatgccaccgaagagagaaatcgagttccagattgatctggcacccggaactgctccaatctacaagaggccgtacagaatggcagctaatgagctagcagaagtcaaaaagcaggttgacgaacagctgcagaaagggtacatccgaccgagtacttcaccttggggtgctccggttatctttgtggaaaagaaagacaagaccaagaggatgtgcgttgattatcgcgcccttaatgaggtcacaatcaagaacaaatatccgttgccaagaattgatgatctgtttgatcagctaaaaggagctaaggtgttttccaatatagacctgcgatcaggctatcatcagttgagaattcgggaagaggatattcccaagacagccttcgccactcggtcttgctctcttttcccccacaccagagttgaagtccttctcagttga

SEQ ID NO: 50698 - DNA, 2829 bp, Oryza sativa
  Clone ID: PAT_MRT4530_53159C.1
atcaccttccgttccccagcgtcgcagaagtccgtagcgagtctgaatcaggctgctattgagggtcagacagaaacagtggagaaaagtcccaggaagttggaggatattcctatagtacaagaatatcctgaggtatttcctaaagacctcactacaatgccaccgaagagagaaatcgagttccgaattgatctggcacccgggactgctccaatttacaagaggccgtacagaatggcagctaatgagctagcagaggtcaagaagcaggttgacgaacagctgcagaaagggtacatccgaccgagtacttcaccttggggtgctccggttatctttgtggagaagaaagacaagaccaagaggatgtgtgttgattatcgcgcccttaatgaggtcacaatcaagaacaaatatccgttgcccagaattgatgacctgtttgatcagctaaaaggagctaaggtgttttccaagatagacctgcgatcaggctatcatcagttgagaattcgggaagaggatattcccaagacagccttcaccactcggtatgggttgtttgagtgcacggttatgtcctttggactcaccaatgcaccgactttcttcatgaacttgatgaacaaagtgtttatggagtttcttgacaagtttgtcgtggtattcattgacgacatacttatttattcaaaatcagaagaggaacatgagcatcatcttcgtctggtactcgagaaattgaaggagcaccagttatatgccaagtttagcaagtgtgacttctggttatcggagatccggagttttcttggacttgcgggctattaccgtcggttcatcgaaaatttctccaagattgccaggcccatgacacagttgctaaagaaagatgaaaaattcaagtggtcagctgagtgcaaccaaagttttgaagaactcaagaagaggttagtctctgcaccagttctaattttgccagatcagacaaaagacttccaagtctactgtgatgcatctcgccaagggttgggatgtgtgttgatgcaagaaggcagagtggtcgcatacgcttcgcgacagttgcgtccacacgagaccaattatcccactcatgaccttgagttagcagcagtggttcatgctctgaaaatctggcggcactatcttattggcaaccgctgtgaagtatacactgatcacaagagtctgaagtacatcttcactcagcctgacttgaatctccgacagcgaagatggctagagttaattaaagattatgacatggggatacactatcatccaggcaaagcaaatgtggtagcagatgctctgagcagaaagagctattgcaatgcagtatgtaccgaaggcatgtgtgacaaattgcagcaagatcttgagcacctaaatttgggcatcgtagaacacgggtacgtagctgccctagaggcacggcctacgctcgtggatcaagtcagagcagctcaagtaaatgatcctgaaatagctgagctgaaaaagaatatgagggtcggaaaagcccgagatttccatgaggatgagcatggcacaatctggttgggagaaagattgtgtgtgcctgacgacaaagaactgaaggatctcatactcacagaagctcatcaaactcagtattcaattcatcccggcagtactaaaatgtaccaggacctcaaagagaaattctggtgggtcagcatgaggagagaaatagctgaattcgtcgcactctgcgatgtttgccaacgggtgaaggcagagcaccaaagaccagcaggtttactccaacctcttcaaatcccggaatggaaatgggaggagattggaatggactttataacaggactgccccggacatcatcgggtcacgattcaatctgggtagtcgtggatcgactcactaaggttgctcacttcataccagtacataccacgtatacgggcaaaaggttggcggagctctacctctcgagaatcatgtgtctacatggggtacccaaaaagattgtatctgatcgagggagtcagttcacttcaaaattttggcagaaactgcaagaagaattggggactcgtttgaatttcagcacggcttatcatccgcaaacagatggtcagaccgagcgagtaaatcaaatcttggaagatatgttgagagcttgcgctcttgattttggtggagcttgggacaaaagcttgccatatgcggaattctcgtacaacaacagctaccaggccagtctacagatggcaccgtttgaagctttatacggccggaagtgccgcacacctctcttctgggatcagacaggcgaacgtcaactgttcggaacagaagtgttaaccgaagcagaggagaaagtcaggaccgtcagggaaagactgcgaatcgcccagtctcggcaaaagagttatgctgataaccgccgaagagagcttacttttgaagcaggggattatgtgtaccttcgtgtcactccgcttcggggagtacaccgcttccaaaccaaaggcaagttggcaccacgctttgtgggaccatacaggatcttggaacgcagaggtgaagtcgcttaccagctagagcttccacctaatatggttggtatccacgatgtgtttcatgtgtctcaactgaagaagtgtttgagggtacctgaggaacaagctagctcagagcacattgacatccaagaagatttgacctacgtggagatgccaattcgtatcctggaaaccagcgagagaaggaccagaaacaaagtaatcagattttgcaaagttcagtggagccaccactaa

SEQ ID NO: 50699 - DNA, 1146 bp, Oryza sativa
  Clone ID: PAT_MRT4530_5315C.1
atggaggagttgattagtgccattatcagggctacatttggggttgaagcgaagaatcgtgctagggagaaccaaaagccgtattctgatttttatgacgttgtcccatatcctcctaattataaaattcctgaatttactaaatttagtggtgaggatagtaggactacatacgagcatgtatatcaattcttagctcaatgtggtagggctagtagtatgaatgcgtattcggtcccatatccgcaaggattcgaggtgcccaacttcacaaaattcacaggtgaggatgctagaacaacaatggagcatatcggctgctttattgatcaatgcgggaaaagtgttattattggggatcctcggcccaaaaataggatcaaaaatgcgaaggccgaagatcataaagttgcaaaggatgagtcatctagtatccaaaggaccaaaaagccgaagctcacttttgagatgcttatggctaaatacaagaaaggattagccggtcaacgatttgataatcaaactagtgattcaaaaggaccaagatcatctcgtaggaagagatttggtcaaacatcaaagcaatcggagccatcaactataccaactccacacaaacctccggttgtgatgccatggtatccatatccaatgtcactatatggttatccttttatgtattgcatgccttggatgcatcaaccacctatgccgtattaccaagagtggaaggaatcacctaggtcagtgccaaatcattcatctaactcaagacaagaccgtttcccacaaaagaattggtccggtagatcaaaggtgaaaaatgtgaagaaggtgtgggtgaggaaagaagccaaagctccggaggtcgttgttatcaatgaggagtctcaagatgttcatgtacctactggagatgcgttggaaaccatacaagcgaagaagactgaagccgacgccgttgctgtcgacatcggcggtctgaccaagacagctggccggtctgatcgccagactatggccggtctgaccgaccctcctggccggtttaaccgacggcttacagccggtctgaccggggagcattggagaagagtgagaaaattgagagcagcacaggggcttccacttcgaccaaaaatatga

SEQ ID NO: 50700 - DNA, 481 bp, Oryza sativa
  Clone ID: PAT_MRT4530_53160C.1
atctgcaaaagtcgggggttcagaatcctaaccctaactactaaacccatgactttgtatccaaggctccaagcaaacaccgatacttcgaagggaccaagtgaaatcgaaccttaattcgacttggcccctatcccaattcccatcacacttcaaatccaccaaccgaacaatttctcccatgaatcaacgattgcctcaggaatgataaaaccagtattaatattatccatcgagatcgtctactcccccgcatcagcggcgcctatcgaaagctgagagcaagagccgtggatttacctggacgcggcggaggcggattcctcctcgagccaggcacgaatctggcgggcgttgcggcggaacatcgcgccggacttgcggatgtcggtggtgaagaggagcgccgtcgcgcccaccgccgccaccgtcagcacgaagtttgtcagcgccatctctctctctcttgctctctcgctcg

SEQ ID NO: 50701 - DNA, 2508 bp, Oryza sativa
  Clone ID: PAT_MRT4530_53161C.1
cagaagatccttgatccgcagtcgatgaaaatctcaacagctttgtgatgacattttggtggccttccccttcttgaggacacacctcgctcaaactcccaaggcgcacatcaaatttatcatcaagaagaatactgctagcttgcacgtccctgtgaaccattggtggattacactcgtggtggagatagcatagtgcctctgccactcctgttgcaattttcagcctctttatccagtccaaagattgcaggccttcctcttcctcccctgactttctgtgcagtgcacttgataagtcgccattccggacaaatatatacacgagaaatttctcctcctctttatcaaggcaatgccccatgatcggcaccagcctttcatgcaatcctttggcaaataaatctagctccgccatataagcatctttcttagccatgctggaagttatcctcttcacaaccacagaggtcccatcatggagcgccccaaggtaaagatcacctgagtgaccatgcttgataagcctatcatctccaaagtccgtggtggcttcgacgagctggtcataaccgaatgaatcaccgacctttgccaagtttgcaggcgatgcagaaggttgcgtgccagcagtaactgcacccccaccagttccagacgctcccaactgtgtgttccgcacgccactttcccgctgatcattcctactcccattcctcctactcccagagcacaccaagcaatacaaaatggcagcaatcacagctaccaagaggacaccgccgcaaatggctccaatcagtatatacttcaaattcttgtgcccctttttccttcccggtgaagctggcatcgcaggctgcggtgtgggtgcaggacctgaaacattatacggcaaaccacgtgcagcatagaactgctgacattctgcctggctacgctgtccagtgacatcaacgaagcaattcaactcaaatgagaaattcccaccatcaccattggatacacccagtttgccgtcgaagtaattcccagagatattggccagcttcgtcctaccgaaaagttggccaaaggatcccggcacgccaccatagaagaggttcccggacagatccaccacctgtacattggatggaagcgcgagccctgtatccggcaatgcgccggtgaggttggtccgagacacatcgagaacgctcagctccgggagcgaccagaccgccttgggtagctcgcctgagaaggcattgccagagaggttgagagtcttgagccgagcgagcccggcgagagcactgccagggagctgccccgagagtagattccccgcgaggttgagagtggtgaggttgctgaggccggcgatggccgaggcggggatctcccccgtgacggcgcagccggagatgtcgaggagctggaaggtgggcgcgagccccgcgccgagccacgccggaagggagcctggcaggccgaacccgggcgcgctgaaggcctcgagccgcgtgaggttgcgcagcccgtcgacggcgaaccgcggcgccaggcgccccagccgcgtgcggcgcagcccggcgaggtcgaccgacacgacgcggccgccgctgcagcgcaccccggcccacgccgtgcaggggtcggcgcggcgcggccagtcccgcgcgcgcagcccgagcgagccgcgcagcgcgtagagccccgagagatccgcccgcgacgtgaggttcccctgctgcgccaccaccgccccgggcgccgccaccaccgccacgagcagcagtagccgcgcccagaccccaccaccaccacaacaacaaccaccagcccgcatcatctcctcctcctccatccaccaccaccaccaccaccacctccgccgccgccgccactccccattcctcccccagggtcgcaggtacagaagccaccaccaccaccaccctcctccttgggggctcaccttctctaccccgccatcaatgcccaaagttacactcccccaactgcctcccaattattaccccctctcctcctcctctctccgccgatccgaacccaaattccactccactccaccgccgccgcggtcacgccaccgggtgcgagcagccgccgccgccggagccggcgaagaattctctttccgcttccgctccccaaccctagctctcgatgtcgctccctatgccagccgacgccatgtcgtcgcctcctccccccgccgcgcacgacgccgtcttcacccggatcgtccaagccatcgccgactccatccacgccagctacgacgtacccgccggactctccgtcgaccccgacgtcatccgctccgtcgccgacgccgcggctgcccaggccaaaacggcagctcacgacgccctcgccacccaccttcgggctcttcttcaagtgacagaacacgacgcgtcgtcggccctcgtcgacaccacgtcgccggccgccggccccgtcgccacacccacgtccggcgccatgcccacgctg

SEQ ID NO: 50702 - DNA, 4547 bp, Oryza sativa
  Clone ID: PAT_MRT4530_53162C.1
atggtgaagacaaggaatgatccccgtgactccaacgacaccagtggtagcgaagagcagatcgatggagcacataccagtggtgcatctggcagcagttcatctccaccgcccgagaacccaacggtcactcagatgatgacaatgatgatgcaacagatgcagcaacattaccatcagatgttgcagcaggcgcagcagaatcagcagtttggtcctccaccatcacgtctgtccagactgttagagtttcttcgtatccagccacccactttctcaagcaccaccaacccaatggaggccaacgactggctccgtgctattgagaagaagctgaaccttctgcaatgcaacgaccaagagaaggttgcctttgctacacaccagctgcaaggttccgcttctgcctggtgggacaactacgtggtaacccgtccagctacaatggaggttacttgggcagagttttgtcaaagcttcaggaaggcacagattcttgaggggattatggcacaaaggaaaagagagttccgtgcattgtaacaaggaaccaggacagttacagagtacttgcacgagttcaaccgccttgcgcgctacgctcctgaggacgtgcgcaccgatgccgagaagcaggaaaagtttttgtttggtcttgatgatgagttgaccaaccagctaatctctggagtctatgaggactttgagaagcttgtggacaaggctatctgtctggaagagcaacgcaacaaaatggactgtaaaagaaaggcagctcagatcaggactcctcaagggaacaatcagaagcctcgcttcatgatgggacaactgggtgggccttccaccctgatcgtccgtcagcaccatccctataatccgggcaacttcaacaacgactacaacggtggcagtcacaacaacagtgaacagcaccaccacaacttgactccacccccattaatggcaccagctgagtcagaactaccagctatgtcagctcagttagaacagctcaagaaggagtctgcaggaaagccaagaccctacttcaactgtggcaagctcggtcactttgctggcaagtgtccgaagcggaagcgcgctggacctaggttcgtccaggcccgcgtcaatcatgcatctgcagaggaagcacaggcagcaccagaggtcgtgctgggcacgtttctagtgaatttatttctggcaacaatactttttgattcgggtgcctcgcattctttcatttccaagagatttgctgggacacatggattatcagtagtggaacttaaaataccgatgcgggttcatacccctggaaatgacatgaacaccgcacactactgcccctggcgactatagagatcaaaagatcacagtttcaatccaacctcatccttctcgaatccaaagacctagatgtcattctcggaatggattggttgaccagacacaagggagtgattgactgcgcaagtcgcactatcaccctaaccaatgacaaaggagagaagatcaccttccgttctccagtgccacagaagtccgtagcaagtctgaatcaggctgctattgaggatcagacagaaatagcagagaaaagtccccaaaaattggaggatattcctatagtacaagagtatcctgaggtgtttcctgaagacctcactacaatgccaccgaagagagagatcgagtttcggattgatttggcaccgggaactgccccgatctacaagaggccctacaggatggcagctaatgagctagcagaagtcaaaaagcaagttgatgaacagctgcagaaagggtacattcgaccgagtacttcaccttggggtgctccggttatctttgtggagaagaaagacaaaaccaagagaatgtgcgttgattatcgcgcccttaatgaggtcacaatcaagaacaaatatccgttgccaagaattgatgacctgtttgatcagctaaaaggagctaaggtgttttccaagatagacctgcgatcaggctatcatcagttgagaattcaggaggaggatattcccaagacagccttcaccactcggtatgggttgtttgagtgcacggttatgtcatttggactcaccaatgcaccggttttcttcatgaacttgatgaacaaagtgtttatggaatttctggacaagtttgtcgtggtgttcattgacgacatacttatttattcaaagtcagaagaggaacatgagcaacatctccgtctggtactcgagaaattgaaggagcaccagttatataccaagtttagcaagtgtgacttctggttgtcggaagtcaaatttctgggtcacgttattactactcaaggtgtggcagtggatccatcgaatgtggagtcagttaccaagtggaccccacctaagacagtttctcagatccggagtttttttggacttgcgggttattatcgtcggttcattgaaaatttctccaagattgccaggcccatgacacagttgcttaagaaagatgaaaaatttaagtggtcagctgagtgcaaccaaagttttgaagaactcaagaagaagttagtctctgcaccagtcctgattctgccggaccagacgaaagacttccaggtctactatgatgcatctcgccaaggactaggatgtcttctgctgtaggaaggccgagtggtcgcatatgcttcgcgacagctgcgtccacacgagaccaattaccctactcatgatctagagttggcaccagtggttcacgctctaaaaatctggcggcactatcttattggcaaccgctgtgaagtctacactgatcacaagagcctgaagtacatcttcactcagtctgacttgaatctccgacagcgaagatggctggagttgataaaagattatgacatggggatacattatcatccaggcaaagcaaatgtggtggcagacgctctgagcagaaagagctattgcaatgcagtatgtaccgaaggcatgtgtgacaaattgcagcaagatcttgagcacataaatttgggcatcgtggaacacgggttcgcagctgccctagaggcacggcctacgcttgtggatcaagtcagagcagctcaggtaaatgatcctgaaatagctgagctgaaaaagaatatgaggtttggaaaagcccgagattttcatgaggatgagcatgacacaatttggttgggagaaagattgtgcgtacctgacgacaaagagctaaaagatctgatactaactgaagctcatcaaactcagtattcaattcatcccggcagtactaaaatgtaccaggacctcaaagagaaattctggtgggccagcatgagaagagagatagccgaatttgtcgcactctgcgatatttgtcagcgagtcaaagcagaacaccagaggcccgtaggattgcttcaacctcttcagatcccggaatggatatgggaagagattggaatggatttcataacaggtttgcccaggacatcatcggggcacgattcaatctgggtagttgtggatcgactcacgaaagttgctcacttcattccagtgaacaccacctatacagggaagagtttggcagagctgtacttagcaaggatcatgtgtttgcatggggtacctaagaagattgtatctgatcgagggagtcagttcacttcaaagttctggcagaagctgcaagaagaattggggactcgtttgaatttcagcacggcttatcatccgcaaactgatggtcagaccgagcgagtcaatcaaatattggatgatatgttgcgagcctgtgcacttgactttggcggagcttgggataaaagtctgccttatgcggaattctcctacaacaacagttatcaggccagtttgcaaatgacaccgtttgaagcattgtacggacggaagtgccgcactctgctcttctgggatcaaaccggagaacgccaactatttgggacagaagtgctaaccgaagcagaggagaaagtcagaaccgtcagagaaaggctaagaattacgcaatctcgacagaagagttatgctgacaaccgccgaagggagcttagttttgaagcaggagattatgtgtaccttcatgtcactccgctcaggggagtacaccggttccaaaccaaagggaagttggcaccacgcttcgtgggaccatacaggatcttggaacgcagaggtgaagttacttaccagcttaagcttccatctaacatggctggaatccatgatgtgttccatgtgtctcagttaaagaagtgcttgagggtaccagaagaacaagccgattcagagcacatcgacatccaggaagatctgacatatgtggtgaagccgattggtatcctcgaaaccagtgagagaaggactagaaataaggtgatcagattttgcaaagtccagcggagccaccactcagaggaagaggccacctaggaaagagaagatgaattgaaggccgctcatccgcacctcttcgccagctctttcgaatctcggggtcgagattccgtt

SEQ ID NO: 50703 - DNA, 631 bp, Oryza sativa
  Clone ID: PAT_MRT4530_53163C.1
caggaattcggcacgaggctttcttcttcttcttcttctccctcatttgagctgagaagttaagttggaaccaagaactatactagttatattatgtagtggaaacatcacaaaagaatatcagaaaataaaaagaaaccgttccatgccaccctgagattctcctacaagctagcccaaccaaggaaacagcaatttttaagctgtttctcttgatactcgatctacatcttttcccttagtttaacactctttttcagtgggtttactactcttgtgtggtggtggtagtggtagatcaagagccaagaagtccgggaaaaaaattctacttgtttcgtccatttggtttagtctgccaaagcagaagtcagtggcgagatcttgtttctactccattcgcatcattctgctgccaatttgccctcagagaagagggagattcggcagcggaagagagcggagtatctccggcgatggcggcagcgctggagtgctggtcgggccggccgagcaccgacgaggagatggtggagcaggtgctcatgaagccccacgtccgctcggacgattccctccccacctgcgccgacgcggccttcgccgccggcgagccgacgacggcgcaggc

SEQ ID NO: 50704 - DNA, 4506 bp, Oryza sativa
  Clone ID: PAT_MRT4530_53164C.1
atggtgaagacaaggaatgatccccgtgactccaacgacgccagtggcagcgaagagcagaccgatggagctcatgtcagtggtgcatctggcagcagatcatctccaccgcccgaaaacccaacagtcactcaaatgatgacaatgatgatgcaacagatgcagcaacattaccatcagatgttgcagcaggcgcaacagaaccagcagtttggtcctccaccatcacacgtgtccaaactgttagactttcttcgtatccagccacccactttctcaagcaccaccaacccaatggaggccaatgactggctccgtgctattgagaagaagctgaacctactgcaatgcaacgaccaagagaaagttgcttttgctacacaccagttgcaagatgcaacggaggttacttgggcagagttttgtcaaagcttcaggaaggcacagattcctgaagggattatggcacaacagaagagagagttccgtgcgctccagcaaggaaccatgtcagttacagagtacttgcatgagttcaaccgccttgcgcgctacgctcctgaagacgtgcgcaccgatgctgagaagcaggagaagtttttgtttgggctcgatgatgaattgaccaaccagctaatctccggagtttatgaggactttgagaagcttgtggacaaggctattcgtcaggaagagcaacgcaacaaaatggaccgaaaaagaaaggcagctcagatcagctttcctcaggggaacaatcagaagcctcgcttcatgacgggacaactaggtgggccttccaccctgatcgtctgtcagcaccgtccctatcacccgagtaacttcgacaacgactacaacggtggcagtcacaacaacagtaagcagcacaaccacaactcgactccacccccactaatggcaccagctcagtcagatccgccagctgtgtcagttcagtcagaacaacccaagaagggggctgtaggaaagccaggaccctgcttcaactgtggcaagcacggccattttgctggcaagtgtccgaagctgaatcgcactggacccaggttcatccaggcccgcgccaatcatgtgtctgcagaggaagcacaggcagcaccagaggtcgtgttgggcacgtttccagtgaactcatatccagcaacagttctctttgattcaggtgcctcgcattctttcatttccaaaagatttgctgggacacatggattatcgatagtagaacttaaaataccgatgcaggttcatacccctggaaatgatatgaggacagcacactactgcccctcggtgactatagagatcaaaagatcaccgtttctatccaacctcatccttctcgaatctaaagacctggatgtcattcttggaatggattggttgaccagaaacaagggagtgattgactgcgcaagccgcaccatcaccctaaccaacgacaaaggggagaagatcaccttccgttccccagcatcgcagaagcccgtagcgagtctgaatcaggctgctattgagggtcagacagaaacagtggagaaaagtcccaggaagttggaggatattcctatagtacaagagtatcctgaggtgttcccagaagacctcactacaatgccaccgaagagagaaatcgagttccggatcgatttggcacccgggactactccaatttacaagaggccgtacagaatggcagctaatgagctagcagaggtcaagaagcaggttgacgaacagctgcagaaagggtacatccgaccgagtacttcaccttggggtgctccggttatctttgtggagaagaaagacaagaccaagaggatgtgcgtggattatcgcgcccttaatgaggtcacaatcaagaacaaatatccgttgccaagaattgatgacctgtttgatcagctaaaaggagctaaggtgttttccaagatagacctacgatcaggctatcatcagttgagaattcgggaagaggatattcccaagacagccttcaccactcggtatgggttgtttgagtgcacggttatgtcctttggactcaccaatgcaccggctttcttcatgaacttgatgaacaaagtgtttatggagtttcttgacaagtttgtcgtggtattcattgacgacatacttatttattcaaaatcagaagaggaacataagcagcatctccgtctggtactcgagaaattgaaggagcaccagctatatgccaagtttagcaagtgtgacttctggttatcggaggtcaaatttctgggtcacgtcatttctgctcaaggcgtggcagtggatccatcaaatgtggaatcagttacaaagtggaccccaccaaagatagtttctcagatccggagttttcttggacttgcgggctattaccgtcggttcatcgaaaatttctccaagattgccaggcccatgacacagttgctaaagaaagatgaaaaattcaagtggtcagctgagtgcaaccaaagttttgaagaactcaagaagaggttagtctctgcaccagttataattctgccagatcagacaaaagacttccaagtctactgtgatgcatctcgccaaggattgggatgtgtgttgatgcaagaaggcagagtggtcgcatatgcttcgcgacagttgcgtccacatgagaccaattatcccactcatgaccttgagttggcagcagtggttcatgctctgaaaatctggcggcactatcttattggcaaccgctgtgaagtttacactgatcataagagcctgaagtacatcttcacccagcccgacttaaatctccggcaacgaagatggctggagttgattaaagattatgacatggggatacactatcatccaggcaaagcaaatgtggtagcagatgctctgagcagaaagagctattgcaatgcagtatgtaccgaaggcatgtgtgacaaattgcagcaagatcttgagcacctaaatttgggcatcgtagaacacgggtacgtagctgccctagaggcacggcctacgctcgtggatcaagtcagagcagctcaagtaaatgatcctgaaatagctgagctgaaaaagaatatgagggtcggaaaagcccgagatttccatgaggatgagcatggcacaatctggttgggagaaagattgtgtgtgcctgacgacaaagaactgaaggatctcatactcacagaagctcatcaaactcagtattcaattcatcccggcagtactaaaatgtaccaggacctcaaagagaaattctggtgggccagcatgagaagagagatagccgaattcgtcgcactctgcgatgtttgtcagcgagtcaaagcagaacatcagaggcccgcaggactgctacaaccccttcagatcccggaatggaaatgggaagaaatcggaatggatttcataacaggtttgcccaggacatcatcgggtcacgattcaatctgggtggtcgtggatcgactcaccaaagttgctcattttattccagtacacactacctatactgggaaaaggttggcagagctttacctttcaagaatcatgtgtttgcatggggtacctaagaagattgtatctgatcgagggagtcagttcacttcaaaattttggcagaaactgcaagaagaattggggactcgtttgaatttcagcacggcctatcacccgcaaactgatggtcagaccgaaagggtcaatcagatcttggaagatatgctgcgagcgtgtgcgctcgattttggtggagcatgggataaaagtctaccttatgcggaattctcttacaacaacagttatcaagccagtttgcaaatggcaccgtttgaagcgttgtacggacggaaatgccgcactccgctcttctgggatcaaactggagaacgccaattgtttgggacggaagtattaactgaagcagaggagaaagtcagaaccgtcagagaaaggctaagaattgcccagtctcggcagaagagttatgctgataaccgccgaagagagcttactttcgaagcaggggattatgtgtaccttcgtgtcactccgctcaggggagtacaccggttccaaacgaaaggcaaattggcaccacgctttgtgggaccatacaggattttggaacgccgaggtgaagtcgcttaccagcttgagctcccatctaatatggttggaatccacgatgtgtttcatgtatctcaattgaagaagtgtttgagggtacctgaggaacaagctagctcagagcacattgacatccaggaagatctgacttatgtggagaagccgattcgtatccttgagaccagtgagagaaagaccagaagcaaggtgatcaggttttgcaaagttcagtggagccaccactcagaagaagaggccacctgggaaagagaagatgaattgaaggccgcccatccgcacctcttcgccagctcttccgaatctcggggtcgagattccgtttaa

SEQ ID NO: 50705 - DNA, 302 bp, Oryza sativa
  Clone ID: PAT_MRT4530_53165C.1
aagcttcggcatagttatgtgggaattactagcccgcacagaaccctacaaggacatgaaaatatacgatattcccagggcggtaatagatggacatcggcctcctgttccagagagtgcaaataaagactttgtcgcaataatgaaaaaatgctggagtggaaatccagaagaaagacctagttttgaagagttgcaacatcaatttgtgaatatgatatcaaagatagattataatggaatgtatagagaagagtaaaaaaaaataaacaatgattagaatatgtaaaaaaaaaaagctt

SEQ ID NO: 50706 - DNA, 298 bp, Oryza sativa
  Clone ID: PAT_MRT4530_53166C.1
tgcgtggacgcgtgatttcagatcatggtatggttgctcgccttaggcatgcgagtcagatatggtataccggaacggtacgatggcggacatagattacaccagacggagcacaagtgcaaaacatacgatgcctaagattgtatgaatcgggacctgtgcggacaacctcgatgtcatgattggtgatcaggtcaggaaccatgggggagatgtaggaggtgggaggactgttactggtgatacatacaactagtgtagtgatgagcgacgagatgagaataattattgagtttga

SEQ ID NO: 50707 - DNA, 393 bp, Oryza sativa
  Clone ID: PAT_MRT4530_53167C.1
ctcgccaagcctcgcattttgttttacctccacgagatatcattggcaaaggcagcctgcacatttgccttgaaggggttgaagaattggatgaaacctgagaaggtacctgccgccctcacgacattcccatcaactgcacaaattgtgtcagagcctcttggtgtcgtcctagtcatctcagcatggaactaccctttcttgctctccatcgacccagtcataggagcaattgctgctgggaatgccgttgtgctgaagccatcagaaattgcaccagccacctcagcattgttcgccaagctgctacctgaatacgttgatagcttttgcataaaagtggtggagggaggcgttccagaaacaaccgcactcttagaacaaaagtgggat

SEQ ID NO: 50708 - DNA, 992 bp, Oryza sativa
  Clone ID: PAT_MRT4530_53168C.1
ttttttttttttttttttttttacagtagcctgaactttgctgatgctgtaatgtaatgggatttaatttacatttttactccacaaagttcggtacagtgcactggtcaccggccttcgacgatggtgacggtgacgtcgttgacggtgcaggtggacgaccactcgccgtcggtcgagccgccgccgccgccgcggtcgctgcagaagcccgggtgcctcggctgcggcaccaccgcgctgaggttgcccagcatcatgaacaccgccgccatgtgcggccggtcctccggccgctcctgcacgcacaggagccccacctgcacgcaccgcagcacctccgacctgctgtaccccccgccgccgccgccgccggccaccgcctcgtcgagcagcgccagcgcgttgccctccctccacagcctccacgcgtggctgagcaggctcgtctgctcgccgctgctgtacatcccgcggttcttccggccgctgacgagctccagcaccagcacgccgaagctgaacacgtcggacttcaccgagaacacgccgtccatcgcgtactccggcaacatgtacccatatgtcccgacgacttttctggtgtgcgagtcggtgtcgtcgccgaagatcctcgcgacgccgaagtcggagatcttggggttcatgtctccgtcgagcaggatgttgccggccttgagatccctgtggatgatcttgaaccgggagtcctggtgcagatacaggaggccccgtgcgatgccgagtatgatgttaaatcgcttcgaccagttcagctgagctgatcgagccttgtcgaagatgaagttgtcgaggctcttgttctccatgtactcgtacaccagcatcctctcctcgccatggatgcagcagccgagaagcctgacaaggttcacatgctggagcctcgcgatgagcatgacctcgttcttgaactcgtccctcgtgccgtattcctgcagcccggggga

SEQ ID NO: 50709 - DNA, 1892 bp, Oryza sativa
  Clone ID: PAT_MRT4530_53169C.1
aaattaaaattaaaattaaaatataataaaatttattattttttaaaaaataaaaaaaaaaatattttattataaattataaatatttttataaatattttattttttttatttttttttttttttttttttttttttttttttttttttttttttttactgacaaatcatgtttatttatgtaaccctgtgtagtagaattttcaataagttacacaagaaaatccgacaaatataatgtacacctgtgtaaaacaacatgcaggaaatggcttccattgacagcatggcctgcactcactcaaatgcacaagtactgtactgaaactactgaaagttttctaacgcctctctttggggaagcccaggagggcaagaatcagtgcaaagaagctgccgtttatcagtcctctcaggatcttctgcttctcaatcgtgtaaggtgggtacctagcagttgcctcccctccgaagccgcggatcaggacggccttcttgtgggtgaaacaatcgaagctgaatttgccatggtaggagccgatcccgctgtcgccgactccgccaaatggcaggtgcggattggcgagatgcagggcaacatcatttacaagcattcctcctgctgggacattggacacaaattcctcttgcagtttcttgtccttggtgaaaagataggctgcaagtggcttggtccttgagttgatgaactggatgctatcttcaatcttgtcaactgttacaatgggaagtaagggaccaaaaatttcctctgccatgagtgttgtatcaagaggaacatctaacaacacagtaggagctatttttagttgcttctcatctgtttggccaccatatacaatcttttgggcgactttcttatcctctatcaaatttgtcaatctacggaaatggttagaattcacaatacgggacaagtcttctgattgcaaaggatcctccccatagaaccttttcaaaactctttttaaagagtcaaccagctctggagcaaatgattttgttgttataacgtagtctggagcaatgcatgcctgcccgttgttacatccccacttgccaacagctagcctcttcatggtaacatgaagatcagtattagaatcaacaattgcagggcattttccaccaagctctagagccacaggggtaagatgctttgcagctgctgccatcactatgcggcccacatttccgctacctgtgtagaagatcttatcccacttttgttctaagagtgcggttgtttctggaacgcctccctccaccacttttatgcaagagctatcaacgtattcaggtagcagcttggcgaacaatgctgaggtggctggtgcaatttctgatggcttcagcacaacggcattcccagcagcaattgctcctatgactgggtcgatggagagcaagaaagggtagttccatgctgagatgactaggacgacaccaagaggctctgacacaatttgtgcagttgatgggaatgtcgtgagggcggcaggtacctgatcatcatttatgagggttagcatgattagcatcttctcaggtttcatccaattcttcaaccccttcaaggcaaatgtgcaggctgcctttgccaatgatatctcgtggaggtaggactccatgcgaggcttggcgaggtcggagtggagcgcgtcggagatgtccccctccctctcctccaccatcctcacgatcccccgcagctgcgccgcccgccactccgccgccctcgtcctcccggacctgaagctccccctcagctcccccaccaccgccgccacctcctcctccgccatcgcgaatccctctcccaccaatcggagacgcaagaagcttactcgccgccgccgccggatgagtga

SEQ ID NO: 50710 - DNA, 1013 bp, Oryza sativa
  unsure (1)..(1013): unsure at all n locations
  Clone ID: PAT_MRT4530_5316C.1
ccccttctcctgtcctgtctccttcgcccgcgccgcgccgcctgcgccgatctccatcccggcgagcaccgctgccggcctcctctgctgcttccgccgcacactctcctctctgactccttgtcccccccctccccccgggcttcggctcccgtctccacgagagtccgccagccgcctgcgctgatctccatcccgccgtcgccgccgccgccgcctccgccgccgctgaccggccgatgaaccagccggtgcagaagaacacgctctatgtaggtgggctggcggaggaggtggacgagaagatcctgcacgcggcgttcgtgcccttcggggagatcaaggacgtcaagacgccgctcgaccaggccacgcagaagcaccgctccttcggcttcgtcaccttcctcgagcgggaggacgccgccgccgccatggacaacatggacggcgccgagctcttcggccgcgtcctcaccgtcaactacgccttccctgagcgcatcaagggaggagagcaggggtgggcagcacagccaatttgggctgatgcagatacttggttcgagaggcagcagcaggaagaagaaatgcaacgccttcaggcagagcagcgtgcagcgatgcaggcagcagagaagctgcacagggagaaattggctgcagaaaaagaaggggagaaagaagaggagactgataccaatgcagaccccatggctgcagcagaagctcaggccttgaaacagagctcttaaatccttgtgtattaatgttagaacaggtagtactgcaggcatgtccatttgtcaaatgcatgctattctaaatccgtcggtgcaactaacatgctattctctgcggacttgctaagctagttgttaagttggagctttctgttctactgcctgtgtaccactagtaacatggattntggngctatgaaaaattgatttgtgtttagctgtactgtcacattcacaggtgatttgcatgtcgtcttattctctggaggg

SEQ ID NO: 50711 - DNA, 3456 bp, Oryza sativa
  Clone ID: PAT_MRT4530_53170C.1
tcagtcggcggcggcggcggcgatggcgtccagccactccaccagctgctgcgccgtcggccgtgacttggggttgtcgctgacgcaggcgcacgcgacgtcgagcaccctgcaggcctcgtcgcggtgccgcctctcgccgacgctggcgtcgaccacctcgtcgccccgcgcctcccgccgcatgcggagcgcccacgacgtcacgtcgcggccgccgccggcgggcctcgccatgtcgacgggccgccgcccggtcaccagctcgagcagcacgacgccgaggctgtagacgtcgccgcggtaggtggccaccgacgagtggccgtactccggcgggatgtagcccagcgtgccgacgaggtcggtggtgacgtgcgtgtcgtcgtgcgcgcgcaccagccgcgcgaggccgaagtcggcgaggcgcggctccaggcgggcgtcgaggaggatgttgctcgacttgatgtcgcggtggaggacgcgcggctccgacgtcgcgtgcaggtgcgccagcccgcgcgccgcgccgcgcgcgatgctcagccgcgccggccatggcagcgcgccgccgccctcgacatcggcgcgctcgtgcagccagtggtcgaggctgccgttctccatgtaggggtagatgaggaggcggtccttgccgacgcggcagtagccctgcagcgtgacgaggttgcggtggcggacgcgggagagggtctccacctcggcgcggaactcgcgctccatctgccagaagtcgccggagagccgcttcaccgccacctcccgcccgtcggcgagagtcgcgcggtacaccatcccgaacccgccgcaccccacgatgcgggtctcgtcgaagttgcccgtcgccttcagcacgtcgtccagcgtcatcgtcctctcgccgtcgtcgccattgccattgtcgtcgtcgttggcgaagaggagcaccagcgttgacctcgccgccgactcgaggctgccgctctcgtcgtcggccgccaccctggcgttgtcctcctgccacctcgaccacgcccgccacgtcgcgaccgcggccaccgcgagcagcagcaccgtgccgacgattatcgccgccacgacgccggcattggcgctccggtccttgcgcccgccgccgccgccgccgtccacggcctgcggcgcgcaccgcgccgcgtggatgccgcagagcaaggggttgccgtcgaagtcggcgcgggagaacgtggagaactgcccgccgacggggacctcgccggagaggttgttgtacgcgacgtcgaagtgggagaggaagctgagccgcgccagcgacggcgggatggcgccggagagcgcgttgtgcgacacgtcgagcgactcgacgctcgacatgcccgacagctccggcgggatcggccccgacagcgcgttccagctcaggtcaacgacgtgcaccctggtcaacgccccgagcgccgccgggacgccgccggtgaggttgttccgcgccagcaccagcgacggcgggaaccggctcacctggttgtactgcctccccctcgccgacgagttggggcgtatgaagaaggggaagttctgcacgtgcgcctcgtcgctgccatcgccgccggccatgagcgccggcatccacgccagcttgagaggtatctcgccgtggagggagttgttcgatacgtcgaggtagaagaggcggtcgagctcgccgagccatggcgggatcgggccggcgaggtggttccacgacaggtcgagcaccttgagcttgctgaggcctgcgagccacgccggtatggcgccatgcagctcgccgttggcgatgacgagcacctcgatgccggcgaacccggcgatgtcggtcggcatcgcctcgccgccgtggaagttcttagtgagcaccaggctcgtcaggttgggtaaaccctgcagagtccgcagcgccgacgagacgttggagaagctgttcccggtgagggagaggaaggacagcgacgtgaacgcggcgaacgtcgccggtatctcgccggtgaggttgttccggccgaggtttagcgccgtcatggccctgcactccgggaggctcgccgggattggccccgtgaagcggttgacgccgaggtcgaggtacacgaggctctggagggcgcggaagtcgaggccgatgtctccggcgagcgagttgttccgcaggttgaggatgcggaggcgggagcatcgcgacagcgtggcggggagtacgccggtgagcaggttggacggcgccgagagctcctggagaccggggaccgcgtcgaacacatcggggaggtcgccggtgaagttgttgaaggagacgtcgaggcggacgaggctgctgaggttgcgcaggctgggcggcaggtggccggagagcgagttggtgtggaggctgaggacctgcagcgacgtcaggccgaacacgtcgtcggggagagccccggcgatggcgttgccgtcgagcgagagctccacgagcgaccggcattgcccgaaccccacggggaaatcgccggagaagccgttcatcgagagccgtagtgtccgcaaccccggcgacgcgccgcacagggcggcggcgtcgacgtggccggcgaagctgttcccggagacgtcgtacgacgtgagcctgccggcgccggcgagcacggggtggctgccgttgaacgcgttgtacgagacattgaactcgcgcatcgccgggaggtcgacgacggccgccgccgccaccgccccctccagcgcgttgacgctgacgtcgagcacctggagcgcccgcagccggaggagccccgccgggagcgcgccacggagcgcgttactcgacaggttcaacacccggagcgcggcgaggccggcgagcgactcggccaccactccccggagcgtcgcgttgggcaggaccacgccgacgacctcccccgcctcgtcgcacgccacgccgcgccacgcgcagcagtcgccaccgtccgatgtcgacgacgacgacgcgttgccgacccccgccggccacccgtcgacgccgccgtcgagaccggccgagaagccacgcagcgcggcgaggtcgccggagctgcaccgcgactgggcggcgccgttcttgagcaccagcagtagcaacagcaccagtacagcaacaggtaaagctcctcctctgcttcccatggctatagctactgttcacttcttcttcttcttcctggagctaaggatggtcatgggcatccatccatggtgaattggtgtgagagagaattcacatcagatgatccgatccagcttgagcttgctaagcttcatgcttgcacgaagtggaagagaggagggagaaggttggttaactaactgactactagcatgtctggggtttgactctttggttaagtttgatcgtacgcgtgaaacggacgcgtgggccgacccggccggtccggaccg

SEQ ID NO: 50712 - DNA, 366 bp, Oryza sativa
  Clone ID: PAT_MRT4530_53171C.1
atgggagcgaattatccaggatttatcggcgctgtgctttcagtggtaggcgacgtacccgtcgacagcgaggcgcctgtggtgacttcgtcaatctctcaagaatttgctagcccagtcttcgaagatgctcatagagatagggtttacgtgcgtgtgttcatagggttaacgggtacgattcagtatggccgagcagcgatcagcatcgatcgtgcaatcattttccacttccaccacatcaacttggtaatcaatacgttcaacactttcccaatgactggatttggcatatccttggtgggagcagtgggcacaagtgggttgaacggtagagttggctgcgcgaccgagaccaccggttga

SEQ ID NO: 50713 - DNA, 603 bp, Oryza sativa
  Clone ID: PAT_MRT4530_53172C.1
atggcgccatccccgtccggctttctccatcccagagagcaggtcgaggctagcccacgcatcagtgacacacgtctaccacttgatcaaaccaacttaatatcaatggttgagatctttccaaagtgtgtttgtttgcatataagaagttggaagtcggtggaggccattagggattcgggcaaccgcgtggaaggggttgaccaatccccctccactgaactgcttgggccaccccctctggcggggtgcacgtggcccatcttgggtgggtataccatgaggaccttcggccgggcctaccgaaaccaaggaccaggcgaggactcaagccggaggcacgcggcgaaggccgagaaggtgtccatgaggagacaacatgggcgaaagccatgtggcgaaagtcgtggcatgaagcacatgggcttcgccaaagatggaccttgttcgagggccatacgggcgaagactgcggggcaaaagccttgccgcgaagggcacgggtttcaccaagaaccggacctcactggaggaaggcccagcaggccatcacgccttccaggggtttcaccattgattgggccgggctacttagcccattag

SEQ ID NO: 50714 - DNA, 174 bp, Oryza sativa
  Clone ID: PAT_MRT4530_53173C.1
atgtccctttggaaggtgctcctgatggtaatcgcgctcatctgcgccctgcatactacttcagggagacctcccgtcgtgggatatcctgctcctcgtcccaacggtagctcgggcacacgatgctacgaaggctgcaaccctccaggtagagatggcaacagggatccataa

SEQ ID NO: 50715 - DNA, 216 bp, Oryza sativa
  Clone ID: PAT_MRT4530_53174C.1
atggagtcgctggctgtacacaaggcctcagtgagtttcaagttcaagttgataggtggcgtggagacaaggtcaagctgctcaacctccacttgtgggagaaggtttaggatccaagaggacaacaaaggggaagctgcttctgactatgccctgagccacctccatagtgtacattttgaaatctgcatggtgatattcaagtttaacaattga

SEQ ID NO: 50716 - DNA, 2373 bp, Oryza sativa
  Clone ID: PAT_MRT4530_53175C.1
tcgcttcctcgtcgccggctcgccgcgccggcggcagcattgtgagcctccctcccctccctgtggctgtgcctcccccggtggccagccgccggcctttggcagtagtccctgcgcggcggcgggccggcggcgaggctggtctggacgcggcggagtgtgactccgtccttccatctcggcttcgaatcgaattcgaagagagagaaaaatttggggggtttgagctgagctgaccaccacgtctaggtcaggtccacccccctgctgttcaagctgtggagtgaggagatgcgtctacttttgccgaggaattagcgaggcattgccaggtttccgatggataataagcatcataagaatgttgaggcagggaaaagctcattccacaggatggttcttgggcagcttgttggggaattcggtttcgacgaggagaatgttccttgcaatactccgagaagctcggttcgctcgcggttcggtgcttcggctagcagaatcgtcgcgtctactagcggtgcgtcagttagccccggtgagtatgtcagagatcctgggtccatattgagcctgcagccttggatctttaagaggagtggctctcagaagaatgaggaaaagatgatgctcgcaagtggtagtagggttgttggtgaaggcaagaatctgatggattcctttcgagatggctcggctgttgaggtctctccaaggagccctggtcttggttctggacctgggagaggtcgaggtgctcttaggagcagacggtcgcgtaggcacttgattaggccactcgtgccgatggagaattcctacattcctcaactttatagtgcagattttgaaattgatgagtgcacgtttgggccagctccctcccccgcttctgctaggccgttcatcgtaacagatggaaggagagtcattagtaagtcacgttatcaaccagtgcctgtaccatttcatattggatttgagaaggaagggcgtcgaaacagctcagaaatggtggaaagtgtaattgggattgctcctctacctgagctgaagaaatcaaaaagggagaggcagggatcacacaatggagggatgggtttgtctgctttcgagagtagtaagccatcaaaatcaacagatttacttgctcgactgcgcatattctctactggtgtcagtattggtattatatcatccactttatcaaacaagaatgagcttgatgcattaaagggtacagtgaaacgaatggagaacttgattcaagatctgcatgatgagctggagatgagagagggtttaactgtaaaggaattgcctaatgaaatgtctgtaaaaattgatgatgatgagagcaaagctcatgtaactgattcagagcccatgagcaaaatcgaagaagagcttgaagctgagcttgcgagattggaattaaatataacttcaaactgcttgaaagaacaaacatttgacttcagtgaggttgaacaggatctcattggagatattgtccagggagaactgaagatcgatacaacccattgtgatcttgctgaccacagcagtgagagtgcccatggcagggatagtagagaaagctccccagattacacacatgatgcaaactatcctgtctcacctagggatctcagcctccgtctccacaaggtaatccaacagagactcgaggagcgaatcaaggaacttgagacaacacttgcccagagtgagatgcagacgcaggtgcaagtgatggccaccgagcagatcttgtgtgaaagaacctgctcagacagtgattctggttctcccaaccaggaaagtccagtgtatatacaagaaactaactccttggtagaaccgttctgtctaaacctagctggagacgcgctagaggcttacgatgaagcttatgaggaattcatgagaattgcggactccccttgcaccacaagtaccaacgggaagcctcaagttcatgaagattactcggtggaccgcagcttgatctggggcttggaggatggcagtgcaaggaagctgaaaaaagtgcccacttgggagcgaattttaaagagcagagagcctaacagaactcaggagagtgacggagatgatgaagatgaatttgaagatgatgaccaggatagtaagatgctcatccaacagattatagagagaactaaacaaggctcacctgtactaattcatgctcaaagaatattgttttctgtggatgattagattgttggactatattgaattagaatttagtgccaattgattgtttagagaaaaaaacataatattattcttttcatcatcttccggtgatacattttccaacgtgtgttataaaaaaaaaaaaaa

SEQ ID NO: 50717 - DNA, 426 bp, Oryza sativa
  Clone ID: PAT_MRT4530_53176C.1
atcaaataacaagtgggctaagcccatataggcccaccaatcgaacacagcaaccacccatatagcacaaaggttacaacccaattagcatctaacacgacccgacaaacatccaatacaacacaaattttacaacacagttaacagccaaatccagccacattccaaatacaaatacagcaaccaaaatttcaccggatgtcgcgcgaccaagatcttcaaagtgagcttagcagcacgatgtcattgtagtggcagtattcaggatcatcagcacaaactgctattatcttgtcatccttctcaccctaatccatccattatcctcagttaaaaagaaagtgtttggtaaaaaaaaacagagtgaagcaacacatatgttaggcaatttactctgtgttaccagagcctaaatctcataattgt

SEQ ID NO: 50718 - DNA, 513 bp, Oryza sativa
  Clone ID: PAT_MRT4530_53177C.1
atggcgtgcggcaggaggatggatgcggtggggagctcaccgacgagggaggagcagcgttggcgacgcggagggagtcgtggcgaggtggtcgcgacggcgggacggcacggcaccgagtgggcgcggccggggaagaagagagggagacgagaggatgggggcggcgcggagctcctcgtcgactcctcgtgctcgccggcctcccgggcacgcgcggtggcagaaagagcgacgacggcggcgagcagccaggcggcaggggcggcaatggcgcgcgccggaaggcttcatgtggaaggaattggggatgtcggtttggagagggcgaaaccgacctcgacggtcaagggggcgaggcagctggcgcgggcggaagcgacatggggcatcggggccaggcggctgcgcggcgcaggcgggccagggcggtcggccaccgcgcgtggagcaaaatcgaacagcggcggcgggagggttcaaaccgcggcggcgggaagcagcgggcggtga

SEQ ID NO: 50719 - DNA, 280 bp, Oryza sativa
  Clone ID: PAT_MRT4530_53178C.1
tatgtaatgacgatggtattagggtagtatctggtagttttgacgtgtgtctaaattacgggatatcattatttttggttatatgctgatgatgaggtgggctgctaatggtgacagctcagtacgggtattcctccgcgcttgtatataatcctaagttaattccctggagagtattcctccgtatttagccctggttttatggtcatgacgagctgtcataaggaactcggcagtcatgggtggcttctcgaagtacaaggagggcatcggatagagg

SEQ ID NO: 50720 - DNA, 804 bp, Oryza sativa
  Clone ID: PAT_MRT4530_53179C.1
atcgatcggtcgaaccgacgaaatcgcctgccgctgcctgcctacgccgccggtctgaccgccggtgagatgccggttagaccgccgaaacccggtgaaacaccaatccgtcggccggtcagaccgcgggccggccggtctgaccgctcaacacaagccggtctgaccggcaactccgcccggtctgaccggaaatatcagggcattacggaaattgagtatccgctttccgcggagataccaagagcagcaggcgccaacgagacacaagatggcacgctgtgcggagcaaaggacgttttctactactaccacatcaaatcaaagaggaagaaccctgccatcccagtgtgttggccgttggtgggcatgctccctgatcttctcgtcaaccgtcaccagctccatgactggatcacctcgtttctcaccgcctcccagctcaattttcggtttatcggcccaacgatgtcgtccaacatgcggttcttcttcacctgcgactcggccaatgtccggcacatcttcacctccaacttcgcaaattaccccaagggacccgatttcgccgagatctttgatgacaccttaggtgatggcatcttcaacgtggacggcgactcgtggcgccggcagcgagccaagacccagcttctcatgtacaaccaccgattccagtctttcgtgttccggtgcagcagtgacaaagtggagaatgcgctgcttccgctgatatcccatttcgcgggaacgggggagagatgcaacctgcaagacgtgttcatgaggctgacatttgacatg

SEQ ID NO: 50721 - DNA, 108 bp, Oryza sativa
  Clone ID: PAT_MRT4530_5317C.1
atgtggaaacttaagattaagatgctccggaatggaaatgaggtgcttcgacctctctttctacggttggtttctgacatcaatcttgatctatttcacaacaagtga

SEQ ID NO: 50722 - DNA, 1237 bp, Oryza sativa
  Clone ID: PAT_MRT4530_53180C.1
atggatacatatggatggatgatggaatggaaggtggacagacgttaccggcgataccgtgagcagatgagggcggtggaggtgtcgttcgaggcggtggccggcggcggcgcggcgcaggtgtacacgaagctggcgatgcgagccatgtcgcggcacttccggtgcctgagggacgcgctggtggggcaggtgcgcgcgctgaggaacgccatgggggagagccagagggacgccgccggcggcgtggcggcggcggcgcccggtgccaccaagggcgacacgcctcggctgcgggtgctggaccagtgcctgaggcagcagagggcgttccagcagtccggcgccgtcgacagcttcccgtggcgcccgcagcgcggtctgccggagcgcgccgtcgccgtcctccgcgcctggctcttcgagcacttcctccacccgtatccaaatgatgtggacaagcacattttggcgcgccaaacaggcttgtcaagaagccaggtttcgaattggttcatcaatgcaagggtgaggctatggaagcctatgatagaagacatgtacaaggaagaaacgaagccggaatcatctgatggcaacaacaaattaaaccctagcgcagccggcaacaaacagcagcatcgagatgatcccaagaagaattacacggcaacgacagcagaagccagcttagtacaacaaagcagctaccatctccaccttcgcagcagcggaaaccgtaactcctcctcgttgatgatccctgcagcagcatcaacatccatcgatcatcaccatgacagcagccaccagctgttgggcggccatagctattcttcagcagcaggattgcatcatggtcatggcggcgccgtgtcgcttactctagggctccagcagcagcagcagccatttgcggcgtcgatgatgcatcagcatcagcagcaccagcaccagcaccagcagcagcagtcattcatggtggaggcggcggaggaagaagaagatgacgtgctcccttacaggaacctcatggagtctcagttgctgcatgattttgcaggagctagctaaggcaggctccagcttagcatgcagctaatttatttgattgttaaaggagattattgcgctcaaaagtttaatttaattaaggagatgtaggtaattaaatattacattattgttcttttatgaccccacctttcgttacattaaaaaaaaaaaaaaaaaaaaa

SEQ ID NO: 50723 - DNA, 711 bp, Oryza sativa
  Clone ID: PAT_MRT4530_53181C.1
atgccgatgacatatcatttatctttgagccgatgtcatatatgcatcgatcggcggtcattaataaccgagtctccttgtcctcgttgccttgctgattggcgcgcttgccaccagaaggaacatgatgcggacatcactatttcggatacatacaacaacaatcctccaccggtcactaaaggaccgataacaagagctcgcgcgcaacaattgaatttagtggtgagctcgttcctatattcttctttgtacgaatttgagaatagattgctacctaatgattatattgtgattaggaacaatggaggggacaatgagacacttggagaaggacttagagtcataaacgatcatcgaggacgtccaagtcaaggtggaggcccaaacaaggtcgacttcgagtgcaattcggagtccagtaccaggtttggattttgcttagattattctgtcgagaacaattttgccgctagatcggtttctgcaagagaagaagaggaagtgcccgagatgggtcaacctcaccttggaccttcagagccctatttatacgcggaggaggttggcggcttgcgatttctacttcgagaaggggacatctatgggtataaatacaagccccctaggaagagaggggacacgccacgagggcacaagatacacaagccaatgcaaaccaatatgtcaccagataccgacatcagagat

SEQ ID NO: 50724 - DNA, 222 bp, Oryza sativa
  Clone ID: PAT_MRT4530_53182C.1
atgccgacagggtggatccggtgtaggctcggcgacgaggcgacggatccggtggcgccgaggcacgcgcgcggcgcatcgagcggcgccgagacgcgggtgcgatgtatctggctccggcaggttgatgaaggtggcgcggcggtggcggacttcggtggggaggcgacggttctgcggggagggagggagcaccggcatgggcggcgcacggcaatttaa

SEQ ID NO: 50725 - DNA, 392 bp, Oryza sativa
  Clone ID: PAT_MRT4530_53183C.1
ttttggttttttttttttttttttttttttttttttcaagaaaagctacagacaaggttatatgtggccgagtgcatgcttcctgttagtgcatacagattggggcgctacgcaagagccttggcaggcagtggccaatcttaacgtgggggtcttgaatttacaagcttatttcaacactttcagaactttaccacaggtattgaaagcgcccacagttcccactctttcgtaagcaattggaacctgttttcgaaccaagaaccaccaaaacccttgttttcacctttgaaaccattaaaccgggcgctctggtatcaacaaggggccactgggttcctgaatgaaaatcaatgcggaaggccaggaagtttgagccttgaacctgaaaa

SEQ ID NO: 50726 - DNA, 3750 bp, Oryza sativa
  Clone ID: PAT_MRT4530_53184C.1
atgtcagttacagagtacatgcacgagttcaaccgccttgcgcgctacgctcccgaggacgtgcgcaccgatgctgagaagcaagagaggtttttgtttggtcttgatgatgaattgaccaaccagctgatctccggagtctatgatgattttgagaagcttgtggacaaggctatccgtcaggaagaacaacgtaacaaaatggaccgaaaaagaaaggcagctcagatcagctttcctcaggggaacaatcagaagcctcgcttcatgacgggacagttaggtgagccttccaccctgatcgtccgtcagcaccgtccttaccactcgagtaacttcaacaacgactacaatagtggctgtcacggcagcagtaagcagcacaaccacaactcgactccacccccattaatggcaccaactcagtcagatccgccagctatgtcagctcagtcagaacaactcaagaaggagtctgcaggaaagccaagaccctgcttcaactgtggcaagcacggccactttgctggcaagtatccgaagccgaagcgcgctggacctaggttcgtccaggcctgcgtcaatcatgcgtctgcagaggaggcacaggcagcaccagaggtcgtgctgggcacgtttccagtgaattcatttccggcaacagtactttttgattcgggtgcctcgcattctttcatttccaagagaattgctgggacacatggattatcggtagtggaacttaaaatactgatgcgggttcatacccctggaaatgacatgaacaccacacactactgcccctcagtgaccatagagatcaaaaggtcaccgttcctatccaacctcatccttctcgaatccaaagacctagatgtcattctcggaatggattggttgaccagacacaagggggtgattgactgcgcaagccgcaccatcaccctaaccaacgacaaaggggagaagatcaccttccgttctccagtgccacagaagtccgtagcaagtctgaatcaggctactatcgaggatcagacagaaatagcggagaaaaatcccaagaaattggaggatatacctatagtacaagagtatcctgaggtgttcctagaagacctcactacaatgccaccgaagagagaaatcgagttccggattgatctggcacccggaactgctgcaatctacaaaaggtcgtacagaatggcagctaatgagctagcagaggtcaagaagcaggttgatgaacagctgcagaaagggtacatccaaccgagtatttcaccttggggtgctccggttatctttgtggagaagaaagacaagaccaagaggatgtgcgttgattatcacgcccttaatgaggtcacaatcaagaacaaatatcccttgcccagaattgatgacctgtttgatcagttaaaaggggctaaggtgttttccaagatagacctgcgatcaggctatcaccagttgagaattcgggaagaggatattcccaagacagccttcactactcggtatgggttgtttgagtgcacggttatgtcatttggactcaccaatgcaccggctttcttcatgaacttgatgaacaaagtgtttatggagtttcttgacaagtttgtcgtggtgttcattgacgacatacttatttattcaaaatcagaagaggaacatgagcaacatctccgtctggtactcgagaaattgaaggagcaccagttatatgccaagttcagtaagtgtgacttctggttgtcggaagtcaaatttctgggtcacgtcattactgctcaaggtgtggcagtggatccatcaaatgtggagtcagttacaaagtggaccccaccaaagacagtttctcagattcggagttttcttggacttgcgggctattaccgtcggttcatcgaaaatttctctaagattgccagacccatgacacaattgctaaagaaagatgaaaaattcaagtggtcagttgagtgcaatcaaagttttgaagaactcaagaagaagttagtatctgcaccagttctgattctgccggatcagacgaaagactttcaggtctactgtgatgcatctcgtcaagggctgggatgtgtgctgatgcaggaaggcagagtggtcgcatatgcttcgcgacagttgcgtccacatgagagcaattatcctactcatgatcttgagttggcagcagtggttcatgctctgaaaatctggcggcactatcttattggcaaccgctgtgaagtctacactgatcacaagagtctgaaatggctggagttaattaaagattatgacatagggatacactatcatgcaggcaaagcaaatgtggtagcagatgcttttagcagaaagagccattgcaatacagtatataccgaaggcatgtgtgacaaattgcaacaagatctagagcacctaaatttgggcatcgtggaacacgggtacgtagctgctctagaggcacgccctacgctcgtggatcaagtcagagatgctcaggtaaatgatcctgaaatagctgagctgaaaaagaatatgaggattggaaaagcccgagattttcatgaggatgggcatggcacaatctggttgggagaaagattgtgtgtacctgacgacaaagaactgaaggatctgatactcactgaagctcatcaaactcagtattcaattcatcccggtagtactaaaatgtaccaggacctcaaagaaaaattctggtgggctagcatgagaagagaaatagctgaattcgtcgcactctgcgatgtttgccagagggtaaaggcagaacatcaaaggcccgcaggattgttacaacctcttcagatcccggaatggaaatgggaagagattggaatggatttcataacaggtttgcccaggacatcatcgaggcacgattcaatctgggtagtcgtggatcgactcaccaaagttgctcatttcattccagtgcacactacctatacggggaaaaggttggcagagttgtacttagcaaggatcatgtgtttgcatggggtacctaagaagatagtatctgatcgagggagtcagttcacttcaaaattttggcagaagttgcaagaagaattggggactcatttgaatttcagcatagcttatcatccacaaactaatggtcagaccgagcgagtcaatcaaatattggaagatatgttgagagcttgtgcacttgactttggcggagcttgggataaaagtctgccttatgcggaattctcttacaacaacagttatcaggccagtctgcaaatggcaccgtttgaagcattgtccggatggaagtgccgcacttcgctcttctgggatcaaacaggtgagcgccaactgtttgggacagaggtgctaaccgaggcagaggaaaaagtcaggaccatcagggaaagattgagaatcgcccagtctcggcagaagagttatgctgacaaccgccgaagggagcttatttttgaagcaggggattatgtgtaccttcgtatcactccgcttcggggagtccaccgcttccagactaaaggaaagttggcaccacgctttgtgggaccatacaggatcctggaacgcagaggtgaagttgcttaccaccttgagcttccatctaatatggctggtatccacgatgtgtttcatgtatctcaactgaagaagtgtttgagagtacctgaggaacaagctagctcagagcacatagacatttag

SEQ ID NO: 50727 - DNA, 4497 bp, Oryza sativa
  Clone ID: PAT_MRT4530_53185C.1
atggtgaagacaaggaatgatccccgtgactccagcgacgccaggggcagcgaagagcagaccgatggagctcatgtcggtggtgcatctgacagcagttcatccccaccgctcgggaacccaacggtcactcaaatgatgacaatgacgatgcaacagatgcagcaacatcaccatcaggtgttgcaacaggtgcagcagaaccagtggtttgctcctccaccatcacacctgtccaaactgttagactttctccgcatccagccacctactttctcaagcaccaccaacccaatggaggccaacgactggctccgtgttgttgagaagaagctgaaccttctgcaatgcaacgaccgagagaaggttgcttttgctacacatcagttgcaaggtcctgcttctgcctggtgggataactacgtggtgacccgtctagatgcaacggaggttacttgggcagagttttgtcaaagcttcaggaaggcacagattcctgaagggattatggcacaacagaagagagagttccgtgcgctccagcaaggaaccatgtcagttacagagtacctgcacgagttcaactgccttgcgcgctacgctcctgaggacgtgcgcaccgatgccgagaagcaggagaagtttttgtttggtcttgatgatgagttgaccaaccagctaatctccggagtctatgatgattttgagaagcttgtggacaaggctatccgtcaggaagagcaacgcaacaaaatggaccgtaaaagaaaggcagctcagatcagctttcctcaggggaacaatcagaagcctcgcttcatgacgggacagctaggtgggccttccaccctgatcgtctgtcagcaccgtccctatcacccgagtaacttcgacaatgactacaacggtggctgtcacaacaacagtaagcagcacaaccacaactcgactccacccccactaatggcaccagctcagtcagattcaccagctgtgtcagctcagtcagaacagcccaagaagggggctgtaggaaagctaggaccctgcttcaactgtggcaagcacggccactttgctggcaagtgtccgaagctgaatcgcgctggacccaggttcattcaggcccgcgtcaatcatgcgtctgcagaggaggcactggcggcaccagaggtcgtgctgggcacgtttccagtgaactcatatccagcaacagttctctttgattcaggtgcctcgcactctttcatttccaagagatttgctggggcacatggattatcggtagtggaacttaaaataccgatgcaggttcatacccctggaaatgacatgaggacatcacactattgcccctcggtgactatagaaatcacaagatcaccgtttctatccaacctcatccttctcgaatccaaagacctggatgtcattctcggaatagattggttgaccagacacaagggggtgattgactgcgcaagccgcaccatcaccctaaccaacgacaaagcggagaagatcaccttccgttctccagtgtcgcagaagtccgtagcgagtttgaatcaggctgctattgagggtcagacagaaacagtggagaaaagtcccaggaagttggaggatattcctatagtacaagagtatcctgaggtatttcctgaagacctcactacaatgccaccgaagagagaaatcgagttccgaattgatctggcacccggaactgctccaatctacaagaggccgtacagaatggcagctaacgagctagcagaagtcaaaaagcaagttgatgaacagctgcagaaagggtacattcgaccgagtacttcaccttggggtgctccggttatctttgtggagaagaaagacaagactaagaggatgtgcgttgattatcgggcccttaatgaggtcacaatcaagaataaatatccgttgccaagaattgatgacctgtttgatcagctaaaaggagctaaggtgttttccaagatagacctgcgatcaggctatcatcagttgagaattcgggaagaggatattcccaagacagccttcatcactcggtatgggttgtttgagtgcacggttatgtcatttggactcaccaatgcaccggctttcttcatgaacttgatgaacaaagtgtttatggagtttcttgacaagtttgtcgtggtattcattgacgacatacttatttattcaaaatcagaagaggaacatgagcaacatcttcgtctggtactcgagaaattgaaggagcaccagttatatgccaagtttagcaagtgtgacttctggttatcggaggtcaaatttctgggtcacgtcatttctgatcaaggcgtggcagtggatccatcaaatgtggaatcagttacaaagtggaccccaccaaagacagtttctcagatccggagttttcttggacttgcgggctattaccgtcggttcatcgaaaatttctccaagattgccaggcccatgacacagttgctaaagaaagatgaaaaattcaagtggtcagctgagtgcaaccaaagttttgaagaactcaagaagaagttagtctcagcaccagttctaattctgccagatcagacgaaagacttccaggtctactgtgatgcatctcgccaagggttgggatgtgtgttgatgcaagaaggcagagtggtcgcatatgcttcgcgacagttgcgtccacatgagagcaattatcctactcatgatcttgagttggcagcagtggttcatgctctgaaaatctggcggcactatcttattggcaaccgctgtgaagtctacactgaccacaagagtttaaaatatatcttcacccagcccgacttaaatctccggcaacgaagatggctggagttgattaaagattatgacatggggatacactatcatccaggcaaagcaaatgtggtagcagatgctctgagcagaaagagctattgcaatgcagtatgtaccgaaggcatgtgtgacaaattgcagcaagatcttgagcacctaaatttgggcatcgtagaacacgggtacgtagctgccctagaggcacggcctacgctcgtggatcaagtcagagcagctcaagtaaatgatcctgaaatagctgagctgaaaaagaatatgagggttggaaaagctcgagatttccatgaggatgagcatggcacaatctggttgggagaaagattgtgtgtgcctgacgacaaagaactgaaggatctcatactcacagaagctcatcaaactcagtattcaattcatcccggcagtactaaaatgtaccaggacctcaaagagaaattctggtggcgagtcaaagcagaacatcagaggcccgcaggactactacaaccccttcagatcccggaatggaaatgggaagaaatcggaatggatttcataacaggtttgcccaggacatcgtcggggcacgattcaatctgggtggtcgtggatcgactcaccaaagttgctcattttattccagtacacactacctatactgggaaaaggttggcagagctttatctttcaagaatcatgtgtttgcatggggtacctaagaagattgtatctgatcgaggaagtcaattcacttcaaagttctggcagaaactgcaagaagaattggggactcgtttgaatttcagcacggcttatcatccgcaaacagatggtcagactgagcgagtaaatcaaatcttggaagatatgttgagagcttgtgcacttgactttggtggagcctgggataaaagtctaccgtatgcggaattctcttacaacaacagctatcagtccagtttgcaaatggcaccgtttgaagcattgtacggacgaaagtgccgcacaccacttttctgggatcaaacaggtgggcgccaactgtttgggacagaagtgttaaccgaagcagaggagaaagtcaggaccgtcagggaaagactgcgaatcgcccagtctcggcagaagagttatgctgataaccgccgaagagagcttactttcgaagcaggggattatgtgtaccttcgtgtcactccgctccggggagtacaccggttccagacgaaaagcaaattggcaccacgctttgtgggaccatacaggattttggaacgcagaggtgaagtcgcttaccagctagagcttccatctaatatggttggtatccacgatgtgtttcatgtgtctcaactgaagaagtgtttgagggtacctgaggaacaagctagctcagagcacattgacatccaagaagatttgacctacgtggagaagccaattcgtatcctggaaaccagcgagagaaggaccagaaacaaagtaatcagattttgcaaagttcagtggagccaccactcagaggaagaggccacctgggaaagagaagatgaattaaaggccgcccatccgcacctcttcgccagctcttccgaatctcggggccgagattccgtttaa

SEQ ID NO: 50728 - DNA, 2692 bp, Oryza sativa
  Clone ID: PAT_MRT4530_53186C.1
agtacttgcatgagttcaaccgccttgcgcgctacgctcctgaggacgtgcgcaccgatgctgagaagcaggagaagtttttgtttgggctcgacgatgaattgaccaaccagctaatctccggagtctatgaggactttgagaagcttgtggacaaggctatccgccaggaagagcaacgcaacaaaatggaccgaaaaagaaaggcagctcagatcagctttcctcaggggaacaatcagaagcctcgcttcatgacgggacagctaggtgggccttccaccctgatcgtctgtcagcaccgtccctatcacccgagtaacttcgacaacgactacaacggtggcagtcacaacaacagtaagcagcacaaccacaactcgactccacccccactaatggcaccagctcagtcagatccgccagctgtgtcagctcagtcagaacaacccaagaagagggctgtaggaaagccaggaccctgcttcaactgtggcaagcacggccactttgctagcaagtgtccgaagctgaatcgcactggacccaggttcatccaggcccacgccaatcatgtgtctgcagtggaagcacaggcagcaccagaggtcgtgttgggcacgtttccagtgaactcatatccagcaacagttctctttgattcaggtgcctcgcattctttcatttccaaaagatttgctgggacacatggattatcggtagtggaacttaaaataccgatgcaggttcatacccctggaaatgatatgaggacagcacactactgcccctcggtgactatagagatcagaagatcaccgtttctatccaacctcatccttctcgaatctaaagacctggatgtcattcttggaatggattggttgaccagaaacaagggagtgattgactgcgcaagccgcaccatcaccctaaccaacgacaaaggggagaagatcaccttccgttccccagcgtcgcagaagtccgtagcgagtctgaatcaggctgctattgagggtcagacagaaacagtggagaaaagtcccaggaagttggaggatattcctatagtacaagagtatcctgaggtgttcccagaagacctcactacaatgccaccgaagagagaaatcgagttccggatcgatttggcacccgggactactccaatttacaagaggccgtacagaatggcagctaatgagctagcagaggtcaagaagcaggttgacgaacagctgcagaaagggtacatccgaccgagtacttcaccttggggtgctccggttatctttgtggagaagaaagacaagaccaagaggatgtgcgtggattatcgcgcccttaatgaggtcacaatcaagaacaaatatccgttgccaagaattgatgacctgtttgatcagctaaaaggagctaaggtgttttccaagatagacctacgatcaggctatcatcagttgagaattcgggaagaggatattcccaagacagccttcaccactcggtatgggttgtttgagtgcacggttatgtcctttggactcaccaatgcaccggctttcttcatgaacttgatgaacaaagtgtttatggagtttcttgacaagtttgtcgtggtattcattgacgacatacttatttattcaaaatcagaagaggaacatgagcaacatcttcgtctggtacttgagaaattgaaggagcaccagttatatgccaagtttagcaagtgtgacttctggttatcggaggtcaaatttctgggtcacgtcatttctgctcaaggcgtggcagtggatccatcaaatgtggaatcagttacaaagtggaccccaccaaagacagtttctcagatccggagttttcttggacttgcgggctattaccgtcggttcatcgaaaatttctctaagattgccaggcccatgacacagttgctaaagaaagataaaaaattcaaatggtcagctgagtgcaaccaaagttttgaagaactcaagaagaagttagtctccgcaccagttctaattctgccagatcagacgaaagacttccagttgcgcccacacgagaccaattatcccactcatgaccttgagttggcagcagtggttcatgctctgaaaatctggcggcactatcttattggcaaccgctgtgaagtttacactgatcataagagcctgaagtacatcttcacccagcccgacttaaatctccggcaacgaagatggctggagttgattaaagattatgacatggggatacactatcatccaggcaaagcaaatgtggtagcagatgctctgagcagaaagagctattgcaatgcagtatgtaccgaaggcatgtgtgacaaattgcagcaagatcttgagcacctaaatttgggcatcgtagaacacgggtacgtagctgccctagaggcccggcctacgctcgtggatcaagtcagagcagctcaagtaaatgatcctgaaatagctgagctgaaaaagaatatgagggttggaaaagctcgagatttccatgaggatgagaatggcacaatctggttgggagaaagattgtgtgtgcctgacgacaaagaactgaaggatctcatactcacagaagctcatcaaactcagtattcaattcatcccggcagtactaaaatgtaccaggacctcaaagagaaattctg

SEQ ID NO: 50729 - DNA, 644 bp, Oryza sativa
  unsure (1)..(644): unsure at all n locations
  Clone ID: PAT_MRT4530_53187C.1
atcgtgagtttaacaaagtttggatcaggtcaggataatnatgcgttgcgcaagagaagaataaaaatgtttgcttacactttgcccaaggttggtactaatactatacaaatgacatgttgcaccatttcaaaaataataataataaaaagctgttgcacctgtagttgctaacaatgaaatgaactcttggcacagcaggtcttaacaggacagatcttgtgctactgtattatttgcatcttcgatacatgaaatcaaagagtacagatgaagcttagtgcatttaggtgtaactcggtcgagttactgggtcgaggaaattagcataaaaaatcacacaaggctacagtctttccagcaaaatggacttaaatctgaaccaagttccattaaaaattagacagcctttttgagatgatcaagatcagatagcttgaaatttgcatatgtacacaccgggcttcaatcatatgtaatctgaatctcaaaataaatagttgttatcatcacactacagtatacccacatgtggaccaatctttgaaaatctatccacccaactcaaaaactataccagcaaccaagcctgccttcacataggnggacaaagctgagggaagccacaggcctatagatccctc

SEQ ID NO: 50730 - DNA, 455 bp, Oryza sativa
  Clone ID: PAT_MRT4530_53188C.1
agcgctttcggcccgttgctcgccgcggcgatcatcattccctacggccacacacacatcgcctggttcgggctgttcgcggtgtatgcgattctggtgctgtatggcttgagccactggtaccgccaccacctcaatctgttcaagctcaagcaaggtggcaaggccacccacggctgtccaaaggccgcgtgacgtttgccctggtggtgctggctctgctggtgttctccaagtacttctacatgaccagcctgaccagttacttcaccttctacctgatcgagaagttccagctgtcggtggccagttcgcacatgtacctgttcctgttccttggcgcggtagcggtcggcacctttgccggtgtacctatcgacgacaagatcggccgcaagaaagtcatctggttctcgatcctcggcgccgcgcccttcaccctgtcgctgccttat

SEQ ID NO: 50731 - DNA, 284 bp, Oryza sativa
  Clone ID: PAT_MRT4530_53189C.1
atgaataaagaacgcaatccccctacaaatcgaccagagcagggtgccgtggactggcacgaggacacacgagcgcatgatcttgccgtcgtgcggcggagagaggcggacggggaggaggaagaagcgtaccattttggcggccgcggaggggaaggcggggagctagggtttcggaggcgctgccttgtctggtcgacacgctgcggcgagtggcggcggggaggggaaggagaaggtctgcgactttatacgggtgagctcctggaggctagggtttactg

SEQ ID NO: 50732 - DNA, 1536 bp, Oryza sativa
  Clone ID: PAT_MRT4530_5318C.1
atgatgagcgagaacgagatcatgccgatcacattggatgatttcgaaggagaagaccgcaagtccatggaggagtacatcaaggagatcacacaggaggcgttgatgagggcgtgcactaggactcgtcaaggcgtgatgaccaagcccgggccacgtcctaagttcgcttccgattttgtaagcaatgaagaggtaacacaatctatccaacaagtagcatctacaatagattcatctatgactgtttttaaagataggttagatgcaacttttgagggtaaatttgatgagtttttaagatttaaagtcggccctctcttggccgattttatggtaaaagataaagcctctaccactgctagccaagctcctatagatcaaacaagtagtggaaccaatggagtggcgcatatagccggtctgaccgggcctgatggccggtcaaaccgcgacttcaccgtcggtccgaccagccaaacggccggtccgaccggaacatttaatcctcctgtatctactgctgcgactaatccccaagttcccccacatgttcctaatgcttataatgatgttgctagggggtatcatcccgatactaggcaaggccaatataatcatattgcgccgcaaacacaacctattaggccaccaaatccaccaccaaatcaacataggcctgataatatggaggaaataactagtgggattattagggataaattcgggattgaaactaggaattgtgctaaggtttaccaaaagccgtatcctgactattatgataatgtgccatttcctcgtaattatagagttcccgaatttaccaagtttagtggtgaagatagtaggaccacatgggagcatgtagcactggctcaggaaagccgggtggatgataatagcttaaatgctagtttagatgatagtgcaatatcatgtgtagccgaaccaagcgacggtgagaatgctatgactacaatggagcatatcggccaatttattgatcaatgtggtaagcatgagtttcatgattattttaaagatgcaagcttgatggagcaaagaccgattgatacttcatcggtcacttgtgaaactatttcggttacatctatgcctaagaccggaattgttagtgatcctctccctgttagttttattgatgttggcaaaaagaaagggaaaagtgttattattggggatcctcggcccaagaataggataaaaaatgcgaaggccgaagatcataaagttgcaaaggagtggaaggaatcacctaggtcagtaccaactcattcatttaactctagtcaagaccgtttcccacaaaagaatcggtccggtggatcaaaggtgaaaaaggtaaagaaggtgtgggtgagaaaagaagccaaagctccggaggtcgtcactattaaggaggaatctcaagatgttcaagtacctactggcacagttattaagaccggaccggaccggtggtcagaccggaaaaaaccggaaccagagcccccgccggtccggtccaggtaa

SEQ ID NO: 50733 - DNA, 670 bp, Oryza sativa
  Clone ID: PAT_MRT4530_53190C.1
atgtctttcgacgagatcggaaccatcatcgccaactattcgatctgtcaagatcgaccaaacttcaagacatcatctccgcggatcacgtcaattttaaggttgtcagtcatggtgcttcgtcgtagattgaacaacctcgccgccgcgaaggatgtggacgccaaacttttcgtcgtgttacaaccaaccgagggcgggccctctcctcctgcggtgggccgtctacacgtgctgatagctgaggataatccagatcaactaagaggtgatcgagatacgcttacacctggtcatcaaccagtagatagtagcgatctctcaccaccaaaaatccattttcagatcgccgttgtcaccaggacgacaacgtctaggactaatgacaccaagacgacaacggacaaggttaacgacatcacgacatcacacgatgacgacgaaactcctgcgccccggcctccttgtctgcccgggcaccaggagacagttctcgcaggtcacgagaatgtcgtctatctattactctggattccatacaagtggtcaaggtacgactacgactggtctttgggcctgtttgggggagcttaagattctgagaagcagctgctgagaagctacctgataggtaaggggctcgaacctttataaaaatccttgtctccat

SEQ ID NO: 50734 - DNA, 4710 bp, Oryza sativa
  Clone ID: PAT_MRT4530_53191C.1
gcccccatgtcgccaccaccgccgaaaccgccgcaccccgccccctcgggccacgtcggccccgccgcgcgcgcgccccgcctttcccgcgtccacctccctctctcgcttcctccctcctgtgtgcgccgtcgtcctccgcgcgcgcaccgtcgtcttcggccgccgccgccgctttcggcatggtgaagacaaggaatgatctccgtgaccccaacgacgccagtggcagcgaagagcagaccgatgaagctcataccagtggtgcacctggcagcagatcatctccaccgcccgagaacccaacaatcactcagatgatgacaatgatgattcaacagatgcagcaacattaccatcagatgttgcagcaggcgcaacagaaccagcagtttggttctccaccctcacatctgtccaaactgttagactttctccgtatccagccacctactttctcaagcaccaccaacccaatggaggccaacgactggctccgtgcgattgagaagaaactgaaccttctgcaatgcaacgaccaagagaaggttccttttgctacacatcagttgcaaggtcccgcttctgcctggtgggacaactatgtggtaacccgtccagatgcaatggaggttacatggtcagagttttgtcaaggcttcaggaaggcacagattcctgaagggattatggcacaacagaagagagagtttcgggcgctgcaacaaggaaccagaacagttacagagtacctgcacgagttcaaccgcctcacgtgctacgctcctgaggacgtgcgcatcgatgctgagaagcaggagaagtttttgtttgggctcgatgatgaattgaccaaccagctaatctccggagtctatgaggactttgagaagcttgtggacaaggctatccgtcaggaagagcaacgcaacaaaatggaccgaaaaagaaaggcagctcagatcagctttcctcaggggaacaatcagaagcctcgcttcatgacgggacagctaggtgggccttccaccctgatcgtctgtcagcaccgtccctatcacccgagtaactttgacaacgactacaacggtggcagtcacaacaacagtaagcagcacaaccacaactcgactccatccccactaattccgccagctgggtcagcttagtcagaacagcccaagaagggggctgtaggaaagccaggaccctgcttcaactgtggcaagcacggccactttgctggcaagtgtccgaagctgaatcgcgctggacccaggttcatccaggcccgcgccaatcatgtgtctgcagaggaagcacaggcagcaccagaggtcgtgttgggcacgtttccagtgaactcatatccagcaacagttttctttgattcaggtgcctcgcgttctttcatttctaagagatttgctggggcacatagattatcggtagtggaacttaaaataccgatgcaggttcatacccctggaaatgacatgaggacaacacactattgccccttagtgactatagagatcaagagatcacagtttctatccaacctcatccttctcgaatccaaagacctagatgtcatcctcggaatggattggttgaccaggcacaagggagtaatcgactgcgcaagtcgcaccatcaccctaaccaacgacaaaggggagaagatcactttccggtctccagtgccacagaagtccgtagcaagtttgaatcaggctactattgaggaacagactgaagtagcggagaaaagtcctaggaagttggaggacattcgtatagtacaggagtatcctgaggtgtttcctgaagacctcactacaatgccaccaaagagagaaatcgagttccagattgacctggttaaggtaaccactccgatttacaagaggccatacagaattgcagctaatgagctagcagaggtcaagaagcaagttgatgaacagctgtagaaagggtacatccgaccgagtacttcaccttggggtgctccggttatctttgtggagaagaaagacaagaccaagaggatgtgcgttgattatcgcgcccttaatgaggtcacaatcagaacaaatatccattgccaagaattgatgacctgtttgatcagctaaaaggagctaaggtgttttccaagatagacctgcgatcaggctatcaccagttaagaattcgggaagaggatattcccaagacagcctttaccactcgatatgggttgtttgagtgcacggttatgtcatttggactcaccaatgcaccggctttcttcatgaacttgatgaacaaagtgtttatggagtttcttgacaagtttgtcgtggtattcattgacgacatacttatttattcaaaatcagaagaggaacatgagcagcatctccgtctggtactcgagaaattgaaggagcaccagttatatgccaagttcagtaagtgtgacttctggttgtcggaagtcaagtttcttggtcacgtcattactgctcaaggtgtgacagtggatcaatcgaatgtggagtcagttaccaagtggaccccacctaagatagtttctcagatccggagttttcttggacttgcgggttattaccgtcggttcatcgaaaatttctccaagattgccaggcccatgacacagttgcttaagaaagatgaaaaattcaagtggtcagctgagtgcaaccaaagttttgaagaactcaagaagaggttagtctctgcaccagttctaattctgccagatcagacaaaagacttccaagtctactgtgatgcatctcgccaagggttgggatgtgtgctgatgcaggaaggcagagtggtcgcatatgcttcgcgacagttgcgtccacatgagagcaattatcctactcatgatcttgagttggcagcagtggttcatgctctggaaatctggtgacactatctttttggcaaccgctgtgaagtctacactgaccacaagagcttgaagtacatcttcacccagcccgacttaaatctccgacaacgaagatggctggagttgattaaagattatgacatggggatacattatcatccaggcaaagcaaatgtggtagcggatgctttgagcaggaagagctattgcaatgcggtatgtaccgaaggcatatgtgacaaattgcagcaagatcttgagcacctaaatttgggcatcgtggaacacgggtacgtagctgccctagaggcacggcctacgctcgtggatcaagtcagagtagctccggtaaatgatcctgaaatagctgagttgaaaaagaatatgagggttgaaaagcccgagattttcatgaggatgagcatggcacaatctggttgggagaaagattgtgtgtgcctgacgacaaagaactgaaggatctcatactcatagaagctcatcaaactcagtattcaattcatcccagcagtactaaaatgtaccaggacctcaaagagaaattctggtgggccagcatgagaagagagatagccggattcgtcgcactctgcgatgtttgtcagcgagtcaaagcagaacatcagaggcccgcaggactgctacaaccccttcagatcccggaatggaaatgggaagaaatcggaatggatttcatcactggtttgcccaggacatcgtcagggcatgattcaatttgggtagtcgtggatcgcctcacgaaagttgctcatttcattccagtgcacactacctatactgggaaaagattggcagagctctacctttcaagaatcatgtgtttgcatggggtacctaagaagattgtatctgatcgaggaagtcaattcacttcaaagttctggcagaaactgcaagaagaattggggactcgtttgaatttcagcacggcttatcatccgcaaacagatggtcagaccgagcggataaatcaaatcttggaagatatgttgagagcttgtgcacttgactttggcggagcttgggataaaagtctaccatatgctaaattctcttacaataacagctatcaggccagtttgcaaatggcaccgtttgaagcattgtacggacggaagtgccgcactccgctcttctgggatcaaactggagaacgccaactgttcgggacagaggtgctaaccgaggcagaggaaaaagtcagaactgtcagagaaaggctgagaattgcacaatctcgacagaaaagctacgcagacaaccgccgaagagaactcgctttcgaagcaggagattatgtgtaccttcgtgtcactccgcttcggggagtacaccgcttccaaaccaaaggcaagttggcaccacgttttgtgggaccatacaggatcttggaacgcaaaggtgaagtcgcttaccagcttgagctcccatctaatatggttggtatccacgatgtgtttcatgtatctcaattgaagaagtgtttgagggtacctgaggaacaagctagctcagagcacattgacatccaagaagatctgacctacgtggagaagccagttcgtatccttgagaccagtgaaaggaggaccagaaacaaggtgatcaggttttgcaaagtccaatggagccaacactcacaggaagagaccacctgggaaagagaagatgaattgaaggccgcccatccgcacctcttcgccagttcttccgaatctcggggtcgagattccgtt

SEQ ID NO: 50735 - DNA, 634 bp, Oryza sativa
  unsure (1)..(634): unsure at all n locations
  Clone ID: PAT_MRT4530_53192C.1
cgatcacgcttgtttgctgattcacctgccaacggcgatcgatcacgctttactgctgtgctaacctcttcaggtgctgaaacatctcctgctttatccaccgacggtncgtatggcaggaaggcatgaagcgaccggtcgaacactagtgcacttatgtcggttaggccatcgatgaaattgtacaggtcatttatatcataagttaagtccctggccatagggttgatatccctgattttcctttcgtaaaggccacagattccatccagtgcatggttaactgaattgaagtccataaatgttcttgtcgctctgttctgcgatggttgcatgagaatgatggtgtgcctcccggccatgttccgagcgaagagcgcgccagccgccgatgcagctctggaccagcacacgcgcccgccgccgcgccggccgacgaaccgcgaggaagattcgattgctcgctcgcgttcgcgtgacaacgaaggggaaagggaagtgggaggtggtggagccgatcactcgccgccgagaagcacacgagactaatgctgctgctgctgctgctgcagtgcagggctgcgtctggtggcttaggagcaacgcaacgagggggtgggtgggtcccggccgg

SEQ ID NO: 50736 - DNA, 876 bp, Oryza sativa
  Clone ID: PAT_MRT4530_53193C.1
catcaacttacaacaaagttttggagaaaaaaaaatgtaagtctaggttgtttcgcatgtcacaatacttacaccatccgcaaactgatggtcagaccgagcgagtcaatcaaatattggaagatatgttgcgagcctgtgcactttgactttggcggagtttgggataaaaatctgccttatgcggaattctcttacaataacagctatcaggccagtttgcaaatggcaccatttgaagcattgtacggacggaagtgccgcaccccgctgttttgggatcaaactggagaacgccaattgtttgggacagaagtgctaactgaggcagaggagaaagtcagaaccgtcagagaaaggctgagaattgcgcaatctcgacagaaaagctatgctgataaccgccgaagagaactcactttcgaagcaggggactatttgtaccttcgtgtcactccgctcaggggagtacaccgcttccaaaccaaaggaaaattggcaccacgctttgtgggaccatacaggatcttggaacgcagaggtgaagttgcttaccagcttgagcttccatctaacatggttggtatccacgatgtgtttcatgtgtctcaactgaagaagtgtttgagggtacccgaggaacaagctagctcagagcacatcgacattcaagaagatctgacatatgtggagaagccgatttgtatccttgagaccagtgagagaaggaccagaaacaaggtgatcagattttgcaaagttcagtggagccaccactcagaggaagaggccacttgggaaagagaagatgaattgaaggccgcccatccgcacctcttcgccagctcttccgaatctcgggatcgagattccgtt

SEQ ID NO: 50737 - DNA, 910 bp, Oryza sativa
  Clone ID: PAT_MRT4530_53194C.1
tccattcaaagccagaatactgcatcggatacgacaggaggctggcgacccaaaacctcgcgtttttcttacaagaaacaaatcccagatatctcacccacgaaacaaaccgcaacaggataccacggcgatcacgcttgtttgccgattcacctgccaacggcgatcgatcacgctttactgctgtgctaacctcttcaggtgctgaaacatctcctgctttatccaccgacggtcgtatggcaggaaggcatgaagcgaccggtcgaacactagtgcacttatgtcggttaggccatcgatgaaattgtacaggtcatttatatcataagttaagtccctggccatagggttgatatccctgattttcctttcgtaaaggccacagattccatccagtgcatggttaactgaattgaagtccataaatgttcttgtcgctctgttctgcgatggttgcatgagaatgatggtgtgcctcccggccatgttccgagcgaagagcgcgccagccgccgatgcagctctggaccagcacacgcgcccgccgccgcgccggccgacgaaccctaaaaaggaaaaaaaaaaaagcacgcctcgattagtgagtggcactggcaccacagggcagggcgcgagctcctctcgtcaggtccaatccaggcacgggcggggcggggcgggcgcagcaagaccagaggagaggtgttacgcttacgcgaggaagattcgattgctcgctcgcgttcgcgtgacaacgaaggggaaagggaagtgggaggtggtggagccgatcactcgccgccgagaagcacacgagactaatgctgctgctgctgctgctgcagtgcagggctgcgtctggtggcttaggagcaacgcaacgagggggtgggtgggtgagcggtga

SEQ ID NO: 50738 - DNA, 4551 bp, Oryza sativa
  Clone ID: PAT_MRT4530_53195C.1
atggtgaagacaaggaatgatccccgtgactccaacgacgccagtggcagcgaagagcagacagatgaagctcataccagtggtgcacctggcagtagttcatctccgccgcccgagaacccaacagtcactcagatgatgacaatgatgatgcaacagatgcagcaacattaccatcagatgttgcagcaggcgcaacagaaccagcggtttggtcctccaccatcacacctgtccaaactgttagactttctccgcatccagccacctactttctcaagcaccaccaacccaatggaggccaacgactggctccgtgctattgagaagaagctgaaccttctgcaatgcaacgaccgagagaaggttgcttttgctacacatcagttgcaaggtcctgcttctgcctggtgggataactacgtggcgacccgtctaggtgcaacggaggttacttgggcagagttttgtcaaaactttaggaaggcacagattcctaaagggattatggcacaacagaagagagagttccgtgcattgcaacaaggaaccagaacgattacagagtacctgcacgagttcaaccgcctcgcgcgctacgctcccgaggacgtgcgcaccgatgctgagaagcaggagaagtttttgtttgggctcgatgatgaattgaccaaccagctaatctccggagtctatgaggactttgagaagcttgtggacaaggctatccgccaagaagagcaacgcaacaaaatggaccgaaaaagaaaggcagctcagatcagctttcctcaggggaacgatcagaagcctcgcttcatgacgggacagctaggtgggccttccaccctgatcgtctgtcagcaccgtccctatcacccgagtaacttcaacaacgattacaacggtggcagtcacaacaacagtaagcagcacaaccacaactcgactccacccccactaatggcaccagctcagtcagatccgccagctgtgtcagttcagtcagaacaacccaagaagggggctgtaggaaagccaggaccctgcttcaactgtggcaagcacggccattttgctagcaagtgtccgaagctgaatcgcactagacccaggttcatccaggcccgcgcccatgatgtgtctgcaaaggaagcacaggcagcaccagaggtcgtgctgggcacgtttccagtgaactcatatccagcaacagttctctttgattcaggtgcctcgcactctttcatttccaaaagatttgctgggacgcatggattatcggtagtggaacttaaaataccgatgcaggttcatacccctggaaatgatatgaggacagcacactattgcccctcggtgactatagagatcaaaagatcaccgtttctatccaacctcatccttctcgaatctaaagacctggatgtcattctcggaatggattggttgaccagaaacaagggagtgattgactgcgcaagccgcaccatcaccctaaccaacgacaaaggggagaagatcaccttccgttccccagcgtcgcagaagtccgtagcgagtctgaatcaggctgctattgagggtcagacagaaacagtggagaaaagtcccaggaagttggaggatattcctatagtacaagagtatcctgaggtgttcccagaagacctcactacaatgccaccgaagagagaaatcgagttccgaatcgatttggcacccgggactgctccaatttacaagaggccgtacagaatggcagctaatgagctagcagaggtcaagaagcaggttgacgaacagctccagaaagggtacatccgaccgagtacttcaccttggggtgctccggttatctttgtggagaagaaagacaagactaagaggatgtgcgttgattatcgggcccttaatgaggtcacaatcaggaacaaatattcgttgcccagaattgatgacctgtttgatcagctaaaaggagctaaggtgttttccaagatagacctacgatcaggctatcatcagttgagaattcgggaagaggatattcccaagacagccttcaccactcggtatgggttgtttgagtgcacggttatgtcctttggactcaccaatgcaccggctttcttcatgaacttgatgaacaaagtgtttatggagtttcttgacaagtttgtcgtggtatttattgacgacatacttatttattcaaaatcagaagaggaacatgagcagcatctccgtctggtactcgagaaattgaaggagcaccagctatatgccaagtttagcaagtgtgacttctggttatcggaggtcaaatttctgggtcacatcatttctgctcaaggcgtggcagtggatccatcaaatgtggagtcagttacaaagtggaccccaccaaagacagtttctcagatccggagttttcttggacttgcgggctattaccgtcggttcatcgaaaatttctccaagattgccaggcccatgacacagttgctaaagaaagatgaaaaattcaagtggtcagctgagtgcaaccaaagttttgaagaactcaagaagaagttagtctctgcaccagttctaattctgccagatcagacaaaagacttccaagtctactgtgatgcatctcgccaagggttaggatgtgtgttgatgcaagaaggcagagtggccgcatacgcttcgcgacagttgcgtccacacgagaccaattatcccactcatgaccttgagttggcagcagtggttcatgctctgaaaatctggcggcactatcttattggcaaccgctgtgaagtatacaccgatcacaagagtctgaagtacatcttcactcagcctaacttgaatctccgacagcgaagatggctggagttaattaaagattatgacatggggatacattatcatccaggcaaagcaaatgtggtagcagatgctttgagcagaaaaagctattgcaatgccttatgcactgaagacatgtgtggcaaattgcagcaagatcttgagcacctaaatttgggcatcgtggaacacgggtacgtagctgccctagaggcacggcctacgctcgtggatcaagtcagagcagctcaggtaaatgatcctgaaatagctgagctaaaaaagaatatgagggtcggaaaagcccgagatttccatgaggatgagcatggcacaatctggttgggagaaagattgtgtgtgcctgacgacaaagaactgaaggatctcatactcacagaagctcatcaaactcagtattcaattcatcccggcagtactaaaatgtaccaagacctcaaagagaaattctggtgggccagcatgagaagagaaatagccgaattcgtcgcactctgcgatgtttgtcagcgagtcaaagcagaacatcagaggcccgcaggactgctacaaccccttcagatcccggaatggaaatgggaagaaatcggaatggatttcataacaggtttgcccaggacatcatcggggcacgattcaatctgggtggtcgtggatcgactcaccaaagttgctcatttcattccagtgcacactacctatacggggaaaaggttagcagaactgtacttagcaaggatcatgtgtctgcatggggtacctaagaagatagtatctgatcgagggagtcagttcacttcaaaattttggcagaaactgcaagaagaattggggactcgtttgaatttcagcacggcctatcacccgcaaactgatggtcagaccgaaagggtcaatcagatcttggaagatatgctgcgagcgtgtgcgctcgattttggtggagcatgggataaaagtctaccgtatgcggaattctcttacaacaacagctatcagtccagtttgcaaatggcaccgtttgaagcattgtacggacgaaagtgccgcacaccacttttctgggatcaaacaggtgagcgccaactgtttgggacagaagtgttaaccgaagcagaggagaaagtcaggaccgtcagggaaagactgcgaatcgcccagtctcggcagaagagttatgctgataaccgccgaagagagcttactttcgaagcaggggattatgtgtaccttcgtgtcactccgctccggggagtacaccggttccagacgaaaggcaaattggcaccacgctttgtgggaccatacaggattttggaacgcagaggtgaagtcgcttaccagctagagcttccatctaatatggttggtatccacgatgtgtttcatgtgtctcaactgaagaagtgtttgagggtacctgaggaacaagctagctcagagcacattgacatccaagaagatttgacctacgtggagaagccaattcgtatcctggaaaccagcgagagaaggaccagaaacaaagtaatcagattttgcaaagttcagtggagccaccactcagaggaagaggccacctgggaaagagaagatgaattaaaggccgcccatccgcacctcttcgccagcccttccgaatctcggggtcgagattccgtttaa

SEQ ID NO: 50739 - DNA, 305 bp, Oryza sativa
  Clone ID: PAT_MRT4530_53196C.1
gcttccagtggtagttagtctactgaacttttaggagctgaagatactcggagctaggtaagatgtcatccagaacgggcaggctgggacgtgtgagcctagcgagtctgagcgtgctagtgatccatggttactgaaaggggcagcctgtgaactacaactgctccgacagctagctaactgagcagaagagctttagcaatggcgacgccggggcagcagctgccgccggggttcaggttccacccgacggacgaggtggtggtgtgaccattctttactgatgaccgttcttcttttattca

SEQ ID NO: 50740 - DNA, 510 bp, Oryza sativa
  Clone ID: PAT_MRT4530_53197C.1
atggggatacaatatcatctaggcaaagcaaatgtggtggcagacgctttgagcagaaagagctattgcaatgcagtatgtaccgaaggcatgtgtgacaaattgcagcaagatcttgagcacctaaatttgggcatcgtggaacacgggtttgtagctgctctagaggcacggcctacgctcgtggatcaagtcagagcagctcaaataaatgatcctgaaatagctgagctgaagaagaatatgagggttggaaaagcccgagattctcatgatattgagcatggcacaatctggttgggaaaaagattgtgtgtacctgaagacaaagaactgaaggatctgatactcatagaagctcatcaaactcagtattcaattcatcccggcagaactaaaatgtaccaggaccgcaaagagaaattctggtgggccagcatgagaagggaaatatcagagttcgtcgcgctctgtgatgtttgtcagcgagttaaggcagaacatcagtga

SEQ ID NO: 50741 - DNA, 864 bp, Oryza sativa
  Clone ID: PAT_MRT4530_53198C.1
atgtacatggacttaaccctaggaggagcactgctgcaggtagaagaagccactgaggaagaagaagaagaagaagaggaggagcaagctctaggtcaagaacctgcaccggctgcggcggcggcggcgctggtgctaggtcgtcgccacggcgtcgtcgtcggcggcggcggtggtggagtggtggtggcggcggagcgggagcacatgttcgacaaggtggtgacgccgagcgacgtgggcaagctgaaccggctggtggtgccgaagcagcacgcggagaggttcttcccggcggcggccgccggcacgcagctgtgcttcgaggaccgcgccgggacgccatggcggttccgctactcctactgggggagcagccagagctacgtgatgaccaaggggtggagccgcttcgtccgcgccgcccgcctctccgccggcgacaccgtctccttatcccgcgccgccgacggccgctacttcatcgactaccgccactgccaccgccacggcggccgcgacatcagcttcgcctccgccgccaccgccatgccggcggcggcgtggccgctcttcggccgggtgcaaacggcggcgccggtcagctacggcggcggccatgggagtgcggccgcagcaacgatgttcttggacacggtggcgcccgtcgccgccgccggcggccaccgcggcgaggtggggccctccggacagaggagcttcaggctcttcggcgtcaatgtcgagtgcggcggcgacgtcgacgcggcggcggaagaggaggatgccgacgacgacgtcgacgacggtgatcatcgccgaggtgaagaaatggagcttgtgatgtggacgaaccataggtag

SEQ ID NO: 50742 - DNA, 1389 bp, Oryza sativa
  Clone ID: PAT_MRT4530_53199C.1
atggtgaagacaaggaatgatccccgtgactccaacgacgccagtggcagcgaagagcagacagatgaagctcataccagtggtgcacctggtagcagttcatctccaccgcccgagaacccaacagtccctcagatgatgacaatgatgatgcaacagatgcagcaacattaccatcagatgttgcagcaggcgcaacagaaccagcagtttggtcctccaccatcacacgtgtccaaactgttagactttcttcgtatccagccacccactttctcaagcaccaccaacccaatggaggccaacgactggctccgtgctattgagaagaagctgaacctactgcaatgcaacgaccaagagaaagttgcttttgctacacaccagttgcaaggtcccgcttctgtctggaaggcacagattcctgaagggattatggcacaacagaagagagagttccgtgcattgcaacaaggaaccagaacggttacagagtacctgcacgagttcaaccgcctcgcgcgctacgctcctaaggacgtgcgcaccgatgctgagaagcaggagaagtttttgtttgggctcgatgatgaattgaccaaccagctaatctccagagtctatgaggactttgagaagcttgtggacaaggctatccgccaggaagagcaacgcaacaaaatggaccgaaaaagaaaggcagctcagatcagctttcctcaggggaacaaacagaagcctcgcttcatgacgggacagctaggtgggccttccaccctgatcgtctgtcagcaccgtccctatcacccgagtaacttcaacaacgattacaacggtggcagtcacaacaacagtaagcagcacaaccacaactcgactccacccccactaatggcaccagctcagtcagattcgccagctgtgtcagctcagtcagaacagcccaagaagggggctgtaggaaagccaggaccctgcttcaactgtggcaagcacgaccactttgctagcaagtgtccgaagctgaatcgcactggacccaggttcatccaggcccgcgccaatcatgtgtctgcagaggaagcacaggtagcaccaaaggttgtgttgggcacgtttccagtgaactcatatccagcaacagttctctttgattcaggtgcctcgcattctttcatttccaaaagatttgctgggacacatggattctattcgacattgacgaaggctccatgtctctatggttctataccaagatcgactaaggcgagtacgacaaatgtcgacaaagctccgtcgcagattctgcgccttctcgatcactcgagaacggttggtggatctcgacaaggaatacggaatgaagagatggtgtacccgccgagataa

SEQ ID NO: 50743 - DNA, 288 bp, Oryza sativa
  Clone ID: PAT_MRT4530_5319C.1
atggagacggagatttttatacaggttcgggccccttatctgacagggtgttacagtttccctctccgactcggatccgaacttgctggggaggcccaagataaggactacacgccgatccaagaaatttttatggcctcaagagctgaggatgaggaagctcgccgattaagggagcagtgggaacgtgaggacaaacgcctttgcaagggggcagaagatgaagaacggcagggcctgcaatcaggatccgtgcacgagttcatgccgtgttcaccaaaactataa

SEQ ID NO: 50744 - DNA, 772 bp, Oryza sativa
  Clone ID: PAT_MRT4530_531C.1
ttgcttcgcctgagccctgagccgccgcctcccgtactcccttgcgagctggggttttagcggcggcggcgagagaggaggaggaggaggagaggggaagatgagccggagcctggggatcccggtgaagctgctgcacgaggcggcggggcacgtggtgacggtggagctcaagaccggcgaggtgtaccgcggcgccatggtggagtgcgaggacaactggaactgccagctcgacaacatcaccttcaccgccaaggatggcaaggtgtcgcagctggagcacgtcttcatcagaggaagcagagtgagatttatgattataccggatatgctcaagaacgcacccatgttcaagcgcctggaagcaaggattaggggcaaaggatcagctattggagtcgggcgtggccgtgcggttgcaatgcgtgcccgggctgctgctggtcgtggtggtggtcctgttggacggggtggtgcacctccggtgaggagatagattgtctgtcatctattatctgcctgaggaagttgatgccttaatttgaaaacattgcttgagaattaaacagccagtgtgcatcttgtctgatcaatccgcttaaaggaggatgcatgcatgttggtggcgtcgatttcatgtatttttaatgttagatatggtaggttgagtatgatatttcaaaggtagaaacattgtgttcgttaacctgatttgaatgacaagaccagtttcccctgtcattgagcgaatttcaaaaaaaaaaaaaaa

SEQ ID NO: 50745 - DNA, 297 bp, Oryza sativa
  Clone ID: PAT_MRT4530_53200C.1
atgccgcagagctctcgttactcctccccgacgacggtaggtagcttcgtcgtcgcttctccggtcgtcgtcgagcgctcgctgtgccgccccggcccctccactccacttcgacgacgagcttttatggtggtcgtgtcgtcgagcggcgagtggagtggactcggccgagcacgaagtcttgctcacgcgtctcgttatttaggtacacttgatgacttgagcaatgagcgtaacacacatgatgctgcaacactgaggcagtttgcaggcttcagcgacctgaaatttctctag

SEQ ID NO: 50746 - DNA, 717 bp, Oryza sativa
  Clone ID: PAT_MRT4530_53201C.1
atggggataaggaacagaacgacggaagaggggaaagaaggggggggtggacgaaagaggaggacgggtggaagagagaggcgggaagatgagagagtggaggtaatagcggatgtaaagggaaggggcaagagagctttaggggttgaggcggtgctaaccaaagcagaggagaaagttaggaccggcagggaaagactgcgaatcgcccagtctcggaagaagagttatgctgacaaccgccgaagagaagtcactttcgaagcaggagattatgtgtaccttcgtgtcactccgcttcggggagtccaccgcttccagaccaaaggaaagttggcaccacgctttgtgggaccatacaggattttggaacacagaggtgaagttgcttatcagtttaagcttccatctaatatggctggtatccacgatgtgtttcacgtgtctcaactgaagaagtgtttgagggtacccgaggaacaagctagctcagagcaaatcgacattcaggaagatctgacatatgcggagaagccgattcgtatcctcgaaaccagtgagagaaggaccagaaacaaggtgatcaggttttgcaaagttcagtggagccaccactcagaagaagaggcaacctgggaaagagaagatgagttgaaggctgcccatccgcacctcttcgccagctcttccgaatctcggggtcgagattccatttaa

SEQ ID NO: 50747 - DNA, 792 bp, Oryza sativa
  Clone ID: PAT_MRT4530_53202C.1
gccgccatggccgcgggattaaccctcactaaatgctgggtgaagatatacttcaggctcttgtgatcagtgtagacttcacagtggttgccgataagatagtgccgccagattttcagagcatgaaccactgctgccaactcaaggtcatgagtagggtaattgctttcgtatggacgcaactgccgcgaagcatatgcgaccactctgccttcctgcatcagcacacatcccagcccttggcgagatgcatcacagtagacctggaaatctttcgtctggtctggcaggaattaggaactggtgcagatactaaccttttcttgagttcttcaaaactttggttgcactcagcttgaccactggaatttttcatctttctttagcaactgtgtcatggtctggcaatctttgagaaatttttcgatgaaccgacgttatacccgcaagtcccaagaaaaactcctggatctgagaaactgtctttggtggggtccacttagtaactgactccacatttgatggatccactaccatgccttgagcagaaatgacgttgacccagaaatttgacttccgactaactagaagtcacacttactgaaccttggcatataattggtgctccttcaatttctcgagtaccagacggagatgttgctgatgttcttcttttgactttgaatagatgagtatgtcgtcaatgaacaccacgacaaacttgtccaaaaattccataaacactttgttcatcaagttcatgaagaaggacggtgctttagtgagggttaa

SEQ ID NO: 50748 - DNA, 219 bp, Oryza sativa
  Clone ID: PAT_MRT4530_53203C.1
atggagagcgctggaggcggattggcggagactgccgccggcagaggagaggagatgagaagacaaaagtttggaactcggacggtcgcgtgtcgggtattcttcaccgtgcaccgactgccacttgatgagttccttcactgggtgcacgccatcttctaccatatcgcgcagataagagctccacatcctcttgcaagcatcatgatgacgggatag

SEQ ID NO: 50749 - DNA, 289 bp, Oryza sativa
  Clone ID: PAT_MRT4530_53204C.1
gaaaaagtcgtattcatgttcttcaggctttgacatcgaaacactatactgtagcgaggtctgactgagatgtcacgcaatagattgatgctcaatattatgaatgctgatgaggaggaactgtgacatctttatgtataggactgtataaagctcaatcatgatcgtatcggttgaatcacttggataattaggcaggataatacacagtgatcacgaagcgatcaacttgtctgatctatcattctgaataagttgtgactgcactttcttcttggtgtgaacaaac

SEQ ID NO: 50750 - DNA, 725 bp, Oryza sativa
  Clone ID: PAT_MRT4530_53205C.1
ccggccgggccttcccgtcctctcctctccgggatcctcccctccggcctccacccgccgtcgtccgtcgccgttgcgcgcgcgccaccccctccctccttcccgtgcgccgccgcctcgtcgttccatctaagtcgcgagggaacgagctgaaccccatctgcgctggtaagcgcgatagcgaacccgctgcacggctcgggtccgcttcgatccgggaatgcgtcgagctcggacgagatccagctgcggatcgatccggtgcacggcgatcttgatgaggagatcgatgggctgcactcgagggttcgcctactgaaaggcgtggcccaggagataaatgctgaagccaagttccagaatgatttcctcagccaactgcaaatgaccctcataaaagctcaggctggagtgaagcataacatgcgaaggatgaacaagagcatcatccaacagggctcgaatcatgttgtgcacgtggtcctttttgctctgttttgcttcttcgttgtctatctcttgtcaaagttctctagaagataataacactgttagacatatggctataagatagttgagttctgtcaacctagtgaccatgagggtataccattgggttttaacttgtatactacatatggacacatctctggaggttatgtaatggcttctgtgatatggatataatatatcctgacataggatgttactctatggacctaatg

SEQ ID NO: 50751 - DNA, 420 bp, Oryza sativa
  Clone ID: PAT_MRT4530_53206C.1
atggcgaacccgctgcacggctcgggtccgcttcgatccaggaatgcgtcgagctcggacgagatccagctgcggatcgatccggtgcacggcgatcttgatgaggagatcgatgggctgcactcgagggttcgcctactgaaaggcgtggcccaggagataaatgctgaagccaagttccagaatgatttcctcagccaactggtactatgtcttgccttttcctttaagcttgtggtcatgacatgttttcctctgcaaatgaccctcataaaagctcaggctggagtgaagcataacatgcgaaggatgaacaagagcatcatccaacagggctcgaatcatgttgtgcacgtggtcctttttgctctgttttgcttcttcgttgtctatctcttgtcaaagttctctagaagataa

SEQ ID NO: 50752 - DNA, 1271 bp, Oryza sativa
  Clone ID: PAT_MRT4530_53207C.1
gttttggggtttttctttaccccttttcccaatcagcttcttcccgtagataccggggttcccaatacttcccccccgacacccgcccgccgggatggctccctgtgcaataccaacgcccggccccctccgcgttccccgctttcagaaggcacgttcctatacgcatttcgttggctaccaccgagactctaccaggccccaccgagcctgacccgcctgcactctcagtggcacgcccccgcctgtttgtggcccgaagcgccggccggggccccctccacggaggtcaaccgtctccagttgttctttgctttcgcattcgtcaaagtatccccactaaagtgtaaagatcttcacatagataagggagcttctgtttactttttcccctacagtttcatgctgtggatacatgcatgtacaatacaagacagggggcacccgatagtcagctttggtctgcaggagttatacaattgcatacttataagcgatactcaatataagaagaaacattcatatttgcaattctgtagcatgcacctaaatgatagatatacagacagagagtgatgctaattaactctcagagtcacactttggcttgcttctagcatggagcgaagacgggttgcaacttcagcgaaggaaggtcgtcgctcaggttcagttgaccagcactgctccatcagtttcctccattccaggttacatgaagttggcactagtggcctcagtgtgttactcaaaatgccccctatgactcctccatagtgcatgccgtcatatggatcctcaccagtcagaatttcccacatcacaatgccaaatgaatatacatcaatcttttcggatacttttgtgccactcattgtcagcaattctggagccatccaaggaagagttcctctcattccaccagaaacagagtcgcttgtttcatcttcgacaaacaaaatcagaacctggcatatgggacgagagggatccttatattccgcatatgcttagccaaattgattcaccaaaatactaaattgtcaagttcttgtactagaacgcacccacttgttaagttgttgcactcggacgttcaattctcaagttcttgcgctatatcgcacccacctgccaagttgttgtaccgtgggtgcaatttactcgaaagtaaactgatatctcacctaatcttggttaccagtggtgacttctgattttgtgaacctatgactcctccatagtgcatgccgtcatatggatcctcacca

SEQ ID NO: 50753 - DNA, 231 bp, Oryza sativa
  Clone ID: PAT_MRT4530_53208C.1
atgtggagaggaggacgtggtggaaattatccgtccgttcttgaaagtgatggctccggtgtgcggggaacgaagggcaaattgatacgtgcaccccgcaggaaacgtcagggtgcatgtgaacaagctgaatgtgacccaagatcaaaaaagaacgtgctacgtgagccttacgttctgcacgcgcgacgaaacaacgactacatatacgtcgacctctttcactggtga

SEQ ID NO: 50754 - DNA, 274 bp, Oryza sativa
  Clone ID: PAT_MRT4530_53209C.1
gcatgcacccctccgtcagcttctatcctccacaacagccgcccccctttatttcttctctttctcttttttttatattttttggggtatttttaaacttcttgggggtacaacacacatccccccaatcccaatacccctcaccttacccctaaactcacggcttccactatccacaactcaccaaacctgaataaacaacacacttgaaacaacccccaacaccctctgtctaccaggccttactaaccaaccggttacactctcgccaaaa

SEQ ID NO: 50755 - DNA, 467 bp, Oryza sativa
  Clone ID: PAT_MRT4530_5320C.1
cctgttggtatttcttacgaccacagataaatccgcaagcgcacagaataccactgtagcactttaccttcgggtgaccccaaagggatatattgaactcagggaacgattactacgacgggatttagggttgtcaccacttgccatctacctctaacaaatccgtgggatacacaacaaacaaagagaagtttctccgaacccggaacagagtgtaccgacagctccggtactcctcgaaagctacactcgtcgaggtagaagtcggagagagcgccaaacttccaggcacttctcaagagcttcctctcactctctacctattttctaatgtacaaagatacaatagaggctcttgtaattcagctcaaagttgtgtattgtgaagtgaagtgagctcctccttttatagcctccatatgacggttacagctatcggaattgtccaaaacacccttcaaccgtca

SEQ ID NO: 50756 - DNA, 318 bp, Oryza sativa
  Clone ID: PAT_MRT4530_53210C.1
atgggcgtggtggcggcactcgggttcggccgggggagagaggaacaggcgcggctggaggaagacgatgacgcgtcgccttcttgggccggctggtccgcgcaggggcgagcggcgtgggccgacagggtggacgcagaccacgtgcgggagaggaggggggaaggggagctgggccactgtggctgcgggccgaggaggctaggggcggctgcggcccaacggggagaaggagacccacgagggatgggagaagagggaaaaaacttcagttgcgacagagacaagatatttgcagacaaggcaggaatggagtaa

SEQ ID NO: 50757 - DNA, 519 bp, Oryza sativa
  Clone ID: PAT_MRT4530_53211C.1
atggcggcagcagcagcggaggccacgaccgatggcggcggcaagatgatcatcctgatcagcgccgacgggaaacgcttcgaggtgacggaggcggtggcgagccaatcgcagctgatatccaacatgatcgaggacgattgcacggagaacggggtgcgtctccccaacgtcgacggcgacatcctcaccatggtcgtcgactactgcaacatgcacgccggcgacgccgccgccgccggcgacaccatgaaagcatcaagcacggaggaggagctgaagaagttcgacgccgagttggtgcaagccctcgagaatccggtgctgttcaagctgatcttggcggccaatttcttgaacatcaagagcttgctggacatgacgtgccagcgcgtggcggacatgatgtccggcaagacgccggagcagatgagggagacgttttcgatcgagaacgacttcacgccggaggaggaggcggcgattcgccaggagaacgcctgggccttcgacgactag

SEQ ID NO: 50758 - DNA, 1723 bp, Oryza sativa
  Clone ID: PAT_MRT4530_53212C.1
ccgttacccgacgacgccgccgcggcccgcgtcatgtgcttggctcgccgcctgcgccgtcgacgcgccggtctccgtcgccgggcgccctgctgcttccatcgcatactctcgcctctgaccccgagtccatctccccgtcccggcgtcgcctcggcctcgactcccgtctcctcgaggagttcgccccgtcgcctgcggccgagctccatccatcccgcgagcggcggtgcggtgttcctgctgcttccgcctgcgggcgggagagggaggagcgggtgaccatggtgagcatggaggtcaccgatgagatgttcaagtgcatggaggttgggctggccttccgggactataatggaagaatcagttctatggatttccacagcaaggctacaaattacctcgtgacagcatgtgatgatgaatcaattcgcctatatgacattcaaaatgctgtgtgtttgaagacgattaatagcaaaaaatatggggttgagcttgtgtgcttcactgaaaacccaacttatgtcttgcattcttcaaaaaatggatgggatgattctctccgtctactctcactggtcaataactgttttttgagatatttcaaaggccatctagacagccaataccaacagaggatactatctgtcttaatcagggttgtttctatctcattgtgctctgagaacgggaacattctctctggttcacttgatcgaacagttctcctatgggattcaagggttgaaaaagcacagggtttgctgcgtgttcaggggaggcctgcagtttcttatgatgatcagggtttggtttttgcaattgcatatggtggctacataaggatgtttgatgctcgaaattttgagaaggggccttttgatattttctctgtcggtctagacagggttgtttctattttattgtgctctgagaacgggaacattctctctggttcacttgatcgaacagttctcctatgggattcaagggtatttcatggcaataatatagcaacatacaacgtgaagccagtggtaagcaattcgacgctggaagcatcttttgcaattgcatatggtggctacataaggatgtttgatgctcgaaattttgagaaggggccttttgatattttctctgtcggtaatgatgattcagaagccaatgtcataaagttcagcagtgatggcaggcggcttcttttaaccaccaaagctgggcgtgttcatgtgctagattcatttcatggcaataatatagcaacatacaatgtgaagccagtggtaagcaattcgacgctggaagcatcattcagccctgatggaaaccatataatatctggctctggtgatggcagtgtatatgcttggaatgttaggagtggaaaggttgctcgctggggaagcacagatagtgagccaccgctaattagatgggctccaggatctttgatgttcttgactgcatcttcggaactgtcttgttgggtccctgatctatctaagctgggatcctttactgttagtaagtaattcgaatggtacgagttgttgtttgtgtatgctcaggcctttgttctagctgtttgcaaaatgacaatgttaggtaaaaatctgagctgcagtgggtcaagcctcgggtcaacctagtccgggccatctgcatatcttgatcttgcccaattttggctttacccacaaaaaaaaaaaaaaaaaaa

SEQ ID NO: 50759 - DNA, 714 bp, Oryza sativa
  Clone ID: PAT_MRT4530_53213C.1
agaggattgtggaggctgatgtccaagagagagggctgcctgccttctggatccgaaggcccatcttctccccagccgatgacgccatgccggcctcctcatttgattgaggcatcctcatcatcagccaaagcagcttgcacaaggcagcgaagttcagatgtgcttcgatcgggtcatggtgtgctccacttcgcagtaacatatatgtgttcctgagtttgtatattttcaataggtgcagtgtgggatactgtagttgaggcacgggttgatggcatgttgatgagccaatcctgctgctccaattgacagcttcaaggggtacatcaagaagaggatttttattaaaatgtgctaattttttgatgtcctgaaagtgactaacagtgatctctacatgctaggcactttctattttattggcttctaatctgtgtcatttagagtcatactgaatgtaaatcgagacttctcgttgaaaccacctattggagacactggcaaggatacacgagcagggccataaagattattatgcggcatggcacaggactagcagcagcgtcggcagggaggtgactgagtctggtgccggccatatccatcattgttggtggtgttgtaattttttatttgtttttgtgcattctacaaatgtatcacattgcgtgtgtgatcagacagccgttgtaattctaaatccgttcaacc

SEQ ID NO: 50760 - DNA, 644 bp, Oryza sativa
  unsure (1)..(644): unsure at all n locations
  Clone ID: PAT_MRT4530_53214C.1
agttcacgacttttgtaaaanccgacggcccattgaccccccgtaatacgactccacctattaggnccgaattggntaccggccccccctcgagntcgaccccacgcttccgccccaaagaggccaaagagcaagctttcaagggcccggtttagacagaagaaatttgaaggatcagagtgaccccgagatagaacatgaaggatgaagttggctattatccccaaaagatttttttagtgatttagactagaaagtgaatgaaattgaaagtgtacccctaataataactataacctgaggacgggagccgtccggaggtgttccagtgcgaaatcagccctaggtacaagcgcttctgtttcattggtcacgttccgtttgcaggtttcaagcccgatctggaggtttaattggtgtggctagtgctcaacaatacgctgctgaaggccgttaaggtatgcgcaaagaggggagtccagaacttctggagtaactgggcggtccttgttacggtcacaaaatatgtttggagaatagctgctatatatgtctctgtttttttttttttttttggatcgatctgctgttttcgcaagcggatggtgtaaaaatctgctgcttttgcaaaaaaaaaaaaaaaa

SEQ ID NO: 50761 - DNA, 1923 bp, Oryza sativa
  Clone ID: PAT_MRT4530_53215C.1
cctctaccatactatacctagcttgccaccaacaacagtacaccatgcccaagaagaagctgtcacataagctgctctctgtcagtcaagctctaagtttatagaagaatatactaataattttaataaaaagtatattattaaaatattcaaacccttccttgctgcacaagtcctcctcaagcttccctcccatggagaagctcgccgcgaaaaccctagtactcgacgtcgaaggcggtttgcttagatcatcctccttgttcccctacttcatgcttgtggcactagaggcaggagggttcttgaggggccttgtgctcctcctcctctacccattgctatgtgtcatgggaagtgacatggccttgaaggtcatggcaatggtgtccttctgcggtttacgggcaagccggtttcgggccgggcgagccgtgcttcccaagtggttccttgaggatgttggggaggaagggtttgatgtgatgaggagtgccatgaggagggtgtgtgtgacaaagatgcctaggatcatggttgaagggttcttgaaggagtacttggaggttgaggttgtttcaggtagggagatgaaggtgatttgggggttcttcactggcatcatggaggaggaagaaggtggtgatcaagaggaggtgttgcttgaggagaagaaaatgttggttgatgttgtgggcttctctacctccttggagttcctccaacatcatctcttcactcacacaacacaggaggtgtacctggtgacacgtgaggagaaggcgaggtggtcggcgctgccgcgcgacaagtacccgaagccgatggtgttccacgacggccgcctcgcgttccggccagccgccggcgacacgctcgccatgttcacctggctccccttcggcgccgccctcgccgtcgcccgcctcgccgtcgcgctcgccgtgccgtacaggtactcgacgccgatcctggccgccacgggcttgtcgtggcgcctcaagggcgaggcccccacgccgctcgccggcgccggcgacggcgcgcgccggcgcgggcagctgttcgtgtgcaaccaccggacgctgatcgacccggtgtacgtgtcggtggcgctggaccgccccgtgcgcgccgtgtcgtacagcctgagccggctgtcggagctgatctcgccgatcgggcggacggtgcggctgacgcgggaccgcgacagcgacgggcgcgccatggcgcggctcctcgacggcggcgacctcgtcgtcgtctgccccgaggggacgacgtgccgggagccgtgcctgctccggttcagcccgctgttcgcggagctgagcgacgacgtggtccccgtcgggatcgccgtcgacacggcgatgttctacgcgacgacggccggcgggctcaagtgcctggacccgctctactacatcgccaacccgaggacgtgctacgccgtgcagttcctggagagggtggacacgtcgccggcgagggagcggagggcgccgtccaccgacgtggccaacctcgtgcagaggaggatgggcgacgcgctcggctaccgctgcaccatgctcaccaggaaggacaagtacctcatgctcgccggcaacgatggcgtcgtcaacaccacccaagacaaccactctgctccggggaagaagaagatgcaataatcatgaactagattagccaaaaaagttattaaaaaaagttctagatagatttcggttgttcttttttctttttaattatttttttatgttgctggtagtttaatttggtgtgtgtttatactgtatttccttcttgcttcagtttggctggtgtgttcatcaggttgatttcttctgtgtgtgttttaatcaaattaatgattgtatagaaacaacaagaagctggcaccatcaaggagcttgt

SEQ ID NO: 50762 - DNA, 639 bp, Oryza sativa
  Clone ID: PAT_MRT4530_53216C.1
ggcatcagaacacttccattccaaacaaactttgcaggacgcgcgttagcgtcccactaaaatttggaaaagaaaaaaaaaacaaacgaacaaaacaacacatcgctctcgtctctcgtcagtaagcctcagcgtcatgcatctacgtgcacacccgcatccgcgtcacgtcacgtcacagctctaaggtactccagctattggcgggagccgtacgacgccggcgacgccaacgtcgacgccgccgtcctcgccgtccccgacgacgccgtggtcgccgacgatacccgcggcgtgcccacctgcttgatcaccacgttcggcagcgggctgcgccgccgccgctcgtgctccttcaccacctccgccgccgcggcgtccaccttctcggcgttcgtcctctccgacatcctccgcccgcggaacagcacggactccacgttccgctgcgacagcatcgcgcccgcggcggcggcgccgtggagcgcggtcgccgccttgctggcctggatgcgcacgtagttgctgctgctcccgctcgtgtggccgaacgccatggcgacggactcgtcgaccatgtccgccacgccctcggcggtgacgcgcgccatctcgcgcggcgacggggagcgcgtgggc

SEQ ID NO: 50763 - DNA, 317 bp, Oryza sativa
  Clone ID: PAT_MRT4530_53217C.1
aaagataactatccggagctgccagatcttaaattaacatatgcctcacccaacagcatattgacccagcagatacccctcttacatcaagtcacatagagatcaggtgaaacaaaaacaaaaagctcagcacggccggtccaatcaaaagacagatgaacaaactgggaacacacaaaacaaggcgggagacatcttctaatcacaaatagacaatgaaacaaggctatatatgactacgaccgtttaatagccaacagactgctggcagcccggggtcttgtaagcgaagaatctgttaagctgcacctggctga

SEQ ID NO: 50764 - DNA, 191 bp, Oryza sativa
  Clone ID: PAT_MRT4530_53218C.1
aaaaaaagagagaaaatagaaaatcactgttggtatttcttaatgacattactagaaatataattcccagcaatggcacggaaatacttctggtatattatggttacagagttcatccgcaagcgcacggatataccattgtagcatttcacccgagagtattcgaagggtatcatatttattttatccca

SEQ ID NO: 50765 - DNA, 1033 bp, Oryza sativa
  Clone ID: PAT_MRT4530_53219C.1
cccacgcgtccgcccacgcgtccgcacagccaggcaaagcaccgacgcacgcgcccctgccggaccctcgggcgggcgggtgggcggacgcctggggccaggcaaagcaccgacgcacgcgccccttctcttccctctccgtggcggcatggcggcgtgccccctcctcccgctgctccagctctagccctccctccacaacatcctggacatggatcctctacctttggctcgccggagcaatggggccaccagactgccagcgatgagtccgggggcatccagatccagcgccacctcacccatggcagctgctccggtgcgacgatggccaggggccgcgctgccctcctcatccctccactggttagtgaagaagttgggtgaagaaggacccgggcaagacttacatgctagctgcctctccatgaagattggagccatgttccaagaagtcattccaaaattgcaatgtctgttccagtactgaaccaatccagctcggctccatttcaagccatcataggcatcacctcaaagacattctactcactgcaaagccagggagccatttctttctctcaagttggcatgcgttcctttttcttagttaaatcataaattaacaggcccaacttaattatcatggaataagccacagcaattttacccacctaaggtcactctgtgcattcatttcaggacaatgacaagcattgggatagacaaggcagtagattctcaatcaattggtgctgtctagtaggtgaagagtgacaccgaaccaggatttgcaagtcaactgggtcatcttcatattatttgaggtgttgtcggactgcctgcaatgccattcgtcaactcttttctcgtttccctacctccttggttatctaaccttaagaagtaatattcaaatttcatctcagttgtagatgtctatgagattggcattgctattgtaattcacattagattgttgtcaaatcgattaattgaacgttgatgtcaatgcattggaatccattcttcc

SEQ ID NO: 50766 - DNA, 530 bp, Oryza sativa
  Clone ID: PAT_MRT4530_5321C.1
gcacgaggatgtacttatgagtatacccagtacacaaatagggtatacccaaatgcatggcgagtagaagttttactcctgtgtcgtactaaggggttctacaaggtaaatgacgaactgggtgggtgtggtatagtagtattctatttctaacgagcatatatatcatatatatgaagattaagcatatagtatcaagtaacttaattgttctacgtgtgaaaggcaactattagttaagtcaagtggaatgggtaatgccaatccatatagctaaaatcttcatattttctgtaagagttccagctttataattctatttaccattatttgttgaactacacacgcgtcggtgatctgtgttcagatgtacccgagtagcaaattatagcatattttcctggtttcattcgttcagctccatactactactttttaatgattcagtcatgcatgctattaagctgactactttctttatgcaaattggacacaggtgttggcaattctgtgtagaattcagaagattt

SEQ ID NO: 50767 - DNA, 281 bp, Oryza sativa
  Clone ID: PAT_MRT4530_53220C.1
atggcacgtcattttggcccggcccaagcacagcacggcccgacggaggtcgagcccgcgccggcctggcccgaccaccgggccgtgcctagacccctctaccgacacgttgggctggcccggcacggcacgataggctggcagccagacccgataggagggaggaaaaatagacttattttaaaaaaggcccaatgttccacccgtgccttcgggccggtacggcacggcccgacagctggtgggccgtgtctgggcgggaggtgcatcccatgggccgg

SEQ ID NO: 50768 - DNA, 1937 bp, Oryza sativa
  Clone ID: PAT_MRT4530_53221C.1
gtcgacccacgcgtccgggcatggatcgcatgcttgctcgccggaagaaggagcttacttctgggaggactgttgctatgactttgattcctggctatacaccctttgtgcgtaccgacgaacatatgatgagcattatggtacgcacgtcgggtgtcagttgatctagacaagttctggatgcacttgacagtgcagacagggatctatacgccggggacaattggggatcgagagatgctcgggttgatccacacccacatgccacagctgattgcgtcttatttgtgatgggccattggaaaagcacatgaagtggaccagctaatgtaacaggatacagtaaagtgtgctgctaccttaccttcctgataaacaacaccaccctgtcatatggtctcatttaggcatatactgataccagctggctattctctcttgcccttccacgttcaagattcagcccgggctgcaggctcccttctcctaaccgccggtcttccccgccggggccccgtccgccgtccgccgtccgccgtcccgccttgcggctgcgcgcacctacaccgtgtgtcgcgctccctgcctccgtcccgcacggcgccgctcgctgtccccaccccgtgtcgcgctctgcctccatcccgtgcggtcaccggacatgcatattttgcccagctcctcctcgatcaagaatgcaccaaggtacggccggaagctatctaaggactgcagctatgggcaatttgttctgctgtgttcaagttgatcagtctacagtggccattagagaacagttcgggaagtttgatgctgtgcttgagccaggatgtcactgcctgccttggtttgctgggaagcgtatagctggccatctcacactcaggttgcagcaactggatgtgcgctgtgaaaccaagacaaaggacaatgtgtttgtcaatgttgtggcatcgatccagtacagagctttggctggcaaggcaaatgatgctttctacaagctgagcaacacaagatctcagatccaagcttatgtcttcgatgtgatcagggcaagtgttccgaagctgaacctggacgacgcatttgagcagaagaacgacatagcaaaggcagtggaggatgagctggagaaggctatgtctgcttacgggtttgagattgttcagacgctcatcgttgacattgagccagacgagcacgtgaagcgagcgatgaatgaaatcaatgcagctgcgaggctgagggtggctgcaaacgagaaggcagaggcagagaagatcgtgcagataaagagggcggagggagaagcggaagcaaagtacctgtcggggctgggtatcgcgaggcagcgtcaggcgatcgtggatgggttgagggacagcgtgctggggttctcagtgaacgtgccgggcaccacggccaaggacgtgatggacatggtgctcatcacccagtacttcgacaccatgaaggagatcggcgcctcctcaaaggcctcctccgtcttcatcccccatggccccggcgccgtccgcgacatcgccacgcagatccgcgacggccttcttcagggccaggctaccaccacctcccattagcatccatgtgggacaccagctgtgggattgctaagctgctgtttctcttgatttgtcctgtgtgattagatatgtcttgtaatttcttcatgctagctgtccgaccgacgtgtgtgcgcgcgcgggcaacattttcattttagttgtgaatgatatcctatcgtgtatgtatgtgtggaactatgccttgtgaaaactttgtgaaatttcagcgtcaaacatgtaaatgtgcatgtaatccggttctctgtattgtattacttgtatgatatgccgtctcgagttgtgcaaaaaaaaaaaaaaaaaacacgagtctagttatctccctcgtgc

SEQ ID NO: 50769 - DNA, 291 bp, Oryza sativa
  unsure (1)..(291): unsure at all n locations
  Clone ID: PAT_MRT4530_53222C.1
gatccgcctagggtnngtagnannncnccggnaaccgncgaggnatcntcgntnnctccggtcaaatggcgtcaagtancccagnccgnatccnnccctactaggnactccnancggtctcgtagggtcanacnacnccnngtgcggtttangggtcctcctcctccaccgcctccgccnanncgccccaatccaccnaacnacnancgaccgccggtgacaatcgaagcgaaggccaatcggtcatncccnnctgcntngtctctcctgncannctaccctccaccgggt

SEQ ID NO: 50770 - DNA, 358 bp, Oryza sativa
  Clone ID: PAT_MRT4530_53223C.1
cccacgcgtccggccttcgcgcgcgcgctcgcgcgattgcgtcgtcgctaccactcgcgctgactgatgagagcgagcgagtcggcgtcgactacacgtgcactcttctcttctgcatcggtatatctcgaccagtacgcgctactacttctcactctatgccgctcgttgcactcgtactacacatgctccactcgagctgatagttgtacacaatatccaaccactacggctattacagccagtatgcgtgtgcccggtatgagcccacatgctgtggacgctgggctgtcactagagcccaagagatctcgcggcagcggtacgagatgctcgacatgctgcatgaccttcccga

SEQ ID NO: 50771 - DNA, 3897 bp, Oryza sativa
  Clone ID: PAT_MRT4530_53224C.1
gtgaagacagggaatgatccccgtgcctccaatgacgctaggggcagcgaagagcagaccgatggagctcatatcagtggtgcatctgacagcagttcatctccaccgcccgagaacccaacggtcactcagatgatgacaatgatgatacaacagatgcagcaacattaccatcagatgttgcagcaggcgcagcagaaccagcagcaggcgcagcagaaccagcagtctggtcctccatcatcacacctgtccaaactgttagactttcatcatatccagccacccactttctcaagcaccaccaacccaatgtaggccaacgactggctccgtgcgattgagaagaagctgaaccttctgcaatgcaatgaccaagagaaggttgcttttgctacacatcagttgcaaggtcccgcttctgcttggtgggataactacgtggtgacccgtccagattcaacggaggttacttgggcagagttttgtcaaagcttcaggaaggcacaaattcctgaggggattatggcacaaaagaaaagagagttccgcgcactgcatcaagaaaccaggatagttacagagtacttgcatgagttcaaccgccttgcgcgctacgctcctaaggatgtgcgcaccgatgccgagaagcaggagaagtttttgtttggtctcgatgataaattgaccaaccagctgatctccggagtctatgatgactttgagaagctcgtggacaaggctatccgtcaggaagagcaacgcaacaaaatggaccgaaatagaaaggtagctcagatcagctttcctcaggggaacaattagaagcctcgcttcatgacgggacagctaggtgagccttccaccctgatcatccgtcagcaccatccttaccacccgagtaacttcaacaacgactacaacggtggcagtcacaacaacagtaagcagcataaccacaactcgacttcacccccattaatggcaccagctcagtcagatccgccagctatgtcagctcagtcagaacagctcaagaaggagtctgcaggaaagccaagaccctgcttcaactgtggcaagcacggccactttgctggcaagtgtccgaagctaaagcgcgttggacctaggttcgtccaggcccgcgtcaatcatgcgtctgcagagaaagcacaggcatcaccagaggtcgtgctgggcacgtttccggtgaactcatatccagcaacagttctctttgattctggtgcctcgcattcttttatatccaagagatttgctggggcacatggattatcggtagtggaacttaaaatactgatgcaggttcatacccctggaaatgacatgaggacagcacactactgcccctcagtgactatagagatcaagaggtcacggtttctatccaacctcatccttctcgaatccaaagacctagatgtcattctcggaatggattggttgaccagacacaagggagtgatcgactgcgcaagtcgcactatcaccctaagcaacgacaaaggggagaagatcaccttccgttctccagtgtcacagaagtccgtagcgagtctgaatcaggctgttattgaggatcagacagaaatagcggaaaaaaatcccaagaagttggaggatatacctatagtacaagagtatcctgaggtgttcccagaaggcctcactacaatgccaccgaagagagaaatcgagttccagattgatctggcacccggaactgctccaatctacaagaggccgtacagaatggcagctaatgagctagcagaagtcaaaaagcaggttgacgaacagctgcagaaagggtacatccgaccgagtacttcaccttggggtgctccggttatctttgtggaaaagaaagacaagaccaagaggatgtgcgttgattatcgcgcccttaatgaggtcacaatcaagaacaaatatccgttgccaagaattgatgatctgtttgatcagctaaaaggagctaagatggtgaagacagggaatgatccccgtgcctccaatgacgctaggggcagcgaagagcagaccgatggagctcatatcagtggtgcatctgacagcagttcatctccaccgcccgagaacccaacggccaacgactggctccgtgcgattgagaagaagctgaaccttctgcaatgcaatgaccaagagaaggttgcttttgctacacatcagttgcaaggtcccgcttctgcttggtgggataactacgtggtgacccgtccagattcaacggaggttacttgggcagagttttgtcaaagcttcaggaaggcacaaattcctgaggggattatggcacaaaagaaaagagagttccgcgcactgcatcaagaaaccaggatagttacagagtacttgcatgagttcaaccgccttgcgcgctacgctcctaaggatgtgcgcaccgatgccgagaagcaggagaagtttttgtttggtctcgatgataaattgaccaaccagctgatctccggagtctatgatgactttgagaagctcgtggacaaggctatccgtcaggaagagcaacgcaacaaaatggaccgaaatagaaagctaggtgagccttccaccctgatcatccgtcagcaccatccttaccacccgagtaacttcaacaacgactacaacggtggcagtcacaacaacagtaagcagcataaccacaactcgacttcacccccattaatggcaccagctcagtcagatccgccagctatgtcagctcagtcagaacagctcaagaaggagtctgcaggaaagccaagaccctgcttcaactgtggcaagcacggccactttgctggcaagtgtccgaagctaaagcgcgttggacctaggttcgtccaggcccgcgtcaatcatgcgtctgcagagaaagcacaggcatcaccagaggtcgtgctgggcacgtttccggtgaactcatatccagcaacagttctctttgattctggtgcctcgcattcttttatatccaagagatttgctggggcacatggattatcggtagtggaacttaaaatactgatgcaggttcatacccctggaaatgacatgaggacagcacactactgcccctcagtgactatagagatcaagaggtcacggtttctatccaacctcatccttctcgaatccaaagacctagatgtcattctcggaatggattggttgaccagacacaagggagtgatcgactgcgcaagtcgcactatcaccctaagcaacgacaaaggggagaagatcaccttccgttctccagtgtcacagaagtccgtagcgagtctgaatcaggctgttattgaggatcagacagaaatagcggaaaaaaatcccaagaagttggaggatatacctatagtacaagagtatcctgaggtgttcccagaaggcctcactacaatgccaccgaagagagaaatcgagttccagattgatctggcacccggaactgctccaatctacaagaggccgtacagaatggcagctaatgagctagcagaagtcaaaaagcaggttgacgaacagctgcagaaagggtacatccgaccgagtacttcaccttggggtgctccggttatctttgtggaaaagaaagacaagaccaagaggatgtgcgttgattatcgcgcccttaatgaggtcacaatcaagaacaaatatccgttgccaagaattgatgatctgtttgatcagctaaaaggagctaaggtgttttccaatatagacctgcgatcaggctatcatcagttgagaattcgggaagaggatattcccaagacagccttcgccactcggtcttgctctcttttcccccacaccagagttgaagtccttctcagttga

SEQ ID NO: 50772 - DNA, 4902 bp, Oryza sativa
  Clone ID: PAT_MRT4530_53225C.1
atggtgaagacaaggaatgatccccgtgactccaacgacgccagtggcagcgaagagcagaccgatggagctcatgtcagtggtgcatctggcagcagatcatctccaccgcccgaaaacccaacagtcactcaaatgatgacaatgatgatgcaacagatgcagcaacattaccatcagatgttgcagcaggcgcaacagaaccagcagtttggtcctccaccatcacacgtgtccaaactgttagactttcttcgtatccagccacccactttctcaagcaccaccaacccaatggaggccaatgactggctccgtgctattgagaagaagctgaacctactgcaatgcaacgaccaagagaaagttgcttttgctacacaccagttgcaaggtcccgcttctgcctggtgggataactacgtggcgacccgtctagatgcaacggagaagagagagttccgtgcgctccagcaaggaaccatgtcagttacagagtacttgcatgagttcaaccgccttgcgcgctacgctcctgaggacgtgcgcaccgatgctgagaagcaggagaagtttttgtttgggctcgacgatgaattgaccaaccagctaatctccggagtctatgaggactttgagaagcttgtggacaaggctatccgccaggaagagcaacgcaacaaaatggaccgaaaaagaaaggcagctcagatcagctttcctcaggggaacaatcagaagcctcgcttcatgacgggacagctaggtgggccttccaccctgatcgtctgtcagcaccgtccctatcacccgagtaacttcgacaacgactacaacggtggcagtcacaacaacagtaagcagcacaaccacaactcgactccacccccactaatggcaccagctcagtcagatccgccagctgtgtcagctcagtcagaacaacccaagaagagggctgtaggaaagccaggaccctgcttcaactgtggcaagcacggccactttgctagcaagtgtccgaagctgaatcgcactggacccaggttcatccaggcccacgccaatcatgtgtctgcagtggaagcacaggcagcaccagaggtcgtgttgggcacgtttccagtgaactcatatccagcaacagttctctttgattcaggtgcctcgcattctttcatttccaaaagatttgctgggacacatggattatcggtagtggaacttaaaataccgatgcaggttcatacccctggaaatgatatgaggacagcacactactgcccctcggtgactatagagatcagaagatcaccgtttctatccaacctcatccttctcgaatctaaagacctggatgtcattcttggaatggattggttgaccagaaacaagggagtgattgactgcgcaagccgcaccatcaccctaaccaacgacaaaggggagaagatcaccttccgttccccagcgtcgcagaagtccgtagcgagtctgaatcaggctgctattgagggtcagacagaaacagtggagaaaagtcccaggaagttggaggatattcctatagtacaagagtatcctgaggtgttcccagaagacctcactacaatgccaccgaagagagaaatcgagttccggatcgatttggcacccgggactactccaatttacaagaggccgtacagaatggcagctaatgagctagcagaggtcaagaagcaggttgacgaacagctgcagaaagggtacatccgaccgagtacttcaccttggggtgctccggttatctttgtggagaagaaagacaagaccaagaggatgtgcgtggattatcgcgcccttaatgaggtcacaatcaagaacaaatatccgttgccaagaattgatgacctgtttgatcagctaaaaggagctaaggtgttttccaagatagacctacgatcaggctatcatcagttgagaattcgggaagaggatattcccaagacagccttcaccactcggtatgggttgtttgagtgcacggttatgtcctttggactcaccaatgcaccggctttcttcatgaacttgatgaacaaagtgtttatggagtttcttgacaagtttgtcgtggtattcattgacgacatacttatttattcaaaatcagaagaggaacatgagcaacatcttcgtctggtacttgagaaattgaaggagcaccagttatatgccaagtttagcaagtgtgacttctggttatcggaggtcaaatttctgggtcacgtcatttctgctcaaggcgtggcagtggatccatcaaatgtggaatcagttacaaagtggaccccaccaaagacagtttctcagatccggagttttcttggacttgcgggctattaccgtcggttcatcgaaaatttctctaagattgccaggcccatgacacagttgctaaagaaagataaaaaattcaaatggtcagctgagtgcaaccaaagttttgaagaactcaagaagaagttagtctccgcaccagttctaattctgccagatcagacgaaagacttccaggtctactgtgatgcatctcgccaaggattgggatgtgtgttgatgcaagaaggcagagtggtcgcatatgcttcgcgacagttgcgcccacacgagaccaattatcccactcatgaccttgagttggcagcagtggttcatgctctgaaaatctggcggcactatcttattggcaaccgctgtgaagtttacactgatcataagagcctgaagtacatcttcacccagcccgacttaaatctccggcaacgaagatggctggagttgattaaagattatgacatggggatacactatcatccaggcaaagcaaatgtggtagcagatgctctgagcagaaagagctattgcaatgcagtatgtaccgaaggcatgtgtgacaaattgcagcaagatcttgagcacctaaatttgggcatcgtagaacacgggtacgtagctgccctagaggcccggcctacgctcgtggatcaagtcagagcagctcaagtaaatgatcctgaaatagctgagctgaaaaagaatatgagggttggaaaagctcgagatttccatgaggatgagaatggcacaatctggttgggagaaagattgtgtgtgcctgacgacaaagaactgaaggatctcatactcacagaagctcatcaaactcagtattcaattcatcccggcagtactaaaatgtaccaggacctcaaagagaaattctggtgggtcagcatgagaagagagatagccgaattcgtcgcactctgcgatgtttgtcagcgagtcaaagcagaacatcagaggcccgcaggactgctacaaccccttcagatcccggaatggaaatgggaagaaatcggaatggatttcataacaggtttgcccagaacatcgtcggggcacgattcaatctgggtggtcgtggatcgactcaccaaagttgctcattttattccagtacacactacctatactgggaaaaggttggcagagctttatctttcaagaatcatgtgtttgcatggggtacctaagaagattgtatctgatcgaggaagtcaattcacttcaaagttttggcagaaactgcaagaagaattggggactcgtttgaatttcagcacggcttatcatccacaaacagatgctatcagtccagtttgcaaatggtaccgtttgaagcattgtacggacgaaagtgccgcacaccacttttctgggatcaaacaggggattatgtgtacccttcgtgtcactccgcttcggggagtacaccgcttccaaaccaaaggcaagttggcaccacgctttgtgagaccatacaggatcttggaacgcagaggtgaagtcgcttaccagctagagcttccacctaatatggttggtatccacgatgtgtttcatgtgtctcaactgaagaagtgtttgagggtacctgaggaacaagctagctcagagcacattgacatccaagaagatttgacctacgtggagaagccagttcgtatccttgagaccagtgagagaaggaccagaagcaaggtgatcaggttttgcaaagttcaatggagccaccactcagaggaagaggccacctgggaaagagaagatgaattgaaggccgcccatccgcacctcttcgccagctcttccgaatctcggggccgagattccgtttaagggggtaggtttgtcacgccctgtcggccccttcttcctcctccagccgacggcaccgccgccgccgaaaccgccaccgacgccgccggtttccccgtttcccgcgcccactccgcccgtaccccacgcccacgtcgccgcccaccttccccgcacctcccgccagctcgcgcgcccgcaaacggcgggggatttgaaatttcccccactctctctctcctcctccatttcccccacgtcgccggccaaatcggccacctttccggcctcgtccgcccctcccgagcccatataaaccatccccgcactcccctccacctttttcctctttccgccgctctctcccgtgccctccatcactcccgcaccgctacacccgccgccgccgccttttccactcctccggtcgccgctcgccgccgcccgggcgccgcatccccatccaatcccgccatcggggcccgcttctctccgcgcgccggtgagtaccaccatagccgccgccgtcggccatggctctcgctcgtcgtgggcaccctctctccctctaacccctcacacttcctctcttagggtgtcccggagctcggccgcgtcgccgtttgccgtcgtttcctcccgcgccggccgaaccccggtgagaactccctctctcttcttcccgcgcgcgccgcc

SEQ ID NO: 50773 - DNA, 176 bp, Oryza sativa
  Clone ID: PAT_MRT4530_53226C.1
gcacgaggcccgatctaatctccggcgagcgagcgagtggaatcggcggcgatcttggctggtgacggctgttccggcgaggtggagcacgcgtgcgacgacgagcaccgagcggcttccatttgcgccggctggggggagcacgcacgatgtgctgtgctgtgcaagccgtgcct

SEQ ID NO: 50774 - DNA, 4917 bp, Oryza sativa
  Clone ID: PAT_MRT4530_53227C.1
agacgattatcctggtttaggcccttagcatggggtaataccctacgtctggtgatgtagattggatctatgtcaactaaaaagacaagagtgttaccgcttagggttagtgccagcgcccttatagagctagggcaaccgacgacatgcttcgtacagtatccctcataatccggctccagccgacggcaccgccgccgccgaaaccgccaccgacgccgccggtttccccgtttcccgcggcccactccgcccgtaaccccaagcccacgtcgccgcccaccttccccgcacctcccgccagttcgggggcccgcaaacggcgggggggatttgaaatttcccccactctctctctcctcctccatatggtgaagacaaggaatgatccccgtgactccaacgacgccagtggcagcgaagagcagaccgatggagctcatgtcagtggtgcatctggcagcagatcatctccaccgcccgaaaacccaacagtcactcaaatgatgacaatgatgatgcaacagatgcagcaacattaccatcagatgttgcagcaggcgcaacagaaccagcagtttggtcctccaccatcacacgtgtccaaactgttagactttcttcgtatccagccacccactttctcaagcaccaccaacccaatggaggccaatgactggctccgtgctattgagaagaagctgaacctactgcaatgcaacgaccaagagaaagttgcttttgctacacaccagttgcaaggtcccgcttctgcctggtgggataactacgtggcgacccgtctagatgcaacggaggttacttgggcagagttttgtcaaagcttcaggaaggcacagattcctgaagggattatggcacaatagaagagagagttccgtgcgctccagcaaggaaccatgtcagttacagagtacttgcatgagttcaaccgccttgcgcgctacgctcctgaggacgtgcgcaccgatgctgagaagcaggagaagtttttgtttgggctcgacgatgaattgaccaaccagctaatctccggagtctatgaggactttgagaagcttgtggacaaggctatccgccaggaagagcaacgcaacaaaatggaccgaaaaagaaaggcagctcagatcagctttcctcaggggaacaatcagaagcctcgcttcatgacgggacagctaggtgggccttccaccctgatcgtctgtcagcaccgtccctatcacccgagtaacttcgacaacgactacaacggtggcagtcacaacaacagtaagcagcacaaccacaactcgactccacccccactaatggcaccagctcagtcagatccgccagctgtgtcagctcagtcagaacaacccaagaagagggctgtaggaaagccaggaccctgcttcaactgtggcaagcacggccactttgctagcaagtgtccgaagctgaatcgcactggacccaggttcatccaggcccacgccaatcatgtgtctgcagtggaagcacaggcagcaccagaggtcgtgttgggcacgtttccagtgaactcatatccagcaacagttctctttgattcaggtgcctcgcattctttcatttccaaaagatttgctgggacacatggattatcggtagtggaacttaaaataccgatgcaggttcatacccctggaaatgatatgaggacagcacactactgcccctcggtgactatagagatcagaagatcaccgtttctatccaacctcatccttctcgaatctaaagacctggatgtcattcttggaatggattggttgaccagaaacaagggagtgattgactgcgcaagccgcaccatcaccctaaccaacgacaaaggggagaagatcaccttccgttccccagcgtcgcagaagtccgtagcgagtctgaatcaggctgctattgagggtcagacagaaacagtggagaaaagtcccaggaagttggaggatattcctatagtacaagagtatcctgaggtgttcccagaagacctcactacaatgccaccgaagagagaaatcgagttccggatcgatttggcacccgggactactccaatttacaagaggccgtacagaatggcagctaatgagctagcagaggtcaagaagcaggttgacgaacagctgcagaaagggtacatccgaccgagtacttcaccttggggtgctccggttatctttgtggagaagaaagacaagaccaagaggatgtgcgtggattatcgcgcccttaatgaggtcacaatcaagaacaaatatccgttgccaagaattgatgacctgtttgatcagctaaaaggagctaaggtgttttccaagatagacctacgatcaggctatcatcagttgagaattcgggaagaggatattcccaagacagccttcaccactcggtatgggttgtttgagtgcacggttatgtcctttggactcaccaatgcaccggctttcttcatgaacttgatgaacaaagtgtttatggagtttcttgacaagtttgtcgtggtattcattgacgacatacttatttattcaaaatcagaagaggaacatgagcaacatcttcgtctggtacttgagaaattgaaggagcaccagttatatgccaagtttagcaagtgtgacttctggttatcggaggtcaaatttctgggtcacgtcatttctgctcaaggcgtggcagtggatccatcaaatgtggaatcagttacaaagtggaccccaccaaagacagtttctcagatccggagttttcttggacttgcgggctattaccgtcggttcatcgaaaatttctctaagattgccaggcccatgacacagttgctaaagaaagataaaaaattcaaatggtcagctgagtgcaaccaaagttttgaagaactcaagaagaagttagtctccgcaccagttctaattctgccagatcagacgaaagacttccaggtctactgtgatgcatctcgccaaggattgggatgtgtgttgatgcaagaaggcagagtggtcgcatatgcttcgcgacagttgcgcccacacgagaccaattatcccactcatgaccttgagttggcagcagtggttcatgctctgaaaatctggcggcactatcttattggcaaccgctgtgaagtttacactgatcataagagcctgaagtacatcttcacccagcccgacttaaatctccggcaacgaagatggctggagttgattaaagattatgacatggggatacactatcatccaggcaaagcaaatgtggtagcagatgctctgagcagaaagagctattgcaatgcagtatgtaccgaaggcatgtgtgacaaattgcagcaagatcttgagcacctaaatttgggcatcgtagaacacgggtacgtagctgccctagaggcccggcctacgctcgtggatcaagtcagagcagctcaagtaaatgatcctgaaatagctgagctgaaaaagaatatgagggttggaaaagctcgagatttccatgaggatgagaatggcacaatctggttgggagaaagattgtgtgtgcctgacgacaaagaactgaaggatctcatactcacagaagctcatcaaactcagtattcaattcatcccggcagtactaaaatgtaccaggacctcaaagagaaattctggtgggtcagcatgagaagagagatagccgaattcgtcgcactctgcgatgtttgtcagcgagtcaaagcagaacatcagaggcccgcaggactgctacaaccccttcagatcccggaatggaaatgggaagaaatcggaatggatttcataacaggtttgcccagaacatcgtcggggcacgattcaatctgggtggtcgtggatcgactcaccaaagttgctcattttattccagtacacactacctatactgggaaaaggttggcagagctttatctttcaagaatcatgtgtttgcatggggtacctaagaagattgtatctgatcgaggaagtcaattcacttcaaagttttggcagaaactgcaagaagaattggggactcgtttgaatttcagcacggcttatcatccacaaacagatggtcagaccgagcgagtaaatcaaatcttgtaagatatgttgagagcttgtgcacttgactttggtggagcctgggataaaagtctaccgtatgcggaattctcttacaacaacagctatcagtccagtttgcaaatggtaccgtttgaagcattgtacggacgaaagtgccgcacaccacttttctgggatcaaacaggtgagcgccaactgtttgggacagaagtgttaaccgaagcagaggagaaagtcaggaccgtcagggaaagactgcgaatcgcccagtctcggcaaaagagttatgctgataaccgccgaagagagcttactttcgaagcaggggattatgtgtacccttcgtgtcactccgcttcggggagtacaccgcttccaaaccaaaggcaagttggcaccacgctttgtgagaccatacaggatcttggaacgcagaggtgaagtcgcttaccagctagagcttccacctaatatggttggtatccacgatgtgtttcatgtgtctcaactgaagaagtgtttgagggtacctgaggaacaagctagctcagagcacattgacatccaagaagatttgacctacgtggagaagccagttcgtatccttgagaccagtgagagaaggaccagaagcaaggtgatcaggttttgcaaagttcaatggagccaccactcagaggaagaggccacctgggaaagagaagatgaattgaaggccgcccatccgcacctcttcgccagctcttccgaatctcggggccgagattccgtt

SEQ ID NO: 50775 - DNA, 4734 bp, Oryza sativa
  Clone ID: PAT_MRT4530_53228C.1
atggtgaagacaaggaacgatccccgtgactccaacgatgccagtggcagcgaagagcagaccgatggagctcataccagtggtgcatctagcagcagtccatctccaccgcccgagaacccaatggtcactcagatgatgacaatgatgatgcaacagatgcaacaacattaccatcagatgttgcagcaggcgcaacagaaccaacagtttggtcccccaccatcccacttgtccaaactgttagactttctccgcatcaagccacccactttctcaagcaccaccaacccaatggaggccaacgaccggctccgtgctattgagaagaagctgaaccttttgcaatgcaacgaccaggagaaggttgctttttctacacatcagttgcaagggcctgcttctgcctgcctcacggtccacggtggaccaggtgcacccgggctcacaccggccgacgccgtgggccccacgcgtcagccgcaccagagggcgcgggcggctgacggccgggccccacgcggcagccgctcggtgcgcccgaaggcggccacggcggcgcggccggcgggaggcggcgcgcccgcgccccctatggtcgccggcggcggccataggcacggtggagcggccgccgagagaagggagggaaagggggaaacgaggcggcggtccacggctcaccctaggtcgacggcgacgacgaaaaggcggccggagcggaggaaggcggcggcgcggctcgggtcgacggggacggcggcgctccagcggtcgacgagcgaaacggagaggtggacgaggtcggcgaggatgcggcgaagccgaaggaggcggcgccgaggtgggaggtggtccggggcgacgacggcggcggaccggagctcggcggcgacggcggagagagagagcgacggcgcgagctcgattctggcgaggagaaagggcggcgagaggcggaaacgaatggaggaggtgcggggaggggtcgttttgggacgtgacaagttccgtgcactccagcaaggaaccatgtcagttacagagtacatgcacgagttcaaccgccttgcgcgctacgctcccgaggacgtgcgcaccgatgctgagaagcaagagaggtttttgtttggtcttgatgatgaattgaccaaccagctgatctccggagtctatgatgattttgagaagcttgtggacaaggctatccgtcaggaagaacaacgtaacaaaatggaccgaaaaagaaaggcagctcagatcagctttcctcaggggaacaatcagaagcctcgcttcatgacgggacagttaggtgagccttccaccctgatcgtccgtcagcaccgtccttaccactcgagtaacttcaacaacgactacaatagtggctgtcacggcagcagtaagcagcacaaccacaactcgactccacccccattaatggcaccaactcagtcagatccgccagctatgtcagctcagtcagaacaactcaagaaggagtctgcaggaaagccaagaccctgcttcaactgtggcaagcacggccactttgctggcaagtatccgaagccgaagcgcgctggacctaggttcgtccaggcctgcgtcaatcatgcgtctgcagaggaggcacaggcagcaccagaggtcgtgctgggcacgtttccagtgaattcatttccggcaacagtactttttgattcgggtgcctcgcattctttcatttccaagagaattgctgggacacatggattatcggtagtggaacttaaaatactgatgcgggttcatacccctggaaatgacatgaacaccacacactactgcccctcagtgaccatagagatcaaaaggtcaccgttcctatccaacctcatccttctcgaatccaaagacctagatgtcattctcggaatggattggttgaccagacacaagggggtgattgactgcgcaagccgcaccatcaccctaaccaacgacaaaggggagaagatcaccttccgttctccagtgccacagaagtccgtagcaagtctgaatcaggctactatcgaggatcagacagaaatagcggagaaaaatcccaagaaattggaggatatacctatagtacaagagtatcctgaggtgttcctagaagacctcactacaatgccaccgaagagagaaatcgagttccggattgatctggcacccggaactgctgcaatctacaaaaggtcgtacagaatggcagctaatgagctagcagaggtcaagaagcaggttgatgaacagctgcagaaagggtacatccaaccgagtatttcaccttggggtgctccggttatctttgtggagaagaaagacaagaccaagaggatgtgcgttgattatcacgcccttaatgaggtcacaatcaagaacaaatatcccttgcccagaattgatgacctgtttgatcagttaaaaggggctaaggtgttttccaagatagacctgcgatcaggctatcaccagttgagaattcgggaagaggatattcccaagacagccttcactactcggtatgggttgtttgagtgcacggttatgtcatttggactcaccaatgcaccggctttcttcatgaacttgatgaacaaagtgtttatggagtttcttgacaagtttgtcgtggtgttcattgacgacatacttatttattcaaaatcagaagaggaacatgagcaacatctccgtctggtactcgagaaattgaaggagcaccagttatatgccaagttcagtaagtgtgacttctggttgtcggaagtcaaatttctgggtcacgtcattactgctcaaggtgtggcagtggatccatcaaatgtggagtcagttacaaagtggaccccaccaaagacagtttctcagattcggagttttcttggacttgcgggctattaccgtcggttcatcgaaaatttctctaagattgccagacccatgacacaattgctaaagaaagatgaaaaattcaagtggtcagttgagtgcaatcaaagttttgaagaactcaagaagaagttagtatctgcaccagttctgattctgccggatcagacgaaagactttcaggaaggcagagtggtcgcatatgcttcgcgacagttgcgtccacatgagagcaattatcctactcatgatcttgagttggcagcagtggttcatgctctgaaaatctggcggcactatcttattggcaaccgctgtgaagtctacactgatcacaagagtctgaaatggctggagttaattaaagattatgacatagggatacactatcatgcaggcaaagcaaatgtggtagcagatgcttttagcagaaagagccattgcaatacagtatataccgaaggcatgtgtgacaaattgcaacaagatctagagcacctaaatttgggcatcgtggaacacgggtacgtagctgctctagaggcacgccctacgctcgtggatcaagtcagagatgctcaggtaaatgatcctgaaatagctgagctgaaaaagaatatgaggattggaaaagcccgagattttcatgaggatgggcatggcacaatctggttgggagaaagattgtgtgtacctgacgacaaagaactgaaggatctgatactcactgaagctcatcaaactcagtattcaattcatcccggtagtactaaaatgtaccaggacctcaaagaaaaattctggtgggctagcatgagaagagaaatagctgaattcgtcgcactctgcgatgtttgccagagggtaaaggcagaacatcaaaggcccgcaggattgttacaacctcttcagatcccggaatggaaatgggaagagattggaatggatttcataacaggtttgcccaggacatcatcgaggcacgattcaatctgggtagtcgtggatcgactcaccaaagttgctcatttcattccagtgcacactacctatacggggaaaaggttggcagagttgtacttagcaaggatcatgtgtttgcatggggtacctaagaagatagtatctgatcgagggagtcagttcacttcaaaattttggcagaagttgcaagaagaattggggactcatttgaatttcagcatagcttatcatccacaaactaatggtcagaccgagcgagtcaatcaaatattggaagatatgttgagagcttgtgcacttgactttggcggagcttgggataaaagtctgccttatgcggaattctcttacaacaacagttatcaggccagtctgcaaatggcaccgtttgaagcattgtccggatggaagtgccgcacttcgctcttctgggatcaaacaggtgagcgccaactgtttgggacagaggtgctaaccgaggcagaggaaaaagtcaggaccatcagggaaagattgagaatcgcccagtctcggcagaagagttatgctgacaaccgccgaagggagcttatttttgaagcaggggattatgtgtaccttcgtatcactccgcttcggggagtccaccgcttccagactaaaggaaagttggcaccacgctttgtgggaccatacaggatcctggaacgcagaggtgaagttgcttaccaccttgagcttccatctaatatggctggtatccacgatgtgtttcatgtatctcaactgaagaagtgtttgagagtacctgaggaacaagctagctcagagcacatagacatttag

SEQ ID NO: 50776 - DNA, 156 bp, Oryza sativa
  Clone ID: PAT_MRT4530_53229C.1
atgtcgccaccactgtcaaccaccgccaaactgctcctctccctccctcctagcgactcgaccactgagcgcgcccatggtcttgggagtggcaaatctgctcgctttgcctccttacccttcttcgtcaaccccctcggcgacgatggtggctcg

SEQ ID NO: 50777 - DNA, 1951 bp, Oryza sativa
  Clone ID: PAT_MRT4530_5322C.1
cggcacgagggagagactagtctcgagttttttttttttttttttttttataaaataattgtaaaatatatcacagtggaaaacatatacacgtatatatacatgcaccatcaactacagtttcacagttcccttttttctcacaaaagggacatgcttcgtatttatcagggaaagtgtctgaacttagatcgatagacgaagcttgtgctcaacatatacagctgcttcctttcgatcaactatttttttatgctccaaactacttgtacaaaggggcaacttccctcaatttgatatccacaacacagttcatagcaactatgttttaaccatctgatgacactcaagttttatccatttcagaatgcaagccgaaatgaagtagatgactaacttgggaacctcggaagtatgcactgatgcccaaattaccagtctaactatgttcagaggttataccaccatatccctgtcttctttcacagttcaagctgtgtgagatgttgggaccgtgggatgtactttaaatcttcacattgctgttttgcgccaatgaaatgtcacaggtgcttcagtacagcattcatctgggccagtgtctccagaagaatcttgcaacggccttttacttctcgcctacgatgcttttgtagttaaccatatagatggcgaccaatgttagaagcgcgccaccaagctgtacaggcgagaaggtctctcccagatagaggaacccaaaaatggaagcaaacataggagttaagaaagtgagagaactaagtgtggtcaagctacctcttgtagcattgtagaagtacacaccatagctgatagcactgccaaatatagatgtatagagaagtgctaatacatcattcagtgtaagttcttgaagatgcccattcagcgcaggatcatgattgagaacagatataaccaacaaaggaaggccaccaattatcatgtgccatcctgttgccatgattggatcagaatactttgacacccaacggaccatgatagttccgacagccatgctttgggccgagaggaacatccaccattccccacttccccagatcgctgtgtcattcccttcaactgatagtgctggaacctcgagaagcaaaagcccgacgacacccagcacgagccctccaactcctatcgcgccaatcgattctccaaagagcagcgctgcaaggacagctaccgttaatggctgagaatcaatgataacgcttccgagcccagccgatgtcttctgcaatccctccgcgagaaatccctggaagcaggcggcgtcgacgaggccgaaggcggcgacggcgacccaggcggcccagccggagggctgcctcctgccgcgcgcggcggcgaaggcgacgagcagcgcgccggcggggaggaggcggagcgcggcgacgaagaaggggcccgtcttgggtatgacccccttcatcgccaccatggccgtgccccagaagaagaagggcgacaccagcgacgcccactcccaccactccctccccacgagcgccgccgccgaggccgagacgccatcctcctcctcctcggagacccgcgcgaggaggggctccgcgcctacgcctgcgcctgcgcctgggccgtcgacgaagcactcgacgtccgtgcccgtgccgacgcagtcgaccgcgtcctgcggggagggcggcggcgtcgcctcgcggcggatgggccccacttccgcgcctgggcggtcgtcgacgtagcactcgacgtcggcgcccgtgccgacgcagtcgaccgcgtccaccgggttaggcggcgtgtcgcggcgcgcggcatgtcgcacgccacggccgcggcgcgcgaggacaggggcggctcggcgcgtcctgcaaccgggaggagggagtggcgggaggacgagcacgtggagggacgcggctgcggcgggccacat

SEQ ID NO: 50778 - DNA, 4518 bp, Oryza sativa
  Clone ID: PAT_MRT4530_53230C.1
atggtgaagacaaggaattatccccgtgactccaacgacgccagtggcagcgaagagcagaccgatggagctcatgtcagtggtgcatctggcagcagatcatctccaccgcccgaaaacccaacagtcactcaaatgatgacaatgatgatgcaacagatgcagcaacattaccatcagatgttgcagcaggcgcaacagaaccagcagtttggtcctccaccatcacacgtgtccaaactgttagactttcttcgtatccagccacccactttctcaagcaccaccaacccaattgaggccaatgactggctccgtgctattgagaagaagctgaacctactgcaatgcaacgaccaagagaaagttgcttttgctacacaccagttgcaaggtcccgcttctgcctggtgggataactacgtggtgacccgtccagatgcaacggaggttacttgggcagagttttgtcaaagcttcaggaaggcacaaattcctgaggggattatggcacaaaagaaaagagagttccagtacctgcacgagttcaaccgccttgcacgctacgctcctgaggacgtgcgctccgataccgagaagcaggagaagtttttgtttgggctcgatgatgaattgaccaaccaactaatctccggagtttatgaggactttgagaagcttgtggacaaggctattcgtcaggaagagcaacgcaacaaaatggaccgaaaaagaaaggcagctcagatcagctttcctcaggggaacaatcagaagcctcgcttcatgacgggacagctaggtgggccttccaccctgatcgtctgtcagcaccgtccctatcacccgagtaacttcgacaacgactacaacggtggcagtcacaacaacagtaagcagcacaaccacaactcgactccacccccactaatggcaccagctcagtcagatccgccagctgtgtcagttcagtcagaacaacccaaggagggggctgtaggaaagccagcaccctgcttcaactgtggcaagcacgaccactttgcttgcaagtgtccaaagctgaatcgcactagacccaggttcatccaggcccgcgccaatcatgtgtctgcagaggaagcacaggcagcaccagaggtcgtgttgggcacgtttccagtgaactcatatccagcaacagttctctttgattcaggtgcctcgcattctttcatttccaaaagatttgctgggacgcatggattatcggtagtggaacttaaaataccgatgcaggttcatacccctggaaatgatatgaggacagcacactactgcccctcggtgactatagagatcaaaggatcaccgtttctatccaacctcatccttctcgaatctaaagacctagatgtcattctcggaatggattggttgaccagaaacaagggagtgattgactgcgcaagccgcaccatcaccctaaccaacgacaaaggggagaagatcaccttccgttccccagcgtcgcagaagtccgtagcgagtctgaatcaggctgctattgagggtcagacagaaacagtggagaaaagtcccaggaagttggaggatattcctatagtacaagagtatcctgaggtgttcccagaagacctcactacaatgccaccgaagagagaaatcgagttccgaattgatctggcacccgggactgctccaatttacaagaggccgtacagaatggcagctaatgagctagcagaggtcaagaagcaggttgacgaacagctgcagaaagggtacatccgaccgagtacttcaccttggggtgctccggtgatctttgtggagaagaaagacaggaccaagaggatgtgcgtggattatcgcgcccttaatgaggtcacaatcaagaacaaatatccgttgcccagaattgatgacctgtttgatcagctaaaaggagctaaggtgttttccaagatagacctgcgatcaggctatcatcagttgagaattcgggaagaggatattcccaagacagccttcatcactcggtatgggttgtttgagtgcacggttatgtcatttggactcaccaatgcaccggctttcttcatgaacttgatgaacaaagtgtttatggagtttcttgacaagtttgtcgtggtattcattgacgacatacttatttattcaaaatcagaagaggaacatgagcaacatcttcgtctggtacttgagaaattgaaggagcaccagttatatgccaagtttagcaagtgtgacttctggttatcggaggtcaaatttctgggtcacgtcatttctgctcaaggcgtggcagtggatccatcaaatgtggaatcagttacaaagtggaccccaccaaagacagtttctcagatccggagttttcttggacttgcgggctattaccgtcggttcatcgaaaatttctctaagattgccaggcccatgacacagttgctaaagaaagatgaaaaattcaaatggtcagctgagtgcaaccaaagttttgaagaactcaagaagaagttagtctccgcaccagttctaattctgccagatcagacaaaagacttccaagtctactgtgatgcatctcgccaagggttgggatgtgtgttgatgcaagaaggcagagtggtcgcatacgcttcgcgacagttgcgtccacacgagaccaattatcccactcatgaccttgagttggcagcagtggttcatgctctgaaaatctggcggcactatcttattggcaaccgctgtgaagtttacactgatcataagagcctgaagtacatcttcacccagcccgacttaaatctccggcaacgaagatggctggagttgattaaagattatgacatggggatacactatcatccaggcaaagcaaatgtggtagcagatgctctgagcagaaagagctattgcaatgcagtatgtaccgaaggcatgtgtgacaaattgcagcaagatcttgagcacctaaatttgggcatcgtagaacacgggtacgtagctgccctagaggcacggcctacgctcgtggatcaagtcagagcagctcaggtaaatgatcctgaaatagctgagctaaaaaagaatatgagggtcggaaaagcccgagatttccatgaggatgagcatggcacaatctggttgggagaaagattgtgtgtgcctgacgacaaagaactgaaggatctcatactcacagaagctcatcaaactcagtattcaattcatcccggcagtactaaaatgtaccaggacctcaaagagaaattctggtgggtcagcatgagaagagagatagccgaattcgtcgcactctgcgatgtttgtcagcgagtcaaagcagaacatcagaggcccgcaggactgctacaaccccttcagatcccggaatggaaatgggaagaaatcggaatggatttcataacaggtttgcccagaacatcgtcagggcacgattcaatctgggtggtcgtggatcgactcaccaaagttgctcattttattccagtacacactacctatactgggaaaaggttggcagagctttatctttcaagaatcatgtgtttgcatggggtacctaagaagattgtatctgatcgaggaagtcaattcacttcaaagttttggcagaaactgcaagaagaattggggactcgtttgaatttcagcacggcttatcatccacaaacagatggtcagaccgagcgagtaaatcaaatcttggaagatatgttgagagcttgtgcacttgactttggtggagcctgggataaaagtctaccgtatgcggaattctcttacaacaacagctatcagtctagtttgcaaatggcaccgtttgaagcattgtacggacgaaagtgccgcacaccacttttctgggatcaaacaggtgagcgccaactgtttgggacagaagtgttaaccgaagcagaggagaaagtcaggaccgtcagggaaagactgcgaatcgcccagtctcggcaaaagagttatgctgataaccgccgaagagagcttactttcgaagcaggggattatgtgtaccttcgtgtcactccgcttcggggagtacaccgcttccaaaccaaaggcaagttggcaccacgctttgtgggaccatacaggatcttggaacgcagaggtgaagtcgcttaccagcttgagctcccatctaatatggttggaatccacgatgtgtttcatgtatctcaattgaagaagtgtttgagggtacctgaggaacaagctagctcagagcacattgacatccaggaagatctgacttatgtggagaagccgatttgtatcctcgagaccagtgagagaaggaccagaaacaaggtgatcaagttttgcaaagttcagtggagccaccactcggaagaagaagccacctgggaaagagaagatgaattgaaggccgctcatccgcacctcttcgccaactcttccgaatctcggggtcgagattccgtttaa

SEQ ID NO: 50779 - DNA, 1809 bp, Oryza sativa
  Clone ID: PAT_MRT4530_53231C.1
aaattcgatgatccatgatacagtaacatgtaacagcttctatagttgcataccaccacaaatatccgatgataaacttcgaacaatgcggtgtatgtatcataggaagatatatttacatgtaaactatagaggttttgacttgccatctggaacttgactgatagcagtggacctagctacaatggcaagcacttagaagaatcaataagcctagctaaaaacgcctacagccagaagaatcagagcaaatatgtacagttgagatttacatcgtcctaacgactcagcccagagtacaggccatccaacgctgtgtacagaaacttggcagcatttggtctctgcatatcccccatgagaatatcgctggttgtcagatacgggtcgccgtaaaaccgcagatttgcgtcccttcgggttgcaacgaagttcccttccaacgaaacaccaatgaatgcacctttgctgcagctatatgtataacaaacacctgagcctttatcaccagctctcaagtcagcctctagcactctaccaacaggccctgctgcagcacttaaacctgccccaacagaaaaatgcatctggctgctaaaagtcctgacagcttccagaccacgaagcactatgatgaaatccattagctcagcaccaacctgtgctccccatcctaacccaactgaaacgattgctgatggtggtgaccaagatccatctgatcttcgagcaactactaggccagttccaagtttgtatgtaagaagtgcaccagcttttacaactgtcaggatagcaagcccacttgctccactaaggactgcatgaggaatagacctttcggggtttagccttgcaatctggctatagctcctcacagaatttgcggccttgtaaatctcatgttccattgttaatccaataggcaaattcaaccaccccctggtactagtccaatccataacatcatgctttgcagtctgtgtggcattgctaatagaattaatgaataagttctgcaacggatcaagcctatcataacaagcatcacaaaccctttgcggattccgctcacggaacttggctggcaacagacatctgccttttgagcatgtcctacaaaatatccctccacaaaatcgacaatgatgccttccacgagtaacaacagtaaaagaagcagcgcattgcatgcatgagttagcataactatcaggtaaccattctggtggttctgcttcaatcacaaccctatacacattgtaattcagagcttcttcgtcaagcaatggtggagcacttggcacatagactgaggcgtgcaagaatgtttctccatcgctacctgaccctaagaatgcgacactagacttagtgtcctttggcggttgaatttcagaatttttgccgccacgactgatgattgcaattaaaccacccagcagatttctaaggtttaccggcttatctgccttcaagggtgcagatccccaaccatcgtccgcacaatcatagccataaaaattggttttgccaccaaaatcaaattgcttgtgctcagccaattttgactcaaaggaattgatgatgtttccagctgttcccagtgctccttctacatgctgtgggaatgactttggatcaaatgagttcatcacatcccctatcgtgcccaaaaccttggattggatctcatccttaaaactgttttccactcccggtgtaggcaaagggtgatacttgaaaacctctcgcgaggtcgccatggtcataaattactaccacacaaaagttggcgcgagccgggga

SEQ ID NO: 50780 - DNA, 4843 bp, Oryza sativa
  Clone ID: PAT_MRT4530_53232C.1
atggtgaagacaaggaatgatccccatgactccaacgacgccagtggcagcgaagagcagaccgatggagctcatgtcagtggtgcatctggcagcagatcatctccaccgcccgaaaacccaacagtcactcaaatgatgacaatgatgatgcaacagatgcagcaacattaccatcagatgttgcagcaggcgcaacagaaccagcagtttggtcctccaccatcacacgtgtccaaactgttagactttcttcgtatccagccacccactttctcaagcaccaccaacccaatggaggccaatgactggctccgtgctattgagaagaagctgaacctactgcaatgcaacgaccaagagaaagttgcttttgctacacaccagttgcaaggtcccgcttctgcctggtgggataactacgtggcgacccgtctagatgcaacggaggttacttgggcagagttttgtcaaagcttcaggaaggcacagattcctgaagggattatggcacaacagaagagagagttccgtgcgctccagcaaggaaccatgtcagttacagagtacttgcatgagttcaaccgccttgcgcgctacgctcctgaggacgtgcgcaccgatgctgagaagcaggagaagtttttgtttgggctcgacgatgaattgaccaaccagctaatctccggagtttatgaggactttgagaagcttgtggacaaggctatccgccaggaagagcaacgcaacaaaatggaccgaaaaagaaaggcagctcagatcagctttcctcaggggaacaatcagaagcctcgcctcatgacgggacagctaggtgggccttccaccctgatcgtctgtcagcaccgtccctatcacccgagtaacttcgacaacgactacaacggtggcagtcacaacaacaaacaacccaagaagggggctgtaggaaagccaggaccctgcttcaactgtggcaagcacggccactttgctggcaagtgtccgaagctgaatcgcactggacccaggttcatccaggcccgcgccaatcatgtgtctgcagaggaagcacaggcagcaccagaggtcgtgttgggcacgtttccagtgaactcatatccagcaacagttctctttgattcaggtgcctcgcattctttcatttccaaaagatttgctgggacacatggattatcggtagtggaacttaaaataccgatgaaggttcatacccctggaaatgatatgaggacagcacactactgcccctcggtgactatagagatcaaaagatcaccgtttctatccaacctcatccttctcgaatctaaagacctggatgtcattcttggaatggattggttgaccagaaacaagggagtgattgactgcgcaagccgcaccatcaccctaaccaacgacaaaggggagaagatcaccttccgttccccagcgtcgcagaagtccgtagcgagtctgaatcaggctgctattgagggtcagacagaaacagtggagaaaagtcccaggaagttggaggatattcctatagtacaagagtatcctgaggtgttcccagaagacctcactacaatgccaccgaagagaaaaatcgagttccggatcgatttggcacccggaactgctccaatttacaagaggccgtacagaatggcagctaatgagctagcagaggtcaagaagcaggttgacgaacagctgcagaaagggtacatccgaccgagtacttcaccttggggtgctccggttatctttgtggagaagaaagacaagaccaagaggatgtgcgtggattatcgcgcccttaatgaggtcacaatcaagaacaaatatccgttgccaagaattgatgacctgtttgatcagctaaaaggagctaaggtgttttccaagatagacctgcgatcaggctatcatcagttgagaattcgggaagaggatattcccaagacagccttcaccactcggtatgggttgtttgagtgcacggttatgtcctttggactcaccaatgcaccggctttcttcatgaacttgatgaacaaagtgtttatggagtttcttgacaagtttgtcgtggtattcattgacgacatacttatttattcaaaatcagaagaggaacatgagcaacatcttcgtctggtacttgagaaattgaaggagcaccagttatatgccaagtttagcaagtgtgacttctggttatcggaggtcaaatttctgggtcacgtcatttctgctcaaggcgtggcagtggatccatcaaatgtggaatcagttacaaagtggaccccaccaaagacagtttctcagatccggagttttcttggacttgcgggttattaccgtcggttcatcgaaaatttctctaagattgccaggcccatgacacagttgctaaagaaagatgaaaaattcaaatggtcagctgagtgcaaccaaagttttgaagaactcaagaagaagttagtctctgcaccagttctaattctgccagatcagacgaaagacttccaggtctactgtgatgcatctcgccaaggattgggattggttcatgctctgaaaatctggcggcactatcttattggcaaccgctgtgaagtttacactgatcataagagcctgaagtacatcttcacccagcccgacttaaatctccggcaacgaagatggctggagttgattaaagattatgacatggggatacactatcatccaggcaaagcaaatgtggtagcagatgctctgagcagaaagagctattgcaatgcagtatgtaccgaaggcatgtgtgacaaattgcagcaagatcttgagcacctaaatttgggcatcgtagaacacgggtacgtagctgccctagaggcccggcctacgctcgtggatcaagtcagagcagctcaagtaaatgatcctgaaatagctgagctgaaaaagaatatgagggttggaaaagctcgagatttccatgaggatgagaatggcacaatctggttgggagaaagattgtgtgtgcctgacgacaaagaactgaaggatctcatactcacagaagctcatcaaactcagtattcaattcatcccggcagtactaaaatgtaccaggacctcaaagagaaattctggtggggcccacctgtcggccccttcttccacctcccgctgccgctccctaagccggccgccgccgaaaccgccaccgacgccgccgggtcgccgccgcaccccgccatcggcgccgccgcgtccgccatcccgaggtccacctcgtccgctgttctcccgtccaattccatcgccggagctcgcatctcctcgcactccgagttgaagtccttcccagttgaagatgtctcgaagaggttggtttcgtcgctgccgtcaaggattgcctgtggaatggagtcgcccgctgcaggagtcaacttagaaattctggttcgtgaatttctgggcgtgacaaggcgcgcgcggccacgggcatggcgcggcagcgaggaggcagtccctgcggcggggcggcacggcaccgcgaggacgatgacgagcggcagggcgtcaatgaggtttgaagagctcgcggttggaaagataatggatccgaactttccataccagtcgccgtcgttcaccttgggtgatttcgaccccaactacatgtcggggtttgacggcggagacagcttcggaaggattttccggaaccgcgagcggaagtgtttcgacacacaccggctcgaagagatcgagaacctccggtcacctcaagcgccatgcggagtcgtgtgccaagaagcaaggaatacaactccggcagcagcaacttatggtaaacccagacggtacggtacgcagttgggagtacgatcccatggttgctcgggaatctcttgtccggttaatcgccaggcaagatttacccctgaactttggggagtcccctgcttttgaacattacattcagcaatctcataaccctaggtttaaagctactggcatgaagagggtaggtgaccacatcgatgctgttcgtcaagcaatcgcgtggttaactgcttctaacccgcagattgctgcatggaagaggttttgcaatgcggccggtgtgaaagctcataaagctagcatgccaacggtatacagcgagtcgctctttgtggaggttacggccaagttcgatcctaggtgtaaattaaggggattgtctgctattttatcacttgttggagatactataggtgtagattatagttctttttatactgaggttagacgtaaattatatgaggtttttggaagatatgaagtaaagtttcaggaagttcgccagcagagaccccctcctatccccactacaggtaagaagaagatacagtggggtaggatttggggtggatcgtcttcaatccaaggtggtggcagttcgtcggctacaagtggagacgcctcttcgcatgttgtggccgaagagttgtccggttatttggacagcgacgccatccaccacgaagcacaagatttcaacgtcctcgggtggtggaatgaccacaagataacatatcctgtgctttcaaaactagcacgggatgtgttgacggtgcccgtgtcgacggtgtcctccgaatcggccttcagtctatgcggccgaatcatcgaagaccggaggacgactctgcgcagcgaccacgtcgaaatgctactaagcgttaaagactgggagcttgctcgacaacatgcccaatacactgcggacaaccaagaattggccgcccagttcgagcaactctacctggatccagaccaaccccagtag

SEQ ID NO: 50781 - DNA, 911 bp, Oryza sativa
  Clone ID: PAT_MRT4530_53233C.1
atgaccggcgacggaaaaggaagggtggccgagcttcccctcaccacggcgcacccaacggtggtgacggcgaccggcgacgacgatggagacggcggcgcggcggcaccggagatggccggcggcggcgggggagccagccaggggtcagtcgaccacgcgccgatctccaatggccgcgtgccgtgcggctccgaaacagccacgcagctgctcatccaagtccggctgtgcagccgtttcgccggcgtcaatcttctgccactgcaccacggcaccgcaggaacacctctcatcggtgagaacatccccaacctttctccccttctttccttgcttgggtcgagctcccatcgtgctcctgtccaccaccatggctaccaccgtggtttggggtggacatgtggaaggggcttcggccaggttgacatgatccgcaacggtggaacccgtgaaagcagcgaccatgtagccttgcttaggcccagcaagtgcccgactgctaggacggatcaatatcccattgggcagtaaactcgtgcagttgttaacgaccaaatttggtaatatcagcatcggaagtgaagatgagatcgaagtggaatcagagataaggatttctgtgggaacagagtaagaatcggctggagtccggatcggctacgaccagaatcggctaaatccgaatcagactaggttagatgatacagccgattccgataatacaacttggtgtacaacatcgggttgagttgatatgcttcaagatgattgccgcacgtggatagagtcctgagagggcaattgtatccattaattaggatgttttatgtaatttccttagagatatgtttagggcaaaagtctgtcgcaaagacttatggtattttagagtttgttagggataatag

SEQ ID NO: 50782 - DNA, 204 bp, Oryza sativa
  Clone ID: PAT_MRT4530_53234C.1
atgtaccgcggctcgtgtagggctcgtgcttggtcggagtctgcatgcgggatgttcctcttgggttgggtgccgtggccgtcatgggagcggactccggtgctccactgtagtggatgggcgaaccggaataaccaaaaagacgagaaggacgtgaaggctttgatgggcgcgagcccaatagttgcgtacagggttcgctaa

SEQ ID NO: 50783 - DNA, 547 bp, Oryza sativa
  Clone ID: PAT_MRT4530_53235C.1
cccacggcaccgccttcccacacttccttttccccaatcgcccccctccttccctccctgtctggctcccccccccctcgccccacccccccccttccaccccatgttcgccaactgggtccccccccctgattccccagcttgccccccccgccgcctgatataccccccccaccttcctcccccaaccccccctccgtacccccccccatattaccccttccccccgacccccccccccctcaccccctctgcgccagcgcctcgcgtatcccacatcgtccgtttcccccccttacaccccgctcgctcaccccccctcaaaaatccaccccccactcacctccaattcctcataaccccccctatccctccattccccaccccccaaatcaaacagccaacccccctcccccccaccctcgatccgccccaatctacatcaaatcttagttgctgccccgccccccaataacttcccccgccttcacataggccacacgcccccgtcctcctctcccgtccccgcccgcgccccacccccccc

SEQ ID NO: 50784 - DNA, 438 bp, Oryza sativa
  Clone ID: PAT_MRT4530_53236C.1
atggcggcggcctggttcacgatgagggaggcgcacgcaggggcggtgctggggttcaggagggggagcggtgcacggcgcggtgcacggaggactaggagacgacgggcccacgcgcgcgagcgggggacggagggagcggctgaccggggtcagcttgacccggtccggccgagctggcgccgacgaggcgccttcgtggcagccacgcgggccggcgtgtggaggaagaagggggaggccgagatggacggcggacggcggcgacattcgccggggcaacacacggggattcaagggagggggaaggacaccggagtgatgggagggacaagagggagcgaatcaccggcccggattcaccggagagaggccggcggcgacgaatcgcggtggcgcatgccggcggcgagcaaagaggggaaacggcggcggtag

SEQ ID NO: 50785 - DNA, 534 bp, Oryza sativa
  Clone ID: PAT_MRT4530_53237C.1
atggagacggcgcggcgacggcgacatgacgcggcggcgcggcagggcaacggcggtgacaagacggcgcgcggcggcgcggggcgcaaggcagcggcgcagcagagggcggcagcggcgcggtgcaggggtggcgcggggctcgagatggagcgcggcagaggaggggtggtgatgccaattgttcatcacagaataagaatcaaaacacacgttgatcttacaggcagcgtcggcgggatgatgatggtagcggcggtggcggcagctggcagcgtggagtacggccatggggagggaggagggggagtacaccggcgcgtcctgcaggcgcggggcggtggctacgtcaactcgtcgctggtggcagaccggcagagggaggcagagagacacctcaatagcaccctcaagagtgagattgggaacttaaacttaagaacacagactaggtcgcagtgcctccacgtgctgccgtgcctgctccatcccagcggaaatgccaccggggcaccggattcgaccatggactag

SEQ ID NO: 50786 - DNA, 390 bp, Oryza sativa
  Clone ID: PAT_MRT4530_53238C.1
atggcggcggcctggttcacggtgagggaggcgcacgcggggacggcactggggttcaggagggggagcggtgcacggcgcggtgcacggaggactaggaggcgacggacccacgtgcagcctcatggctcgcggtggaccgcgcgcgcgagcggggtacggagggagcggctgaccggggtcagcttgacccggtccggccgagctggtgccgacgtggtgccttcgtcgcagccacgcgggccggcgggaggaggaagaagggggaggccgagatggacggcggacggcggcgacattcgccggggcagcacacggggattcaagggagggggaggacaccggagtgatgggagggacaagagggagggaatcaccggcccggattga

SEQ ID NO: 50787 - DNA, 1612 bp, Oryza sativa
  Clone ID: PAT_MRT4530_53239C.1
acggcgcgaaccgcttcctacgaaactgcgatctcggtaccagtcccaggacgtagtgctggtacccacgcggctcggccgaaccaaatgggccggcgcgggcgcgaggaggcggcccattaggggcgcgcgggagagagggagcggtccggtggaccaagttcacctcgcggggtcccgggtgaggcccgcttgtcggtgacacggctcacggagggatgggcatacgcaagggtggtgctagggttcggggaggaagcggtccacgcgcggcgcacgggtggacgcggtgtgcggcgggcccacgcgcagcctctcggctctccgtggaccccgcgcgcgagtgaggaacggagggaggcggctgaccgaggtcagctttgacccagtccggccgagctggcgccgacgtggtgccttcgtggcagccacgcgggccggcgggaggaggaagatgggggaggccgagatggacggcggacggcggcgacattcgccgaggcagcacacggggattcaagggagggggaggacaccggagtgatgggagggacaagaggaagcgaatcaccggcccggattcactggagggaggccggcgacgacgaatcgtggcggcgcatgccggcggcgagcaaagaggggaaacggcggcggtagacgagaggtcgattcaaggcggtgggatcatccatgggagttggggaacccgtttccggcgccggatgggacggaggggcaccgaggagggccggcgacgagcggcggcctccgggagcggacggcaatggcggcgaggccatgccgggcggcagcggggctcggggcggcgtccacgcgcgttcgagagagagagcggggagggagaacggaggaggcactaccgagccgggcgcagcgatgggcggccgacggcgcggggcgagctctccggcctcgggccggggaaggggaaggagaagggtgcccggagtcctcttctcgcgtccttcgcacgcaccggtctccctggtgcttcggcgacgggcggtgagggcgactgcagggcaggggcgacagtggcgtggcagcgtggagagtgaagcgggagggacattggcggtcacgggcgatgcaagagcggcggatgccgaggatgcaaggagcggcgaaggcggtggatcgggcggtggaaaaggattcgcgagcgcgggaggggcagctcggcgcggtcaaggtgggggcggcgaactggcgcaccggcgtcagcgtctctgtctccaagcgcaagtggacaagggcgggagagagagaggtcgaaccggagagggaaaaagggagatagggcgtttaggcggcgggcaggcaaggcgcggcacgggcggtgcaggcggcgaccacgcgggcgcgcgcgcgcgacgcgagggcacgacggaattcaaaggcggcggcgggaaccggcaaagcggtggtggatgcggcgtcggagagagagaaaacgagagagagggagagaaacggcgctccttctcggctcggctgcgtgcaacgcacgtgcgaggggagagggaaacggactgagaggagggatgggccgagggaaaaggattcgacccacaaaaacttgagggag

SEQ ID NO: 50788 - DNA, 309 bp, Oryza sativa
  unsure (1)..(309): unsure at all n locations
  Clone ID: PAT_MRT4530_5323C.1
tgggcgcgcttttttttttttgggggaatttgagaggcaaaaacatcatcttcttggcatcttctagggacaaacacacggacatatggggactaaacccatttcccaaccaagaacgaatngtggcaaaaccatcaacaaataaccatgtaagtaggcccaattcactgcgggacgaagtgggggtacgccagggtgtgtgaggggcgggaggggcgggaggtccgagggggcctgcgggacaggccggagagaagcgacaggagaacagggagggccgtctgaactctactgagctcggaagcccgg

SEQ ID NO: 50789 - DNA, 457 bp, Oryza sativa
  unsure (1)..(457): unsure at all n locations
  Clone ID: PAT_MRT4530_53240C.1
cgccgggctggtgcagatgaggtcgctgcagaagcgcacggggagctacttccggtacggcggctcgctgacgacgccgccgtgcggcgagaacgtggtgtggagcgtgctcgggaaggtgagggagatcagccaggagcagctgcacctgctcatgtcgccattgccgaccaaggacgccaggccggcgcagccgctcaatggcagggccgtcttntactacaacccgccgggcagcgccgtctccttccaggaattcgccaagtgattctttcttttttttttctttctttttttttttggttttttgtatttgatgttgagttgatttgattaacatttcgacgtatgatatgcactatatataattaattaacatcgcaaaatactttttttttcgagaatacataaagggctcgcgtatctttgtattaaaaaaaaaaaaaaaaaaaaaaaa

SEQ ID NO: 50790 - DNA, 2844 bp, Oryza sativa
  Clone ID: PAT_MRT4530_53241C.1
gtgaacgtgttcgcgggggtgagcgggggcgctgcggggaaggaggcggggacggtgggcggcggggcgatgctggagctgacgccgcacaagctggcgctgtgccacctcgtgcaggtgttcgcgccgccgccgcaggccggggtctcggcccccgcgctgcccttcaccttcgagtccgtcgcccaccccaaccgcctcggcctcttcctcttcgccctcaccccctcgtgcgaggattttcgggaacctccactggaagagcttctaaggcagctgaaggcagttgatgctttggttaatggctggctctgtgagcagcttacaagtaccctttcagcgcttacttcaccggatgatctgttcaacttctttgataagctacgaggcgttctgtctgcgccagaaggtgcaaatgtggaagacgaatttctggatccaaatagtcagcttggagtttttcttcgttgctgtatactttccttcaatacaatgacctttgagggtgtctgccatcttttggcaaatcttgtggagtattgtaactccgctgacacctcatacgacttggcagaagatgaggacttcaacagtgaaatggaaatgagcaacttcatggatacaaatatgcatgttagagatggtgtatttgacaaatacaatcaaggttatgcccctaggagccatatggtagacagctcgtcatctctagtacatgctccagcctcactccatgattttgaggaagctaatatgttcaaggcagatgataacctgggtccaacttgtctgaggtcaagatggcaattagaggcatatcttaaccaacaagctgatattcttgagaaggatcctagttcggtgcctttgaattcatttaatgctactatgagtcaacttcagaaattagctccagagctccatcgtaattgtgaagagttccttgtcacaatggtttattttgatctatattctacctgtcaggtccaatttttgcagtatttgaatgctcttacccatgatgactacgttgctgcattagataatcttcaccgctattttgattacagtgcagggatgcaaggacttttcagtcgtaccgcgtctccattccaagatattatagttgggaagtatgagagtgctttgctctgcttaggtaacttgcactgttattttggacatccgaagaaagccttagaggcattcacagaagcagtgcgtgtttcccaaatgaacaatgatgattcatgcctggcctatatattaggagctatttccaatctgttatcaaagataggcatgtcaagcacagttggaacaattggttctccttattcacttggaaataacatcggattaggcacaccgctgtccattcagcaacagctgcttgttcttttaaagagatcacttaagcgagctgataccttgaaacttacaagcttgctgtcctttgatcacctttctcttgcaaaatttgatctgaagcatgtccaaaggcctctggtgtcctttggccctaatgcttccacaaagcttagaacatgtcctgcagatgtctgcaagaatttgagattaagttcacgtgtgttgactgactttggcacagatggcttatcagcatcaaatgataatggtagttttagtacttcatggcttaggaatctgtctgctgcttctaattcttggtgtagcagctcgaaaaaatctggaaaactacttacgaatgacttcgacaatttccattttcatgcacaaccaagtcctatacctgcatcagtattgcaattagctggctcagcttatttgctgagggccactgcttgggaacactacgggagtgctccgatggttcgaatgaattcgttggtctatgcaacctgctttgctgatgctgcaagttcatcagagctgtcgctagcatatgtcaagctaattcagcatttagcaactttcaaagggtattcagcggcattctctgctctcaagcttgctgaagagaagttcccgttgtcagcaaattcacatatccagcttcttaaaatgcaattattgcacgagcgtgctctgcatcgaggacacctgaaagttgcgcaacagatctgtgatgagtttgctgtgttgtcatcttctgttagtggagtcgacattgagctcaagacagaagctaggttacggcatgctcgcacgcttcttgccgcaaaacaatttagtcaggcagcaaatgtggcaaattctcttttctctacttgctacaagtacaacatgcaggtggagaatgcaagtgttcttttattacttgcagagatacagaaaaattctgacaatgcagtccttgggcttccttacgcattagctagtcaatcattctgcaaatcatttaacttagatctgcttgaagcctcggctacactaactcttactgaattatggctggctcttggatcaacccatgcaaagagggccttgagtcttgtttgccaaagccttccaatgatccttggtcatggtggacttgagctgcgcgctcgagctcacatagttcttgcaaaatgctatctgtccgatccaaaattctcagaaaaaccggttcccctttgtcctttcatcatggcagtttccgaagacccttctgctgttctagatcctctgaaccaagctgcggaagatctggaggttttggagtaccacgaaatggcggcagaagcatactacctaaaggcaatggtctacaacaatctaggaaaactggatgagagggaggaagctgcagcttctttcaaggagcacacactcgcccttgaaaacccatataacgaagaggattcacttgcttgctga

SEQ ID NO: 50791 - DNA, 252 bp, Oryza sativa
  Clone ID: PAT_MRT4530_53242C.1
aaaaggaaaaccatttaaggcaatataccattcgaaaggaaacatgaaccctggaaaaacaggggggttcaatagaggcaccagggggtcaccccgaaaaatggggggcttaaggaaacaaaccaagcggcccccaaggctgaacaataccttgggttggacaaaaaaaacggacgggggcgatcggaaaacagccttttttgcttaaacatcgttacttacccttggtgaaaaggggtgaaacagcccgaa

SEQ ID NO: 50792 - DNA, 167 bp, Oryza sativa
  Clone ID: PAT_MRT4530_53243C.1
ttttcctcgcgtggccagtggtggtgctatcacatcttatatccaccccatcttatcgtctatccatatttcctcgtggcacagcacaacatggtgggtcccggacagtggggtgggggacaaagacatccatctgtatatcccacccccattatattccttccaat

SEQ ID NO: 50793 - DNA, 191 bp, Oryza sativa
  unsure (1)..(191): unsure at all n locations
  Clone ID: PAT_MRT4530_53244C.1
aaatccgtccgagtcnacatccggcancgagcctccgtccccggccacaaccggcaccgccgcgtccactgcngcctccgtccccagccacaaccggcgtcgccgcctccgtccccgaccaagtccggcgccgctgcatccacccccgcctccgtcccagccacaaccggcgtcancgcttccgtccccgg

SEQ ID NO: 50794 - DNA, 209 bp, Oryza sativa
  Clone ID: PAT_MRT4530_53247C.1
accagtacgccgccatgctgctgcagaagatgcagaagtatggcgccaccgggtggctcgtcaacaccggttggtcggcggaaggtataccaggacgatcatcgacgtcatccacttcggtgagctcctactgcaactacaagaagacgtaggtattttggcttgagatccccattaaaatcgacgggatccgtctgaatcctcgccct

SEQ ID NO: 50795 - DNA, 1378 bp, Oryza sativa
  Clone ID: PAT_MRT4530_53249C.1
gctgcaatcctaacgaattaacccgtagtatttatgtagctacatgttgcgtaaacaaggcaagctagttaaaaagtactagaccctttcaccgctttaattgaaaagcggtatcatatcataattcatctacacattcttcactcaaatattagtttataaataatacagatcgagattaataatcttactatatacaaagtacatcatacttttatacatactcaactggggctaactgtctagtaaccatagatccaattccaaattatgtcatttctcacaattggaaccagtcaccgatgatcatccatgatgggctatctgaattgtgatgtcgcgatgccttcctcttgttctttctccattcccatggcttctcaaggttatcatatgcccaaagcccttgacgtgcatcccgtgccattttttcccactttgcaaattgtggccgtttgtcatagttcttgaagtgccaggcatgaccattcaccagcatttgctcctggatgaacacaccaccacaatggatatcacagacgaagcgcttaaattggtcctgcccataaacatgaagcgtgacacacttcctagcgatcagtttcaccagtgcatcctgcgactcctttccatactgcatgcctatctccggtgcatcaatgcccctcagtcttatttcgtattttcttgcgaggatctcacggcccccaaagaacattttcttttgtccagtattttcgagacttatttgtagatcagctgctgttttgtcccacaatttttgcttcttagagttacgggattgacagcttgcattgcaatcctgacgcagttctataggatccagtgtgtcgacataagcagtaaagccatcaccatctactatgcactttgcattaaccggcaatgtttttagcacgaacagcacaccctttggtattgatgatggatgattttctgatgcctctttggagattgtaggaattggaaagccataaaatgcaagaatgccattaaatagaatccaaagaatatcctccaaattagttcgttcgatccctctcaagggggcagcaacaagcacagcagcatctgctgattctttgggtggatattttatatccttgtatgcggccaacaatttcctataccatgtaacctgtgcctgcataggtgatgtaacatgctgtgcaagcccttcaggaacctcaaaggtccgagtaaagtcgacgaggtcacgctccagggcagctaccccactagggggccgaggtgaccgtttggtctgaggggttactacatgaatgtctttgttcttggtcagccagtagtaggagggtttactgttgccatcgtctttttcatggatacacctcat

SEQ ID NO: 50796 - DNA, 425 bp, Oryza sativa
  Clone ID: PAT_MRT4530_5324C.1
gtcagcatacgcacactcactccacagttgggatcttatttgatcgaattgctcagctcaactctgtgcttttacgtgccatctagattggtatctacctagtactatggtgcacccagtaccattaccacccttggcggtgtcttgtaatgagttttaacagtatagtggttcggagttaaaaatagctcagattaaaaaaaaaaaaaaaaaaaaaaaaaaaaaataaaaaaaaaaaaaaaaaaaaaaaaaaaaaataaaaaaaaaaaggaggaccatcaaacagaaaaaaaacttaagtgaggctgacaaaagaagagaaaaaactttttaaaagtgacgtaaaagaaactaattggagccgaaataataaagggggttcccggtcaaaacaatactatttttaactggtttgccttataaat

SEQ ID NO: 50797 - DNA, 175 bp, Oryza sativa
  Clone ID: PAT_MRT4530_53250C.1
gttcaccacaaatgcaacgtgcgtgccgcaaaagggttgtgcgcctgtgaaatgtgttgtgggacaccacaaaggatgggatgtgggctctgtgttgcccagtgtggccccgaacaatgaagatgagtggaactggatgttgtacacccctgtgaagccgggactgtatcccttg

SEQ ID NO: 50798 - DNA, 381 bp, Oryza sativa
  Clone ID: PAT_MRT4530_53251C.1
agttaaaaagtactagaccctttcaccgctttaattgaaaagcggtatcatatcataattcatctacacattcttcactcaaatattagtttataaataatacagatcgagattaataatcttactatatacaaagtacatcatacttttatacatactcaactggggctaactgtctagtaaccatagatccaattccaaattatgtcatttcagataagatcatcatccaagtgaccagagtccatcaacgtacatctgaattgtgatgtcgcgatgccttcctcttgttctttctccattcccatggcttctcaaggttatcatatgcccaaagcccttgacgtgcatcccgtgccattttttcccactttgcaaatt

SEQ ID NO: 50799 - DNA, 413 bp, Oryza sativa
  Clone ID: PAT_MRT4530_53252C.1
gacaaagaaaaagttcaggtatgccgtggataggaagtggattgtacaatgagtagttgtcaaatagctttacatcagatacaggatgcattcctaggaaaagaatggtaatactgcctctgcatctaccctaaaagtgtaattgccggtgtatcctacgtttttctagaaagatatgttacaagaagccacactgcaagcaactaagcaacacctccctacctatatgcccaaataggaaacctacatcttctacaaaatatggtggtgagacttcaatctctttccccgcggacaaaaatgactgtgaatgatattcaaaacttcgttgcctattgattctgcaaccaccaaaaataagcaaggttaaaactttgttgcctcctcctcttgcatggggttgtggcgttgtg

SEQ ID NO: 50800 - DNA, 426 bp, Oryza sativa
  Clone ID: PAT_MRT4530_53253C.1
ttatccagacaagtagcgttggatagccgacacagcccgttgcctgatttgatctacttcttcgatagcttggatatcttgagcatcggttccagaaatgaccttgaggtacttgatcatatcagctacattcttgatagccaatttcagtctggatttctgttcttcgacagcatttggaagattggctaacttttgcttgtccagatctagttcggcattacattcttcaagttgagctatgagatcaatcttgcgggcttcaagccgatctatgttcggctgaattggcccggcagagagcatatctaacttggctttctctttgtcgcatccggaaaaatagcttttccagaacactagtgtattaatccccgtcacaggataagccggggtacaccacacaaacatgataaaaagacacat

SEQ ID NO: 50801 - DNA, 513 bp, Oryza sativa
  Clone ID: PAT_MRT4530_53254C.1
gtgtttcattatcaattgccacactcaactgatgtttacatccacagaagtggaaggacagcgcggaaatcaatggcaggttgcagcattgcattaatctctcctgcagacaaggacaagttttactcactttgcaagtcactgtcaaaggagaacctccagcagttttctgttgaccatgcttacatgcctgcagtaatgaataggctcacccttgctcggcagattgacaagattacacgtaaaaatttcccaggaaaatgccaacaaatcatggctttagaggaatgctgagtccatgggattattattggagaacaagggacagtgaggaggaaaccgtacaggggcataagccaaggaaaggcaccttctgcgaaccctccaaaggcttcacaggatttgggtgagcttttgcaaccccccttggagcctaaaattttttttcggcgctatttatatgggggtgggggttttacccgttctttaaaagtaactggaagagtttttcca

SEQ ID NO: 50802 - DNA, 1918 bp, Oryza sativa
  Clone ID: PAT_MRT4530_53255C.1
atgcgggtggcacccaaggtcctcgtcctcgtccgcgacgccgccggctacggcgccgccctcgccgacgcgctccgcccaacgccggggctcacgagggaatccacgcccctggagctccccctcgccaagtacggcctcgacggggagaaggcctccggcgagctcgtgaacttctccgattctagtggcgatccgcagcaccaaggaaaaagctctacagatgtggaccttgaggggcagcgtcaagccgtcaacccggctcctggcaaaggagcagagccgagatcccccagcaatggcggcggcgcagtgagctcgccgccgattgccaacatgcgggcgacgccaccgccgccgccgcgtcccccggctcgcgcgtacccaggaacgtctcccatgggctcgtctccagccttgccgcgctccaccaacccggcggcgctcctcgcccacctcgccgccgtcctcacctcgcccgactggttcctcaacccttccctgccccgcctccctgccctgctcacgccgtccctgccggagtcgctccccgtcccgctccccgtccgcctcgccgccgcggcggccagggtggccgcgccgtcccgccacctcctcgccgtcgcgctcccggtcgtcctccgcctccactccctctcgcccccgccgctccgcccgctcttcgaccgccccttcgcctccctcctcgcccacctctcccgcttcgccctcgcgccgctcgccctccgcctcttcgcccacatgcaccgccacgccccgccggcgccgacagcccccacctacaacgccgtcatccgctccctctgccgccgcgccgacctcgcccgcgccctgcggtacctcagcctcatggtccgctccggctggcgccccgacgcctacacgttcaactccctcatcgtcgggtattgccgcaccaaccaggtcgacgttgcccgcgacctgttcgacaaaatgcccctgagagggttcgcccaggacgtggtctcttacgccacgctgattgaggggctttgtgaggcggggaggattgacgaggcagtggagttgttcggggagatggaccagccagacatgcacatgtatgcagccttagtgaaggggttgtgtaatgcggagcggggggaggaggggcttctcatgctgcgtaggatgaaggaattggggtggcggccaagcacccgtgcttatgcagctgtggttgatttccggtgtagggagcgtaaggccaaggaggctgaggaaatgcttcaggagatgtttgaaaagggattggcaccgggagatgctacaaaaggatgtgaagccctcaacagtcaattatacaattgtgattcataagcttttaaaggagagaaactatggattggttgcgagaacctggggcgaaatggtttcatcgggttgcaatcctgatgtagtcacttatacaacgtctatgcgtgcttactgcattgaaggaagactaaatgaagcagaaaatgttttgatggagatgagcaaaaatggggtcactgtagatacaatggcatacaatactctgatggatggacatgcaagtattggacagacagatcatgcagtctcaatcttgaaacaaatgacaagtgttgcttctgtgccaaaccagtttacttattttatcttgcttagacatcttgtacgcatgagattagtggaggatgtgttgcctttgaccccagctggtgtgtggaaagccatagagcttactgatgtctttgggttgtttgatgtaatgaagaagaacgaatttcttcctaattcaggaacttattcttccattctagaggggttttctgaagatggaagaacggaagaggcgacatcgttagtttctcttatgaaagaagatagtatatctctgaatgaagacatc

SEQ ID NO: 50803 - DNA, 450 bp, Oryza sativa
  Clone ID: PAT_MRT4530_53256C.1
atggagatcaagctcgtcttcttcttcctcctcctcctgggttttggcaacgcggaggaggaactcgacaccgaaacctgcgacgtcgccaagctgtcggccgagattggcacctactgcgaattcgaccaagggaggatgtaccccggccggtgctgcgacagcatcatcgacgccgcggatgggcacgatggcggtggcactcagtgcatctgccgcgtctggatggaggatgcggtgagaaagaccgggatcactttcagagagttgttgcataagtacattgattgtggtggtctgcagcccagcctacctcatcttgccgactccgcttgctcagctgctcctgagatggtaggcacacttccaggtccaggcaagatcagcggtgcagacaccaccaacgtcggagtcatcttctccgccatgaggccggccattatcccgtga

SEQ ID NO: 50804 - DNA, 426 bp, Oryza sativa
  Clone ID: PAT_MRT4530_53257C.1
gtattcaatccacattgtattaattattaaaatacaagtgcgtttaaggatacaataatacacagctccaccattgtacatggtataaaataaatgaaaaaaaaaaaaacctcaaaggtgaaagagcagaaaatggacacaaaagtcacttctgatcatctaatgctactggccatacaaaatttatgcttaaaatttgtcatttaaattaacctaattattactctgagaatgataatacgcatgtcacaatctgattcaagtgcctgtaaagaaagatctcagcaaatttggtagcagaattcagtaagttgataatggtcacctaattatgtttgggcttgaactgtccaagtggaaataagacagagaaattaacttactaatttgtcaaaatggccaactgaaaacgatacacttgaattg

SEQ ID NO: 50805 - DNA, 249 bp, Oryza sativa
  Clone ID: PAT_MRT4530_53258C.1
atggaggcggccattgtcgaggcggcatggctagatctagcgttccctcgcctggacccaacgtatcctggtctcatttccccgtctggtcgaagcagagccatcattgaggaggtggggtggagttcaccagcacggagcggagcgacagggctccatggtggcgtcgatggctaccgaattggtagcttaccgatggtggcaacatcggacttggtgacgacggcagtcggcggtggtattgggtag

SEQ ID NO: 50806 - DNA, 1826 bp, Oryza sativa
  Clone ID: PAT_MRT4530_53259C.1
tcgctcgcgagagcagagcaggggagggggaggggaagggcgccgtcgtcctgttgttcactcctgacctgcatcacatctggagatgtctttccgcagcatagttcgtgatttcagggacagtttcgggactctatccaagcggagtttcgaggtgaaaatttcaggcttttcgggccgtcacagagggaaatccattggaccatcaagcgagctggatgacacgcccgtggtagctcagcaaagcaagtgggctggtcttcctcctgaattacttcgcgacgtgatgaaaaggctggaggaagatgatagcaattggccctcccgcaaggatgttgttgcctgcgcttcagtttgtacgacttggagagacatgtgcaaagatattgtcaggaaccctgaattttgtggaaagcttacatttccagtgtctcttaagcagcctggacctcgagatggagtaatccaatgtttcataaaaagggacaaatcaaaactaacttatcatctctacctgtgccttagctctgctgtgcttgatgagactggaaagttcctactatcagctaaaaggagccggcgaacgacacacactgactacatcatttctatggactccaaaaatatctcccgatcaagtagtggctatattgggaagttgaggtcaaatttcctcggcaccaaattcatcatctatgacacgcagcctccatacaatgctcggacactttgctcacaagaacggacgagccgtcggttctcctctaggaaagtttccccaaaagttccaacgggttgttatcccatcgtgcaggtgaattatgagctaaatgtgcttggaacccggggaccaagacggatgcaatgcgctatgcattccatcccagcatcagcagtagagcctggtggcattgtgcctggccaacctaaagagctcctcccaaggttatttgaggagtccttccgcagtatggcaacttccttctccaagtactccatcacagatcattcgacagacttcagtagttctcgcttctctgagtttgggggaggggctctgcaagggcaagagcaagagcaagatggcgatgatgtgaacaaggagaggcctttggttctccggaacaaagcaccaaggtggcatgaacagctgcaatgctggtgcctcaacttccgtggccgtgtgacggtggcttcagtgaagaacttccagctgatagctgctgcacctcagccatcttctggagccgcctctgaaccttcacaggcagggcaggctgcacaacagcaaacccaaccttctcagccatcgagttcgtcgtcgtcgtcatcatccaaccatgatacggtgatcctgcaattcggcaaagttgcaaaggacatgttcaccatggattaccggtacccattgtcggccttccaggcttttgctatctgtttgaccagctttgacaccaagctggcatgtgaataaatgagtagaatagcgatcagaaagcactccagtgtacctgaggacctaagccactccaggcgtatggtattttaggataggagaattctgtgtctagtcacttgtgtgtattcatgtgcagttctttggttgaatccttgtgttcctccggcgtgcgtgtttgttagaagtgtaaaaaggggattgaagtgtagatgtctgtaagatagaacaagatcttgtttcttgtatgttgggcttaaaaagttttgagcaagagaatgaatgaatggttgagggagccgtcggtctgaatgtggggttaaaatgatggagatggtgagcttagagccaaaaaaaaaaaaaaaaaaaa

SEQ ID NO: 50807 - DNA, 303 bp, Oryza sativa
  Clone ID: PAT_MRT4530_5325C.1
ggctgtagagcgtgatactagctgatcccatgaacaagtacaagctcgggtggatggaggatgccccgggaccaggatgaatgggcacactgtgctccaacgatcgatagggaacaatagctagggccttaaggcgaggatgatctccttaccaccaacacgacacgggtgcgtcacgctgttcatgataattcatgcagcgctaatctgctgaaggttcaccaacaaggatctgacactgaacgtatcgtaggcgctaagattaccaagcgtgctggcaggagtgtgatgacacagcatatg

SEQ ID NO: 50808 - DNA, 281 bp, Oryza sativa
  Clone ID: PAT_MRT4530_53260C.1
atgatggttgtgacggttggaatggtcggtaatactctccaaccgtcattggggcttcatctcaaccgtccagccaaaacctggatccaacggatgtgagggaggttcggccgaacctggggccgacccaatccagcccaatttcgctggtggccttctccattgttcttctccgcagacttgtgaattttggccccattcatcgtgccaattctgagttcttggcctattcacacacaagactggttctcgacatcgtccgattgatttatcgtctgagt

SEQ ID NO: 50809 - DNA, 115 bp, Oryza sativa
  Clone ID: PAT_MRT4530_53261C.1
catatcaagaatatccttactggccatttatttttatgttggggacgccaggaaagatgggactagcccatgttcaaaaactcttttgttcaaaacaaaacacagtgacgcccag

SEQ ID NO: 50810 - DNA, 444 bp, Oryza sativa
  Clone ID: PAT_MRT4530_53262C.1
atggtcgatgacacctgcgcgccaccgccgatcgcgacccgccatttgtcccttctctctctctcgctgcagcagcagcagcggcgcaacggcattgttggtgcgcggaaaggaagcgcgaggacacggggaagccatcgatgtatatgtcgtcgtgtacctgtctctgcactgcacgcacacctcatctccggcgtgcgtcaccaacgacgtcgccgtcgtccgctgtgcgtggacgagagctatagcggtggccggcgtacgacggcgacccgcgctctgcagctagctaagcgacggcgacacgggcgttgtcgtggcgtcgtccgatcctatgcaagtgcaaccacacaaacgattctgctgcctcttctggcccatccttttctttctatttgggaggatttcaatttctccgttatactccctccgtttcgaaatgtt

SEQ ID NO: 50811 - DNA, 664 bp, Oryza sativa
  Clone ID: PAT_MRT4530_53263C.1
atggcgggttgcgccacgtcgaccagctggaacacgccattgcatacccacacgaggacggtgagacgccacattctccttcgaggcgtcccggtgacactcatcgtgctactgctaccgccgcagccgacctgcctccaccgcatctctctcgtcaacagtcggttcccgccgcgtgctcactagccgccggttcctccaccatttcagcgacctccacatcagcgcgccaggggctcccctcgtcgggttcttccacaaccacaaccatggcgcctgggcgaacaaccgctccatccctatcggcatcaatgacaccggggactgccgtcggagccaccatcgcggcgccacgacgcgtaatcctgacggggtgttcgccttgggcgacgccgccgagtggcacgtcgtcggctcccgtggcgggcgcgtcctcctccttagccccacccagctccgcctcctcgtgctagagcccatgcttggtcgccgccagtacatcccggtgccaccggcgcccaagtacaggccgtcatacttcagcaacgcgcaacaccgttccaaccgaggtgcccgcactggcccgcgcctcgtcgcacgatcaccagcgctccctcgggctcgcttgaagagcagagagagaaagagagaaagaatgagatag

SEQ ID NO: 50812 - DNA, 886 bp, Oryza sativa
  Clone ID: PAT_MRT4530_53264C.1
cgcttacaatgcagttttctctttcctctttactttcttcaataaaaagaaggaaaaatggaaagatgagcttcgacatcgccggccgcgtcaccgggttcggcaacccggactgggcgaggacccacgcgcccgccgccgccacttcccccgtcgtcctcgctgcgctcgccgccggccccacagcctcggcaccactatttcttggccgcaacaacgcagcatctatggggagaacgcgcgcgacggcacgccgaccaacccatgcgcccccggcagtgtccccggcggatcctccagtggctccgccgtcgccgtcgccgtcgccgccaacctcgccaacccgggcgtcgtgctgcgcgccatgctcgccaagaaggaggagctggccgcggccggcaacattgggtccgatccctacaagaggcggcggatcggggccgacatagggcacggtggcgtggggactggcggcgacatggccgagatggcgcagagcagaggcaacccggacttgaagggggcaatgggcagccgaggtacacggcggcagtcgcactggcgttcgtggcggcgagcctcgggaagggagggtggcgcggcggtggaggggggaggtgggtggcggcgctgttccggcgtgggtcggtggagaggtcgtcgctgcagcgggtgttcggcgacgccacgctgcgtgacaccgtcgcgccgctgcttcgccttccgcctccgcgacgtctgcgccgcgacgtgcgccggcggggccaccgccacagccgtccgctccgtcgacgggcgcacggccatcgccgcggcgtcggccggggtggcggccatgggcaaccccaccgccgccgccatcacccaagtcctccacaacaagtag

SEQ ID NO: 50813 - DNA, 246 bp, Oryza sativa
  Clone ID: PAT_MRT4530_53265C.1
atgggtccttatgattctcaaagaatgatgaggggcaaggctgatacctcgcaggtgatgctatcaactgtgaagaggcttcgaggcaagatctacaaacgtctgcctcggctcgctaccaaactccctcttcaaagtattgctttaaagttcctcatgaagacagagaaccagctgactactataactccccatctcatccctgctgctgatccgtggtaccatttctctatggggaagtgttga

SEQ ID NO: 50814 - DNA, 348 bp, Oryza sativa
  Clone ID: PAT_MRT4530_53266C.1
tcgattctttattacattcaataccatctccacaggagtaccatacaaggacgcgtcgaggctccaaggacgactacatagacagcagctgtttgatctcaatagccagcacgccatgcagccattacaggcaggatgtcagcaactgctggtacaacttcagcgtgcctggcaatcctatcctatcacctggaactatacatactactcacaaagagtctggatagatggaaggaggcatatccaaacactaataccatggcagatatcatgccgggctctaacatatgtgactagactgaatacggggattcatagcctttaagatgactggacctaagaaattgt

SEQ ID NO: 50815 - DNA, 984 bp, Oryza sativa
  Clone ID: PAT_MRT4530_53267C.1
gccgcgaaacgaggcaatggcgtcggggtcttccagttccaacgacgccgccgccgacctcaccgtcctcgtcgacgacttctacttctccgtcctctcccacggccgcaacgacgacgacgactccgccgatggagacgacggcgagctcttcccgatatccgacgagaagtacgcctccgagctgcagctccaggaggtgatcatgtcgtcctccgtggcggccaccacggcgcgctcctcgtcggcgccggttatcttcataggtgagtgctcctcctcccacgccgcgtcgtcgtcgtctcggttgacctcgatccccgccgccgccgcgacgacgctcgtcttctgcaagatctgcatggacgccgtgccgccgtccgccgcgcaccgcgcgagccgcgggtgcgaccacgccttctgcgcggcgtgcctcgcgggctacgtcggcgccaagatccaggagaggatcgccgacgtccggtgccccgaggagcggtgccgcggcgcgctcgacccggagctctgccaggggatcctcccgcgggaggtgttcgaccggtggggcgcggcgctgtgcgaggccatggtgctcgccgccccgagggcgtactgcccgttcaaggactgctcggcgatgatgctggacgacgccggcgaggccgtcaccgagtcggagtgcccgagctgccggcgcctcttctgcgcgcagtgcgccgtgccgtggcacgccggcgtcgactgcgcggcgtacaagaagctcggcaagggggacaggggcaaggaggacctgctggtggtggagatggccaaggggaagaagtggaagaggtgccccaagtgcaagtacttcgtggagaagtcccaaggttgcctgcacatcacctgcaggtgcggctttgaattctgctatggatgtgggagacagtggcagctgatacatgacggctgctgctccctaatgacacaacaagctggagaagt

SEQ ID NO: 50816 - DNA, 1437 bp, Oryza sativa
  Clone ID: PAT_MRT4530_53268C.1
tttttttttttttttttgtctaaagggtattgccatttgccaagctgtacactcattagattatgtcttacaaggatgaataattgaaaatggtgtatttcaaaattcaaaagtacaccagttcttaatgtaccaattctctatgtagtgtaactgaacttgcatgagctttcccagcttgcatgattttgtcgcaaagggaaatgccttttgctccagaaagaaaaaaaaatagcagtagtataatctaacgcaaatggaaagttgagcacacgatctgcactggctgttaaaaaccaccgtgttacaggacgggtatgtgcaaaggcatctttgccggaatgtccatgtatatgcaggcattttgcttcagataaatcttgtcaaacttctgaggggtctgccctctccagcacaaagatgtttgccttgtcatctcttcctatccgtagagattcatcaacgtatctgaccaaaatgttgaggagaactctggaatctggatgcaaattgggttactctgctgctatacatgtgctacccgaaattattggtgttaaaagcatccacaccacttctggaaagaaaaaatgtagcgtagggaaactagtgatttgtagcagagattgtaaaattagaaaaacagcgaagaacaaaacagtttcacataagccgaaaaggatacgttatctctagccagccttctgggttgaatatagcaaggagcatatcatagttcttctggaaaatattcatcagctgatcaggagtgatggtcgaactatcaagcgtgatatcaacctttgttttagtagttatcttgtacgaagcttcaatagtaagttggccagataatatcttcaacgcccttgcactgaattttatcacatttaccgccttttcctctttgacatcaatcatctggaagaaatctcctaagctgatgaaatctctcagtcccaactttgtcctcttcttccccagtatcgaaatcgtgctatagacgagcctccagcatccatccaccttgtcctgcagcttgtcggttggctccggcgttgggttcttggactcgaggagctccaccagtgcgtgaatctccgaccttttctcggaggtcatcccgaatatccctctgttcatgccttccagagcggcgtagagcgcgtccttggcgtcgccgagggcggcctcgtacgagcccaccgcccgcgcctgtggctggggctgggacaagccgtgctcgggaggcaccgccgccgacgccgcgcgtcgccgtgggccggggcggcagcgcgaggcgaagaggaagagccccctcctcccgctcgtgctcgtcgtcgtcgtggtggcaatgccgcagcgcgcgcggtgcgccggggacgacggacggaggaagggggaagggaggaggaggaggacggaagctgccgccat

SEQ ID NO: 50817 - DNA, 544 bp, Oryza sativa
  Clone ID: PAT_MRT4530_53269C.1
tttcctccttctcccttcttcctcctcatcctgtcgccgccgtcccctggagggcggcaaaccctagatctcgccgtggcgaggcgacatggaagcgccgtcggcaaaacctagatctcgccgtgccacgcatggatatatggtcctggaccgcatagtccgttgctggagcggagttggaggggacgacgaccccacggcgtcggagatcgcctacacctgcagcggccaccccatccgcgtctccctccgcgtcgccgacccccccgccgtctcccgcctctacgtccaccgccccggctggccgcgcgtctacgacctgggcgacgccgaggtcatcgccgcccaccgcggctccatcctcctctcggcgcgcgtccctttcgccgacctcgacaccatcgcgccgggccaattccccctggactacttcgtctacacggccaggcccggcgaggggttgcggccgtcgctcacgcggctgcccccttgcttcatcggcggattctcctccccgaggtcgaccgccacttcaagccgcacc

SEQ ID NO: 50818 - DNA, 429 bp, Oryza sativa
  Clone ID: PAT_MRT4530_5326C.1
atggaaaacgcttctataaattaacttaatttgggcttacccatacacgagagaaaccagcaaaagaaaattttaataacaacaatatagttactatagcaaatcataatgcaatctccgagattgcgattacgagacacagcttcggcgtcaggactgaacacgatctgattctgctcacgcgaacgtctccgacagcttgaacaatcccagcctcctcagccggctgctcatcggttttccgcacctcacgtccaccagctccacgccgccgacgccgcggtgccccctcgccgccggcttgttcgccttgccgccgccgccgctcctggcgacgtccgccgtgagcatcggggagctggccggggtggtactagagctccttctgcacgccgtcgcttttgccagccgacgactactccgggctca

SEQ ID NO: 50819 - DNA, 309 bp, Oryza sativa
  Clone ID: PAT_MRT4530_53270C.1
atgtttcaagttttgcacccgtgcgccgtttacaaagcaaatgctcacttgctacgctcacatgctttgccttctccgaggtctccgatccgagaccacgccttccttcaagctgacacttgcttctcctcgcaggatgatgatgtgctcagcttgctagagcggcaccttgatcccttgattcatgaggcttctgtgcagcactccatctactcgcctgactttgactcccagcgtatttcctcccctgttttcactacttcctttgcagctcagggaggctctgatgctgatcagggggcgaagtaa

SEQ ID NO: 50820 - DNA, 156 bp, Oryza sativa
  unsure (1)..(156): unsure at all n locations
  Clone ID: PAT_MRT4530_53271C.1
cttgctacacgaatactcctacttttctactcgtacatctgcctctgccctctcttagctggcactactcccaacccacgcctactacgnctgacttacgcgaccatcgaatagcggagcagcgcagcggaggaaaccctagcgcagcagcaagcc

SEQ ID NO: 50821 - DNA, 580 bp, Oryza sativa
  Clone ID: PAT_MRT4530_53272C.1
gcacgagaaaaaagctgaacctctctctactctgatcagacaacgccacaccaccggttccattgagtgctctcctcctcctcctcctcttctccaatggagaccaacgggtgggaccagtacagtaaggcatccatctccttcgtttctcttctgccgtccgactacaaactagggttctaggcactcaattttgctttggttttgctcaattttaagggggcaggtgagatggcgagtagcttggagaagataaagaaacagctcacatcggcatccgggaggcacctccttcagggccctcttctcaagcgatctgaaacactgagaaaatggaatgagcggtgggtaattttagacccaactactgggacaatggaatacaagataaagagaacagatgtagctacaaagggcacactaattttcgattcaaccagcacaatctcattgtcacctcttaattttcatggtctgccaaagtacaacagttgctgtttttatattggaactccagcaaagaaagaatacttcctttgtgctgaaacaccaggtgcagctagagcttgggtatctactt

SEQ ID NO: 50822 - DNA, 1796 bp, Oryza sativa
  Clone ID: PAT_MRT4530_53273C.1
atggataaggcctacattgccgtcttctccattgccatcctcttcttgctcgtcgactacttccgctgtcgccgccgccgcggcagcggcagcaacaatggcgaaaacaaggggatgttgcagctgcctccgagccctccagccatcccgttcttcggccacctccacctcatcgacaagccgttgcacgccgcgctgtcccgcctcgccgagcgccacggcccggtgttctcgctgcgcctcggctcgcgcaacgccgtcgtggtgtcgtcgccggagtgcgccagggagtgcttcacggacaacgatgtgtgcttcgccaaccgcccgcagttcccctcgcagatgcccgcgacgttctacggcgccgggttcggcttcgccaactacggcgcgcactggcgcaacctccgccgcatcgccaccgtgcacctcctctccgcgcaccgcgtcaggggcatggccggcgtcgtctccggcgagatccgccccatggtgcagaggatgtaccgcgccgccgccgccgccggcgtcggcgttgcgcgcgtccagctgaagcggaggctgttcgagctctcgctcagcgtcctcatggaagccatagcgcagaccaagacgacgcggccagaggcggacgacgcggacacggacatgtccgtggaggcccaggagttcaagaatgtcctcgacgagctcaacccgcttctcggcgcggccaacctgtgggattacttgccggcgctccgggtgttcgacgtgctcggcgtgaagaggaagatcgcgacgctggccaacaggagggacgcgttcgtgcgccggctgatcgacgcggagcggcagaggatggacaacggtgtcgacggcggcgatgatggcgagaagaagagcgtgatctccgtgctgcttagtctgcaaaagactgagccagaggtctacaaggatatagtgatcgtgaatctttgtgcggcattatttgctgctggaacagagactacagcaatgacaatagaatgggcaatgtcgcttctgctgaatcatcccaagatactcaagaaagcaaaggcagaaatagacgcatccgtcgggaactctcgcctgatcaatggagacgacatgcctcatcttagctatctccagtgcatcatcaacgagacgcttcgtctataccctgtagcaccactgttgatccctcacgaatcatccgcagattgtaaggttaatggctatcacattccaagtggaacgatgctgcttgtcaatgtgatcgccatccaaagagatccaatggtttggaaagagccaaatgagtttaagccagagaggttcgaaaacggcgagtccgagggattgttcatgataccgtttgggatggggagacggaagtgtccgggagagacgatggctttgcagacaattgggttggttttgggggctctgatccagtgcttcgattgggacagagtcgatggcgccgaggttgatatgacgcaaggcagtggactgaccaaccctagggctgtcccgttggaggccatgtgcaaaccacgcgaagctatgtctgatgtttttcgggaactcttgtgaagcatcatggaagctggggcggatccaccaggtaggcttcatcaggctctagcctacccttcaatttttgcaaaaaaatatcaactacataggatatctttcataactgctgttggaggaagacaagaagaggtcgggcgtcaggaggaagatgaacaggagccccatgggagcgatctgattgtggagagggtgaagcggtatgcattaaa

SEQ ID NO: 50823 - DNA, 2526 bp, Oryza sativa
  Clone ID: PAT_MRT4530_53274C.1
ctgtacccccgtggtacccctccgcaaataccggattcgacccaccacgccccctttttcccgcccgcgcggcaccaaccccaaccccagcaagaaccccccctggcgcacgtttccccaaccacgcgcagccgcagccgctgcagcttcgactcctctccaatctccaccaccacaatctcctcagatccaaacccacacgcactctcccccgcttctgctggttttccgccatgccgccgccgaggctgccgtgcctggcggcgttcctggcgctggcgctggtggtggtggtgtgcgcggctgagccggacgcggacagggcggcgctgctcgacttcctcgcggggctgggcggcggcagggggcgcatcaactgggcgtcgtccccgcgggtctgcggcaactggacgggggtcacctgcagcggcgacgggtcgcgcgtcgtggcgctccgcctcccgggcctcggcctctccggccccgtgccgcggggcacgctcggcaggctcaccgcgctgcaggtgctcagcctccgcgccaacagcctctccggcgagttcccggaggagctcctctcactcgcgtcgctcacggggctgcacctccagctcaacgccttctccggcgcgctcccgccggagctcgcgcggctccgggccctgcaggtgctcgacctctcgttcaacgggttcaatggcaccctccccgccgcgctctccaacctcacccagctcgtcgcgctcaacctctccaacaactccctctccggccgcgtcccggacctcggcctcccggcgctccagttcttgaatctgtccaacaaccatctcgacggccccgtgcccacctcgttgctgaggttcaacgacaccgcgttcgccgggaacaacgtgacgcggccggcgtcggcgtcgccagcggggacgccgccctcggggtctcctgcggcggccggcgcgccggcgaagaggcgggtgcggctcagccaggcggccatcctcgccattgtcgtcggcgggtgcgtcgcggtgtccgcggtcatcgccgtcttcctgattgcgttctgcaacaggagcggcggcggcggtgtttgtcttaccaaggtagggaactaggggaaatgaatcctgatgttttggagcagtactgcttacccgcaatgatgatgagtcattttgtcgtaagagattaggatcgtgttcttcgagggcccggcattggcgttcgatttggaggacctgctccgcgcttccgccgaggttcttgggaagggcgcgttcggcacggcgtaccgggcggtgctggaggacgccaccacggtggtggtgaagaggctcaaggaggtgagcgccgggcgccgcgacttcgagcagcagatggagctcgtcggccggattcggcatgccaatgtggcggagctccgggcatactactactccaaggacgagaagctgcttgtctacgatttctatagccggggaagcgtatccaacatgcttcacgtgcctatatgcagccatgtgaaattagaaccttctaaatttatattccttgttttggatttctgtcttaaacttgccatgctcattgagaatgagctgattggaaagagaggggaggacagaacacctttgaactgggaaaccagggtaaggatagccctgggagcagcaagagggattgcacacattcacactgagaacaatgggaaatttgttcacggcaacatcaaggcctcaaatgtcttcctgaacaaccagcaatatggctgtgtctccgacctcggcttggcatcgctgatgaacccaatcaccgcaaggtcccgttctctgggatattgtgcaccagaggtcacagattcgaggaaagcatcgcaatgttcagatgtctacagctttggtgtcttcatacttgagctcctgacgcgtgggcgatcgcgtgggcagatcactggtgggggcaatgaggttgttcaccttgtcagatgggtgcaatctgttgtccgggaggagtggactgccgaggtgtttgacgtcgagctgatgaggtaccccaacatcgaggaggagatggtggagatgctccagatcgccatggcatgcgtctcaaggaccccagaacggcggcctaagatgtcggacgtggtgaggatgcttgaagatgtgcggaggaccgataccgggacgcggacctcgacggaggcatccactccggtggtggatgttcagaacaaggcagagagctcatctgccgctcactgaacctcactcgttggaagctgccccctagtttatcatgttgtttgtcttaccaggtagggaactaggggaatgaatcctgtgttttgacagtactgcttgcctgcatgatgatgattcttttgtcgtaagagattacatgttacaaaattgtaacgccttgtggacagagcttgcttattcagcatttgctcactgctgatctgtaagcaaagaacagcacctgctctctgaattattcttggatagtattattaacttcttc

SEQ ID NO: 50824 - DNA, 421 bp, Oryza sativa
  Clone ID: PAT_MRT4530_53275C.1
cttctaaaattacacatttttttgattttcttaaacaaatttcaaaaactttcggtgtccagtaccaaaattctccaaaaaatctcacatcacggtttagcggccaatctgctcctatttcagactgaacttagctggccttattgtagctcacacaaccattgccattaccagtatataaatcctgcagaaaatcggggaaagaaaaattagaactaaaatacagggtccagagatggaggtgagcttcgctacagatactcccaattccccccttatatgcgccgcattctccttatgccagggcctacatgaccgaaccatttcacaaagctggttcaagattgggtcgtacccggtgccggatactgctttttggctagagcattgtcccgctgaaactcttggcccaaatatgcag

SEQ ID NO: 50825 - DNA, 192 bp, Oryza sativa
  Clone ID: PAT_MRT4530_53276C.1
atggcgacgagggcaatgggaggcagatctgatggtggtatgggaggaggctggtcgcggtggcgcaataaagagtgtggcggcggtgaccctcccactcccctctcccatatccagcctccagtgagaaatcaatgtagtgatcttggatgtcaatttgaatatggattggatttgaatctagctttctag

SEQ ID NO: 50826 - DNA, 2595 bp, Oryza sativa
  Clone ID: PAT_MRT4530_53277C.1
tcaaaacaggtacttggagatgtagtacttattagagctgggagctgcagttctgttcctgtcacccagccagtgctgcatgtgcacgccaatggcgtccaggtacaggccgctccggccatggaacccgaccaccttcccttccgtcgtcgccgagctgaagtaggtcccgacctcctcgccgaacggcccgtacttcccccggttgctgacgagagtgatcgacctcagcactctgggcccttcatcctggcaggtgttgtagtagccgtatatgcagttcaggacctcgtgtgggtagtccagcttgattctgtgtgttatctggccaccgttgccgtgccttgtggaccagatggattggccactcctgtcgtactcaatctgcacagaaccgatgaaatcggctctcatgatgtagatttgcttcactcctgtgtagacaccatcgtcccatggcttgcctccctcgccaccccaaggccctggccctactggtattggttctttcaccacaccatatgtaacctcatctcctatttccctctgtgctactgcaagcatatcggcgtgccgagacgggctcgtttcggtcaatgctctgtcagctctctgtgacaacaccttgccttcaaggacatggactccaatgctgtcgatgtaccacccatccctgccatggaatcctactatcctaccttcggtcaggcagctggagaagaacgtgccagtctcatccccgaaaggaccatggctcttcttcgtcgtgtggaatgtcagagacttgatcaccgttgatcccatgatcatcgtcgaactgaagtaaccagttatgtgagttaagatctctgatggaaaatcgaatactaccttctcagcccttgctgccccactggatccacgcttatcaccccatatagcctgcccatttcgatcatagaggaccttcatcgtcgatatacccaatcctcgctttaaattgatctgtcgaacaccagtgtatataccgtcgtcgaatatggtgccgccatttccaccccagggaccaaatctcaccggagtgcttattgtcatggtcccattatccgagtagaaactaggcagtgacaccatcttgttccagagagtagcatcctgtgattggttaggatactgttccttgggattgttgctagtcaggacactgtagctgtcacctctgtctctgacggcaagaaccatgtcatacccagcattgctatctgcgtacctgttgccattcttgtcatgaggtctcgtgatgctcctgagagctgaaggagcattggacgacggagtggcgttcttctccttcttgaaatggcagccgattgagtcgagaaaccacccggatttgccatggaagccgatgaccttaccggtgaccgccactgggagcgagaagggcgtcccttcctcggagccgaaaggcccgtacttggagaggttgctcctgaatgttagtgatcttacgacgatgcagcctcccaatgatccgtagtagccactgacagaggtgaggatttcttgagggtagtcgagtttcacctgatcagttttggtgcctccatcacctccatgcttctctgaccagactgactttcctttcaggtcatactcgatcttgatggaatcaatggctgcaccatgagtaatcacgacctgcctcaccgtggagtgcacgccgtcgtcccaaagggttcctcccaaccctccccacggcccaacgagtatcgggttcttcccgttgaatcctttaaagctcaatagtttgtagagaccaagcatcaggcatagtaataagtgcactgcagattggttcaaactgacgatttccttgttcagaaaggccttcaaagaaaatggcgggtaagaatccttgccaacttcctgctgtaggtattgtctaaccacagttgcttgctgtatcactctctccaatgatgaatatgctggtcgattagcatgtgcaagaacagcccgattcaagctatctgcaacattctgcctgtactctgggcttagtagatgaaacataggtgacttctcaggctcttcataagctaggagggccataaagtcctctagtttctcaacgtacttgggcactttcccaaatggcgtcaactttttctgaccaaactcaagagcttctgtgcattttctagaacgaactaactcaatgaagtgaagacttaaaagatcaaaatgcaaatccatatcattctctagcaagttaggtgccaactcttctgtcaggtctatagccttcagggcattgccttccaacacaaaactaaaaatcgctttacgcttatctacatctacagtgtaatcaacaggcagttccaaaccagtgctggataagaatgtctcagcagtctccttaaaacagttgtgcataagataagacaacactatgttgcggacatcgttatcactcacggactcatcgtggaagtaccgatttttttgcactgcaagcaccttatcaacaaattcccgatctttcttcaccaaaagcccttcaactctaccattgtctttgtgacaagccccgagctccaccgcagccat

SEQ ID NO: 50827 - DNA, 1159 bp, Oryza sativa
  Clone ID: PAT_MRT4530_53278C.1
gtagagaccaagcatcaggcatagtaataagtgcactgcagattggttcaaactgacgatatctctgcacgaacatacagaatagctcaaggttctgatatgtacaactttcgatggcgtcaacgggtaaaggggaaatggggaactgtaaatgaggaaacaacagttatacaacattcctctttcgatgcagatgatattgttggtacaccactgatgatatcgtttaatccagaaggcggttctctgaataatatgtgcatgagcatcccgtcgcttgctttcacgcaactgttttacacattctgaagggaactctggtggccataggactggagccctggaggtgatctttctaacgattgattggttgcaccttacttgttcagaaaggccttcaaagaaaatggcgggtaagaatccttgccaacttcctgctgtaggtattgtctaaccacagttgcttgctgtatcactctctccaatgatgaatatgctggtcgattagcatgtgcaagaacagcccgattcaagctatctgcaacattctgcctgtactctgggcttagtagatgaaacataggtgacttctcaggctcttcataagctaggagggccataaagtcctctagtttctcaacgtacttgggcactttcccaaatggcgtcaactttttctgaccaaactcaagagcttctgtgcattttctagaacgaactaactcaatgaagtgaagacttaaaagatcaaaatgcaaatccatatcattctctagcaagttaggtgccaactcttctgtcaggtctatagccttcagggcattgccttccaacacaaaactaaaaatcgctttacgcttatctacatctacagtgtaatcaacaggcagttccaaaccagtgctggataagaatgtctcagcagtctccttaaaacagttgtgcataagataagacaacactatgttgcggacatcgttatcactcacggactcatcgtggaagtaccgatttttttgcactgcaagcaccttatcaacaaattcccgatctttcttcaccaaaagccctagcatgagcacccccaaacaaccaaactaaccatcgcatcctccccactaaacggatccaacgacgttctcgtagaggcggggatcca

SEQ ID NO: 50828 - DNA, 672 bp, Oryza sativa
  Clone ID: PAT_MRT4530_53279C.1
cgcagtcgcccagtcattgtcccaccgcctccgccgcagccgccatccttgtcctgctgctgcggtcgctgtcagctcgtcctcatcctcccgcggcaaccgccgcgccgcagccgctgtcctcgcccgcatccgctgcgtcatggccaccatcctcgctcgcatccaccacgccgtgccctgcatcccttccgccgtcgtcgcccgcatctgccactccacggtcaccgtcctcgtcctcagtggctgccgtcgtcctcgcccgcatccgtcgcgccacggccgttgtcctcgtccatcccaccgtcctcacccacatccatcgcgccccgccgtccccgtgctcatccatcccctcgtccttgcacgcgcccgtcccaccaccctcgtccacgtctgcagcggccaccgtccccgtcgccgtctcctgcgcccatcccactttttctcccgcgggtgccgtccctctcacgcgttcgtcgccctcgtcctccgtggctgccgtcaccgtgtgcactgcagctgccggcgtgttcctcgccccgggctcgccccagccgcatccgtgcatttggctgggacactgcctcgttatcaccgcctcaccggcaaagagaaagctgaaagggatggatgggagcaagcaagagaatagaggatggtggggcccat

SEQ ID NO: 50829 - DNA, 268 bp, Oryza sativa
  Clone ID: PAT_MRT4530_5327C.1
gaacataaataattaatttgtattgtctcaattaattacgtagttaatttgtattgtacatggaacccatgggaactgcttggtttgttgggaccgagtgtgtcggcccctatctttgggagaacttgaaattcttaatcttgaaaagagggggtgggctatgaacatgagattgttttggttaaaaaaaacagacttttaatggccttgggctggttttatccatcaaatactcagtttttagatgtttcaaatctacacgttgaat

SEQ ID NO: 50830 - DNA, 440 bp, Oryza sativa
  Clone ID: PAT_MRT4530_53280C.1
gcgttcgtttcacttcaaaacacctcctttaatgataacctgagggatgcttgagagtcatgaggcacaaagagccaattttatagattatacagagagaaatcagagccaccaaactagaagagcaccttcactgatgaagaagatatgatgagggagggagatgcatgggcagcacttctaagaagcaagctgcatgggctcgcaaagaggacccggagactggaagaggtgaacaagcaatagatacattaagtaaggcgtcgagaaggtcaagtatgctcccttgaaggcccggatactgatagaaagatgctgtggatgaagctggatgagttttccgacaaaagacacgacctcataaaagctgaacatgttgacccaatgccagctgacagaggccgtgatctgatcaccacaacattttacaagaagcgccc

SEQ ID NO: 50831 - DNA, 516 bp, Oryza sativa
  Clone ID: PAT_MRT4530_53281C.1
atggggaacagcctgcgctgctgcctggcctgcatgctcccctgcggcgccctcgacgtcgtccgcgtcgtgcacctcagcggccgcgtcgacgagttcaccagctgcccgctcaccgcggccgacgtcctcgccgcgcaccccaaccacgcgctcaccgccgcctggtcgccgggcggcgccggcgccggcggcgcgccctgcaggaagatcgtcatcgtgtccccggactccgagctcaagcgcggccgcatctacttcctcatcccctccgcgtgctccgcgcccgccgccgacaagatgatgacccgccggaagaagaagaagcgctgccacggcaacggcaatggcaagggcggctccgccgccgcggcgagcaccgcggagcaggacaactacctgatggagctgctgtccgagaagcgggggacgagccaccgccggcggcgcagcggcgcccgcgccggtgtgtggcggccgcagctggagagcatagcggaggagccatcagactag

SEQ ID NO: 50832 - DNA, 1174 bp, Oryza sativa
  unsure (1)..(1174): unsure at all n locations
  Clone ID: PAT_MRT4530_53282C.1
cgccggtgctcggcccttccctttctgtcagcagctatcacaattcacaagtgtagactgtaggatggccacgctctcttcctgcagccgcctgagcaccggcggcggcgccgtccagcgccgtccccggcggccggcaagcgctgcgaccatcacctgccaccggagctcctcctcctcctcgtcggccagggtagtccgcacaggcgccgccgcggcgcctgccgcggccacggcgcccgccgtgccgcagaccaacgagtgctcgcttccgacatgggcggagttcgagctgggcaaggcgccggtctactggaagaccatgaacggtcttcctccatcggctggagagggcctgatccttttctacaacccggcagcgaccaagatgacccccaacgctcagtttggcatcgcgtttaatggtggttttaaccagccgatcatgtgcggtggtgagccgaggcagatgacgctgcaagagaggggatcagctgatcctcccatatacaccatcaggatacgtgtgccgcagcatgccatgaccctcgtcttctccttcacaaacggggtggattgggatggaccgtacaccctcaagttcagggtccccaagccatggctcaacaagcccttgagcttcttcaacgagggtctagcagacgaactgaacagagaaggggcatgcgacagagccatcttcccagacgaaaacgttgtcatcacaagctgcgagatgggcagctactacgaagaggggggagatcgctgcaagctggacattgtgtcagggtgcatggatccaaactcgcacatgtttgatccactcgccaccgtggatgacggatcatgcccaatggattccgattccgaggaatgaactgaactacagtctcagcgagttttattagcaaggagaagctgtaattagtggccactgttgttcaatgtaaaaagaaagaagcgacacggtatgatgtacaagaaagcacagatgtgtgatagaatggtattagggaatgatgtgtgctgcatttggtgaaaagaatacacaactgtaggcctcatacaaatgtggttgttaatttgtgacagaactactctgaatttaatagagatcaacctataccgcggtgcatgcgnacgtcgatagctctataaaatagtgtcgcct

SEQ ID NO: 50833 - DNA, 1344 bp, Oryza sativa
  Clone ID: PAT_MRT4530_53283C.1
atggagaaggggcaggagataggagcgtcagccggcgagaaaggttcagagcagcacgccattgacgtccgccccggcgagcatggcgccatcggagtcgtcgccggcgccgctgcagaagcaccggagaaggagagattggctgttgttgaagaggagcccaggaagaaaagcaagagggttgcagctcttgatgcctttagagggctaaccattgtgctaatgatactggtggatgatgccggtggggcttacgagcggatggaccattcaccatggaacggatgcaccttggcagatttcgtcatgcccttcttcctcttcatcgtcggcgtcgcaatcgccttcgcgttgaagagagttccaaagttgggtgcagctgtgaagaagatcaccatcagaacactgaaaatgctcttctggggcctgctactgcaaggtggatattcacatgcaccggatgacctgtcttatggggtggatatgaagaagataagatggtgtggcatcctccagaggatagctttggtgtacttcgtggttgctctgatagaggcattcaccacaaaagttcggcctacgacagtgcggtccggtccatatgcaatcttccacgcataccgatggcaatggctaggcggttttgtcgcgttattcatttacatggtcaccacattctctctatatgtcccggattggagctatgtctaccacaacgatggcgatgttaatgacgggaagcaatttacggtactacttgcagttttccctgatcatgtacaatgtggtgtgagaggtcatctggaccctgcctgcaacgcagttggttatgttgatagggtggtttggggaatcaatcatctctacacgcagccagtttggatccgatcaaagttcaatatcatcgattctgtcagggacaattgggatccattatggacatgttctcgttcatttcaagccattccaatcaacaagcaactctacagcttaagctatgtctgcttcacggctggtgcagctggagtagttctttcagctttctacatattgattgatgtctggggactaagaacaccattcttgttcctggagtggattggcatgaatgccatgcttgtgtttgttctagcagcacaggcaatatttccagcatttgtcaatggatggtactatgattcaccaggcaatactcttgttagctggatccagaagcatgtgtttatcaatgtatggcactcacaaaggttgggaacactgctgtatgtcatatttggggagattgtcttctggggtgttgtgtcaggcatcttgcacaagctgggaatttattggaaactatga

SEQ ID NO: 50834 - DNA, 246 bp, Oryza sativa
  Clone ID: PAT_MRT4530_53284C.1
atggcgcctgcgactgcgactgatgagatcagtcctgatcaacagatacccttcatagttcaggcatactacaccaatactgctaagagagaatacaactacagaccaacagtacgtaatactactagtgtagctgccgtagaagatcagatgcttccattattcctgacagttgaacagaaaagaagagcctattctctgaaccagatttttgtattcttcacttgtcctgctctctctggatag

SEQ ID NO: 50835 - DNA, 2760 bp, Oryza sativa
  Clone ID: PAT_MRT4530_53285C.1
atggaggtggtcgacccgctccaggagcctcgggaaggctcttcttcagacgatgacttcgtacctcctcaccgccgcacccataacaccttcctcggtcgcatcgatgcaacggggctggggccggcgcttggtggcagacatgggttctgtgctggcagcccccacctcctgggatgcctcgccttcaacgccttcgccgccccggcatgcatggttgtggccccgtctaccagggagatgggtctccaaagagagctttttcctgaggagccattaatgttgacacctacttcgtcatcaccggtgcgccctgacgttgatgcttcgtcggtcctggtgcccgctgagcgggatggagattttttcaacttgccgggaccacgcctcgctccctcttttgggctggctttgctcgtccctggcccattggctgtctaccgccgccgcagggagctcactggcccgcgggcctttcctctttataggccggggctagaggagtgggctgacccacgatcgctccctgccttggctgatctggtgggaccaccgcctttgtcacttttcgggaagcgtccccaccagcctcggcaccgacaccgcccgtcctcgtacactccaaggaggagcgagcgccttgccgcccagaatagtgggaaacatatccacatgatcaccagagcacagcgggtggtgatgaagagactcggcatcatcgaggatgagaacaaggcggacgagcgggatatcctccggtacctcgagctgttcaaggctcccctagcgccatctcatgtacaggcgctggcggcgctctgcagtgtggcggagtctaaattagatgttctagatcggtccctgtcgattcagtcgtgtggacatgccctggatggtgttgatttcattcctgctgatggaacaagggggggctgtttacggcttggcggcatgatcgcttctctgtttcctgtcttcacaagggacggtggtcgctttctctttgtttctccaacctggaagctagtggtcggggcctggtgcgtggtcggagatttcaacctcttggccacggacggtgataaaaacaatgggaatgcgtgggaggcagcgccggctggctccaatgcactcagcagccttcatttcaagctgcgtgcaactgctgctgccttacggtcctggggagccaggcgtatcagtgagctccgtcagcaactcgcgatcgcccatgaagacagcatcattgcaacaactgaagaggacaagcttcaggctgcgtatgattattttctcaaaattcttggcatgccttgccccccgtcggcatcccttgccttcgatgcgatcggcttggcggtgcatgatttctctgatttggagcgcgacattactgaagacgaggcgaagaaggcgatcttggaaatgtcgagcgacaaggcaccgggccggatggctttagtgccaccttctacaagaaatggggtggtcaaaaacctccatcgttctaaaacgccagccatgctcttgaagattgatattgcaaaggcgtttgatactgtttcctgggaattccttctggatctgctccggcacctgggttttggggtccgatggagggattgcatcgcggccttgctcttcaccgcctctacttctgtcatcatcaacggctcctctggcaagaggatcagggcattaggaagcaccaccttgttcaatggccagttatctgcactcctaaggaacaggggggtctgggataaactccgtcgtccgttcgagtatggtggactgaggatcagaaatcttcgtctgatgggcattgctctccgtgctaggtggtcctggggaatggataagatgctctattttggaaagataattggttgccggatggtggttcagtggaaaacagaggacctatcctctttatctttcgttaagaatagtggaatgactgtggcggctgctctccgtaataattcctgggtctcagatatcagagacggcctctcggttcaagcattgggcgaatatctagatctgtgggatgtgatcgctggaatctctcttgaccctgctagtcgggatgagatgatatggaaggcagctccggatgatactcgtattactacccttcgagtagagatcatcagtttccagcagatcaaaaacgaatcaatcggtgcagcttgtccaactatcgaggttaatctcatctttgagtcatttgcattcgcttatctgagcgataagccagtaaccctgacaaacaaattcttcaaacacccgaacggaaatatcatcgaaggatttgggattgtgcaagatgtgcctgtctactttgaagacagggaggcggtcttggatttccacgtctttgaaatccgagatattgtcattctaatcgggctttccattgagcaactcctcataaacacgctccgattagatagcctcaagataactttgggagggaatgaattctcagttccattctcgcgggcaagccagcccaaggcccagctgccctccacaccccaaaaccctaggaggtccccctccccacctccccctagccgtcatttggtaccttggggcgcccacctccccttctggtcgacctcccccatgcctgccctgctgcagatctgggaagaagaagggaaggagaagaaagggaaagaaggaagcggaggaaatcgaggtgaagatggaaatgtggggtttgattacccgctgcccatggaggcttag

SEQ ID NO: 50836 - DNA, 271 bp, Oryza sativa
  Clone ID: PAT_MRT4530_53286C.1
tttttgttttttttttttttttttttttttttttttttttcattatttgcttaaacaagggggaaaaaaccaaacaacaggaacgccggagcgggcaaacaagcacacagaccaaaaaaaccagggggggaccaggaaacagcaggacactcctttaaaaaaacgtacccgagaaaaccggggtcccaagggcctagagagaaacgacacgggggccacagaaaagcaacccaaaatgacccaaggaaaagcacccggggaaaacaaaaga

SEQ ID NO: 50837 - DNA, 5804 bp, Oryza sativa
  Clone ID: PAT_MRT4530_53287C.1
ctaatcaatctcacagctagaacaaggcgacagtgctaaaggggaggtgtccctgtgaaatttgggtttgctgcttgagcttgatggcatgctgccttgggtacctgaagattgctgtatcgatgatcctgagaagtagcctgctatgaagccatcattctcactcctgatctgcgactgagggatatagctaggcctcgcatttgcttccacttcaaccgtctcgatatcttctgtaagaatggacacgactttcgacatcggtgggcgttgatgaggcaagcccattgtgcaaagaagaatgacgttgatgactcgcatgacctcttcctggttgaattctgtgagttttgggtctaatatttcaagtggctgcttgttctcatgcaaacaccatgcccatccaagtaggtatttcttatcatcctcgacgctatcatcaaagtttggccttcctgcaatgatttccattgccacgattccaaatgcaaaaacatcagctttctccgtgagatggcccatcatggcatactcaggtgcgagataacctagcgtgcctgcaactcctgtgctaacatgagtcatgctgtcattataatgcctagcaagcccaaagtcagagatcttgggattgaggttagcatcaagtaagacattgctggttttgatgtccctgtgcactattcgtgtgctagactcctcgtgaagatatgctaggcctcttgctatgcctacgcatatctcaaagcgggttctccagtctagtttcaagcttgccttgcctaggattgctcgatcaaggctcccgttttccatatattcatagaccaaaagtggggcatcactctcaatgcaacaaccatgcaacttcacaaggtttcgatgttgaactgcagatattgttgcaatttctgtcatgaactcccttttcccttgatgagatgttgcagataactgcttcacggctaccattctcccatcaagtagcttacccttgtaaacaagtccgtaccctcctcttccgagaatgttttgagtactaaagttgtcagtagctgattttatttctccataactaaatacattaggcgttcccactatgctgaggagctcttccatctcgacctctaaccttttacgtttctgtgtccaaacaaaagttcctgtaactgctagaagtcctacaataacagcactgactacaactccaacaaccaaacctcttctaccgctgcttgtattctcaccgttagtcgtgttgtttatgtttagaccaggatcccccgaaaaagagacacttaatgctgagatagatggcccatagaaccctagggtaggaatgcaacaagtgccttttccagcccagaagagatgaatctccatgaaattgtttgtaacgtcagtaaagtattgcctttcaacaggagtatttgatttttcatttgcatatttctttatatcaaagtcctgttctttgcgctctccctgaatgtatatatcgaaaatcctccttcccatgctttgccagatctgtccatctgggaagatctcattcttgagcccaatgccatagtatctcagagaagagggtgacgttctagctgtctggaatagttcactatcaagtgttttgttaaactgatttgaagtgtatataatgtaacttctattaggttcacccatgtagaatttcccagtattgctaacaccccatctcactggccttgtaacgtagtatgatgcaccttgtagattggcaccgtcagattcataaatgaacttatcgtcgcttttaacggatctggaaccaccgcaatctaccgcaaaagaggaatactctggttgaccaaggaaacatggagtatcttgctggagacattctagccctgaaggcaaaatactgctgttagagctatctatcataaagttgttccacaccaaattcaagtccgtgaggttcttaaaatttgagaagtccactgaagtcagcttgtcagatatgttgcagtttcgcagggttaaactactattcaacttgacaagctttgaaagacttgcaggaatggggccttcaattttgtttccttggagcttcagtacttccaaatttgacaagtttccaatataatccggtattttcccagtgaaatcattatctgatgctcgtaatgctctcaggttcttaagcttggaaagggttaatggtaggtccccgcttaaaccacagctatcaatataccttggattagagcttagcgccaacatcgttggcgctgaaacgttatagcttagcgccaaagttaatggcgctgagtccacggtagttccctcaggtaagtcatattcccaatgaatgtcggtaaatatccagtcaagtaattttgatctagattccgtgccattcatgcccgaagcaccaaaatgagacacatcgttcggctggcaattgagggcctccctccccatgcggccgagcctgaagagctcaagcagctgttgaacaagctgccgccgatgtccagtccagggggtgcttctccggtgccggcagcccccacctcctgggatgcctcaccttcgacgacttcgccggtgcgctgcccgttgtcaccggctctgcctcagctctcttccctaggcttggcggctctgggcccaccgtccccacgcgtcattactcacccctcgtcacagccccggcatgcatggttgtggccccgcctgtcagggagatgggtctccaaagagagctttttcctgaggagccattaatgtcgacgcctgcttcgtcgtcaccggtgcgccctgacgtcgatgcgtcatcgctgtctccaccgcgcgatggagcggccatcgatccggaggcgtctgctaccgcggcgggcggccttggccgatctggtgggaccaccgccttcgtcgcttctcgggaagcgtccccgccaaccttgacaccgcccgtccccgtacactccaaggcggagcgagcaccttgccgccatgaatggtgggaaacatatccacacgatcaccagagcacagcgggtggtgatgaagagactcggcgtcatcgaggatgagaacaaagcggacgaacaggatatcctccggtacctcgagctgttcaaggctcccctggcgccatctcatgtacaggcgctggcggcgttctgcagtgtggcggtgccggcggcggcctaaaactgccgcatctgccgcaatgttgaagcttgttgtttctcatgtcttgtactcttttggtgtggaatgtaaggggcctaaaccaccctggcaagatgtcccttgtagcggaagttgttagaacctctagtgcttctattttttgttgtcaggagtctaaattagatgttttagatcggtctctatcgattcagtcgtgtggacatgccctggatggtgttgatttcattcatgctagtggaacaagggagggggcctgtttacggcttggcggcgtgatcacttctctgtttcctgtcttcacaagggacgatggtcgctttctctttgtttctccaacctggaaggtggggcaagttggactctcaccaatgtttatggcccccaattggacagcgacaaattgttgtttctggaggaattgctgctggttgggcagctagtggtcggggcctggtgcgtgattggagatttcaacctcttgggcgcggacggtgataaaaacaatgggaatgtaaatcgatggttgatcagcaagtttaggcacaccattgacgcccttgagctgcgtgaggtgtatctgtttgggcgtcgctatacatggagcaatgagcaagaacgaccgactctaaccaaaatcgataaggtgctaattaacggagattgggaggaaattttccgtgatgctcacctacaggcgctcagctcctctgcctctgatcactgcccctgttgctggcctgcgatcagatgatgcataggccgaggaagttcaagttcaaatcctattgggccaaattggagggtttcgaggatgtggtccgtcaggcgtgggcgctgcgtgcaattgctgctgccttacggtcctggggagccaagcgtatcagtgagctctgtcagcaactcgccattgcccatgaagtagttttccaatcatcggcatcccttgccttcgatgcgattggcttggcggtgcatgatttctctaatttggagcgtgacattactgaagacgaggcgatgaaggcgatcatggaaatgccgagcgacaaggcaccggggccggatggctttagtgccaccttctacaagaaatgttgggaaattatcaagaatgatctggtggcggctcttaacttagcatggaaatccaatttccagcttcttcaccttgttaacacagcctcaattgtcctgctgccaaagaaggaggaaccgaatcaactgtcagattttcggccaattagtttgattcacagcttcgccaagattctcaccaagattttggctttgcgacttgcgccgaggatggatgagctaattgggccgacacagtctgctttcatcaagcgccgaaggatacaggagaattttctatatgtgcaggagggggtggtcaaaaacctccatcgttcgaaaacgccagccatgctcttgaagattgatattgcgaaggtgtttgatactgtttcctgggaattccttcttggtctgctccggcacctgggttttggggtccgatggagggattgcatcgcgaccttgctcttcattgcctccacttctgttctatgccgacgacgcggtgatcttcttccacccctccagacgcgatgcgctgacaatcaattttgtgctcaagctgatgggtgaagcattgggtttggtctctaatctgcttaaaagttcgttaacaccaattcactgctctgatgcgcaagttgatggagtaacatatgtgttgtcctgcccagtcaagttgctgccaattgtttacctcgggtcgccactctccgtcagaaaaccgacaaaggagcaaattcaaccaatgattgacctgcttgcaaaaagcttggctggctggaaacccaagcttttatcccctgatgcccgcctatcgctgatcaaacatgtcctaatggccctacctctttacttcatgttagttttggaacaccctgtctgggcgatcaacgaaatagagaagaaatgccggggatttcattggaaaggtgatgaagaggcggctgggtcgtgtagccttatagcctgggataaactctgtcgtccgttcgagtatggtggattggggatcagaaatcttcatttgatgggcattgctctccgtgctaggtggatatatctggttgcgccgaacgcagccggagcgaccgtgggcgcgtttcgcgccgccggcggataagaagacactgcattgtttcgccatcagttgcaaggtggtcttggggaatggagaagatgctctattttgtaaagacaattggttgccggatggtggttcagtggaaaacagagcacctatcctcttctttttcgttaagaatagtgggatgactgtggcggctgctctccgtaataattcctaggtctcagatatcagaggcggcctctcggttcaggcgttgggcgaatatctagatctgtgggaggtgatcgctggaatctctcgaccctgctagtcgggatgagatgatatggaaggcagctccgagatgaagtgccctattggcaagattatttggaaatcccgtgcaccggcgagatgcaagttctttatgtttctcgccatgcgcaacgcttgc

SEQ ID NO: 50838 - DNA, 4323 bp, Oryza sativa
  Clone ID: PAT_MRT4530_53288C.1
atgagttgggcgctggcgaccctcttctccgcccgggcgcggggagggggggtcctctcctggaccccgcgaatgtcggccatcgagcagaatctgaggggccatgctctcgttgccgttctttctgggcggcaggaggtctccccggccatggtggtggaggagctccgtcgttcctgcggcgtgctccatgacaatgtgtgcgtcgaagtgactagaccctccgattttctcatatccttcgcgcgcgaggaagactgcacggcggttcttgatctctcaggctgtttggctgctgctggggcgaggatcaccttccgtcgctggcaccgtgccattcatgcccgaagcaccaaaatgagacacatcgttcggctggcaattgagggcctccctccccatgcggccgagcctgaagagctcaagcaactgttgaacaaggcggtgaacccttccgccattcccaaggaatttgccctcgacatacctgagccgatgcaagaatggtggaacgagccggagaccgacaatccggatatgatcgaggtgctcttggccgaagggccgccggctccaccgtctgagaagcgttgtctcacgttcgaccttctccttcacatcatggaggtggtcgactcgctccaggagccccgggaaggctcttcttcagacgacaacttcgcacctcctcgccgccgcactcataacaccttcctcggtcgcatcgatggaacggggccggggccggcgcttggtggcggacatcgcttcactggtccgggttctggttcgccccccgctcggccggcggtggtgccaactagcacacctcgatgcattccggagggagtttctgtgctggcgcttgaggcttcatccccagctaagtcaacgactccgctcctagcagcgacggcatcgcctccggctacgacgccgccgccccaggctgcgcctttcctgccgccgatgtcgagtccggggggtacttctctggtgtcggcagcccccacattctgggatgcctcgccttcgacgacttcgccggtgcgctgcccgttgtcaccggctctgcctcagctctcttccccaggcttggcggctctgggcccaccgtccccatgcgtcattactcaccccccgtcagccctggcatgcatggttgtggccccgcctgtcagggagaggggtctccaaagagagctttttcctgaggagccattaatgtcgacgcctgcttcgtcgtcaccggtgcgccctgacgtcgatgcttcatcggtcctggcgcccgctgagcgggatggagattttttcaacttgccgggagcgcgcctcgctccctcttttgtgtcgactttgctcgtccctggcccattggctgtctaccgccgccgccgggagctcactggcccgcgggcctttcctctttttgggctgggggtggaggagtgggctgacccacggtcgctccttgccgacccagtcactctctctccgccgcgcgacccttctcaatctccaccgcacgacaaagcagctggcagcccagaggcggctgttgatgggccacggctgctccccgccagcccagtcactccatcttcaccgcgtgtctctgctctgtctccaccgcgcgatggagtggccatcgatccggaggcgtctgctgccgcgccggcggccttggccgatctgggacggtggtcgctttctctttgtttctccaacctggaaggtggggcaagttggactctcaccaatgtttatggcccccaattggacagtgacattgttgttcctggaggaattgctggtggttgggcagctagtggttggggcctgatgatgcataggccgaggaagttcaagttcgaatcctattgggccaaattggagggtttcgaggttgtggtccgtcaggcgtgggcggcagtgccggccggctccaacgcgctcagcagccttcacttcaagctgcatgcaactgctgctgccttacggtcctggggagccaagcgtatcagtgagctccgtcagcaactcgcgatcgcccatgaagtagttttccaattggacaaggcccaggatgatcgtcttctgtcggctggtgaaagatcattgcgggcatctctgaaaggtcgctgcctcgcgctcacctccctggagcgcattcggctcagacagcgtgcccgcttgcttttcctgaaacatagcggcaccacggctcaattcttccgcctcaaaatcaatgctcgtcgaaggaagaaggcaattccctctatttgtcaggacgacatcattgcaataactaaagaggacaagcttcaggctgcgtatgattattttctcaaaattcttggcacgccttgccccccgtcggcatcccttgccttcgatgcgatcggcttggcagtgcatgatttctctgatttggagcgcgacattactgaagacgaggcgaagaaggcgatcatggaaatgccgagcgacaaggcaccggggccagatggctttagtgccaccttctacaagaaatgttgggaaattatcaagaatgatgtgcgaggagagctttctcctcttgccaatgtacatctaccgctgcgtggctcgctctacgccgacgatgcggtgatcttcttccatccctccagacgcgatgcggtgacaatcaattttgtgctcaagctgatgggtgaagcatcgggtttggtctctaatctgcttaaaagttcgttaacaccaattcactgctctgacgcgcaagttgatgaagtaacggatgtgttgtcctgcccagtcaagttgctgccaattgtttacctcgggttgccactctccgtcagaaaaccgacaaaggagcagattcaaccaatgatggataggcttgcaaaaagcttggctggctggaaacccaagcttttatcccctgatgcccgcctaacgctgatcaaacatgtcctaatggccctatctctttacttcatgtcagttttggaactccctgtctgggcgatcaatgaaatagagaagaaatgccggggattcctttggaaaggtgatgaagaggcggctgggtcgtgtagccttgtagcctgggataaactctgtcgtccgttcgagtatggtggactagggatcaaaaatctttgtctgatgggcattgctcttcgtgctaggtggatctggttgcgccgaacgcagccggagcgaccgtgggcgcgtttcgcgccgccggcggataagaagacactgcattgttttgctatcggctgcaaggtggtcttggggaatggagaagatgctctattttggaaagacaattggttgccggatggtggttcagtggaaaacagagcacctatcctcttctctttcattaagaatagtggaatgactgtggcggctgctctccgtaataattcctgggtctcagatatcagaggcggcctctcggttcaggcgttgggcgaatatctagatctgtgggatgtgatagctggaatctctcttgaccctgctagtcgggatgagatgatatggaaggcagctccggatggcaggatgaagtgcccgcttggcaagattatttggaaatcccgtgcaccggcgagatgcaagttctttatgtttctcgccatgcgcaacgcttgcctcaccgccgacaatctacaacgtcgcggatggagccttgcccagcacatcttcatggactgcgcttacacccagcagatttggggtcaggtgcgcacgcgtctgggcctttcgtgctcttcgccgtcggcggatttcactgattggtggcttacagcacggaaatctgttgctaaggttgaccgcaaaacatttgatgcgggggttatacttgtaacttggttaatttggaaagagcgaaatgtgagggtgttcgatggaatagcggcaacggttcccgtgctttgctcggccatgggggataaatgggagacctggatggctgcaggtcttgttagccccatttgccaccctgtagcaaattttgctgcgatggagaagatgaccgtggagaagacttggaccgacaaggcctccgtggagttcaagagggacctggagaagcgggcgatgaaggagtggacggagagagacttcagagagctgaagagtacagtgaggatcatcgccgttacactcgccctcatcttcatcatcttcctcgtgagcttcttcgtccccatgaccaagaccttccagatcctgtggtggcagtgggggctgctctgtatcctcacctccatcatcaccctctggaggatcgagagggccttgacgccactagcctga

SEQ ID NO: 50839 - DNA, 4367 bp, Oryza sativa
  Clone ID: PAT_MRT4530_53289C.1
atggcggcggcgaaggaggaggaggcgatgatgaggctgctctgcagccacggtggccgcctcgttccgtgcggccccggcggcggcctccggtaccgcctcgccgacgagggtcccgacgaggacctcctggtgtcggtcacctccgacgaggagctcgcccacatgcgcgacgagtacgaccgcctcagggcgacgcggccgtccgcgagcttccgggtgttcgtctccaccgccgttgacgccgccgccggcgtccagcagcggcgccgcccacacccacccgtcgcggcgcccccgatgatgatgcggcgcgcccggagcgagatggggctmrmcgccgggctccccgccgcgccgccgcccatgcggcgagcgcgcagcgcgcaggagctcgccgccggtggcagccactcgcaccagtgcttctacgaccgccgccgccagagctgctgctgctgctgctgctgccaccgccgccgcgacctgccaccgccggcgtggccggtgcgcccgctgccctccatgtccaagaacgtcaatggcgcgcaaccggccggcggccaagaagcggcgaaggcggccatggtggccatggagatggacagccgaagagcttgctgggagttggagtgatagttagggcttagtctttgtaaccagtaaccatgccttttctcacaaaataatggaatatgaaattccttgtccacgattccagcatgtctgtttgcaagccggatatcagccacaagtacttccttgcagcaagcttggactgttcttggctgtttgctccagtgcagaccctcttttctgaagcaaatattggtcatgttgtcttcagctaccttaaaatttaacctcacaatgaacattggggatgaaataacaggaacatcagttatgaaagggcagtaggctgctacaatcatgcatataaagatgcacgagaaaaattcagtgaccatataaactgagaaagagtaattaaagaatacaggccacaggttcttcagtccaggagattctggtctgattttgtcagtttcactccctcggtaaactagtgaaatagaattccggaaggcttcttcattattaactttatgcatgatctttgtcaagcttgtcatcagatcttcatctacatgaattgctgctccaatggtatcgaccagtccagtcaactcatcaaataaatttttcctctcttgaacaaaggcattgcacatattctttgtcctagacttcaactctcctacatgctcatccagtacttcttttctttcctccaaagatctcagcttatttgcaacttccagatgctcctttacattttctaacatctctgcagttgccttggctttgagttgctcaagatcattcttcaaattgttggactgttgtttctccaacgctaaatttacttgcactgccttaagctctctttcacattcttcaatgagcatgtccttgaacaaattatcatgctcttggataagattgagtgaattaagatttcctgctaaacaatatagttgccgaacctcaacctgaacttctgctagcttttctgaagcagattcgactaggtgcttaatgtcaacttgagcagattcaacattttcttgaatttcagaaatagcattttctttttctgcaattagtgtataccaatcagcttcctcctgatcaaacatttccatgagttcttgctctctgcatgtgtatttctgttcgaagaaactgagccttgtttcaagttccaaaagctttttgtcaaagacctcaacgatttcagagtactttctattgacttcttgaatggacctgtcagcctctgacttgataagacctgccacatcaagctttttatctaaattttcttcttccagcacagcgatgtgttgctgaagctcgtcaatattcctgcacctctcatctattatactgcataacttatccttttcttccctaagagactcttcagcatccattttggaattaagagcagaaaccagatcactctttagcacagagttttcatccatgtagcgccctagctcagtttccatactaactctcaacttttcaaattcttccactgcttgcatttgctgatgaagattttctgtgacttggtcaagctcattcttcttgtccaaaagacaacagtttacttcatcaagagcacatagcaacttctcattttcttcactgtaagtcttctcggcttctattttagccatatgggtagcatctagatccctcttcaggacacaaatttcatcaatgtagcccttgatttcagtctccatattgactctcagttcttccaaatgttctagtgcttgcttttgctgatgaagaatgatttcagattgtctcagttcacagttcttctcagaaagggcagagtttgcttcattgagagcacctagtaatttctccttttcttctcttagggacttttcaatttctgttgttgcaataagatctcttttcagtacattgttctcatccatatagccctttagttcattttccatagaaagtttgagctcttccaaatgctccattgcttgtttttgcttatgaagattgatttctatttggctcagctcactctcccgctcagaaactgcagagtatgcttcatccaaatcagataatgctttctgcagtttctcatgcaggcctttttcctcttctgaagattcaccttttaagcagtgaacatctcttgatgcattgtcaagattgtatgtatcaagctgcctttgcatctcttcacgttccttttccatgtgttcaagctgctcaattctttgatgcaatgttgctattacctcaacttgttgtgcccgctcagcttgagattgagcaatggcacagttatcttcctctaactgctttcttgcagcagcaaaattgtgctcaagttgtgcacagttcttctgcatatccagttgaatcgtttcaaaatatgagcaagaatcataaagttttgattctacaataacaagagctactgaagcttcccaattctgcacagcttgcatctccagggagctataactgctcagaagctcaatctgcatttgcttgataagtgtatctttagaatctaactgtgacaagcatccatccagctcactcccaagcttctccatctgtgttttccattctgcctctttatctctcagcttatcaatgcagtttctatgcgtctgttctagagctcggaacttctgctgcagaaccttcaatgaaactacagcatctgcaccaccaatctgagcctcctggtgttccttcaacgaagatcgcatatcctcattttcttgctcaagacgtgccttcccatactccatttccttgagcaatgtgaccttctcagccagtgagcttctcaacgatgcgatctccccatcccgctttgcggcaagcgactcaattgtggacctcgcctcttcataatcggagaccacattaccatacaagtgtttcaattcagacatctccgcctcgagcagcttccggcggccttcctcatgggctaatgcctggctgcacatctcgagccttgaccgaaaatcctcagccattctggtcttggaatccaaattgacctcaagagtgccaatctgatcaaccaacattgatctatcagagccccattccttcttcgcggccctgaattcatcctggacctttttgagtgcatcctcgaggtgcctaaactgctcagatttccacttgagcttcccctcgacggcggccttctggtcctccattttcagcagcatatcgtccctcatcatcacctccttcggtgccaatgccctctgctcagcctccgagcacttcttttccttctccgacagcaacctcctgagccgggcaacctcctcgccgcacgagcgcgcggccgcctcctgctcgagccgcctcgcctcggactcctccagcgccgcgacgagctcccgcttctccgcctccagggcatcgctcctctccctggcgctgctcctgagcccctcgtgcgccgcgcagaggtgccgcagcgcctgctccttctccgcgagcctggcctccagctcccggcgcgcctcccccgaggaggagatctcctcgtcccgggcggcgacctcccgcgcctgcctctccgcctccgccctcgcctcccggagccgcgccgcctgctcggcgcccgcccgcttgagcccctcggcgagctccgccttggcgcggcactctgccgtgagcgcctccacctccgacctcagctcgtccatctccctgcacatctcctccatttccactttgagggaggagcaggtcgggaagaaggagcgggacat

SEQ ID NO: 50840 - DNA, 447 bp, Oryza sativa
  Clone ID: PAT_MRT4530_5328C.1
atgtggttggaggtagaggagatgatggaacgtgaagtggacgctgctgtggctgtgcggcctgtggtttttgcagaatttgatgggcgccgctgggccagggccagggccggaggccagcagagcttctgcaggatggtgaaccgcccgatgatgattagaatgtgggccccacaaacgagcgcggtccccacctcacggccaccgatgccgtgcggcgctggagcgtggcgagggggaggaggcaacggtcgtgttggtggactggcgggggaggggtgggtggggcccggcgctgggacggaggagaccgccgaccacgtggcctcgctggctacgctgccgcttgccaccgtggctgccgttgctcctctcccccgaaatctcgtttcaatccgcggctccgtttccggcgccgccttggtcagattcagagtgaccgggtga

SEQ ID NO: 50841 - DNA, 640 bp, Oryza sativa
  Clone ID: PAT_MRT4530_53290C.1
attaaaccctctcatcgatcgcatcgcgcgcgcggcggcggcggcggcttgagggggtacgcggcgacgcgcgctcccggtgcgaatcgaggcgaagcttcctttgctcctcctcccggctcccgcctccccgcgacgtaaggcgatggagaagatgaccgtggagaagacttggaccgacaaggcctccgtagagttcaagagggacctggagaagcgggcgatgaaggagtggacggagagagacttcagagagctgaagagtacagtgaggatcatcgccgttacactcgccctcatcttcatcatcttcctcgtgagcttcttcgtccccatgaccaagaccttccagatcctgtggtggcagtgggggctgctctgtatcctcacctccatcatcaccctctggaggatcgagagggccttgacgccactagcctgatgatccggaaccggctcggctgaccaagtgacaaaccctcctatccttctcactgtgtattagactaattcatgtgcactgtgttgtaaactgtaatcgtaatcgtttacaaggattcaacgttcgcaactcgtgctgctgttgccggatccaactaggaattcttctcatttcaaatactagcaattctggaatcgg

SEQ ID NO: 50842 - DNA, 445 bp, Oryza sativa
  Clone ID: PAT_MRT4530_53291C.1
ccccatgcctgccctgctgcagatctgggaagaagaagggaaggagaagaaaggaaaagaaggaagcggaggaaatcgaggtgaagatgcaaatgtggggtttgattacccgctgcccatggaggcttaggtgatgccacttcggaatgtaactagagttcatctcatcatcagtgaaggtacttgctgttgatatgtttgcgtgaagggataggattagctacactgtagcacgacatgatctcacttagtcatgattattgtaatatgctgataggattacttgtgtttagacataatgggttaattaaacactagaagtgttgaccattgatgagctaccttttcaagcctatccctacatgtcagtccattgttgtatcataaccttaatctatatgttgatgcttccgcgatgttttcttgtctaaggtagttgttgccg

SEQ ID NO: 50843 - DNA, 1206 bp, Oryza sativa
  Clone ID: PAT_MRT4530_53292C.1
atgtcgttcgctggcgtatctttcatctgcgacggcgtgcacgtgtgttcttctccggccaatggcgccgccggcagcgccgcctatgggtaccacctccttgtcatcaacaactacacgcgcacgaagcaagccatccccaatggatttcgcatcaagtccggcaagttcaagctaggaggccacacttggcacatcaagtactgccccaacggcgaccgatcgaccatctcgggcttcgtctccttccacctcgttcttgattgtgacggcggcgatggcgccgtggcggcggagcccgtgaatgccaagttcgagttcagcttcgccgaccaggtcgcgaagcatcaggcgacgcggctgcgcgcgaccaaggtgtgcgagttctcccgcgactgcagcgcgtggcacgtcgggcggttcgtgcggagggaggcgctggagcggtcgaggtatctcgtcgacgactgcttcacggtcaggtgcgacatcatggtcgtccacgccggcgccggcgccaatggcgtggccgccgccacggcggctccatcgatggccggcgcggtggagagcttcggccgcctcctggacacgaagcttggcgccgacgtggcgttcgaggtcggcggcgagacgttcgccgcgcaccggtgcgtgctcgcggcccggtccaaggtgttcgacgctgagctcttcggccccatgaaagaaggcacggcggcgagcgtcgtgcggatcgacgacatggacgccgatttgttcaggggactccttagcttcatctacacggacgaattgcccgagagagaggaccacggcggagaaaaggagacgagctctgacgacgacgacgacgacgacgacgacgacaatggtgctcaatcggaccaaaaacacaaacaatttacatggctgcagcaattgatcgtagccgcggacagatacgatctgcagaggctgaagcttctgtgcgaggaggagatgtacgaccacataggcgagaagacggtggagaccatgctcatcctcgccgatcaccaccattgccgcgtgctcaaggacgcatgcttgggtttcctcgggtctcatggcaacctgcaaaagatgatggcggctgatggcttggatcgtgtgatcaagaacttcccctctcttaccaaagagattatcggcagatttgcagtcgtcatggcaaacaaatcttag

SEQ ID NO: 50844 - DNA, 345 bp, Oryza sativa
  Clone ID: PAT_MRT4530_53293C.1
atggcgagccatgatctgacgacggcgacgtgcgaaaagacacgacaatggcctcatcagtaccactcaaaaattctgataaaacaaggtcaatgcttgtgccatgctgagttgctgactgagtttgtcaattggatcttcaaggattggaaaactatagcaggtgataatgcactggattatgcagcagaattttcacatatgcttgggtttgatggtgtcaaaatgcttgggttgatgcaaatatgtgtaacaaaacatacctggtttcttccagtgatcatgaaggtcaaaatgtcagtgctcatactggagcagagccatggtctagttctgggccattag

SEQ ID NO: 50845 - DNA, 363 bp, Oryza sativa
  Clone ID: PAT_MRT4530_53294C.1
atgagtggatccgtgatgatgatgcagcggttggcgcgtcaagcggcagcacgcgtggtcacccagcatgccaggagcggcagcggcagtggcctcgcgggagcagttcgcggttacaacaacgtctcggcgtcgcacgcagctgctgctggtagtgccagtggttcagccaacaaacaggcggcaagggcgatggcgacgacggcatcgcggcagcggcaagtaacagaaacggtaatggcggcgtcgcagaataatgcagcaaggatacgcaagttagaggaggaggttatgttttacagatccttcgccgctttcctactcggtgcttacgtagcagccaaggtgatggaaaaagcgtaa

SEQ ID NO: 50846 - DNA, 2763 bp, Oryza sativa
  Clone ID: PAT_MRT4530_53295C.1
attaagacagttcttgagaggttgggcaaaaagcacaagtgaaacatatagaaaagagaaggctgaactaagtgcaaaagcaaatcagttagattaaaaagccgaggtgcaaatattgactaggcaggagttagatctcaagaactacttgaaaaatagactagctcatctgttaagggaggaggaaattagatggcaccaaagataaaaaacaaaacatttaattgaaggggaccggaatacaaaatactatcatatgattgcaaatggcaagcataggaagactaaaatttttcagttagaacaagaggagggtttaattaaaggtgatgaagatttaaaaaagtacattactaaatactacgagaatctttttggaccaccggaggaaaataatttttccatggtggaatcacagaaagaggacattgcacaggtatcagatttagagaatgaaatgctaattaaaatatttaccgaagaggaagtaaaacaagctattatccaaatggaacaaaataaagccccgggacctaatggtttccctgtagagttttatcaagtgttctgggaggtaattaaagaagatctcatggctatttttacagaatttcatgaaggaatattgccgctccacagcttgaattttgttatcatcactttgttaccaaaacagaaggaacctcgacaaattaagcaatacatacctatatgtctgttgaatgttagcttcaaaatctttccaaaggtaatgactaatcgaatagctctagtagctcagaaagtcattagatcttcacagacggccttccttccagggaggaatataatgtaaggggtggtaattttacatgaaacaatccatgagatgcatagaaaaaagaggagtggagttattctaaaattggactttgagaaagcatatgataaagtagattggacttttttacaacaaaccttgaggatgaaaggattttcgcaaacttggtgtaactggatttaacaaattgttagaggaggaagtgttgctgttaaggtcaatgatcacattgggaactttttccaaacaaaaaaaggcttgagacaaggagatctcctatcactaattctatttaatttagtggcagatatgctatctatcttaatacaaagggctaaggatcagaggagatttcagggagtcatacctcatctagttgacaacggcttctcaattttgcaatatggtgatgacacaattctcttgatggaacatgatcttgatgaagcaaaaaatctcaaacttgtacttagtacatttgagaaacttgcgggtttaaagatcaattttcataaaagtgaattgtttttttatggcaaggcaaaagatgtagagaatgagtatgtcatgctttttgggtgtagatctgggacttacccatttagatacctaggaattcctatgcaccacaagaagctctctaataaggattggcaaattatcgaggagaggttccaatggatgttgagtagttggaaagggaaatgtctcttagtaggaggaaggcttgtgttgattaattcggtgctgagtagcctagccatgtttatgttgtccttctttgaggtacctaaatgtatcctcaagaagctagactactacaggtctagattcttttggcaaagtgatggtcataaaagaaaatataggttggcgagatggagtgtgatttgtacacctaaggattgtgggggtcttggaatacataatctaaatgtgcagaacaaacgtttgctgagtaaatggttgtataagcttatcaatgaggatggggtttggcaaaagctacttagaaaaaacatacttggctaagaaaacaattacacttgtaggaaaacaaccaggggattctcatttttgggcagggctgatggaggttaagaaaactcttttctttcttgtggcgcttttcaagtaggtaatggcacacaattgagaatttgggaggattgttggagtggtgattcctcttttgataagatgtatccttcgttgtataatcaagttaggaaaaaaaatgtaatggtggccgaagtgttggaaaaggtgcccctaaacgtctctttcagaagagctattgtaggggataacctagcagcgtggtataacttggtctcaaaagttatatcaactcaacttacggaacaaaatgatgtctttgtgtggaaagccaataaaaaggaaacatttaccatcaactccatgtacagaactctcatgtttaacggagtaattccaaggaaatatttcctttgggagcttagaattccattgaggttactctaacaaaagataatcttgcaaaaagaaggtggaaaggtagcactaagtgttgcttctataattctaatgaaacgatacaacatctttttattgattgtcatttggttagattaatctggaatgttgtgtctataacctttggaatccatccgcctactagcattgctaatcttttttgtaattggctgaatggtgttcaacctaggcttaaacatcaattttttgttggtatagaagctctgtgttgggcggtttggctttgtagaaatgatgtagtctttaatggctccaaaactaagtcctttgtgcaggtaatcttcaaggggacgtattgggcacgtcaatggtctttgctacttaaggaggatgataggtacaaagtcaaggaggggtgcactttgttggaagggagaattttggatttcttctgtaagcattga

SEQ ID NO: 50847 - DNA, 582 bp, Oryza sativa
  Clone ID: PAT_MRT4530_53296C.1
atggagcaacgggcggcggcggcggcgcagcagcggcaggggaggaggcagagcgcggcggcgtgcgggatcaggcgggcgagggcggagacgcggcacccggtgtaccgcggcgtgcggttcagggcggggaagtgggtgtcggagatccgggagctccggaagccgagcaggatatggctcggcacgtacgccacccccgagatggccgccgcggcgtacgacgccgccgcactggcgctgcgcgggcgcggcgcggcgctcaacttccccgacgccgcgcggtcgcgccccgccccggcgtccgcgtccgccgacgacgtgcgcgccgcggccaccgccgccgccgccgcgatggcacaccaggaggaggacgacgacagtcggcgtcagctcgaggacgggggcggcggcggcggcgtggtggacgaggacgacgtgctggagatgccgaggctgatggtgagcatggcggaggggctgatgatcagcccaccgccggtgatgctcggcctgcaggcggacggcggtggaataatggacgagggcggcggcgtggtgaggttgtgggatcacagctga

SEQ ID NO: 50848 - DNA, 255 bp, Oryza sativa
  Clone ID: PAT_MRT4530_53297C.1
atggctggatgccgggaagtacaggttcctctgaataggttcctctcacaatacatcaatgtgtacgagctagaggagcacgaggaggccgccacgatgtgggccaaggtggagagcgttagggtccgcatgctcttctttgacaagtacatgcatgggttctcgctggagcccaacgacacttccgaactgagcatggaggacaaaaaggtcaatagagtcatgccgctgcccaacacgttcagggacacctag

SEQ ID NO: 50849 - DNA, 240 bp, Oryza sativa
  Clone ID: PAT_MRT4530_53298C.1
atggccaagcccccgcgcttgctacccaccaccatcaccaacgttgcggtcgtcgcgacacgaggccgacccaccctacgctacgtcgctacacggggcagcgacgcggacgccactggacagaatgtacgcggctacagtgcacgttccatcgccacggcatctatccgcttgctgaacacgacggatcccagctactcgatcagggaccaacggccaacgggcttcgatgggagctaa

SEQ ID NO: 50850 - DNA, 329 bp, Oryza sativa
  Clone ID: PAT_MRT4530_53299C.1
gtacttactcagcgtgcttgctcttgctgttcctggcgagccaccgacgatggactgcgccctagaagctcatgcgtgtgtcgcgggatccattgctgtggccgtgtccgggaggaggttttcctgcaaggggcgcgctgctgcagattctgcatccatcatggattggaaccacattagcatggtacagcactgaccttaaatgaaagcataataacatgattttttgcatgtgcgatgaacaagcaaggcaacaagcaatgttgctgtaaaaccttttggaattggataatgcgaatgagccaccccctgtaattattcaaaccatg

SEQ ID NO: 50851 - DNA, 353 bp, Oryza sativa
  Clone ID: PAT_MRT4530_5329C.1
atgggggttcggccgaacccctggttctgccgaaccagggagctcgccaacgggctccagattcgcaggggagcccggcactgtcgcaaggggctgcgcccacagtgcattcaccctttccatggtgtagtgttccaccgggatcaattgattcgccggtgtcggctctccgtcaaggttaagcgctgcttgttgctaggcaatatacgctgccgtgccgctctgctcctacgccatctcgtcagcctctgcttcctcgctctgctgtgccagaagaatcagaggcttggccatcatgagtacaagccaaaggaattttttctctttgttgagtccttcgtctcagccagcgc

SEQ ID NO: 50852 - DNA, 1677 bp, Oryza sativa
  Clone ID: PAT_MRT4530_532C.1
atggttttcttgctcgtctgcatgtgctcgcttcttctcatgttcttgatttcatacgcgttacaactgtttggcgacgcccgccgccgtcttccacctggaccaacaccgcttccgctcatcggcaacctcctcgacatcgccagcgacctcccgcaccgctccctggcgcgcctcgccgggcggcacggcccgctcatggcggtccggcttggcaccgtcgtcgcggtcgtcgcctcgtcctcgtcgacggcgcgcgaggtcctccagacgcacaacggcagcctcaccggccgcgtcccgccggacgcgtggcacggcgtcgggcacgccgccaactccgtgttcgtcctcccgccgcgccgcaagtggcgcgcgctgcggaggatcggcgcggagcacctgctctcggcgaggcagctcgacggccggcggctcctgccgctgcttcgggacgctgtgctcgacctgctccgccgcgtgtcggagatgtcggcggcgtcgggtggcggcgccggagcgccggtgcaggtcggccacgccgcgttcgcggccatgatggacatgcagtggcgcgccatgttctccgccggcctggaggacgacgacgcgcgcgtgctgcaggacgcggcgagggaggccgtggcgctgtcgctgaagcccaacctctcggacttctatccggcgctcgccgccgtcgacctgcagggcctgcggcggcgcttcgccgggcgggtggggacggtctaccacctcgtcgacgagcagatcgagcggcggatgcgccgccggcgtgaagcagctggcgacgacggcgaggccaggagcgaggacgacctgctagacgtgttgctcgacatgtcggagcatgggaaggacgacggtaaggtggccatcgacagagacctgatcagaacatttctcactatttgcaggtatctgcagtcctaccccgacgccttcctttgcatgggaagccagctctccattagatcaagtggttgcctaggcttcatcactgtcacctccactacgagtgtgatcaatgacatatttctggcgacagtcgacacgattgcgagtacactcgagtgggcaatggcagagctactacaggaccgagagaccatgagaaagctacaggaagaactcaagaaggttctcggctccaaaactcatgctgaatacgccgatatggaccgtcttccctacctccgggcagtcatcaaggagacgctccggctgcacccggtggtgccgatagtgcccaacgtggccgaggagatggtggagatacatggccacgtcgtgcccagggggagcaccatcctggtgaacctgtgggccgtgcatcgcgacgccgaggcgtggccggagccgaataggttcctgccggagaggttcatgctccggcagcatggccaggaggccgccggccgtgccctgggtacggcgacgacggagttcgggctgatcccgttcagcgctgggaggcgcgtctgcctcgggctgccactcgcgacaaggatgctgcacgcaatgctggggtcgctgctgcatcgcttcgagtggacgctcccgttggaggtggaggaaaatggtgtggacatgtcggagaatcttgggttgacgatgaccatggccaccccgctgcaagctatagccaagagcatctga

SEQ ID NO: 50853 - DNA, 198 bp, Oryza sativa
  Clone ID: PAT_MRT4530_53300C.1
atggttccatctctaccgccgagccttgccacatcatgtccaatacatcaagagaggctcactaatgagaaggccgacaagatgatccgcgaggccgatgatcaacaggacgtgccgttgaccaatgactccacaagtcttttgtccggagtctccgcatggctccgcgaggcgacggcccgacgccctcatgaatga

SEQ ID NO: 50854 - DNA, 525 bp, Oryza sativa
  Clone ID: PAT_MRT4530_53301C.1
atgtcagcggctcaagggaagagaggggcgccggcaagtggggtccccgggtcagcggcccaaggctgccggtccaccgtggaccgagaccacgagggtggtccacgcccggggccgatcggacgggcggcggcgacccggctcagttcggctcaaggccggccaaccggccacggcgatggcgacggcccgcgcgcgcgcacgcgttgctggcgacggcaaccggcggcggaggcggcggcgcaaaggcgacgcgaaggcggcggcgctaagcggcggctaggaaggagagggaggggaatagaggggagaggacgcctcaccaagggtggccggcgcggaggaagacgacggcgaacggcgacggcgaacggcgacggcgaccacgggcaaacggcgacgacgggcggacgaggtccggaatgccctaagggaggaaaagagagggcggacggggtggatctcggccacgcgaacccgacggcggcgacggcgcggcgcggcggcgagtctagcggcggctag

SEQ ID NO: 50855 - DNA, 390 bp, Oryza sativa
  Clone ID: PAT_MRT4530_53302C.1
atggtggcggcaggttgtggaatcgacgcccggcgtgcacctccatcacggctcctcgatagggccatcgccaccgtctcgccttactcctactgcaccggcagccagcttgacttcggcaggggcggcgaatcgtcggacgcaccccatggctccctgtgcattgactttggttgcagcgccggcgtgtcggtgttgatcaacaggttatcctcatcgtctttccctgcattgttctttaggtacttcaccggcgcgagctttgacacatccatgtatagcggctacgatagcaagcagatggcgttgccagcgaccatggcacaaccgcgttcatactcagaggcgctcgtgaggcaaggagttagcgttggcttcttttcttcatag

SEQ ID NO: 50856 - DNA, 609 bp, Oryza sativa
  Clone ID: PAT_MRT4530_53303C.1
atggcaggcgtcggtggcggcgggcgggtggcgcgacgcgcgagggccatgggcggcggcgacgcatgggctgagcggcagcagtggcggcggcagaagcaaggcgacgccaaccagaggccatacaatctaggggcgaacccatgtcccaagtggggcccacctgtcggacccgtctcccacctcgcgccgcgccgctgcgcccgcaaccgccgccgtgcccacgcctccgcctcctccgggccacgctcgccgccgcaccgcgccgtcgccgccgttgggttcgcaaggtcaagggccaccccgtccacccctccttcgtcgaggttcgccgccggagcgccattcccaccgtgcgacgggcattccggacctcgtccgcccgtcgccgccgtttgcccgtggtcgccgtcgccgttcgccgtcgtcttcctccgcaccggccacccttggtcgctgccgcccgtccgatcggccctggggcgatctgggccgtcggtcccgtggaccggcggtggaccacccgcgtggtcccagtgcacggtggaccgggagccttgggccactgacccgggggccccacttgccggcgcccctctctccccttga

SEQ ID NO: 50857 - DNA, 312 bp, Oryza sativa
  Clone ID: PAT_MRT4530_53304C.1
atggtggcggcggggccaaaacctcgttggcggtccgtctccggcgcgaggaggcggcatgtgtcgctgccgtcggagctgaccgaaggagcaggcgcggtgagccgatggcggcaagagtacgcgcaggcgacggtggcaggagatggtagcagacggcagcaggaggcggcggcggatggcggcaggaggcacgggcagcacatcgagaggtcactgcgactggtgggaggcgcaggcgacgacaactgctggacggcgggaggcgcaggtggttggccgacgggagatgtgagtgatgtcagcggctag

SEQ ID NO: 50858 - DNA, 1117 bp, Oryza sativa
  Clone ID: PAT_MRT4530_53305C.1
atgcgtcagctagaggaaagctacactacaagcccagccgttgcccacgctggcttgtggtaagtacgatcggctcaaaggggggagaggggcgccggcaagtggggcccccgggtcagcggcccaaggctgccggtccaccatggaccgggaccacgcgggtgatccaccgccggtccacgggaccgacggcccagatcggccccgagcagatcgggcggtggcgatagaggtggccggcgggctcggctcggcatcaaagccggccggccggccagggctagcggcgacgacacgcggtcgacggcgacggcgaccggcggcacgggaggcggcggcggcggccgaaggcgacggcgcatgacttgaagcggcggcgcggcactagaagggagagggagcggagtaaaggggagaggacgcctcaccaagggtggccgacgcggaggaagacgacggcgaacggcgacggcgagccacgggaggacgacggcaaccggcggacgggcttcggggtgccctaaggaaggaggagggagagattagagagagggagatgaaccacggcggctggcatccatggccgaaggcggcggtagaggtagaactcactggagcgcgaggggatgcgaattccggcgacgaatcctgacggggaaggggcggacgaggtggaggacgtggccggtaggggcgggattccgccggccaacgcggggagtgggggaggagagagaggtgggattcgaaaatcgaatcccggccatctcgggtgcgggcgcgggcgggagagagaggggagtgggcgcgggaggtgcggcgcatgcgcgggcgtggccgacatggcccggaggaggcggaggcatgggcgcggcggcggttgcgggcgcggcgcgaggtgggagacgggtccgacaggtgggccccacctgtcggcgacccgggtgagaggaggcgggcggccggcccgcgcggcctagctgggccttggccttcggccggcctagcgggaggagggggagaaaaaggaggaatgggccggcggcccattcaaaggaaaaagagaaaagaaaagaaagaaaaaggaaaaagaaggaaaaaggatttttcctgggat

SEQ ID NO: 50859 - DNA, 303 bp, Oryza sativa
  Clone ID: PAT_MRT4530_53306C.1
atggagcccatggtaggacgagtgaacgcggcggtgccgcagaatggcagcgcgggaccgacgctgtcgcgcggttccaacgcgcggaaccgaataggtcgcaggagatcggatccaattcgggaaaccgagatgggggcggcatgtgggagcgccggtcccgcacatccggcatgcgggagcgttgccgcgctcaccacgcccgcgggaccagcgtggtaccgcatccccggcctgcgggaccggctgctcgtcctcactcccgcgcaaccgttctgcggattggaggaagtagggggctag

SEQ ID NO: 50860 - DNA, 1067 bp, Oryza sativa
  Clone ID: PAT_MRT4530_53307C.1
atgcgtcagctagaggaaagctatactacaagcccagccgttgcccacgttggcttgtgggctgacgtcataaggggggggtggcgccgacaggcggggcccgcatgtcagcggctcaagggctgccggtccaccgtggaccgggaccacgcgggtggtccaccgccggtccacgggaccgatggcccagatcgccccggggccgatcggacgggcgacggcgacccagctcagctcggctcaaggccggccgaccggccacggcgatggcgacggcgcgcgcgcgcgcacgcgttgccggcgacggcaaccggcggcggcggcggcggcgcgaaggcggcggctaggaaggagagggaggggaatagaggggagaggatgcctcaccaagggtggccggcgcggaggaagacgacggcgaacggcgacggcgaccacgggcaaacggcggcgacgggcggacgaggtccggaatgccctaagggaggaaaagagagaggctagagggagggaggcgaaccacggcggccggcatcatggccgaaggcggcggtaggggtaagctcaccggagcgcgaggggatgcgggatccggcaacgaatctcgacggagtgaagtggcggacgggtccggacgtggccggtaggggcgggatttcgccggccaacgcggggagtgggggaggagagagaggcgggattcgaaaatcgaatcccggccatctcgggcgcgggcacgggcgggagagagaggggagtgggcgcgggaggtgcggcacatgcgcgcgcgtggctgacgtggcccggaggaggcggaggcgtgggcgcggcggtggttgcgggcgcggtggcgcggtgcgaggtgggagacgggtccgacaggtgggccccacctgtcggcgacccgggtgagaggaggcgggcggccggcccgcgcggcctagctgggccttggccttcggccggcccagcgggaggggaggaaggaaggagaataggccggtggcccattcaaagaaaaagagaaaggaaaagaaaggaaaaagaaaaagaattttcccagggat

SEQ ID NO: 50861 - DNA, 2637 bp, Oryza sativa
  Clone ID: PAT_MRT4530_53308C.1
atgtcaatgtcagggcctcgagaagcatgcgacgtcacagggttggatgagttctacaagcgcatgcaggcgcgagtgtggcgcacgcgaggtcagttgatcttcgctgccgccgtggtgacgatccttgtaggatcaggcgtctacagccgtcgccaccggcgccatggtttcgcccgcttcgtcttcctcggagcctctaccctgtacctgcctgtagtctcctacctcgtctccgacatcggcggtgagaactgcggcctgccaaaagacgtcaaggaatgcaaggacatgagtgcgttcttcctggaagcatgggcgatccttgcgctgattttcggagcaaacagcttcgtgatagctgctgctgatgaccatggaggtcaaaatgttcatcgtcccgtcgcggagctgcttgttcgtgcgatctggacctcttacatttcagttcaccacttcagaattatttttccacttgaccgtgtcttcatttcgatgtcgtgtggcttcgttcttgtcaggattgttgtcaagttatatgctttcttgaaggcgcaacgctcgttcgcgcatggacgcaaccctcgcctgattgctggatacatggatcaactgaaacaggatatcatgagcagcagcagcagcagccaccacgcgcaagctgtaaatgttgcgttgccactcttagtcatgggggaggatgagcagcaggtggaggaaggccctcatggctatcgatttagagacaggaagggaaatgaaagcctggtcaccatcggtaaagttcagatcatgtcatcaacggatggtgttttgagctcatggccgccactcaaagatctgtgtttatcattctcgctgttcaagctgctgcggcgaagatttgcgaggtgtgtagttgtggaagaaggatctgagattggcccaaacatggtgtgcacattatttgatagtgacactgaacctgaaagaattgtcagtattgtcgcggatgagctatcttttgcatgtgatttttaccattcatcgctcccagtatcctgttcagtcttctggttattcgtattaaacatcttattctccttcgccggcacagcatgctgcttatttattgcaatacgcacgattcaacatgtggtttcggtagcacaggttgggccaatgtcatcagatccattctaccatcagataacctgtgtgttgatatgcggtaagaatgatcaagccaaacagttcggatcgattttgtttttcatggtgctatcattcctctttgtgatagtactaatttttgatgaggtatgggagattgtctcatacatgtgctcaaattggaccaaagttaccttgatttgctactacataaccaaacccacatggcagcaatctcctcgcatgcggagattgattcgttgcgtactacaatttcgatgcaatctcttgggctactggagtgacaaaatgggccaaacctccctaatggataccaacatgaatataggtccaattgttagaattaaacaactactcggactgccagtccaaactaagcaagtgaagataccaacagaggtgaaggctgcaattatcaacactctcaaaagccaaaactggagaccaactgattgtattacatcactccaacaaagccatatcggcaagagtttttcatgggcttgcaaaggagatggcacatctgatgttattcttgtatggcacattgcaacttgtatcttcgagatcaggcattcgactgagcctttgattgcagactcaattagcaataagatcaccgccacttatctgtcacagtactgtgcatacttgctatcatctgcttctgagctactgccagatgacaaggcatggtcgaagaaatcatatgaatctgttaagaagattgtcgatcccattttcagtggccggaatgataaacctttggaatatgagtacatattactattgttggttgaaaaatccaggagcgatatgatattgaacaaaggtttaactcttgggaagcaacttgtggagggaattgaggatgaagagatgggatggacggttcttgctgggttttggtcagagatgatattgtacattgccccctctgacaatattgatgctcatagaagggccattgccagaggagaatgttcttactcaatcccaacaactacaccgaaaaaaattgacgtgaggttcatcgtcgtggtgatatcctacgcgaccctgctcgtgatcgacgtgaggttcatcgtcctcgccgtcttccccttcatcgcgctcgccttcatcgccgcgctgtgcgtcgcactgatccgagctgaagctgacaatggcggcgagcctggcgcaagcagcagcagtgccagttcggctgctgcaactgatcgcgaaggcaacaagaatacgacgacgacggcggccgaggaagccgagcagctgacggcgatgtcggttgtgccctactgggcgctatgtgtgacggggcacggcccgcgccacggacctcgccgtcacccagtttctcctcttcctcagcgccacactgggcgcgctggtcctgatgctgacgaggctcagctggctgtacgacgccggcgtggctccgggcgtcgcgccggcgtcgcgtga

SEQ ID NO: 50862 - DNA, 1115 bp, Oryza sativa
  Clone ID: PAT_MRT4530_53309C.1
ttagttatgaattttagaagattcactttatttattactataacaaaagtcaattaattcccagagctgacgtcatcaagggggcagcggcgccgacgggcggggcccgcatgtcagcggctcaagggctgccggtccaccgtggaccgggaccacgcgagtggtccaccgccggtccacgggaccgacggcctagatcgccccggggccgatcggacgggcggcggcgacccggctcagctcgactcaaggccggccgaccggccacggcgatggcgacggcgcgcgcgcgcgcacgcgttaccggcgacggcaaccagcggcggaggcggcggcgcgaaggcgacgcgaaggcggcggtgctaagcggcggctaggaaggagagggaggggaatagaggagagagggatgcctcaccgagagtggccggcgcggaggaggacgacggcgaacggcgacggcgaccacgggcaaacggcggcgacaggcggacgaggtccagaatgccctaagggaggaaaagagagaggttagagggagggagacgaaccacggcggccggcatccatggccgaaggcggcggtaggggtagagctcaccggagcgcgaggggatgcgggttccggcgacgaatctcgacggaggaagcgcggacggggtgccggacgtggccggtaggggcgggattccgccggccaacgcggggagtggaggaggagagagaggcgggattcgaaaatcgaatcccggccatctcgggcgcgggcgcgggcgagagaaagagggaagtgggcacgggaggtgcggtgcatgcgcgggcgtggccgacgtggcccagaggaggcggaggcgtgggcgcggccgcggttgcgggcgcggcggcgcggcgcgaggtgggagacgggtccgacaggtgggccccacctgtcagcgacccgggtgagaggaggcgggtggccggcccgtgcggcttagctgggccttggccttcagctggcccagcgggaggagggggagaaaaaggaggaatgggccggcggcccattcaaaggaaagagagaaaagaaaagaaagaaaaaggaaaaagaagggaaaaaggatttttcctaggat

SEQ ID NO: 50863 - DNA, 256 bp, Oryza sativa
  Clone ID: PAT_MRT4530_5330C.1
atggcagacaaaaattatatggatggcaactcctgttcacttcaaaaatgccacgggctaacaaacgatggctttactaagttccacagttgacctattaaaccatttgcagactatcctgaggttatatacctgtattacaattcattcaaacaagctcatacaataccattatatgaactagctctcctacgccaaaagttagaacactacttccctatgggtccagtgatagcagaacctttcatataaccct

SEQ ID NO: 50864 - DNA, 190 bp, Oryza sativa
  Clone ID: PAT_MRT4530_53310C.1
ggaacgagctcgagcgcaagtcgttagtaacggtggaaagactgtgattgatggcgtccttcgcccaggacaattattggtcattccgcaacagtatgctgtcttgaagaaagcagagcgttaggatgccaatatatcgaagtcaagacacacgctagcgccttcttcagccaccgtacagcgtaaaact

SEQ ID NO: 50865 - DNA, 1076 bp, Oryza sativa
  Clone ID: PAT_MRT4530_53311C.1
atgcgtcagctagaggaaagctacactacaagcccagccgttgcccacgctggcttgtggtaagatgtcagcggctcaaggggagagaggggcgccggcaagtagggcccccgggtcagcggcccaaggctgccgatccaccgtggaccgggaccacgcgggtggtccaccgccggtccacgggaccgacggcccagatcgccccaggaccgatcggacgggcggcggcgacccggctcagctcggctcaaggctggccgactggccacggtgatggcgacggcgcacgcgcgcgcacgcgttgccggcgatggcaaccggcggcggaggctgcggcgcgaaggcggcggcgctaagcggcggctaggaaggagagggaggggaatagaggggagagggatgcctcaccgagagtggccggcgcggaggaggacgacgacgaacggcgacggcgaccacgggcaaacggcggcgacgggcggacgaggtccagaatgccctaagggaggaaaagagagaggttagagggagggagacgaaccacggcggccggcatccatggccgaaggcggcggtaggggtagagctcaccagagcgcgaggggatgcgggttccggcgacgaatctcgacggaggaagggcggacggggtggaggacgtggccggtaggggcgggattccgccggccaacgcggggagtgggggaggagagagaaaatcgaatcccggccatctcgtgtgcgggcgcgggcgggagagagaggggagtgggcgcgggaggtgcggcgcatgcgcgggcgtggccgacgtggcccggaggaggtggagacgtgggcgcggcggcggttgcgggcgcagcggcgcggcgcgaggtgggagacgggtccgacaggtgggccccacctgtcggtgacccgggtgagaggaggtgggcggccagctcgcgcggcctagctgggccttggccttcggccggcccagcgggaggggaggaaggaaggagaatgggccggcggccattcaaagaaaaagagaaaggaaaagaaagaaaaagaaaaagaattttcccagggat

SEQ ID NO: 50866 - DNA, 162 bp, Oryza sativa
  Clone ID: PAT_MRT4530_53312C.1
atgaccaacatgaggatgatatcacccatcaaagccggcggagatgttgatggtgctaaagacaatgacaccaatcaaagagttgtgcagctatggcagcgaaataataagtcgataacagacgaggtgcccggtgaagaagacgaagacgtccatcagtag

SEQ ID NO: 50867 - DNA, 560 bp, Oryza sativa
  Clone ID: PAT_MRT4530_53313C.1
ccacgcgtccggagggagccgctacctatgtaatgctgacgaatgcgttcatatattcttcttccttccctactctcctaaacaacagccgatcccccaccctgacaggatggacccctgcggacagcgactaagggatgggtgcctgcaagttcattgaccgctgttgtatggactgaagccgtagctcttggagccggtcaaggccggtcaggcacccttttcatggaggtctggagcgccgactttcagctgtgcccggccgcgaccatggaccagcatgccgtcaaggcctttgccgtggctatcatcgacaggatggacccagcttactgcgagagcaacctcgctggagctattgctgccgtgaaggaccccggctgcgccatgaaggtcgaactcatcatgtagattgaccacaatcgctgcggaggaatcaaggccctcctctcactgaaggatggagcacctgacttcttccacttggatgaggactgagccatgacctggtctcccgctcagaataaggttcggaccgagcacgcctcgctggctttcga

SEQ ID NO: 50868 - DNA, 138 bp, Oryza sativa
  Clone ID: PAT_MRT4530_53314C.1
atgacgatgactgccgtggcagactgtggaccagacatcaacgacgccctcggttcacccctgcttgcagcttgctggggggtggggggtggggcgaatgtgacccgagcactgtccacgggccatgctcaggggtag

SEQ ID NO: 50869 - DNA, 234 bp, Oryza sativa
  Clone ID: PAT_MRT4530_53315C.1
ggtaggacaggaaaagattgacttaactaataggcttataaaaatgacccatggagtaggatggcattgcgtttttgccagggggacacctacatacgccattagcaaaagttcctcctttgagcaacacgtattttaggattaacaaaaatagggcctttaattccagttagttatctcttgaagacaaaggcgcccccaatggcccacaaaaggggcgtcctcggactcgaa

SEQ ID NO: 50870 - DNA, 212 bp, Oryza sativa
  Clone ID: PAT_MRT4530_53316C.1
tgccagatagcatgcttggacccccagtggtgcataaggtggctgggacaagccggggaaagcgccattttttggagcgcaatggttggctggatgttgtgttaccacgagtggaaataatgatgctgcatgcttgcctggcttggctgccttgcatgcctgtgttggtggctgggtgacccaggagtgacttgtagcatgttcggatcctc

SEQ ID NO: 50871 - DNA, 171 bp, Oryza sativa
  Clone ID: PAT_MRT4530_53317C.1
atggcgatcgagttggttgggtattttgcaatgccgtgcgtcacgtcgatgattggagttgcaaaatgtgatgataaggatgctaggtatgaggactgtgaaaagatgattcatgtttttgacaaagatggtgatggcaggattagcttggatgagttcagagctgtgtga

SEQ ID NO: 50872 - DNA, 201 bp, Oryza sativa
  Clone ID: PAT_MRT4530_53318C.1
ggaggagcgatgtcttcgcgcgtggaaaggggatgattgttggtatttcttaacgacattaaaagaaatatatgtcccagcaatgacgcagaaatacttctagtatattatggttacagagttcatccgcaagcgcacggatataccattgtagcatttcacccgagagtattccaagtgtatcgtatttattttattccg

SEQ ID NO: 50873 - DNA, 479 bp, Oryza sativa
  unsure (1)..(479): unsure at all n locations
  Clone ID: PAT_MRT4530_53319C.1
aagtaattatgttattttctccaattcacaccaacgtataatattgtcactgcaaaccaagggtcaatcacctgcagcaattcaactttcaattctcaccttcccaccagactagctttggtgatcgttggtgatgaccgtgcgagagggttggtctccctctgcctactaaactcagggttactagatcctgcatagctactagtggtgtagctactgctcccaccatccctgagctgccactcggtgatatagctcggcttcgtgaccacctcagccacatcaacatctccgatgagcattgccacaacccttgacattggcggnngttggtgcggtgagccccactccaagagatatatcttgctttcctcaagggagttgtttgtattcgatcgaccagcaacagtctccaacataagtactccaaatgcaaaaacatcggccttctctgacaaatgacctctcattgcatactc

SEQ ID NO: 50874 - DNA, 498 bp, Oryza sativa
  unsure (1)..(498): unsure at all n locations
  Clone ID: PAT_MRT4530_5331C.1
gttacaggggnatatagcgtagaggctgggtgctgtgcgtatgctttgcagaagcgctgcttgttgctaggcaatatacgctgccgtgccgctctgctcctacgccatctcgtcagcctctgcttcctcgctctgctgtgccagaagaatcagaggtgtttcaaggtgggaatcatgcgcggggggcatttttaggctcggccattgtgtacgagtcgaaaaatctctcagttcgtctttctctactcatgttaatagattctttggctgtgtccttcggttcggccaatgagtacgaaccaagggattatgttcttgccatgctcctaggcttggccatcatgagtacaagccaaaggaattttttctctttgttgagtccttcgtctcagccagcgcgtttgagacacggaaattcgtttcatttgatggcttttaacatgatttcacactttttcctatggtccggccaaatgagtacgggcctaggagtggttt

SEQ ID NO: 50875 - DNA, 858 bp, Oryza sativa
  Clone ID: PAT_MRT4530_53320C.1
ataaacatatattcaactttgacaaggatatcatgagcttagatggcaaagagaggctaatttctgggggttcacccattgttcatcactgtgatgacactagtaaaagatatgatcatgctagtgtcatcacagtgatgacactagcatgatcatatcttttactagaggacctttcctttttgttttcaatttcaatcctgacgcctcctcgcggctctattctgttggtgtggatgaagctggtgaatatcagcttatattgaacacagatgaaactaaatatggtggacgtggggagctgacgagcaatcaatatatgaaaagaaccagtgacaatagggttggtggttgccgcaactccttggaattgacattaccatctaggagtgctcaggtatacaagttggtccgaattttgagaatttagattctcaaggatgagcattgttgatagaccaagcaattcgggtcctcagaagacggaacttctctgttaatatctgaactcttgcaaacttaaagattcgcatggcaaaaactgaggggaaaagaacaccaccgtagtgaggatccttcaggtatgaatgtccatgcagatgcagattgttgggttgatgttcgacgtctctgatttgaccttctgttgtggtacaatatgaagtattgcagtatttatttagacctcaaattgcctgttctgctcactcgtgtaccttgattccatgcctagtgtgggcgtggcactgtggctagtttaatcaaggatgctatagagtatatagactcatagctccacagtgaaacgctcataaggagtgctattgaaactaataaggctttgtttgttccagctgg

SEQ ID NO: 50876 - DNA, 2548 bp, Oryza sativa
  Clone ID: PAT_MRT4530_53321C.1
atggcaatgatggatggcaaccacataatgcctatcagtggccaaggtggcacatgggcattgggagccgtgcagtggtgccgttggcaggagggtaacaaatttgagcgttgttggcgaaatacctttggagctgcagaatttcacctatatgctggacctgtatggaacctgggctataattacttgactggtgccgtgccatcattctttggaaagtttactttcatgaaatatttggcttttcctttcaatgcactgtctggaccgcttccaaaggaacttggaaacctcaccaatctcctctcgctgggcattagctttaacaattttagcggtcaacttcctaaagaactgggcaatatgaccaatcttcagcagatgtacatcgatagttgtggattcagtggtccgttcccttcaacattctcaaaacttcagaacctgaagatcttgaggtcatcagataacgattttacagggaaaatacctgattatttggggatcatgcctaagttggaagatatacggattggtgatattgtaaatgggagctcttcattggcctttatcagtaacctcacatctttgagcaacctaatattaaggaactgcaagatatctggcaatcttgcaccagtagatttttcgaagtttggagttttaaccctgctggacttgagttttaacaatatcacaggccaaattcctcaaaccattctgaatatgacaaatcttgaatttctgtttcttgggaacaacagctttacaggaagtcttccagatgctataagcccatccttgaaagcgatcgatttttcctacaaccaactcaccggaggcttgccttcttgggctacccagaacaacttccaattaaatttggtggcaaacaactttgaacttggtaccataggccacagcactttaccttcaggactaaactgcctccagcaagacaccccttgtttccgtggatctgcagaatactattcctttgcggttgactgcggcaataatagaacgactagaggcttagatggaactatttacgaaccagatgctgcaaaccttggggctgcatcatattatgttactagtgacacaagatggggtgtaagcaatgtcgggaactactttctggctacagatggagtgaacataataaatagtccacagaaaattcagaatgtccttgattcaagattatttgaaactgcaaggatgtcggcgtcgtcggtgaggtattatggccttggactcgagaatggaaattacactgttctgcttcaatttgccgagtttgcttatccagactcgcagacgtggctaagcttaggaaggagagtttttgacatatatgtccagggtgatctaaaagaaaagaattttgatataaggaagatggcgggtggaaaatcttttactgcagtcaacagaagttatactgcaagagtgtccaaaaatttccttgagattcatctcttttgggctgattttactccaacagttcgaaatggtgtaccaaaaaggagaagtaaagcaggtgcaattgctggaataacaattggtgcattagtgttaggagtagtatccttatttggaatatttttgttggtaaagaagagaagaacaatagcagaacagcaagaagaactgtacaaccttgctggacaacccgatgtcttcagtaacactgaactcaagctagctaccgacaatttcagttatcaaaacatcattggggaaggcggatatgggccagtgtataagggtaaactacctgatggaagagttatagcagtgaaacaactttctgaaacatctcatcaaggcaaaagccaatttgtgacagaggtagcaacaatctctgctgtgcaacaccggaatcttgttaaattgcatgggtgctgcattgatagtaaaacacccttgttagtttatgagtaccttgaaaatggaagcctggatcgagcaatatttggcatagcaagaggcctaacatatcttcatgaggagtcaagtgtccgcattgtgcatagggacatcaaagccagcaatgtcctacttgacactgacctcaccccaaagatctctgactttggacttgccaaactatatgatgagaagaaaactcatgtgagcacaagaattgcgggcacaatgggctacctagctcctgagtatgcaatgagaggtcatttgtcagagaaggccgatgtttttgcatttggagtacttatgttggagactgttgctggtcgatcgaatacaaacaactcccttgaggaaagcaagatatatctcttggagtgggcctggggtttgtatgaaatggggcaagctctgcgcgtagtcgatccatgtcttaaggaatttgatgagaaggaagctttcagagtcatctgtattgctctcctttgtacgcagggctcaccgcaccagcggccgccaatgtcaagggttgtggcaatgctcatcggagatgttgatgtggctgaggtggtcacgaagccgagctatatcaccgagtggcagctcagggatg

SEQ ID NO: 50877 - DNA, 3265 bp, Oryza sativa
  Clone ID: PAT_MRT4530_53322C.1
cccacgcgttctcccacgcgttcgcggacgcgtgttagcaagcgagcgatgagagagatgcggcgttggtgcagcaggatgagcggtctcgtgtgggtggtgcttgtgtgctcatggacatggaggatcgcagctgctcaggctccgcaaccaccaaaaactgatccactcgaggcggcggccctgaacacgatactgggaagatggggcaagaaggcgtcgtcggagtggaacataagcggcgagccctgcagcggtctcgcctctgacaaaagcgactgggataactaccccaacatcaatccattcatcaagtgcgactgcactttcagcaacaacaccctctgccacattaccagactgtaagtatacgcttccaccgttgttggcgaaatacctttggagctgcagaatttcacctatatgctggacctgaacctgggctataattacttgactggtgccgtgccatcattctttggaaagtttactttcatgaaatatttggcttttcctttcaatgcactgtctggaccgcttccaaaggaacttggaaacctcaccaatctcctctcgctgggcattagctttaacaattttagcggtcaacttcctaaagaactgggcaatatgaccaatcttcagcagatgtacatcgatagttgtggattcagtggtccgttcccttcaacattctcaaaacttcagaacctgaagatcttgtggtcatcagataacgattttacagggaaaatacctgattatttggggatcatgcctaagttggaagatatggctttccaaggaaattcttttgaaggaccgatcccaccaagtttagctaatctaaccaagttaaccaacttacggattggtgatattgtaaatgggagctcttcattggcctttatcagtaacctcacatctttgagcaacctaatattaaggaactgcaagatatctggcaatcttgcaccatcttgatgtaaaaaatctgtcatgaatcacagggacttgagttttaacaatatcacaggccaaattcctcaaaccattctgaatatgacaaatcttgaatttctgtttcttgggaacaacagctttacaggaagtcttccagatgctataagcccatccttgaaagcgatcgatttttcctacaaccaactcaccggaggcttgccttcttgggctacccagaacaacttccaattaaatttggtggcaaacaactttgaacttggtaccataggccacaggtacttatcaggactaaactgcctccagcaagacaccccttgtttccgtggatctgcagaatactattcctttgcggttgactgcggcaataatagaacgactagaggcttagatggaactatttacgaaccagatgctgcaaaccttggggctgcatcatattatgttactagtgacacaagatggggtgtaagcaatgtcgggaactactttctggctacagatggagtgaacataataaatagtccacagaaaattcagaatgtccttgattcaagattatttgaaactgcaaggatgtcggcgtcgtcggtgaggtattatggccttggactcgagaatggaaattacactgttctgcttcaatttgccgagtttgcttatccagactcgcagacgtggctaagcttaggaaggagagtttttgacatatatgtccagggtgatctaaaagaaaagaattttgatataaggaagatggcgggtggaaaatcttttactgcagtcaacagaagttatactgcaagagtgtccaaaaatttccttgagattcatctcttttgggctggtaagggaacttgttgtgtacctactcaaggttactatgggccgatgatctcagcattaagtgtcacaccaaattttactccaacagttcgaaatggtgtaccaaaaaggagaagtaaagcaggtgcaattgctggaataacaattggtgcattagtgttaggagtagtatccttatttggaatatttttgttggtaaagaagagaagaacaatagcagaacagcaagaactgtacaaccttgctggacaacccgatgtcttcagtaacactgaactcaagctagctaccgacaatttcagttatcaaaacatcattggggaaggcggatatgggccagtgtataagggtaaactacctgatggaagagttatagcagtgaaacaactttctgaaacatctcatcaaggcaaaagccaatttgtgacagaggtagcaacaatctctgctgtgcaacaccggaatcttgttaaattgcatgggtgctgcattgatagtaaaacacccttgttagtttatgagtaccttgaaaatggaagcctggatcgagcaatatttggacatagtatcttaaaactagattgggcaatgcgatttgatatcattttaggcatagcaagaggcctaacatatcttcatgaggagtcaagtgtccgcattgtgcatagggacatcaaagccagcaatgtcctacttgacactgacctcaccccaaagatctctgactttggacttgccaaactatatgatgagaagaaaactcatgtgagcacaagaattgcgggcacaatgggctacctagctcctgagtatgcaatgagaggtcatttgtcagagaaggccgatgtttttgcatttggagtacttatgttggagactgttgctggtcgatcgaatacaaacaactcccttgaggaaagcaagatatatctcttggagtgggcctggggtttgtatgaaatggggcaagctctgcgcgtagtcgatccatgtcttaaggaatttgatgagaaggaagctttcagagtcatctgtattgctctcctttgtacgcagggctcaccgcaccagcggccgccaatgtcaagggttgtggcaatgctcatcggagatgttgatgtggctgaggtggtcacgaagccgagctatatcaccgagtggcagctcagggatggtgggagcagtagctacaccactagtagctatgcaggatctagtaaccctgagtttagtaggcagagggagaccaaccctctcgcacggtcatcaccaacgatcaccaaagctagtctggtgggaaggtgagaattgaaagttgaattgctgcaggtgattgacccttggtttgcagtgacaatattatacgttggtgtgaattggagaaaataacataattacttactctggtttcttgtctgaaaataaaagctttcctcct

SEQ ID NO: 50878 - DNA, 693 bp, Oryza sativa
  Clone ID: PAT_MRT4530_53323C.1
atgggctggctgactggctcccatactggacttcaactgaggtccacctaccaacctgctcgtcaacagatcgatgaccctgctaaccttgcgacgcccgttgctggggcgagcagtttcaaccgggacccgcccctacgggggcagggacgggtgacatttctaccccacgggtctgttggggccagggccccgcattttgcggcccattacaagaatgcagacccaaaaagcccatgggaatcagcatatataagaaggaaaaaaccaaaccctaccccaacccccaaccagaccgatcccctccccccaccccactgccgcacagcaccgccagtagccgaggaggtggtggtgctccccgccgcggcgggatcggtgagggctccgcgagatggacgccgtcgtcagtccctctacaagccgccgtacctggccatcgccgttgccgccgccgtccctttgcgcgccgccgtgcctggatcccctcgccaccaccatccttctgcgcgccaccgtgcttggagccctagatcctctcgctgctgcgtccctcggcgtgccgccgccatgcctctgcgttcgcgccgtgcgcctggacgccgccgccgtgcctggatctcctggccaccgccgtccttctgtgcaccgccgcgcctggatcctctcgccgccgcgtcccgctgcgcctag

SEQ ID NO: 50879 - DNA, 741 bp, Oryza sativa
  Clone ID: PAT_MRT4530_53324C.1
atggagagcgggcgcgggcacggcggcggcggcggcgatctgttcggcctcgggggagctctccgccccgcggcggcctcggcggcggcgtcgtcggcggggtggggcagcgacagccgggtggggatggtgcactgcgaggacgccgcggcggcgggggaggaggaggagagcgacggcgaggtggagagctcgtacaggggtcccctggacaccatggacgcgctccagcaggcgctgccccgcagccgcaggagaagagggaccaaattcgacaatagcaagtctagtttccttgtgagtgctaaggatgatgtgttgtcttctcaacatactaaaccggaagttccatcccctaagaagcgcaagggtcttcttccaagctctgtcgacaagaacaagtcacagagtaaagaactgagccctgttgacgatgccaccagcagcccaacaaattccaccagcagcccaacaaactgcaggaaggcattgtatccggctgttgtagacagttctccaggcaagaacaggggctacgacgagcgtgagtgctgtaaaaaccggccttgccattgcctgcagacaaaaagcatcaatgtaatggatgcctttgcttctccacctattgcacttctacctgaactaacctcagttcagacgaaacttgtcgcgattagtctcaatgaagtggcggagttgactgatgtgatttctcctagtgaaaagcggagaaagaattag

SEQ ID NO: 50880 - DNA, 219 bp, Oryza sativa
  Clone ID: PAT_MRT4530_53325C.1
atgacggtgatctggcggatgcaggtgactacggcggtctggcggacgcaagagacagtggttgtcgtgcaagacaaaggcggctgtgtggtggaggcggaaggcaacggtgcatgtgcggcggacgcaaagacggtgacagctgggctagacgagctcagttgtctggcgagccccacaacttctttaagcagcgcgtgcagctcggcgacaaattag

SEQ ID NO: 50881 - DNA, 335 bp, Oryza sativa
  Clone ID: PAT_MRT4530_53326C.1
ggacaagcaagtaaggcaaaatgggatccttttttcaagaggccacgggaggatgtgaggaaacctttgtaggggggggttgggattatttttatcaccaggagggtgagattcttaggtcagaacaaggtaggtgttatgcaaagcccccccttgtttttaagtgaatttttacccatggggaaatcaagggaacggagcattcaaaaacatgacctgggggttcccgcttttcttgcagaaaaaggggagtggtacgcttatattgcgaatgggtcgccagcaacatgtaatggagcaggatattatgtctggacacgttgacgctggggggc

SEQ ID NO: 50882 - DNA, 1949 bp, Oryza sativa
  Clone ID: PAT_MRT4530_53327C.1
atggcgtcgtccgggcgacgccgcgacgtcctgctgctgctgctgctgctggtgctcgtcgcgcgcgcggcggcggccgacatggcgggcgaccgcgcggcgctgctggcgctgcgggacgcggtgggggggcggcacctgccgtgggacccctcggcgcccacgccgtgcggcggcgcgtggcgcggcgtcgggtgctccactgctccgcctccggcgaccgcgtcaccgagctccggctccccgggaagagcctgagaggagcggtgcccgtgggcacggtcggcaacctcaccgcgctgcggacgctgtcgctccggatgaacgcgatatccggcgggatccccgcggacatcggcggctgcgtccagctccggtcgctgaacctctccgggaaccggctcgccggcgggttgccggaggggctcttctcgctggcgctgctcgagaaggtggacctctccgggaaccgcctcaccggcggcgtctcgccggagttcagccggctcgcgagcctgaccacgctgaacctcgaccgcaacggcttcgatggcacgctccccggtaacctgacgctgccgaacctcgcgcggttcaacgtgtcgtacaatggccagctcggtggcgccgtgccggcgtcgctcgccgggatgccggcgagcgccttcctcggcacgtcgctctgcggcgccccgctcgccccgtgcgccaacccctcgccgacgccgccgtcgccgcccggggacagcaagggcggcggaaagctctcccgtggcgcgatcatcggcatcgtcctcggcgccgtggccgcgctcgtcgtcgcgctcaccgtggggttcttggcgtgcttccggcgccgggcgacggcgccacggagtcggagcaccgccgccgcggcggccgcccacgacgtggcggagcccatcacggtgaccgtggcgaggacggacatggacgccgccgtcaagcagtcgcactcgccgccgccgccgggcgaaggcagcaccaagctggtgttcgtcggcggcgcgccggagcggccgtacgacctggacacgctgctgcgcgcgtcggccgaggtggtcggcaagggcgcggctgggacgacgtaccgcgcgacgctcgacggcggcgagccggtgctcgccgtgaagcggctgcgcgaggtgagcctctcggagcgcgagttccgggaccgcgtcgcggccatcggcgccgtcagccacgacagcctgccgcgcctcctcgcctacttctacagcagggaggagaagctcctcgtctacgagttcgtcgtcggcgcaggcagcctcgccgccctcctccacggcaacggcgagaagctggacttcgcggcgcgggcgcgcatcgcgctggcggtggcgcgcggcgtggcgttcatccaccgcggagggccaatctcatcgcacggcgacatcaagtcgtccaacgtcgtcgtcaccgcgacacgggacgccgcctacgtcaccgactacggcctggcccagctcgtcggcggcgcggcggcgccgccgactacgaagcggggcgcggggtaccgcgcgccggaggtggtcgacgcgcggcgcgtgtcgcagagcgccgacgtgtacagcttcggcgtgctgctgctcgagctgctcagcggccggccgccgctcgacgcgacgccggacggcggcgccgccgtcgacctgccgcggtggatgcggtcggtggtgcaggaggagtggacgtcggaggtgttcgacgccgccatcggcaacgaggcgcgcaccgagggggagatgatgcggctgctgcagctgggcatggagtgcaccgagcaccaccccgaccggcggccggccatggccgaggtggaggcgcggatcgagcgcatcgtcgaggacgcgtgccggaacgccgactccggcagcacggacggcagccggagcatgtcggcgtga

SEQ ID NO: 50883 - DNA, 189 bp, Oryza sativa
  Clone ID: PAT_MRT4530_53328C.1
atgtcggtgcataatatgtggagctataaaggacaggtcgtccaatatcctacagaatataagaagcaatatggtcaaaggtggctttccttggtcctgcggaggttcttccttgacgagaacagcttccggttcatccgcgggatcggcaactatacacaaaaagagcaaaatcaacacaagagctaa

SEQ ID NO: 50884 - DNA, 297 bp, Oryza sativa
  Clone ID: PAT_MRT4530_53329C.1
atgactacctgcctcccctacttcaggaagctgctcgccgacctcaacaaccgtgccgccggcgatgacgacgacgacgccgtgccaccggtcacctgtgtcgtggccgaccacctcttgggcttcagcctcgacgccaccgtcgccgtgctcgcctcgcgctgccgcccactgcccacccttgcatgccgccttccaccgccccgcccccgcctcgcctcacgcctccgcccaccacccgcccgccgccgccgctcgcgctaccgcccatgcgcgccgcgtgagagagaggaatag

SEQ ID NO: 50885 - DNA, 851 bp, Oryza sativa
  Clone ID: PAT_MRT4530_5332C.1
atagctggcaaatctttgatcccattcatcggctcttcctccaactccacatacaaccttgacggagagccgacaccggcgaatcaattgatcccggtggaacactacaccatggaaagggtgaatgcactgtgggcgcagccccttgcgacagtgccgggctcccctgcgaatctggagcccgttggcgagctccctggttcggcagaaccaggggttcggccgaacccccattggctccgttcggcagtgcgatccctctcccctcaccatgttacgaagaccaaaatccgaggggattcgcctgtgtgacggacgacaacgggcgagctcggtcttttaaaggccgctccgcctcccgccgagcgatatgtgggcaccatgttcacaaaagcaggagatgaggtgctccacaagtacactacaccaccgctactccatccactccgaaggaggatcggtttcgcattcaaggagtgttaactcccggcggtgggtatggcaagggtttgctccggcctttgacgacatcggagaaggagggggcagcggaatcccgtagccctccacctatgaaggtgaagcgtcatttgacgccccctccaattataagggcggacggctaattccaagaagatgaagtaaaatcacaggagccctcggtctataagctcgccgcgcaagtaaagaaactccgcaaggagaacatagagcttagggatcgcaacgcggagctaggggtagaactcgctgaacttagaaataattttgatacccttagtcgtggtttgtgcgctaaaatcaagcgtgcattcatagagatggggaaggagaataagtattatgctaat

SEQ ID NO: 50886 - DNA, 312 bp, Oryza sativa
  Clone ID: PAT_MRT4530_53330C.1
caagtaaaaagcacacaatacaaccactaccctgggggatgatccaaccagtgaagatgatgacttacaattgtagtatcatgcaatggacaactgaatgttgcctgtctgaacaataacaacaatgtctccgatctaacactactttgcagtgtgaagcatgcccaccacaaactgaattgtgtctgaacccttctcactcatgggtgttaagcgctgaacgatctactgtgacctgagtgctctccaaacactattatatttagtcacaacacagacctgaatattcatggccataaaatcttcctgaag

SEQ ID NO: 50887 - DNA, 1332 bp, Oryza sativa
  Clone ID: PAT_MRT4530_53331C.1
agtggatccccgggctgaggaatcggcacggggggtggcggctgggccatgtgcgatcccccccccacctcccgcagagtccacggccgagccgatcccctcgtgcagtgccgccggcggctggggaggaggaggaggaggaggcgatggcgtcgtcgcaggccaacctcgacaagatgcagctccgccagagctaccgcaacctctggcactccgatctcaccagcaccatccaggccgacttcccatattgctgcctcgcgctctggtgtggaccatgtgtgtcatacatgcttcgcaaaagggctctgtataatgacatgtcaagatatgtctgctgtgctgggtacatgccatgcagtgggaagtgtggtgaaagccgatgcccagagttctgtcttgctactgaggtgtttctgtgctttggtaattcagttgcttcaacccgcttcttgctccaagatgaattcaacatacagacaactaaatgcgataactgcatcattggcttcatgttctgcctccaacaaattgcttgtatcttctctatagttgccgctattgttggtagtgaagagctttcagaggcttcccaaatcctttcctgcttgtctgatatggtctactgctcggtttgcgcctgtatgcagacccaacacaaaattgaaatggacaagagagatgggaagttcggcccacagcccatggcagtgcctccaatgcagcaaatgtcgcgcatcgatcagcctattccacctcctgttgggtacacaccacaacagccagcatacggtcagccttatggtggctatcctcctgctccgcctgctcaaggttatccaccagctgcttaccctccggcaggttacccccagggtggtgcataccctccccctggctcttatcccccacctggttcctacccgcctcagggctcctaccctcctccacaaggttactacggcaagtaaaggaaatgcagaaattggagatatgtctttgtgacgaaatcggtatattgtgaacaatgtaaacattagggtggttgtagtgttattataggtgatgtcgatatattaatcgatctgtgactggtctgggtggtaaactgcaaacataatttggattcctccgggtgtggtatactgtgaacccgtttcgtagaaattatcagctccccgtgttgatcattcttgaatacgttcttctctgaataaaggatcgccatgaaatgtcaacttaaatttggaactttttatcagaatttggtgataacattgcctgtgtagattgttgcttgtctacaacgaacaatcaacaactggagcttgt

SEQ ID NO: 50888 - DNA, 712 bp, Oryza sativa
  Clone ID: PAT_MRT4530_53332C.1
gcacgagggctacttcagaagttttcaggctcatccgagtaagaagagatcggtgatgggttatagagtgtagtagctgcctgcaggcggtggtgctgtcgcagttgctcctgccgtggacgcacattgcggtggcggctggcgcgaagagctcgtcgccggcgcgggggccgaaggccccggcgccgcccctcgtgcccgggccgccgtccacgccgcggctccccccctggctcccgtcgtgctgcgccctgcgcgtcaaagtcggcacggtccactgcggcggctggaccttccttcttatgcaggccacagccacggcggccaccgagcccgagtatcgcaccggctggagtagctcgtgcgttatccctctggccctcttctccgtcgacccctccgcctctcctgggccctccttccagctacttggagtattacaaaacttgaaggggataacatctgatcaaattgcctcccagtgtgtgctccaatcatatgcaagtggaaatgtccagctttttaacaagaccgatgcacagatgctcacacaatttagtgcacatttcttgagcactacagatgaaggctgcaatttcgcagcttatgtaccctctgaagaggggacaccattgcaaagggctgagtggatcaagtacttgggagctttcacaaattcagaagatagggctaacacagtttatgacgcaat

SEQ ID NO: 50889 - DNA, 2000 bp, Oryza sativa
  Clone ID: PAT_MRT4530_53333C.1
gatccgggacaaatccatccggcaaaatcggccggacgagctcgtcccacttggatggagcacacggcgtctcctcggtgaccgccggcgctcgtccgcgcccgtgcccgccgcctcctccgtgaccgccggcgctccgccacgactgcctgccaccacctctgcgaccgccggcgctcctccacgaccccctgccttaacaccggtcgccgccgcgagcgagatgctcggcgccatcccgccgctcatcgtgatgctcgacgagagcggttgcggcagctgcggtgatgtcgacgcggcgggctcgagtggcggcgaagcttggaggtagggagggcggcggcggcggatccagagaagggggactcggcggcggcgaaacttggaggtagggagagcggcggcggcggatccggcgcaggggatctcccgatccagccgcggcgacgacggtgggccagcgggttgggtgctccggcggtggtggccgtcctgctgctgccgctgtgcttgatccggttgttccacgcgtggatgcaggtggcgcaggcgacggtcgttgacggtgatggcaaacggcgtccatcccatctctccctcatcgcttgcccttggcacttgctcctaccagcttgcctgctgctcatccgcttacgcttgcccttggcgcttgctccaaccttgcctgctgcttcagcattctggcggtcttgtaggtatgcactgaagtcggtagcaaggaaggtatttgtaagccaccgcgaagtggcctttttagaaatcttggtggaggacaggaccttgttttgcagcatgtcgaagcggatcatataatttgctttaggaaccagctgcatcccaagactgtccccgaactcattgagtcgcggtattggttccttcttgacatcattcagaacggcatacatgatgccatcttcgttgacgctgaggacaggggagaagggcagaacatgtggcaaccccatctggttgaagctctcgctcgcccagatgtctccgacagtcaaggtggtttcctctttccagtgcttgaaatctggggacagtgaccatgtcttgagcttcacctcgttctcgggacaagaagcttcgcagtagccgatcaaggcgaggaacttgatggcaccagagacgcggccgatggaacggtgttcatttgggctgaagcaatggcggggtttgtcgtgggcgtcgatgcagtggggcaacgggacgaacgctagcctggggccttgcggtgatgacaagatgtcgtcgcaaatcaagatgcccttgaggggatcaacccagaagatggtgccggcgaaggagaaggccgtgtcgatgtggaagaagtaggtcgggccacagagatgtggagggagagggaggggaggaatcgatgactggatccactcgccgccgttcttcaccctcgcgaagatggtggctttggggagcgcggggttgatccctctagtggagggggaggtgacgatgtcggcgaagatgtaatcatcatcatcggcgccggcggcagagacgaggacagcgccgcgaccgaggggaaggaagatgggggcagaggtcaccgaatcgggaattggggggatagcggtgaggtggttgttggaggcatcatagaggaggtagcatttatcggcgtagataacgacgatgcccttgtgggtgctggagatctcgccgatcccaagcagatccaggctcgccggcggcggcagcagcatgtgcaggctgcttacttgaggtgggtcgccgaggaaggcgacgggtttcacggacggcgccatcagccgctccatctcctccacggaacccatcatttgcactgtgctccagctccatccgccgacctcgattatggccgcaacatctgggtctctgctggcgccaccgctggttaaccctgctgcttccacgaaacgcaccacgcgttccagcaacacacagggaggaggcctggggtggtctgccat

SEQ ID NO: 50890 - DNA, 275 bp, Oryza sativa
  Clone ID: PAT_MRT4530_53334C.1
tatggactagtcgccgccgccgtatatcccgccggcaagctaaatacccctcccgccgtggcagcccgatccgtcgccggacgacctccactgaccagacctactagtcggcgcaggacgacgacaccacgactactaataatcgaccactatcgtcacttactagagatctcgaccattcttctccttccgctctccctactactactatccataccggctcccttcactactgtaaagtaaacactgcgtgaaactccggtgtaatacaacac

SEQ ID NO: 50891 - DNA, 468 bp, Oryza sativa
  Clone ID: PAT_MRT4530_53335C.1
atggcttgtggagggagagcgccagtgaccgcgaggtgtggcggcgaccgcgaggtgctgtggcggcagagctggctcacggagggaggagcggaggaaacggcggtggcagccgtgggggaatccgtgccggcgccgccgtcgtcggtcgttttcctcgtcgccgagccgccgctcctccgccgccagcggagggccgcctcgtcgccggtcgtattcctcgtcgccgagctaccgctccttcgcagccaccgccagcggagggccgccttgtcgccgagccaccgccgttcctccgcagccctccgcatccgccgccagcggtggccctccgcgtcgcgccgtcgagccgccgctcctcccgccgccctcctcgtcgccgagccgccgctcctccgcagtcgccgctcctccgccaccagcgcctggtcgccgagctgccgccgctctttcgcgtcgcgccgctga

SEQ ID NO: 50892 - DNA, 655 bp, Oryza sativa
  Clone ID: PAT_MRT4530_53336C.1
gttacaattatagtgcttgtcatgtgggggcgtaagtatcagagtaggcataagtctcaagttaaacaaggataatgttttagtttaatttcgttttatctctagagtttgttagtaagttagttaggattgttaatcaattactttcagattaggatacgattgagttttgttatctgtaagattttcctatttaaagggattgggaggaagtaatcgaataagaagaaatttattcaatctatctctctcttcgccattacggcgtcgggatgacgaggagaactttgcccttgcccttccgccagccacggctacgctttacattcaactccgcaaaatagtctcaccgaagctcgtgacagtgctgaagtgttttttgggcccttttttcctttccagatgtcttaaactcctgcagttaacattagtgctgaagtgttcgctgtcttccatggcacactgtctcccgtaccattgtacgcggtactggtgccaagccggggtttgacaaattggagtagcaccaatttcatcttttactttgggatatttactgttgcatatacaacatttgatagcacatgtacgggcatgattaattttttatatgatttaatgttggaagaaaaaataaaaattaaaatctatattt

SEQ ID NO: 50893 - DNA, 548 bp, Oryza sativa
  Clone ID: PAT_MRT4530_53337C.1
cggcgcgacgcgaaagagcggcggcagctcggcgaccaggcgctggtggcggaggagcggcgactgagggcggcgggaggagcggcggctcgacggcgcgacgcggagggccaccgctggcggcggatgcggagggctgcggaggaacggcggtggctcggcgacaaggcggccctccgctggcggtggctgcgaaggagcggtagctcggcgacgaggaatacgaccggcgacgaggcggccctccgctggcggcggaggagcggcggctcggcgacgaggaaaacgaccgacgacggcggcgccggcacggattcccccacggctgccaccgccgtttcctccgctcctccctccgtgagccagctctgccgccacagcacctcgcggtcgccgccacacctcgcggtcactggcgctctccctccacaagccatcgccgccgcacctcgcggtttccgccgctctccctccacgagtcgctgccgccgccagcactcagagagagagagagagagacggaatacggggagagacgtagatatgga

SEQ ID NO: 50894 - DNA, 757 bp, Oryza sativa
  Clone ID: PAT_MRT4530_53338C.1
tccatatctacgtctctccccgtattccgtctctctctctctctgtgctggcggcggcggcgactcgtggagggagagcggcggagaccgcgaggtgcagcggcgatggctcgtggagggagagcgccggtgaccgcgaggtgcggcggcgaccgcgaggtgctgcggcagcggagctggctcacggagggaggagcggaggaaacagcggtggctgccgtggggggatccgtgccggcgccgccgtcgtcggtcgtcttcctcgtcgccgagccgccgctcctccgccgccagcggagggccgcctcgtcgccggtcgtattcctcgtcgccgagctaccgctccttcgcagccaccgccagcggagggccgcctcgtcgccgagccaccgccgctcctccgcagccctccgcatccgccgccagcggcggccctccgcgtcgcgccgtcgagccgccgctcctcccgccgccctcctcgtcgccgagccgccgctcctccgccaccagcgcctcgtcgccgagtgcccggaccactgccactgccatcttctccgcctaaaccaccgttgctgctaccttctcctcttggaccgccatcgtcaccaccttctctatatggaccaccactcttccattgtccttgcaatgttgttctcgatcctaactggctttggggaaggcgagattggagttgcagtgaaaacagggaaaatgatgcatccgacttgagtccatgcaaacattggctgggtaa

SEQ ID NO: 50895 - DNA, 448 bp, Oryza sativa
  Clone ID: PAT_MRT4530_53339C.1
cccacgcgttcggataggtgcaacagcaagagcacatggtcattccaaggtcgacgacgatgcctactatggatcttagaagcattgctgttcatgattgtgctagagcaggaaccaccaggaagaggtgagagaagctttcttactctttagtcccttcacgctaataatacagtatgtgcctgaaagtgtgtcagataacgagccattggactgccacttgcaggttgtagcgaagggcacattttcttgcacacactctaggcgctacttgctgttttagctagagcgaacaaagagtagaagagctgaccactacctctcggtggtgtgttctgatcatgcatgaacaggagcatcagggcaccaatgctacttattaggcatcgtcagaaagcttggatagcgctgtgctgttggcgcccaaactagtcagacacatgggcgg

SEQ ID NO: 50896 - DNA, 543 bp, Oryza sativa
  unsure (1)..(543): unsure at all n locations
  Clone ID: PAT_MRT4530_5333C.1
ttcacacaggaaacagcgtatgaccatgattacgccaagctctaatacgactcactatagggaaatgctggtacgcctgcaggtaccgtccggaattcccgggtcgancccacgcgtccgcgtgcagctgaagaagtcgcttgcttcctcctgcatagtagcatacatggatttngcagacagttagatggttccttgtcgaaagcgtnttgagttgaattgatctgacctcggtgacgttcgaacattcggtgatgacctcttccccctatgcgattccagtgaattacnnaaggatttcttgtggatgacggggctgccagtccgttatgatgtctgttatctattgactccctctgataaaagatatttgatgtttagaacattatttggttaaaattttggaaaattcattccatcttgttgtgactgtgttggtgaattttgcatgcggtatttggcgattttgcaacctcttgacttatgcaaatcattcttatcctataacgcctggtggtttccatggcaaaaaaaaaaaaaaaa

SEQ ID NO: 50897 - DNA, 214 bp, Oryza sativa
  Clone ID: PAT_MRT4530_53340C.1
aaaaaaagttgggaacctttttttagtccgggtttcgaaaaaaatcaccaccaaggggcaaactgggggggttttattttactttaccccgaaactagttttaaattaaattactttgggggttggttttgggactaattcaaaaatccgggggagaattggggtggaaatttaggagggaagggcccgggcttttttcccctgttgtttttgg

SEQ ID NO: 50898 - DNA, 341 bp, Oryza sativa
  Clone ID: PAT_MRT4530_53341C.1
ttttagttgaagctctcgcgcgcggcgcgggcatgaaggcgtcgtcgccgtcgcaagggcagagcccgaggacgccgttgccgcgcgccaccttcggcatcggcgagcacacgcggtcctactccgagccgtggcttactggaacaaagttggcgagcacctgcaacgactcgtgcgtcaacgacgtcgagaacttttcgcgcaccgtttccggcgccaagtctacgcagctggtgggcttgtcatcagcgttgcaccccaagatgctcgcgtccgtgctgtcccactacgccgtcaagtggcttcccaacgtggtggccgtgtcgcttttgtccttgtcg

SEQ ID NO: 50899 - DNA, 318 bp, Oryza sativa
  Clone ID: PAT_MRT4530_53342C.1
atgggcgccggtggtggtggaatgagaggcctggccgggccgcgccgcgccgctcgctcctggcccccagacttgctcgcccagcggcgcgcgcgcgggggaggaggaggatgctacggcgtggcggggaaggagaggagctcgtccggcgccgcctcctcgccggcggcgaccgcgcggaggggaaaaaagacatgttcggctgtcgagctacaagccagaatagtgtcgcaggtagtaggcaatggtgtgcggctgcggtttcctcacctgctgaaaaagcccaaaaccttcaagagttactctgacatgatttag

SEQ ID NO: 50900 - DNA, 1710 bp, Oryza sativa
  Clone ID: PAT_MRT4530_53343C.1
atgaagcgcttcttccagcccgtgcccaaggatggctccccggcgaagaagaggcccgccgccgccgccgccgcctccgcctccgactccgactccctcggcggcgacgcccccgccgcggccgcctgcgccgtcggggagggggattctcctcccgctccccgcgaggaggaaccgcggaggttcgtgacgtggaacgccaacagcctgctcctccggatgaagagcgactggccggccttctgccagttcgtctcccgcgtcgaccccgacgtcatctgcgtccaggaagtgcggatgccagcagctggttccaaaggggcaccaaaaaatcctggtcaactgaaagatgacacaagctcatcacgagatgaaaagcaggtagtgctgcgtgctttgtcgagtccaccttttaaagactatcgtgtctggtggtctctttcagactccaaatatgcaggcacagctatgattataaagaagaagtttgaaccaaagaaagtgtcattcaacttggatagaacatcttccaagcatgaaccagatgggcgtgttattattgcagaattcgaatcgttcctcttgctgaacacttatgctccaaacaatggatggaaagaagaggaaaattcatttcaaagaagacggaaatgggataaaagaatgttggagtttgttcaacaggtagacaaacccttaatctggtgtggagacttgaatgtcagtcatgaagaaatcgatgttagccatcctgatttttttagcagtgctaaactcaatggatacatccctccaaataaagagggggtcagaatgggaatactcgagcagcgggttaagatgaccagtggcattcaattaagtcaagaaaaacccctgaacacgctgcgcgaccaggcatgctcaacctcacgagaggagcacacgtctgccagcgccagcaagtggggctggagccacttcaaccaattcaatattgggaagggctgggaatatgcaaatttcagttacaagaacatcaatgcatgtgaaggaatccgtttctgtcctctatcagtgccacaatattatagtagattgtggacagccaggattcaccctgtcagagaggcggcgcttcggcaatatattgtcccagccttgacaattgtggactactcgaattatcaagccacgctgagctattcaagctcagagcttgttatgctgtacaaaccttggctggccatgctcaaatcaagcatggagcgatccaagtttgaattgctcataagccttgagactttttttactactgcctgcatgggtagaggtcatctatgccaaggaaagctggtagatgcttacagatatctgcacaaagagaaggacatggattgtggcttttcttggtctggacatccaattggcaatttgagtttacaatttatcaattcaaatgggcttacaggcttaaagataatcctgtaccgagggaagagaatgcgaattgactatttccttgtttcagaaaaactgaaggaccaaatagtttcatgtgacattcatggtcgtggaatagagctagaagtgcaaatggaatacgacaggtacctcaaccccatgaaaattagttacatgaacccaggattttatggaagtgatcactgccccgtttcacttgagctctcggaagaagtagaagcaccaaaacccaagtcctccaactaa

SEQ ID NO: 50901 - DNA, 579 bp, Oryza sativa
  Clone ID: PAT_MRT4530_53344C.1
atgaacagcgaaggagatggccgacgacaagctccgaagggcggcgagatactggtcaacgatgacagcggcgttccagcgatctttggcgaagacgagatggtggacggtgttctccttgcagctgcgaatctaatggaggcggcggcgaccgaaggcgacgacgggagtgcaaacatgttcatggagtattgcattgggaagaacaaagagatggagctggaggtggctcgagttagcgggaacggcgatgtcgatatatcggtggctgcagctgaggacgaggacggcgttcccgttgttcacggtgtcttcttcacgcagacgaggattggcattgttttctatttattccagatgccgccatcatcgaccacctccgtggtgggaggcctcgagagccactaccgttgccactgttgtcttcgaccccatccatggtgggagggctcgggagccgccgccaccatcctcgacgccaaccgcggcgggaggcaagggagccgccatcctcaaccccatctgcgcgggagggctcggaagctgttgccaccgccatcatcgtcgttatcctcatag

SEQ ID NO: 50902 - DNA, 357 bp, Oryza sativa
  Clone ID: PAT_MRT4530_53345C.1
atggcggtggcaacagcttccgagccctcccgcgcagatggggttgaggatggcggctcccttgcctcccgccgcggttggcgtcgaggatggtggcggcggctcccgagccctcccaccatggatggggtcgaagacaacagtggcaacggtagtggctctcgaggcctcccaccacggaggtggtcgatgatggcggctgcaacggtggttgtcaacgacggtggtggagagagaggaaggggaaagagaagagaggggagggaggtgaagttggaactgacagttaggtcccacgtgcagttgagggtaacagagattttttacggaaaacgtgatggagtggcactggtctaa

SEQ ID NO: 50903 - DNA, 486 bp, Oryza sativa
  Clone ID: PAT_MRT4530_53346C.1
cccacgcgtccgcccacgcgtccgttctagttttagcatatgatacaattgtgtaacaatttctgatcgaggtgctaaaaaaaaaaaaaaaaaaaaaaaaaaaaaaaaaaaaaaaaaaaaaaaaaaaaaaaaaaaaaaaaaaaaaaaaaaaaaaaaaaaaaaaaaaaaaaaaaaaaaaaaaaaaaaaaaaaaaaggggggggccctttaaaaaaaacaaatttaactaacccttgaatgaaaagaaaaatttttttaaaagggcaaccaaaataaaattaacgggccgggttttaaaaacgtggaaattgaaaaaaccttgggttaaccaaattaaatcgctttgaaaaaaaaccccttttcccaagtggggaaaaaaaaaaaaaggccccaacaaatcccctttcaaaaaatttgcccaccttaaatggaaaagggaaccccccttttagcggcaaataaagcccggggggtggggggttaaccc

SEQ ID NO: 50904 - DNA, 384 bp, Oryza sativa
  Clone ID: PAT_MRT4530_53347C.1
caagcaaaaaatctaacggcgtcatttaggcagaaccacctttctacatcatcatagtcatagcacaagaactcgacgaattcagaagaaacattggcagctacacctacagaatgaaaaatgaaaagaaaacacgatctaatatattacaagggatccttggatatatcctaatagcattgtttcatccggagcaccgagtcgcgacttgtggcgaaaacgggtgccatttccatgcttatgccattactgcttcgcctgaaaaaatgagatgttttttttttggttagagattcacacttatgttcatgaattggctcttttgtgaaaaatgtgatttggtaaaacatgtgcggaaaatctacctgagagtagatgaaagtt

SEQ ID NO: 50905 - DNA, 1731 bp, Oryza sativa
  Clone ID: PAT_MRT4530_53348C.1
aaacagaaagccccaatgcaggtttgcaaccaagcagagcaagttttttttttaacaattcacaatttcaaatccaagagaaaaacaaaacatggttccgagctctaacaaaataggcatcacaatcaccgttctccacctgaggatccaatcattcaaatcctatctaactaccgagtactaccaaccaggaagagaagaacacaacttcaggatgagattatccatggagcccacgagctcagaagcgaacaccggactgcatcacaccatgcatgcccaggggggaacaacgagagctcaacgtcgaacacctgacgctcacaagaacgacgcggcgagcagagcggcggcggaggccacagtggccgcaacgctcgtggccgccgcggtggcgccgttcttcttctcggctttgtctgcagcctcttctcccgcgggcgcgtcggcgggcgacatgtcaggcgtgtcggccggaggcgcgggtggggaatgggaaggcgacttgcccttctttttcttcttgcccgccgccttgggggagggcgccggcgaggagccttctggcgcgggagaagcggctggcacatcgcttgccggtccgggcgccggcgcgggggaaggtgcgccaccgaagagctctggcggcagcagcacgctgtccaccgtgtggataaccgtcggggtgtcgtccagcacggtggacgcgacgcgggacttgtccatgccggtgtccatggacacgtcgtcgcccttagtgacgacggagaggtcgtacttacccgctccggtggaggccagggtctggatgtggcccttgatggtcttgagcgacgccttgggcgcgtactgcggcaaggcgtggtactgcagaagcgtcaccagctcggcgctggtcagcttgctcagatccggcaggcccttggcctggaacgcgtcgtcgttgggcgcgaacagcgtcagcgccttgtccatggccgcctggtacatcttcatcaccccggacgacacgatgagccgcgcgaactgcttgcacccggccttctcaagaagcgcggtgaggttggtcgacgcggccgacggggagtcgaagaggccggggaaggtgatggggtcggagacctcaagaacggagaggttgtacggctcctgcttgacggacttggtgtaggtggcctggaacttggagccgggcgcggcggaggcgaacccaaccttgccgccgcgcaggttggtgatgttgacgtggcccatgttaccggaggcgtcgccggtggtctggtacagcgtggtggtgagctcggagccgtcgctgagggagtgcagcttcttggtgtcgtagtagtcgaggagggtgaggaggcggagcgcgttcttgatgtcggcgagggagaggttggagacgagggaggacatggcgccgttggtgagcacgaggcaggtgaccgtgctccggctgttgatctcgtcgcacaccttggtctgggagaggtagctgttgtacagcgagtactccgggtagccgtcgaggatgtccgtgatgttgtgggagctcaccgccgcgacggcgagggaggcggccaggaggaagagcaggcggcggtcggtggcggccatggcggcggtggtggtgttgtgtggtgtggtgtgacacggtggggagaggaaggagagtagtgtgcgccgtgttggggttttagctttttctggcccggccggtttggcctgttg

SEQ ID NO: 50906 - DNA, 338 bp, Oryza sativa
  Clone ID: PAT_MRT4530_53349C.1
tcggtcaatatcagatgcaggaaacagaactgttacagtatcaggtgcatacaacatataatgtgtcagataggaagatatatggcctaactgctaactccttaacgcaataagctgcgaaaaatcatgacaagacacaggcatgggaacagatggcactggttgcacaacaatatcaatatcagaacatttacatagatgatgccataaaagacaacatacatctagctcgagccagagatctataattggatagaaaactaaattactctaaatgtatgtggtgtgttaacgcgcgatcaatatatatgatctaacctagagactgtggcgcaacc

SEQ ID NO: 50907 - DNA, 1800 bp, Oryza sativa
  Clone ID: PAT_MRT4530_5334C.1
atgcaaggttcagtagtgacagcaaggcgcgctgtccatggcatcctcgtcgccgtcgtggtggtgcagcgcctcctcgccgccggcgccagtccgccggcggatcccgtccattgcgcgtcggggacggcgcgctgcaccgtgaccaacgcgtacgccgcgttcccggaccggtccacgtgccgggcggccgccgcggcgtacccggcgtcggaggaggagctcctccgcgtggtggccgcggcggcggcgtccgggaccaagatgaaggcggcgacgcggtacgggcacagcgtgccgaagctgtcctgccccggcgccggcgacggccgcggcctcgccatcagcaccagcgcgctgaaccgcgtcgtcgccgtggacgccgcggggatggcgatcacggtggagagcggcgtgacgctggcggagctgatcgacgccgcggcgggcgccggcctcgcgctgccgcactcgccgtactggctgggcgtcaccgtcggcggcctcctctccaccggcgcgcacgggagctcggtgtgggggaatggctccgccgtgcacgagtacgtgaacggcatgaggatcgtcacgccggcgccggcgagagaggggtacgcgaaggtccgcgtgctcgccgccggcgacccggagctggacgccgccaaggtgtcgctcggggtgctcggggtcatttcccaggttactctaaaactgcagccgatgttcaagaggtcggtggcgttccagcactgcggcgacggcgacctggcggaacgagtcgtcgccttcgccggcgagcacgagttcgccgacatcctctggtaccccggccatggcaaggccgtgtaccggatcgacgaccgcgttcccagcaacacgccgggcgatggcgtctacgatttcgtcggcttccgggccaccccaacgctcgccatccaggccaaaaggctcgtcgaggacggcctggaagcgaccgggaatgccgccggcaagtgcctcgcggcgtcgacgacgaactccatcctcgcagcccgcaactacggcctgacgaggaacggccagctgctcggcgcgttccccggcacggcggtggtcggctaccagaaccgcatccagtcgtcgggatcctgcctcgccggcgccgacgacggcctcctcaccgcctgcccgtgggatccccgcgtcgagcacggcacgttcttcttccagtccggcatcagcgtgccgctgtccagggcggcggccttcatccgcgacgtgcagcggctgcgcgacctcaacccggacgcgctctgcggcgtggagctctacgacggcgtcctcatgcgctacgtcagggcgtcggcggcgcacctcggcaagccggaggacagcgtcgacttcgacctcacctactaccggagccgcgacccggcgacgccgcttctgcacgaggacgtggtggaggaggtcgagcagatggcgctgcgcaagtacggcggcgtcccgcactggggcaagaaccagaacgcggcgttcgagggcgccgccgccaagtacggcggcgcgcgcgccgcggcgttcatgagggtgaagcgggcgtacgaccccgaggggctcttctccagcgagtggagcgacaaggtgctcggcgtcgccggcgccggcggcgtgagcgtggtgagggacgggtgcgcgctggaggggctgtgcgtgtgctcggaggacgcgcactgctcgccggagaagggatacctctgccggccgggaagggtgtacaaggaggccagggtgtgccggcgtgtcgccgacgatctctag

SEQ ID NO: 50908 - DNA, 218 bp, Oryza sativa
  Clone ID: PAT_MRT4530_53350C.1
cgacgtcctcctcccacacgcctatcgtcatcctcgcgatcgccgcattcatccatccactccccccgcacgccgaaggaataacctagaccagagacgaccaaggagagcgtctccgatggtggtggtggtggtgggaggcggaggaggaggaggaggaggacgaggggtgaagaaggaggagggggaggaggaggcaaggggaagaggaagaggac

SEQ ID NO: 50909 - DNA, 237 bp, Oryza sativa
  Clone ID: PAT_MRT4530_53351C.1
atggcgctcatgctcggcggcgatgggcggcgagtgcatgggggcagcctgcgacgggcggaccgtggtgatgcactgataggagggaggaggcgacgacgacgacgtggagggctccccaacgtgcatgcgctcgcctccgacgccgcccgcgtgcgctctccgcctcatgcgctgcccatgtgtgcgcaccgctcgctgcctccggcgctgcccgcgctcgcttaccgctcatag

SEQ ID NO: 50910 - DNA, 151 bp, Oryza sativa
  Clone ID: PAT_MRT4530_53352C.1
attaaatattgggggtttttctatacttgaattcaagggcaacttaaaatacaacgaatttaacatacaggagaccaaaacccgtaatcaaggccacaaaaattaccaaagagcgaaacctacaaaagatcaagaccccaacagaacaaaa

SEQ ID NO: 50911 - DNA, 640 bp, Oryza sativa
  unsure (1)..(640): unsure at all n locations
  Clone ID: PAT_MRT4530_53353C.1
accgcgcatacatgctgatcgccgaatgcgccacgaagacgttcccgtccaggccaagcctcgcggtggaggaatggatctgtcgcccgagaacgagcccgtccgtggctgcgcaggacttgagagcgagcgggtaggtgtagtggtcggggaagcaggcgtggccctgcggcctcatggaggcgaagaggatcagcgcgtcgcggtggagggaagcggcggtgaggccccggaggaggacgttgaagaagacggtggtgcggtcgggggaggcgtcgagcaccgcgcgggcggccgggagcgcggcgcacgcggcgtatgcctggatgagcttgacgcggacggcggcggaggccgggtgggaggggaggcgcatgatgaagatgatgcgcgcgtgcgcggcgcgcatggagcggatgtgggcgggcgcgcggcacgagtccacgatgcggatgatggcgtggccggccggatgcagctccgggaagatgctccgcggcgggttcatgggaaacccacccttccggctcggngcggcgcggggggttgatgtgcgcgtggtgtgcgcccgagagcccagcctctcacggaatggggcgcgcatgtgacctcggcctttgctctcttcaggccagtgggc

SEQ ID NO: 50912 - DNA, 586 bp, Oryza sativa
  Clone ID: PAT_MRT4530_53354C.1
tcatccacaatagggtgtcgctttttatcttggccaaggatcaaattcacgtgagcagcacactcacggagcaacaaacacacacaatagctctctggggatgaacacacagaagtgcacaagcacacacacaagttttttcttggcaacaaatgccttttcttttcttcactcacttacaaactgatgattacacggcttatgtagcctcgcgtacatgcacatatagctacttcctccgtttcacaatataagtcattctagcattttccacatttatatttagattcattaatatcaatatgaatatgagaaatgctagaatgacttacattatgaaacggagggagtagctaacagcccgaccgggtcgcccgcacgaccatgagccactcactcacacgatctatgcgtctcacgcgcaagaatcgctcctccgagctgactaaaccacgccacaaacatgctccactaatcttgcatgcagctaactaattcgccactaatcctcttattccctagacttgttcagttgctagttatgctgcaacacatgcatcttccaatcactagcactaactaactc

SEQ ID NO: 50913 - DNA, 914 bp, Oryza sativa
  unsure (1)..(914): unsure at all n locations
  Clone ID: PAT_MRT4530_53355C.1
gaagacttgngagaagaatggccgggaaaatggacaagacgacggtcatcgtgtccgcggtggctgcttcccttggcgcgctcagcgccatcctggggttcgctgccgatgccgcaaagcacagtgattgcgcatcagcgcttgggatggcggtggccgcgtcaatcttcctgatgatggcgaaggtcaccgtggcggccggcggcggctgccgcgagtcccgcgccgtcgtcccgtccgcgaccaagcggaccgtcgccgtcgcttgcgccgccatctcgtggattgcgacggtgatcgcgttcgtgatgttcctggacaccggcggcatcagcgttgtccacggctcgtcgtcgagatcagcagcggccgagctgggaatctgcgcggccatcttcctgatgataacacacgtcgccatggctgctgccggctgctgctgccgcagcttctgcatcccctccgagacggcgcgggtcgtctgcgccatcacctcatggatagtgccggtgattgtgttcgtgttgctcctacacgccgcggtcgaggagtctgattgcgacaagatccacaagggcgtctacgctggcacgggcgtactggtcctcgtctccacggtgctcggaatcatctcctacctcatgctccgcacgcggccagagccaacgccgccgatcgtggtcccgatggtcatcgcgttccagccggtatatcctaatcctcttctggtgcctgtgccggttcaagcgccgccgccgaaccaggcgttcgctcatccggctactttgccgccacaaggaggatggtacgggcaagcaccgaaccagcaattcgcggcacctgctcctgctcaaggctatggatggcaagcgccgaaccagcaacatttcccatgcgcaggtgtagtaccgtga

SEQ ID NO: 50914 - DNA, 294 bp, Oryza sativa
  Clone ID: PAT_MRT4530_53356C.1
gcacgagcagctgccgcttgacgatcctgagtgcttgctcaacgataaacatggccactgcaggaccttcgatgtgatctataatgtgtggttcggagacctttttctacatggccaagaacattgagatttacgggtgcattctccttaatccaagcatggtgacacccggtgccgagtgcaaggacagggccacccctgatcaagtatctgactacaccctcaagctcctccacagaaggatcctcctgccgtccccgtatcatgttcttgtcaaaatgggcaaggctttat

SEQ ID NO: 50915 - DNA, 275 bp, Oryza sativa
  Clone ID: PAT_MRT4530_53357C.1
gtaccgatagcgcaaagacgaggtgcactgacatcagcccgtgcgatgttgcggcgcaaccacagagagtaaacagcccccgcgcggcgccgcacggccgcactcactcacacagagaaacacaccaaccgggagcgccgaagacgctccacatgcgccggcgcggcacagacaacaaaacgaaggaggagaaaccaaccctcgcggctccggcgcagcgagtagagtgggccggagcccggcgtcgtcgtcaaaaacaacgccccggaccttaa

SEQ ID NO: 50916 - DNA, 1834 bp, Oryza sativa
  Clone ID: PAT_MRT4530_53358C.1
atgctcgggaggaacgccatgctcgggccgccgcgccgtggcgagggggagacgtcccggcgtggagagggaagcgaaggcgacggcaatggcgagggcgacgcggttgaccggctcagcgccctctcggacggggtgctgcaccacatcatgtcgttcctcaaggcctgggaggtggtgcgcacctgcgtgctctcgcgtcgctggcgccacacctgggcgtccgcgccctgcatcgacctccgcgtccggtacaatgacgttgacagcgagccgccggaggagctgcgcgatttcgtgaaccgcctcttccgccgtagggaggcgtcagcgccggtggacacgctccgcctgcagtccagcgacccggacgagttgtttgacaacgacgatgccaacgcgtggatccggactgccatcaaccgcaatgctcgattcattcatctcactggacaccgtacagagatcggggtgttaaagcacagggccttggtctctacccacctcaagatcttgaagctgtcctatgtcctgatcgatgacaagatcctcaagcagctttcttcagggtgcaaatctttggaagaactggatcttaaggactgcgcgatgaccggccatgagatctcatctgcttctttgaagattttgaagatggataagtgcaagattaatgtggacttatcaatcactgctccaaacctcgtattgctgaatctgatcacaccttacatccaagttccatcgttcaagaacttggagtcgctggtgtcatgctctgtcatacttgatgactttttcttgggtgatgcttatgaacacagtagtgatgaagatgatattgatgaaaccactgatgaagatgatattgatgatcagaagaagacttacaagacagggtatggatttggtttccctcaaaaaggatatgggcttgctggtaacaaggatgattatggctatggtagtgatattgagagtgatgacaatacctatgaatatagtgagattgcaaaagagtatggagatcagcagtatgcccagaattccagtaccattgttcagggagttgggacaagtcagcagactaaaactatttctggtggccataattttcttcacggcctttcaaatgctagaagtttggagctgttagctggtgctggagaggtggttctttctagggagttgaaaagctgcccaatttttagcaacttgaagaccttgtcccttggtgaatggtgtatggatgctgaattcgatacattaattttcttgctacagcgttcacctaatttggagaggctttttctggaacttaaattgaacttcaatactaggaaggcattggaaagtggtgctaaacctatgggaagatcatttacttgtaaagacctgcaaatggtgaagatcagatgctcgaaggatgatgcgagagtgcacatgctggcacatttgttcagagcgaacgacataccctttgagaagatttatgtccgtcggtctgggagctctcgtctccgtggcgagaagtttatgagagatctaggcaaacatgaactggagttctgggggtcagattcagagttctgtggtccaaattccgagttctgtggttcagattcagagtttgaggattcagatatggagttctgatgcaacgtcagatcatctatcgttcatcatatcttctatcgtatttagttcttatgttcggattgcaatcgtcttctatatgtacttagaaagaatctgacggcacgacgcattaagcacgcatagcagggccgtgacagatcggttattcctctttggggtaatattgaatgaacta

SEQ ID NO: 50917 - DNA, 170 bp, Oryza sativa
  unsure (1)..(170): unsure at all n locations
  Clone ID: PAT_MRT4530_5335C.1
ggtaacagggggaggccaacgcgggggaaacagctgacgcgctccgctccgttccgctgccgccgttggccgtccgggcggtcgntgttgctgacttgaccagagatggtgctgcaagggggcagttggattggatttagagggtgcttttatatagaggagcacgagga

SEQ ID NO: 50918 - DNA, 201 bp, Oryza sativa
  Clone ID: PAT_MRT4530_53360C.1
atggcgatggcagagggtagctcgtgctcgtgttgcttgatgatgtgcgcggtcgtgatgtgccggcggtctgtgaagaggaagctggacgagaaggggggggcggaagccagagcgaactcaggccgacgcaagggcgagcagggggtcgacggccggcagaagagcgagcacaggctagcacaaggggcgagcaggtag

SEQ ID NO: 50919 - DNA, 524 bp, Oryza sativa
  Clone ID: PAT_MRT4530_53361C.1
gtgttttttttttttttttttttttttttttttttttttttttttttttttttttttttttttttttttttttttttttttttttattttttttttttttggaaaaaaactttttttttatttatatcacccaaaggttcacatgtcacataggggggggtccgggcttattttaaacttccgaaccacttttctggtaaaactcattacaagacacccccaagggggggaatgggactgggggccccatagaacccaggggggaaaccaaatttagaggggccgttaaaagccaacaaagcttgggcttgagccaaattccgatcaaaggagaaatcaccaaactggtggagttggagctgctgcactatggactgaaaaatgttaatggcctgatagggaaaatggtgcgccaccagcccgagctggggccaaacttgggtgtttttcaggtgaaacccatctgattggaaaaaggggcttgccggtatgccataatggcgggcgcgggggtcgacccggga

SEQ ID NO: 50920 - DNA, 207 bp, Oryza sativa
  Clone ID: PAT_MRT4530_53362C.1
gaatgcaggctatagctctgaagaagccccataatgaaagagaattcggccagaagtctttctattcaaaccgagcctactaagctcgtgagctgctcgcgagctggctcgggctcggctcggttcacaaacgagctaaaacccaggctcgggctcggctcgttcaggattcgagccgagccgagccaggcgagcccgagccgagct

SEQ ID NO: 50921 - DNA, 126 bp, Oryza sativa
  Clone ID: PAT_MRT4530_53363C.1
ctgcccgtgggccgtggccaagtcgtgggaggccgtcgcgacgtcgccgtggggcattttcaaggatgatataatatggtatcttgaggtcagaaatatgattcctggtcagattaagttctccaa

SEQ ID NO: 50922 - DNA, 755 bp, Oryza sativa
  Clone ID: PAT_MRT4530_53364C.1
ctacccggcaggccccgctccccgcgcaggcctgcccggtcggtgcggccgcggccgcggcggcgcaccggcccttccgggccggcggcgtgcggccccggcggttgcgcatggaggcgaggaggaagatgaggttcgcgatggtgtgctcgtcgaacatgaaccggagcatggaggcgcactcgctgctcggccgcgcggggctcgacgtcgcctcctacggcaccggcacccacgtcaagctccccggcccttccctccacgagcccaacgtctacgacttcggcaccccctacaacgtcatctacgacgacctccgccgcaaggaccccgacctgtacaagaggaacggcctgctgccaatgctgaagaggaacacctcagtcaagctggcgccgcagaggtggcaggacaatgccggcgatgggctgtttgatgtgatattcagctttgaggagagggtcttcgacttaatcgtcgatgatatgcataaccgtgagcaaaggatgctaaagaacgcgctgataatcaatatggatgtgaaagataaccatgaagaagctggtgttggtgcaaagcttgctttagatttgtgtcagaagcccagcctcttggatcaacacatgctagatgggttgggctgggtctttcttgaaggggcagatgaagattgggaggaaattattgatgacctgattattacatttgagaagcagcacaagcggaagctcacatacaacatggcattttactaa

SEQ ID NO: 50923 - DNA, 1186 bp, Oryza sativa
  Clone ID: PAT_MRT4530_53365C.1
atgttgggcggcgacgggagaacgaagacggtgtgcgtgaccggcgccgggggcttcgtggcgtcgtggctcgtcaagctcctcctctcccgcggctgctacaccgtccatggcaccgtccgtgatccaggcgacgccaagaacgcccacctgatgtctctggacggcgccgcggagaggctgcggctgttcaaggccgacctgctcgactacggcagcgtggcggcggccatcgccggctgcgacgacgtcttccatgttgatatacttgctcctgctgtaacgggcacgacgaatgtgctgaaggcttgttcagaagctaaggttgggagggttgtggtggtgtcatctgtctctgctgcgatggtgaatcctaactggtctgagggcaaggccatagatgaagattgctggtctgatgtcgattactgcagagccactaagaattggtatacccttgggaaaacacttgcggagattgaggcctttgattatgcgaagagaagtggattggatcttgtgacactctgcccatcgttggtgattggacctttgctgcaaccaactgtgaatgcgagcagtacagtcatacttggatgtctgaaaggtgattgtgaggtaaaaatcaaactgaggaactttgtggatgtcagggatgttgccgatgctcttcttttactgtatgaaaccccaggggtctccggacgatacatctgcagttcacacgcaagaaggatgcctcatatcattgacttactaaagagctggtatcccggttacaaatttgccgacaagtttgtggaagtgagcgatgagccgcaattcaactcggggaagctagagaagctaggatggaaaatcaagccatttgaggaaacactcagggacagtgttgaatcttatagagctgcaggtgtcctggattgagcaaatggtgtcctgtgtatataccaacacaattgaaggaattaccaacacattgatcgggttctaggcttagtttaatagatctactacataggtgtttgttttgatcgaccttaattggatctggcctctttggcaacatctgtatgtaagagctgcctatttggcagcagctgggagtagaagataaaattatcttttggtgatggatttgcgctgagaattatgccatttatgccctaaaaaaaaaaaaaaaaaa

SEQ ID NO: 50924 - DNA, 672 bp, Oryza sativa
  Clone ID: PAT_MRT4530_53366C.1
ctactccttgccaagccaacctgggattttccttaccttcgcatgctttagttcaatatagttcatgctgcgagagtacgccgtgccaaattgtcgatacacagattttgaaggcgtaccattagatgacatgttaacatcatcttccgcgagcacatcgtctctggccatcatgtccaaatgatttcctgctgttggttgaatgaatgtcagcggcccttgttcctgggtcaccacggggatcttctcgaacgagaagagggaggacaccagctgagctccaagagctccaagatagtgaagaagagctgcaactattgatgtcgtcatggcagctgatgacccaagtccagttttggcaacttcaggtttgctccagtcattgttccataattccattagcaacttctgaattaaatgtaattggacagaatggaggcagcgaaagcaatacttctggtctggagttagagggaggccacgtgcttcaatctgttctctataggaataaaaaatcgttgcaaccttgcaaaagcaaagcttgtccagtgcatccttcccctctttgtcagcgactgtcacttccgcagctgccaccgagaattgcactgtcttgttccacaaaagggtttgcagattccggcggggcggggcataggaagcgaggggcat

SEQ ID NO: 50925 - DNA, 516 bp, Oryza sativa
  Clone ID: PAT_MRT4530_53367C.1
ctgcaggaattcggcacgaggtgggagaacgaagacggtgtgctgtgaccggcgccggggtgcttcgtggcgtcgtggcgcgtcaagctcctcctctcccgcggctgctacaccgtccatggcaccgtccgtgatccaggcgacgccaagaacgcccacctgatgtctctggacggcgccgcggagaggctgcggctgttcaaggccgacctgctcgactacggcagcgtggcggcggccatcgccggctgcgacgacgtcttccatgtggcctgccccgtgctcctctccgcccccaacccagaggttgatatacttgctcctgctgtaacgggcacgacgaatgtgctgaaggcttgttcagaagctaaggttgggagggttgtggtggtgtcatctgtctctgctgcgatggtgaatcctaactggtctgagggcaaggccatagatgaagattgctggtctgatgtcgattactgcagagccactaaagattggtatacccttgggaaaaca

SEQ ID NO: 50926 - DNA, 2597 bp, Oryza sativa
  Clone ID: PAT_MRT4530_53368C.1
actgccgacaacaccaacagcttgccgcctccgcaagtcttggacgccgaagttcgcaacgtccttcacacccaagctgttgctgtcctcaacgtgaaggcactcgtcccgctgacgctcaacctcgccgctgcaaaccattctcgatggcgcggcttgtttctcgtgattctcggcaaatatgccttgacggatcatgtcacctccgatgtgcctctccttgatcaagccgactggacgcagatgaagtgcgtggtgctcgcctggttgtacggaataatctcccaggacctgcttcaagaagtcatgtcgccgacggcctccgctcgcatggtgtggcgtgatctcgagttccaattcctcagcaaccgcgaactccatgccgtcaacctctccgccgagttccacacgttatagcaaggtgacctctctgtcacggagtattgccgccggctctgaaccatggtggacaacctcacggatctcgggcgaaccacagagcgactgcacgcttgttctcaccctcatcaatggattgagccctaagtatggaaatatgtaatctctcgttcccatgcaagtcccatttcctagttttctccaagctaggtcgcagcttctgctcgaagaaatcacgagaggacaccacccggtgtcagacacggcaatggcattcgttgcatccactgttagcggcggcggcaactccgacaacaactcccgcaatcgccgctgcggtcgcggtagcaatgaaggacaaggcggcggctcgtaggtaggacacgccacaggaggtgagcaggccggtcagcaagctgatgccactcgcccggcctagcagtggcccaccccattcaatccatgggctggcaccatccagatgttgccaggccacccggcctcccttcgcggggcctatcttcaacgggctccctctccaatacaatgactgcctgggccggcggcatattctgccccccctccccttcggtggtccctccagcccatcttgcgcttccaacactgcaatggcccgatccgtctcagtggaacccacaatcgcttgcaagctccttaaacaccaccacactgactacaccgacttcaaatgagtggtacatggattcaggtgcatcttcccacatgagtgctcatcccggtattcttactgcatcccatcaaccatcccactcactgccctcccacattgttgtcggtaacggttctcttatacccatcacagccactggcaccgcttatttacattaccccaatcactcctttgagctcaacgatgtcctagtttctccacatatcattaaggatcttatctccgctcgccgttttgctcgtgatcattggtgtgctgttttgcttgacccttttggcctctctgtcaaggattaccaacccaggattgaaatcgccaggtgcaataactccagagacctttacccctctctgcggacaccctaccattggcaacctccgctcaagcatttgtcgccatgccctctaacaccgatctttggcattgctggctcggccaccttggtcacgaggccctcactcgcttatctcaggcttctgttatttctcctccgaagagcgccacctctctttgtcacggttgttagcttggccggcacgtccgccttccttttactatgagttttactggtgctagagcaaagtttaagcttattcattgtgatctgtggacctctcccattgttagtgtgtcaagttttaaatactatttggttatctctgatgacttctctcattatgtgtggaccttccctttaaaatttaaatccgacaccttttctaccttgtctcaattttttggatttgcgaaaacccagttctccaccaccatccaaagcatccagtgcgacaatggtcgtgagtttgacaactctagcgcccaaagtattttttctcaccaacggtgtctctctccgtttgttctgcccccacacctccccccaaaacggtatggttgagcgcatgctatgttccctcaataacatagttcgctccctcctgtttcaggctagcctcccaccgcccttttgggtggaagccctccacacagctacccatctcattaaccgccatcccaccaagactctccacacaccacacaccgtttttctccctttatggtgcacacccctcctatacacacctcagagttttcgactgcaagtgctatcccaacctatccgccaccacaccccacaagcttgccccccgctctatcatgtgagtatttttaggatatcctaaggatcacaaagggtacaggagttttggtccttcctccaataggatctacatttcgtgtcatgtggggtttgatgagcactcgtttccatatgctgagataattaataatgcagatgctactaaccttgattttctcgaggatttttctgcaacaataccaggtccgatcgggcgtcgccgcataactgcacaaccagggtcagcctcccacgatggctcacagcatgggccggccacctcccgtgggccattgactccacgacctcacgggccaccttcgccaccacctgggctgccagcat

SEQ ID NO: 50927 - DNA, 285 bp, Oryza sativa
  Clone ID: PAT_MRT4530_53369C.1
atgtgggaagatgcacctgaatccatgtaccactcatttgaagtcgtgttggaagcgcaagatgggctggagggaccaccgaaggggagggggggcagaatatgccgccggcccaggcagttgaagagagggcagtccagtctgcggagggaagttgatgggctgacccgcactgtattggccctgcccaccattgtattggagagggagcccgttgaagataggccccgcgaagggaggccgggtggcctggcaacatctggatggtgccagcccatggattga

SEQ ID NO: 50928 - DNA, 4443 bp, Oryza sativa
  Clone ID: PAT_MRT4530_5336C.1
atggccaaccacgacttggttctcggccatggcgaggaccccgagctggcgctggggcagaatcaccatgactttgggcaggaccacgggctagggctcggccacagccatgagctcggcctcggccacgcgcacgaacatgatctcgtcctcgggcagtcgcacgagcacgagcacgagcacgaccatgatctgggtctcgggaaccaccacgacagccagctggtcctcgcgcatgatcaccacggccacaccagtgagctcgcgttggggcatggccatgatgaggacccgcattccttggatggtcaggaccatgatgggcttgccatgacggagaatcacgtgctgacgctcacagatgcgcatcagcttgacgtcgaccagaatatggatcagctttctcttgagcaagcccacgagctcgctcttcagccagcccatgacttctcgcacggccctcttgcggttgcccctgttgttcagtcgcggaagatggtcgtcagctccgagtttcagcttgtggtggggcaggaattccctgatgtcatgagctgccgcagggccatccgcaacaccgccatcgcctgccactttgagatacagacggtgaagtctgacaagacgcgcttcactgcgaagtgctctgctgacggctgcccgtggcgcatccatgctgcaaagctccctggcgtgcccactttctccatccgaactatccatgacaaccatagttgtgtgggaataaaccatctaggccaccagcaggcatctgttcaatgggttgcaaatactgttgaggagaggctacgtgagaacccacactgcaagcccaaggaaattttggaagaaatccacaagtcacacgggatcacattatcctataagcaagcatggagagggaaggagcggatcatggcagcagttcgggggtccttcgaagaagggtatcggctcctgcctgagtactgtaggcaagtggaaagaacaaatccaggaagcatagctcgtgtctatggcaatccagatgacaactgctttcggcgactcttcatatcattccatgcatcaatatatggttttgtgaatgcatgccgtccgctcattgggcttgacagaaccattctcaaaaacaagtatctcggcaccttgtttcttgccacaggtttcgatggtgatggtgccctgtttcctcttgcatttggtgtggttgatgaggaatctgatgagaattggatatggtttctgtctgagctgcatgaattgctggagaagaacacagagaatatgccaaggctcactatattgtctgatagacgcaagggaataatcgatggagttgacttcaacttcccaactgcattccatgggcattgtatgcgcagtctcagtgaaactttccgaaaggagttcaataactcagtgcttgtcaaccttctctgggaggctgccaatgcactgactgtgatagaatttgaaaccaagttgctagagatagaagacacgtccccagaagctgtttgttggataagacgcctacctcctcggctttgggccacagcttactttgaggggacacgatatggtcacctgacagcaaatatcacagaatcactgaattcttggatactggatgcctctgggcttcctataattcagatgatggagtgtatccgacgccagctaatgacatggttcaacgaacggcgtgaagcaagtatgcagtggacaactatcctcgtgcctgcagcggagcgacgggtgcaagaagcaattgagcgtgcacggggctaccaagttgcccgagccaatgaggctgaatttgaggtcatctcgcctcacgagggaactaacattgtggacatccgcaacaggtgttgtttgtgccgtgggtggcagctctatggtgtgccttgtgctcatggtgtggcagcgctgctttcctgcagacagaatgtccaccgttatacagagagctgcttcaccgttgcgacataccgcaagacatactcacagacgatccatcctatcccggacaaaaccctttggaacgagacgtctgatcaaggccaagaagaagagaacaaggtggatgtgatcatcaacccgccaaaatccttgaggcctcccgggaggcctaggaagaagagaatccgtgcagaggaccgtgggcgaatcaagagggttgtacactgcagccgctgcaaccaaacaggccatttcagaactacatgtgctgctcccatatgaagaagccaatgtcggagttctgaagtagctgcagttttcctgtgaaaagttagaagttagagtctactccaccattcaaacttcctctttgcagatgggcacctttggttatactagatactgcttttggtttaggtgtaatttaataatgttgtgacaatactatgtgttcaaatcatatgccatggtggacctgcatgtcggcctcagctcattggatcagaccaaatcatatgagctggtgttgagtgaaaagtaattagcttaacctgctgcaaagtgaaattattttgttaaacctagtgcaaagtgcatgcaattttattgaaatatcatgtgctcaaacatgatgagtaccgcaccaaatatgtgatactcttgatgttacatcgcaagtatgactcatcgattaacctgttgtttatgtaatacctgttcactctgtacctttctgcactttcctttttcctgtagctgtggattgctgtaattgtcttgctctttcctgtagctgtgattgctgtgtactgctgatctgtctatctgtcttcctttttcatgtagctgtgattgctgtgatgctgcattttgccttgctcttgcctgtagctgtggttcctgtgcgatgctgcatttgcattgcttcatgtaattgtgattgcagcataatgctgtattggcattggcaatatcatgaccttcaacctggctcaagttctcatgcaaaccaattgcaaactcctctggttgttcaccactgcttgcaaagtagtcagcgatatggtttgcaagagacattccgcttaacacagccgcttctatgcttgaacctgttagccagtcaccacagatgcctgctctcccttggggatcaaatatgcatgggactcctggagtgttcattggtagagctgcaccccacaattgtactctcgtgtaaaatggttgctgaagagatcctcttgatagccctaaagcaagctctacacctctaagcatgtcttccttcaccttttccgccgtgatctttggaatgttttcctgcggaactttgtttctttttccataagcagcagtgctgaaaaatgtccagcactcgggtctgccagtctgcaaggggaaaagtttctgagtattgttggccatccaagagagagaatcaacatctttcacaaatgctccttcaaatgttccataagaatcagtttgtggaattggtagaggatcttgaaatgccgcgaggagcgcccagacagaacttagctgtaatctcttcatttgtcttgtcagcagtggtagacctgatgtagagagcagacgattggcacatttcccattatgtgctatcacaattgcatcatattgaccatgtggcttctcattctcaaacaagcgccacaggccattgaacggctcaagcttgcttatccaacacggccggacaacttcaattaggtcactctcaggcagaatcgcatctgcaagcggccgcatcccgtcgacgccgatgtaccgcggcggcgaggaggaaggcataggcctgaaatggccgccggcgtcgagctcaccgatcaagcctccccactcgcggaccaagcccttgtccatccactcgtcgaccaccctcttgaacctctcgtcgctcgcggtgaagaactgcgccgcgtggtcgaacaccagctgctgctgctgctgctggtcgccggcggcggcgatagctctcgtcgccatcctccctcctagcccgtgcatcccctgcagtagtagcggcgagaaaggtgagtacgggatgcggagaaggtaggtgagtgagtgaggtgtgggggttaggtggaccgtgtcgaagacgacggcgcggacgccgcgggcggcgagggaggcggcgcaggcgaggccggatgcgccgccgcctacgacggcgacggatgggtcggggggaacaggcgtggagaacaccacctgctcctggtggaagctcttcttgatggcggactgccgcgagaacccgggcttgccgcgccgccgccgcggggccgggggcggcctcgccgtgcgcgcgccgctgctgctacctcctcctcctcctccggaagaggaggatgcggacgcggcgaagcgggacgccgccagcacggcggtagagcgtgggcagcgtggcgccgggaggaggagaggcggcggcgtcggcggcat

SEQ ID NO: 50929 - DNA, 294 bp, Oryza sativa
  Clone ID: PAT_MRT4530_53370C.1
atgggccgctattggtggaagaatggcaaatggcttcacagcccacgtttgtatccatatgtagatgtgttggaaatccaagcatttctgagcaaggctgcaggggcgtcgtcgttgatggggatcaaagttggctccgagtcagatccacccgggatctgtctgtacctcaacattttggttcgggacctaattcagagttcgttcagtgtcataggcctggtttctgaaggaattcaccgaggatcgcactttgacagtagcttccatggcacgagaaagaatttcgattag

SEQ ID NO: 50930 - DNA, 230 bp, Oryza sativa
  Clone ID: PAT_MRT4530_53371C.1
tcttctttttcttgcttctagatcacaacatgaactagaagtttccacaaaacaagcaatatttgtgggttctagcgtcagcgatactatcaaaacatgtattgccatgggaaatgaacgagctgcactcaaagtgaagtcagagtacatggttttgtaaatgccttcaaaaagtaaattgtggctgattaattttataattgtatctcttctattgtcctattcctttt

SEQ ID NO: 50931 - DNA, 952 bp, Oryza sativa
  Clone ID: PAT_MRT4530_53372C.1
aaccagcgaaaaccctcacattgacataatgaacccaagaacagcagtccaacaagggaaaaaaactcctaaaacgaagcattcaagaaggttacatcgacagaacggtgacaccgtccgatccaaacgaatctaaggttttcacccggagaattcccttaaaatagagttgaagctccaatagcaacacctataagaaggtgaacgacgttcgagggcatcgctgttgctagcactggcaagcagagcaaagcttttacctcggagtcccattcaaccatagcaaccatagcggaagccaccaaatgtcacctggctattcacatcacctgcacaatggcctgactccaacgagaggcggagccggactgacggcgccaacagtccggctccacctaacagccacacaggccgcccaaactccgtcgtctcgccgccaccatcgggggcccgacctcacccgaccccgactgaggacgcgtcgggtctggacctagaggagccaggtccggccatccccctcacaccaccaccaccggccgatgccataacgctgccacaacaccggatgcagggaggcaggccaccgaagccggaggtgactagagacaccccagatctggccggaggagaggaccaccggccatatccagctgtccccgtgctgccctcgccgtcgtcccgggacaaggaggccgctggtgccgagtggggaggagcagccgtcaccgccggaaaccccagatccggagaaaatgagggagggagagaagagaaaggaagaagaaggagagaggaaccgccgtcggcagcggcgacgcgagcggacgcggccgggaagcccccgcgcacacggccttttcgcctcccgtgtcgcctagatatgaaaaatgctacgtatatacgacattttgcctacgatcttcgtacagtcaacgtgtacgacacaggg

SEQ ID NO: 50932 - DNA, 1024 bp, Oryza sativa
  Clone ID: PAT_MRT4530_53373C.1
ctatagaatactcaagcttgcatgcctgcaggtcgactctagaggatccccctagcgcccaaagtattttttctcaccaacggtgtctctctccgtttgttctgcccccacacctccccccaaaacggtatggttgagcgcatgctatgttccctcaataacatagttcgctccctcctgtttcaggctagcctcccaccgcccttttgggtggaagccctccacacagctacccatctcattaaccgccatcccaccaagactctccacacaccacacaccgtttttctccctttatggtgcacacccctcctatacacacctcagagttttcgactgcaagtgctatcccaacctatccgccaccacaccccacaagcttgccccccgctctatcatgtgagtatttttaggatatcctaaggatcacaaagggtacaggagttttggtccttcctccaataggatctacatttcgtgtcatgtggggtttgatgagcactcgtttccatatgctgagatagttaataatgcagatgctactaaccttgattttctcgaggatttttctgcaacaataccaggtccgatcgggcgtcgccgcataactgcacaaccagggtcagcctcccacgatggctcacagcatgggccggccacctcccgtgggccattgactccacgacctcacgggccaccttcgccaccacctgggctgccagcatcttctagctcgtgggcggtgtcacatgggccgcctgcatgcctcgggccacctgcctcccctgggacatggtcccttggctcggtgccttctgctttgccgccagccgcctcttcgaccacacgagcgactccattcccgactgctgctgcactggctcccgacctgatgcggctccttccaccaagcagcgccaccacgcgtcctggcagcgcccgtgttccgcgtatctcggcgccaccaccacaactcggtgtctctccggtcatcaacgaccacacgatggtcaaatgagccaag

SEQ ID NO: 50933 - DNA, 239 bp, Oryza sativa
  Clone ID: PAT_MRT4530_53374C.1
acaggcacacttaccactaatgaattttttaacttcccagtttgtgggaaggaacagtccatgaacaactggggaaaggttttgctcttaccttaccaacggggtactagaactactactactgggaaataatggccagtttggaaaactccagcccgccaaggagggaggcaccaacaatgggtccattattgggtaaaaacggaaaatggacctgtgaaaaacaaagtttggttggg

SEQ ID NO: 50934 - DNA, 339 bp, Oryza sativa
  Clone ID: PAT_MRT4530_53375C.1
acaatggtggtacagtggtgcaaaatgatggttgcaccttagatgtgttccaggaacagggcatgcttcatggtagaggtgtgcctcgagaccttagtccacaagagttgaatgttgcgatgttatatgtcctgacaaattgctctatggtcgacaaatttcaagagtccgagaaatatgaaaaatctcgtagaaggttgaccacagtaaactcaggggtttgtttgtcctcgttcacctctgatgaccagcaacttgactactatggtgtcatcgaagacattataaaactaacatttgatgctggccggaagattgaaatagtgctgctccaatgcc

SEQ ID NO: 50935 - DNA, 2868 bp, Oryza sativa
  Clone ID: PAT_MRT4530_53376C.1
atgacactccatctatgccgttatggcttccaattaggatatgaaaggtggactagtcatggtgagccagaaatacttgaggaagatgaagcagaacaacatataggtctggtagatcaaatgaatgaaatgttaactgatgcaattgctgcacatgatgttaatccgagtgaggaaccaacacctacagctgcagaactatacagattgctagaggaagtagacacaccagtgcatgagaatacaagacaaacacgtttgtcaattgtggcacgtctaatgagtatcaaaacacaaaataacatgtcagaagcctgctataatgaaataatgaatctactacatgatagtttaggagatgaggctggaaataaactccccaaaaattaccataggtctaaaaagcttgtgcacagtcttggcatgccatacaagaagattcatgcatgtacaaacaattgcatgcttttctataaggaaaacgagcataaagaaaactgcactgtttgtggtgaggctcggtatgaagagtcggctagaggaaatagatcaaagcgagtcccacggaaagttttgcgttatctccccatcactccaaggttgcagcgattgtacatgtctgagaccatggcaaagcatatgagatatcatgcaaggcctctctttgttgctccatataatctaccacctgaaatgtgcactaaagataataatattcttctttcacttgttattcctggcccagagcacccagggaaaaacttaaatgttttcatggagcctctagttgatgagcttcttgatctatggatgaatggagctgtcacatatgatcgttttttgaagcaaaacttcaatatgaaggctgcagtagtgtggactattcatgactttcctgcttatggcttagtatcttgttggagcacccatggaaaacttgcttgtcctatatgtgggggtggtacgaaggcctttcagttgaagcatgggcataaagcttgttggtttgattgccataggaggttcctccctagtaatcatgaatttcgtaggagcttaaaatgttttcgaaagaaaacaaaagtgttagatcctcccccagagcgcttaactggtgatgagatatacaagcagctcatgagccttgttcctgatagaaccggtaagcatacctttgaagggtttggggagacacacaattggacaggtataagtggtttatggaaattaccatacttcaagaaattgatgcttcgtcataacattgatgtcatgcataatgagaaaaatgttgcagaggcagtgttgagcacttgcctagatattcaagataaaactaaggataatgtgaaagcacgacttgacatggctgatatttgtgatcgaccaactctaaacatgactaaaagcaccaatggtaggtggcaaaagcctagggcaaaatattgtgttacaaaggaggataaattgaccattatgaagtggtttaaggacttgaaatttcctgatcggtttgcagctaacttaaagaaagctgtgaacttgtctcagtgcaaatttattgggttgaaaagccatgattttcacatatttatagaacgtctgctaccagttgcattgagggggttcattccagagaaagaatggaaggatttgtctgaactaagttttttttatagacagttgtgcgccaaagaaattgataaagaacaaatgcatagacttgaaaaggaaattgtagttctgttatgcaagcttgagaaaatgtttccactgggtttctttaattcaatgcaacatttgattctacatcttccttatgaggcaagggttggcggtcctgtacaatttcgttggatgtacccctttgaaaggtgtatgtgcaaacttcgtcttaaagttcgtaacaaggcaagagtagagggctcaatcgtggaggcatatattgtagaagagacaacaaattttatgtctatttattttaacaaagacattagaacaacctggaacaagcctaatagatacaacaatggtggtacagtggtgcaaaatgatggttgcaccttagatgtgttccaggaacagggcatgcttcatggtagaggtgtgcctcgagaccttagtccacaagagttgaatgttgcgatgttatatgtcctgacaaattgctctatggtcgacaaatttcaagaaaagttttctgaagagaagcatgcaatgcataataatctttcagtcgaggggcttgatcaattgatgagagaggaatttgttgactggtttaagaatgcttgtcgaaatgatccaagtgcagatgatgatttgtggaatttagctactggatgcaagcctagggtcttgtcatacaattcttatgatattaatggctatcgttttaggtccgagaaatatgaaaaatctcgtagaaggttgaccacagtaaactcaggggtttgtttgtcctcgttcacctctgatgaccagcaacttgactactatggtgtcatcgaagacattataaaactaacatttgatgctggccggaagattgaaatagtgctgctccaatgccgttggtttgaccccattcggggcaaacgatccacaccaactttgggaatgatagaaataaagtctacctcaaaattaacaaactttgaaccatttgctatggctcatcaagcaacacaacaaggcaatgaggaaccttcagataacattggtagtgatgagatccatgaagaatcagatgaaagtggtggggaggagggttctgaagaacaagttgatgatggcgatgacgaggacgaggacaatgatgacgaggagaatggaaatgattcagaatatgatgatgatgattattga

SEQ ID NO: 50936 - DNA, 614 bp, Oryza sativa
  unsure (1)..(614): unsure at all n locations
  Clone ID: PAT_MRT4530_53377C.1
gaccgacggagaatgttgagaatggactggatggagtgccntggggactagacattgcttttgggctgcaagcaccaaggagtttgcatgggggaacctggatatacgggctacatgactgctttgcttgatgaaacccttggctggaaaagatagttggatggtgctgctgctcgacatgttgttgcgatgagtntgatgacaggtgtgatgcatgtgttgattgaccacactggcctgggcacctggataatatacgaagattcataattagatataaagtgtggaatggaaagacccattgcaactgttnagatgatgtattatgggtgggaatgcttgccggtgagggcaatgaaaagaaatatggaccgagttgttgtgggaacgntgctgatnagcggggcataaaatcccccagggtgttgctgtggtgtggtgccttgtgtgtgatgtgttctgttctttggtttatgcgtacaggttgtaccaatcctgggataatggtcttatttaaagtttaccatgtanaaaaatatgcttgtactggaaccgtncnggctctgagtaatntttttgttttggtttagacacaaaaaaaaaaaaaataaaaa

SEQ ID NO: 50937 - DNA, 270 bp, Oryza sativa
  Clone ID: PAT_MRT4530_53378C.1
atggccaacgagctgatgagccttcgtatgctggacaagcacttcggcgacgacgaggccgtcatgagcgccgacgagctcgtgaagctgtaccgcggcctgtttgcgtggttcgaccgtgatggcagtggcgccgttgaactggaggagtttcgggctgagatgaaggaagtgttgctcgctgttgctagtgggcttggattcttgctagtgcagatggtggtcgaggatggtaggaagggtgatctgcttctgctcatgatccgctaa

SEQ ID NO: 50938 - DNA, 1290 bp, Oryza sativa
  Clone ID: PAT_MRT4530_53379C.1
atggattatcaaccaaaggttgccatgcacaagattacgacctcactccacttggttcacaggatcttagacagcatcctggatagagcctacgacgacaaactagacaggctatacgagagcgtcaacaatgatgatcaaaggggtggcctgaagattctagcatcacaggctcatcacatacatgagctggcaaaggaggttcagatcaacttctcagggtacatggagatgcaaagaaaagaagagaaaaggtttgggagtatgatatcaagcctaaagaaggagaaccaggatatcagaagcatgctgaagattgctgtcactgagaaggaggcagcagaaaacaggctctgtgtactgaagggtgataaggatcagggcagaagtgcaatcctgcagattgctgagaagggattgcacaaggttggctttggcttcatcatggatgtgatcactggagaatcagaaagagaggaaaacatgagcagcaacagtgcgactgaaatatccactactggaagagaaagcgatcagggcgttgacagtctgacttcagtagttggaaagacgatggaaaatatgcagaatgagataaatgacctaaggcaggccttacataagtccaggtcagattgtgatcgtttgcaacttcttgctgctgaacaggcccagaaaatagtcaaatacgagttgcacattaaagatttggaagaaagagaaatattcctacttcacagcgtaactgagaagggcctgatgttcttgtttgcaatgcttaaggttgaagaactcactgtagatctaaaagaagtagaacgggaggctgcaagatggagggaagcatgtgaattggaggtagaagctggaaaggatgctatcaaacaactcaaccaggagttaggtccctttcaggtcgccttgctcacagaagaactgagaagggtaaaagcagacttggaagctgcaaacagtaagctacagctgaaagaaaaactagctgccactgcaatggcagcacaagctgctgctgatgaatgcctcaagcttgcagacagtagatctgctgggctacaactgaggatagaagagttgacaaagcagatagagcaagaagatgagcatgcaggaaaggagcgagggagtgctcacagaagaacaagatacgcttgctggcctttgcgacgacttcgggtcatatcagcatcctctagtgccaggaaatggtttgttgatcagaatggcaggttgccacctgggacagaagcactactgcaaataaggatctaa

SEQ ID NO: 50939 - DNA, 295 bp, Oryza sativa
  Clone ID: PAT_MRT4530_5337C.1
tagtggatcccccgggctgcaggttttttttttttttttttttttttgcaaaaactgtacaaatttcaagtatgggttattgtagccattcaaaatccccgttggggaacagaacatcgagtttgatcactgtttcttttatatacacaaaacatcacaaaattattagtgacacgtctgcgttgtttaattatgcaagaacagcatcaagcaaccattaattatactcccattccaatattccatggaagcaatcaagcttaatttgcaatagtgaagtgaagcagagcagagc

SEQ ID NO: 50940 - DNA, 3502 bp, Oryza sativa
  Clone ID: PAT_MRT4530_53380C.1
atgggcaagggcgggcaggaggagggcaagcggcgggacggatccgacgcatccgggtcggagccggccgcagcggccttcccggcgtgggcgcgcacgccgagcgagtgcctcgcggagctgggcgtcgcggcggaccgcgggctgtcctccgaggaggcggcggcgcggctgcggcggtacgggcccaacgagctggagcggcacgcggcgccgtcggtgtggaagctggtgctcgagcagttcgacgacacgctcgtgcgcatcctcctcgccgccgccgtggtgtcgttcgtgctcgcgctctacgacggtgcggagggcggcgaggtcggggcgaccgccttcgtggagcccctcgtcatcttcctcatcctgatagtgaacgccgtcgtcggagtctggcaggagagcaacgccgagaaggcgctcgaggcgctgaaggagatccagtccgagcacgcaaccgtcaagcgcgacggccggtggtcccatgggcttccggcgcgcgacctcgtccccggagacatcgtggagctccgtgttggcgacaaggtcccggcagacatgcgtgtgctccagcttatcagctccaccctccgtgtcgagcagggttccctcactggtgagactgcttcggttaacaagaccagccataaaatcgagctggaggacacagacatccagggaaaggagtgtatggtttttgctggcactacaattgtcaacggcagcgctgtctgtgttgtgacgggcactggaatggacactgaaataggcaagatccatgcccagatccaggaagcctcacaagaggaagatgacacgccactgaaaaagaagctcaatgagtttggggaggcactgacagccataattggggtgatctgtgccttggtttggcttatcaacgttaagtatttcctcacctgggagtatgtggatgggtggcccaggaattttaagttctcatttgagaagtgcacgtattactttgagattgcagtggcactggctgttgcagcaattccagagggcctgcctgctgttatcaccacatgcttggcgctcggcaccaggaagatggcacaaaagaatgcacttgtgaggaagttgccaagtgttgagacactgggttgcactacagtgatttgctccgataagacaggaacattgaccaccaaccagatgtcagcggtgaagcttgtggcaattgggaggtggcctgatacacttaggagctttaaggttgatggaaccacttatgatccaagtgacgggaagataaacgagtggccaagtttgagcatggatgaaaatctccagatgattgctaagattgctgcagtttgcaatgatgcaagtattgctcactctgagcatcagtatgttgccactgggatgcccacagaggctgctttgaaggttttggttgagaaaatgggccttcctggtggatatactccatccctggattcatctgatttgctaaggtgctgtcaatggtggaacaatgctgctaagagagtagctactctggagttcgatcggactagaaaatcaatgggagttattgtaaaaaaagcagactctggaaagaatttgctgcttgtcaagggagctgtagaaaatttgctagaaaggagtggctatattcagttgcttgatggatctgttgtgctcctggatgaaggtgccaaggcgctcatattatcaacacttcgtgaaatgtctgctagtgcattgcgatgtttgggttttgcgtacaaggaggatttggcggaatttgcaacatatgatggtgaagagcatgcagctcacaaatatctacttgatccttcatactactcttccatagagagtaatttgatattctgtggttttgttggtctaagggatcctccccgagaagaagtccacaaagcaattgaagactgtagagctgctggaatacgtgttatggtgattactggtgataacaaagaaacagcagaggcgatatgccgtgagattggagtttttggttccacggaagatattagttcaaagagcttcacagggaaggaattcatgtctctttcagataagaagaaactcttaaggcaaacaggtggccttctcttctctagggctgagccgaaacataagcaggagatagttagattgctcaaagaagatggtgaagtggttgctatgactggtgatggagtgaatgatgcaccagctctgaagttggctgacattggagttgctatgggcattacagggactgaggttgcaaaagaagcttcagatatggttcttgcagatgataacttcagtacaatagtcgcagctgttggtgaagggaggtcaatctacgacaatatgaaggcatttataagatatatgatctcttcaaacatcggggaagttgcttccatatttctaacgtcagctttaggtattcctgaaggtctcatccctgtgcaacttctgtgggtcaatcttgttacagatggtcctcctgcaacggctttggggttcaacccacctgataaagatatcatgaagaaacctccacgaaggagtgatgactcgttgatcactccatggatcctattccgttatatggtcattgggatgtacgttgggattgccacagtgggagtgtttatcatttggtacacacatggctctttcctgggaattgacctggctggtgatggtcactctcttgtctcgtactcccagctctcaaactggggccagtgctcctcatgggagggtttcaaggtgtcaccattcacagcaggtgcccgtacattcaacttcgatgtgaacccatgtgattacttccagggcggcaaaattaaagcgacaaccctctccctgtctgtcttggtggccattgagatgttcaactcgctgaatgcgctgtcggaggatggtagccttctgagcatgcctccgtgggttaacccttggcttcttctggcaatgtcggtttcattcgggctgcatttcttgatcctctacgtgccattccttgcccaagtctttggtattgtgcccctaagcttcaatgaatggcttttggtgatagcagttgctttcccagtggttctcatcgacgaggtccttaaatttgtggggcggtgcttgacagcccgtgccagaaaacaatcaggaaagcagaaggaagattagatgctagtcatcagtgttttagatttctagttatgtcacgaggaaccaacacctgatgtagcacaaacattattttttctcgagttccaaaggctctcgttctttgttgagagaatgtttgcgaacatgactatgcagcgaacttaggtactctatagaactcataatcaggcagcgacacagaccgcatttattcattgtaactaagattgttatttgtgaatgtgctggagagacagcatgtttgcctgctcagctgctatgatcttggtcgtcttgcacttgcattcatgaaaaaaaaaaaaaaaaaaaa

SEQ ID NO: 50941 - DNA, 762 bp, Oryza sativa
  Clone ID: PAT_MRT4530_53381C.1
atggattgggcctcgccgaagccgaaggtgctgtcttggcttgcagggccgcctcataggcttgatgttgctcttgcatccggtgaactccgctcctgcttcggctcgtgcgggctcttcgcccgccatctccgcttcgccttcgctctccttcctcttagtgtctattctaatgatgggcccctagatgggtcattggcctggcccataagaggggaatggtcttcatgggccatgctgcttggtgggctccctggtgaagcctgtcttccatggggcgaacccttcatgccttgcccagaggagagactaggtggttcagctgaaaaccctcgtgacatgcctccggcacccatcttcctcgtgcaccacaatggtcaacgacctcctggatgctatgctgcgttcggggccggggcaccctccgatggcatccagcatccctcaccaccacccgcgtcctccctcagccgcagccgtagccgcgctccggcggtctcgaccaccgccctggcgtcgtccttccgcgaggcaaaagacgagcttgatcaggaaacgaaaggcgtcgtcaggtggctgccaccaccatctgacccatcaggcccagtaacagtcggggcgcggtggcacagcagtggcaggcaagggaggcgatgctgtgctgcttgccggagctcctatcgcaagttcgtgttgccttgcagcaacttggtggccctcagtcttaaggtagagaagatcagagcaattataactaattaa

SEQ ID NO: 50942 - DNA, 2371 bp, Oryza sativa
  Clone ID: PAT_MRT4530_53382C.1
tcttgcgcttctctttcctccgtcctatccacaaccccgggcgccaaccccgcccccactcgccagtccccagcccctttctcatacatacgttgtgcgtttttttttttttctggttaccgaaatagttgccatctcggccttttttttattttttctttttatttttttttttgaacagtatcaaacacgacatttcctttagacagcacaagataactgtactatttagtctggcagcccaaaagaaaaaggtatggctaaaccattacgaaccctctttatctagacaagctgatatatacactaacttacatggcgagcacataataacgtatagaaataaatttcagcagcacggaaaacataaaaagacgcgtctgtgatacatacacaatcctgaaattggagagactgctttgtttcagtaaattttcggcttccggaccctctgacttctccggctattcaccgccaccaagactgccttttcaatcctcggtttggagggggtgctttcgcttatatccttccttgcagcacaggatgaattctcagcttcctgattcttggtagatgagcatgactttccagcttttcgcttctttccagttgagtgagtcttcacagctttcttcccttcatctggggctgtggtctcctcaattttcagcttttttgcagctggggatgtgctctcagttttcttctttgtagcaggtgttttagaggcctctttactctgggtcaatccagatacaggaccactaccctccttcattttaagttttcgcctcctctttccagagtagacatgcttcaaagctggtggtttttcaaaaaccggttcttgcttcaccacttgaccaggcgtactcctggcttccagggaaacagaagcgttctcaactctgaatggagctgaagtgcttgtgacttcaacaggggaagagttacttccaactctcaaattagcagtttcacagaccttctctgttagttctaatgatttatccatcggctgcttggcgttctcaaatggctggtatccttcattggctgcttgattgtctatgaggacgtcatcattgtctttgcacaaatctcccatatgaccatttggaaggagtaaatccacagtgatggctttcttatgtgactggcacctctctccacttttttcttcgctactgtacattgtaacttctgtttggcaatctggtgccctcttagacaaagtagatattactgcatgagctggtttatcctcttccttcgataaaatgtttagattcttctttttctttgatttactatatctatctttcttatatgagaatgaccgtttttgagtccttagcctcttctcagacaccttgatatgggcatggtccaccaaggaaaccatgttttcttgttttgaacgaaccttactgagacgatcttgtagccgaagaacttgggaccgaataccatcaattgtcaaaagaaatttctgcagtgtgagttgctccgcaaccatatcatattccttgggctcaagcaacccaacagtatggatcccacctttaacatcattgccaactgggccactgctatcgtcatcaattaagatgccatctgtttcagcacccttattctgtttatcaaagaagtatgacaatatctcgtgcttcttgatgtacaatgaggtattcacagtttcttcaagtcttctcctctttcgcctctccatacaactattttcacggcttttggaagactgtgctgattctgacctagaaccatttgtcatgtttactgcctgctgcaattcttttcctttgttgattagagcaagctctcggtcatacttcgacacttgagataaaaggtccttcatgcgcaactctaaccactgacatctccacatcattgggcggacagcactcctccactcagcagttacctttttctttctgaaagatagtttgtacatgttaaacacctccccaatttccccattaatcaaattacccatatacagtgggtatttgggtaattgggtagaacgatctgaggaggatccaggaggagccacacagctggcagcagcagaagaacggaatgggaatgtacacgacatcactctgcggcgtgcaccgtgctgcacaggttccgcaaggccgtggacgagcgcatggacacttcgctccggcaggagaaccaatcgttgctcgccacacggggctgtgtcttctccctcctgctgctcctcgtcagggatcacctcgtcagcgtcgccaaagaggtccggcagctgcacgagactggtgagctgacacgtcctgcactcccgcaaggtgttcatcgaggaagagggatacgccat

SEQ ID NO: 50943 - DNA, 161 bp, Oryza sativa
  Clone ID: PAT_MRT4530_53383C.1
atggagattttgtttattggtggagtagtggcgtcgcgcgtcagctcgatcggcaggctcgtccggtcgtcccttcgtggccaccaacacacgctgccgggacggcaggcaggacggggacgttccttccaattccttcgcttgtcttttagccgggagag

SEQ ID NO: 50944 - DNA, 1753 bp, Oryza sativa
  unsure (1)..(1753): unsure at all n locations
  Clone ID: PAT_MRT4530_53384C.1
ttttntttttttgggtggtgccgagggccttcctcttttcccttctctgttggcatctgctaaacaaaatttccaagttacaaagtcttccctcaacataaatgagggaatacaattctacatctaaagagcctacgctaccaatatacatacatgtatagaaagtacccaatgcctccattagtgctaaccaaaccctccaagcttgtaaggtcattgtgaccacatcaagcaaatagcttcgctcccaccaatcgccatcaagcttgcatcaattctgtgtggcgagcgactcaatctgtgtatccttgggctcctaccgttgacaatctaatgtcctctttaaaagaaagggcatgacatccagagcaatatgttcatttgttctcatccgatgtctgtgaaatctgtaagaggatccaactcctcaatgccagaaaggacatcagagtcatactggtacggaacaaactctgtttcagcctcttgaggaagattatcaaagtaggtgaattcagaatcactgatgccaaggtcagatagggactgggtaatgtggaactctggtacagaatgaagagaatcactagccagttcccaaagagggccgtactcatttacagttgcacaaagaacagcatcttcctcagttgtccacgagtactcataagaaagtggttcctggtcttcatcaatttctgcttctaaatcttctttgagtttttcaatgcgttcaagttcccattcttcctcttcaacattgacctgatagtttatagcagctttatcaattattggatcccagagttccaaaaaccgcatggcatatctatcaattggccggagctgattttcaaaagacgaacttgcttgacctgctgcagcagctgcagcagccatctgcttaacatcagcaagcatgtcaatatctccatctcctccagccaaagttatagccttttcttcatctaattgatttatagataaagcaacatgcttgtccttgaccaaatcagaacactgatatttatgctcttcattggtgtgttcatcaggtttagtgtcatcctcgtttacaagatcatcctcctcaagtcttccagcagcctcctcgctgaactcttgattgtccacggcctcttcctgctccagcctcttgagagccatatagtcagcttcatcttctgcctgtctaatagctgcttcaacatcaacatttgacagcgccagattagttccgtttgagggtccagcagacagagagcaatccttctgctgattctctgcatgaagtgatgagtgcccagaaaagaattccataggatcaagcttcttgaagaactctgtattgtagctaccgcgttgtatcactagatcatcaagagctcgcttctgattggctttcttgagtatattctcctctatagtgctctcactgatcagtctatagatgtgaacttcacgagtttgacctatcctgtggcatctgtcttgggcctgttggtccattgcaggattccagtcactatcatagaaaatgacagtgtctgcacctactaggttgattcccacaccaccacttcgagtggataagataaaaagaaaaaactttgggttagtattaaacctctgcatcagtgtctgcctctcttctggctgggttgatccatctaaccgcaaatacgtatacccatatagattaatgaactcctccagtatatcaagcatttagcctcgtgccgaattcctgcag

SEQ ID NO: 50945 - DNA, 378 bp, Oryza sativa
  Clone ID: PAT_MRT4530_53385C.1
tttattcgctatgctcacaatggctggagctcggttgtctctcgtgttcctgtgctttgtggtggaggtggtgatctacgaactagtccgcggtgccagtgcaaggaagactgtctctgagtacgtgctcaggaagggggacttcttcgtgaacatcaccaactggggagcagccatgatgacggacgtactccctgatttcaaagggaatttggctgatgatgtacttggcctatacaccattgctgactacgtgaacgacaataatgactttggaccgattaccggtcgcatagtacacaggatagacagggggggttttgatctacacgggaaggcgtatctacacgtacatcaacgtccgatggaaccagattc

SEQ ID NO: 50946 - DNA, 546 bp, Oryza sativa
  Clone ID: PAT_MRT4530_53386C.1
atggcggtggccggcgagtggtgggcggcggcgcttgaggcgaaggcactgcttcaggcctcgctgccgcagcatctacttcagatcgatgctgaagagacgtctggcccatggcgaacaaggtggatgtcgtggggatgtctgacttcgattgggttgagcactcatcttggcgtgcttctctattctcccttacatggcggagatcctgtttgtgatgcagtgaagcccggtaccaaatgtggaccgttggataggtatgatcggatggctgacatcaattggtaccttcagaggaaaatctgcggcagtggcggcgagccgacgacgcttcaggaattgcggtgcgctccaccagtcttctgcggccacaacggtgctccaggagttgttgtcagcggcgacgacggcggcattccaggagttatcggcagcgatggcggcgctccaggaatcatctgcagctgcggcggcagcgctccaataattgtcttcggcgacgacggcagcactccacgagtcattgctagtgacgacgatggttga

SEQ ID NO: 50947 - DNA, 1664 bp, Oryza sativa
  unsure (1)..(1664): unsure at all n locations
  Clone ID: PAT_MRT4530_53387C.1
ggatccccgggctgcaggaatcggcacgcccattgctggtctttgccttgctgtggtgagagagatcgatggcgctgagaatgagcatcgcggcgatgtcggtgttggcggtggcggcggtgctcgttgtggccggcacggcggcggcggcggcggcgtcgtgcccggcgacgccgccggacgcgggggcgacgctgcaggtgtcgcacgcgttcgggccgtgctcgccgctgggggcggagtcggcggcgccgtcgtgggcggggttcctggcggaccaggcggcgcgcgacgcgtcgaggctgctgtacctcgactcgctggcggtgaaggggcgcgcgtacgcgccgatcgcgtcggggaggcagctgctgcagacgccgacgtacgtggtgcgcgcccgcctcggcacgcccgcgcagcagctgctcctcgccgtcgacaccagcaacgacgccgcctggatcccctgctccggctgcgcgggctgccccacctcgtcgccgttcaacccggccgcctccgcctcctaccgcccggtgccgtgcggctcgccgcagtgcgtgctggcgcccaacccgtcgtgctcccccaacgccaagtcctgcggcttcagcctctcctacgccgactcctcgctccaggccgcgctgtcgcaggacaccctcgccgtcgccggcgacgtcgtgaaggcctacaccttcggctgcttgcagagggccaccggcacggcggcgccgccgcagggcctcctcgggctcggccgtggcccgctctccttcctgtctcagaccaaggacatgtacggggccacgttctcctactgcctcccgagcttcaagtcgctcaacttctccggcacgctccggctcggccggaacgggcagccgcggcggatcaagacgacgccgctgctcgccaacccgcaccgctcgtcgctctactacgtcaacatgaccggcatccgcgtggggaaaaaggtggtgtcgatcccggcgtccgcgctggcgttcgacccggcgacgggcgccggcacggtgctcgactcggggacgatgttcacgcgcctggtggcgccggtgtacctggcgctccgcgacgaggtccgccgccgcgtcggcgccggcgccgccgccgtgtcctccctcggcgggttcgacacgtgctacaacaccacggtggcgtggccgccggtgacgctgctgttcgacggcatgcaggtgacgctgccggaggagaacgtggtgatccacaccacgtacggcaccaccagctgcctggccatggcggcggcgcccgacggcgtcaacacggtgctcaacgtcatcgccagcatgcagcagcagaaccaccgcgtcctcttcgacgtgcccaacggccgcgtcggcttcgcccgcgagagctgcaccgccgcctagtcgccgtcgccgtcgccgtcgccgccgccgccgtctcactttcgctgctgcttcaattctttgtagcttagtgagctagcttctcaggtgaagaatgtttcagtggtttatttagtctgggtttggttcgttgattagatcctgatgataagtgaagtgaaatgtgcacgtttgtgatgtttaattaggtgctggattaattcagctaatcccttgctttaangtagtaacatgatgttttaagag

SEQ ID NO: 50948 - DNA, 219 bp, Oryza sativa
  Clone ID: PAT_MRT4530_53388C.1
tgttcagagaaaggcgtcttcgtactcgcctgtgtccgcgcctccgcgcttttactcctcctctgccctctcttcctttttcgccggcgtcgcaagaatcaacccaaatccgccgccatgagggagtgcatctcgatccacaacggccaggccggtatccaggtcgggaacgcgtgctgggagctctactgccccgagcatgggatccaagctggaggt

SEQ ID NO: 50949 - DNA, 303 bp, Oryza sativa
  Clone ID: PAT_MRT4530_53389C.1
atggtgggtggatctggtaggagatcctgcacatgggcgccaccaggtgtcgggccactccttcgggggtatgcggaggaagcacgggaacctattgtgctcctccagccgcctaacggaacggaagaaggcgagccggtcaaggatgggggaatcgagttgggggacaaacacggaggtcatgggagccttgaagaagatgggggtgaatgggttgtcttgttagccaccgcccttctccttgccgcccaccacacgcggtccttatcctttattggttgtcccctgggaaaagatgggtaa

SEQ ID NO: 50950 - DNA, 256 bp, Oryza sativa
  Clone ID: PAT_MRT4530_5338C.1
ttctcggcgcattggcggcgccaccgcccggccaccattattcgccgcataacgatgatctcgcgagcagcggcggcaccaacgacgacggcgatggcggcgcggccgtggtggtcttcgacgacaccgagggcgccaacgaccgcctcagctgcgagtcggggtacttcgatgacgccaggcatgctaactagcgccgccgcacccatcccgacgccgtcattatcgttgcggatgtaacttgtcactctgaatg

SEQ ID NO: 50951 - DNA, 604 bp, Oryza sativa
  Clone ID: PAT_MRT4530_53390C.1
atcttaaagcttgttgtttaggatggcaaaaccttatttcattacacctatggactaacttgaaacctagtagagctctaatcaaatttgcagcttcaacaatgtcatatatataagtaattcgtaggccaacaaaataaggcttgggtaattctcacttaccaatagtacaatactaacatctatgacattggacggatgcttggaatacaggatggtactaaaaacaattattgcagaggagataatgtagttgagctcaactgcatcttttgccaaaaacaaataaagatatcttatcctccataatctcttttggttgtatctgtcggaatgttttgtttatggatatgtggcagcaggttgagttgtctgaaacaccaccaagcaatgaaaaaacaaccataagcttcatttcgtccatgatcttaattaccaactttctttgttgaactggaccaacacaacaaaccacataaatccggggaagtagtaataattttgttgcaacaaattagacattcaataaaggatttgcacaccgtctatcgaagtgttatgctcccagtatcagagctaggggcttttgatgtcaatactgggc

SEQ ID NO: 50952 - DNA, 282 bp, Oryza sativa
  Clone ID: PAT_MRT4530_53391C.1
atgcctgtgctagcaagcgacgaggaggtggcgatgccggagcagaggagcgcggtggtggtgctggtgccgcccgatcgacgcgggttcatccccctcgccgactggatccgcgacctcagcgccgcgttcccgcgcatcgacctcgacagcctcgttcccccagcgccgcagccgcatccgctggtggtgagggaggagcggccgtcgccgtcgctggtggcggggctgacggtggaggaggcgaagaagtcagtgttcttgagtgttgcattcgattga

SEQ ID NO: 50953 - DNA, 402 bp, Oryza sativa
  Clone ID: PAT_MRT4530_53392C.1
atggcgttgcagtgcagcagagcagaggagggggaatcgctcgtcggcgagcggagagcggcgacgggcgcggctgggcgagcggtggcgggagcggcagggagggggaatcgctcgtcggcgagcggagagctacgacgggcgcagctgggcgagcggtggcgggagcggcagggagggggaatcggttgtcgagcgagcgatggcgctcatcggctcgtgcggctcttggacgataagtcgccgtcggcttgctacccgccgcccaccgcgcgcccggtcggccacgcctccgtcgccgattgcagcagtcctcggtctccctccaccacccccaactggctcccacccccggtcaccgccgccctcagctcgcctccggtggtggagatggagatttag

SEQ ID NO: 50954 - DNA, 150 bp, Oryza sativa
  unsure (1)..(150): unsure at all n locations
  Clone ID: PAT_MRT4530_53393C.1
ttttgggtttttggggannggggcgttaacccaggtggacaccacacgaacatacggagcccacggccaagaaccacccgggggaccccagacgtgggcagacatgggacaggtcctgccaaaggaccccgccataaggacccacagggg

SEQ ID NO: 50955 - DNA, 3159 bp, Oryza sativa
  Clone ID: PAT_MRT4530_53394C.1
atgccaggccgcgtgaccgtgctagacctcagctcctgtcagctcgatggccttatacctccgtgcatagccaacttgagctccattgagaggcttgatctgtcgaacaatagctttcacgggcgtataccagctgagcttagccgcctggaacaactacgacacctcaacctgagtgtcaattcgctcgatggccgcatcccagccgagttatcttcctgtagccgtctcgaagtcctgagcttgtggaacaactccctccaaggtgagatccctgcaagcctagcccaactcgttcatatccagctcatagacctgtcaaacaacaagctgcaaggaagcattcctagtgggtttggcacacttcgtgagctgaaaattctgaaccttgccaccaatactttggtgggtaacataccgtggttgttgggcagtggctcatctctcacgtatgttgatctgggaggaaatggcctctctgaaggaatccccgagttcttggcgaatagctcatctctccaatttcttagcctgacacaaaataaacttacaggagcgctgccacgagctctcttcaacacgtcctctctgacagccatttacctcgacaggaacaaattaattggttccataccacctgttacagcagttgctgcacctattcaatacctcagtctagcagagaataacctcactagtgagatacctgcctcaatagggaacctttcctctcttgttggtgtttcccttgcagcaaataaccttgtgggaagcatccctgagagcctaagtagaatcccaactctcgagatgctaatactctcaatcaacaacttgtcgggtcaggtaccccagtctattttcaatatatcatctctgaaatatctagaattggccaacaactcactcataggacgactgccaccagatattggctacaagcttccaaaccttcagagattgatcctatcaaaaacacgtttgagtggaccaatcccagcttctcttgttaatgcttctaagctagaaataattcatcttgttgatattgggctcactggaatactgccatcctttggttccttgtcacacttgcaacaacttgatctcgcatataaccagcttgaggcgggtgactggagcttcctctcatcccttgcaaactgcactcagctgcaaagactctgcttggatgggaatggactgcaaggacacttgccaagctcagttggtaatcttccctcggagctcaagtggctctggctcaagcaaaacaaactttctgggacaattcccttggagattggaaaccttaggagcctcgaagtgctgtatatggatcaaaatttgttcactggtacaatccctccttccgtaggaaatctaagcaacttactggttctaagctttgcacaaaataatctctctggccatgttcctgattccattggcaaccttgtaaaactaaccgagttatatttggatggaaacaacttcagtgggactataccagcaagtttagggcaatggagacatttagagaagttgaatctttctcacaattcatttggtggaagcataccaagcgaggtatttaatatttcttcactgtcacaaagcttggacttgtcgcataattcctttgctgggcctataccactggagattggaggtctcataaatcttggcagccttagcatttccaacaaccgcctcactagcaacattccatccactctcggaaagtgtgtgcttctagagtcccttcacatggaagaaaatctccttgtaggaagcattccacattttctcatgaatttaagaagcatcaaggagttggatctctcttcaaacaacttatcagggagcattccagatttttttgcatccatgaattatttgaaggatcttaatctatcttttaatgattttgatggacctgttccatcaaccggcattttcagaaatgctagcagggtgtcccttcaaggaaatgacggtttatgtgccaacaccccagagttagggctgcctcattgtcctgcattagacagaagaacaaagcataagtccattattttaatgatagtggttccaattgctgccattgttcttgtaatttcactgatctgtttactcactgtctgcttgaaaagaagagaagaaaagccaatattgacagacattagcatggatacgaagataatttcatataaagacattgtccaagcaacgaaagggttctctactgaaaacttggttggttcaggatcctttggagatgtttacaagggcaccttggagcttgaggttgatctagtagctattaaagttttcaatctcaataggcatggaggaccttcaagctttattgcagagtgtgaagccttgaaaaacatccgacatcgcaatcttgtcaaagtcatcaccttatgttcaaccttggatcccaaaggagaagaattcaaagcaatcatctttcaatatatgcctaatggaagcctagaaacatggctgcatcagaaagtctatgatcataatcagaaacaagtcttaactttgggtgatcggattagcatagctctggatatagcatatgctttagattatcttcacaaccagtctgcatctccactaatacattgtgaccttaagccaagcaatgtgctgttagatctacagatgacggcatatgtcagtgattttggattggcaagattcatgtgcactacaactgcagcatgcgccaattcaactagtttggctgatttgaaaggatccatcggatatattgcaccagagtacggaatgggtggacctatctcaaccaagggcgatgcctacagctatggagtgctcttattagagatattaactgggaagcgtccaagtgatgacaaattgaaggatggcttaagccttcatgaactcgtggagtcagcatttccacacaaactagatgagattttggatcccattatgctgcagagtgacctaaatggaggaaaatatcatactgaaataatgcagagttgcatcataccaatggttaagctgggtctgttgtgttcgtccatatcaccaaaagaccgattaggaatgtcacaggtttctgccgaaatgggcacaataagacagtcatttcttgagttacaatga

SEQ ID NO: 50956 - DNA, 1036 bp, Oryza sativa
  unsure (1)..(1036): unsure at all n locations
  Clone ID: PAT_MRT4530_53395C.1
gtgaaccgtgaacacacggcgcgactgctgcactaggcgccgcccctcccccggcggcccggcaagggcgcgtcgcccccggcggcggcggcgccgcgcggcctggtggtagtgaaccgtgaacacacggcgcgacaggtaaactagtgagagagcgactgcgagatggaggagaagggcgcgtctcccgcggcggcggcggcgacgagcggggagccgggagcggcggcggggacgatgaaggtggtggtggccgtggacgcgagcgaggagagcctgaacgcgctgtcgtgggcgctggacaacgtcatcgggcgccgcgccggcgccgtttcggtcgtcgtcgtccacgcgcagcacggccccgaccacttcgtctaccccgtcgccgcgcacggtatcggatccatagcctacgcccccgcctcggcgatcgagtccatgaggaaggcgcaggaggagatctccaggaaggtcgtgtcgcgcgcgctcgacgtctgcaagcagagagaggtgagcgcgacgggcgccatcgtggagggcgacgccaaggaggccatctgccaggccgtggaggagatgcacgccgacatgctcgtcctgggaagccgcggcctaggcaagatcaagagggcgttcttgggcagcgtcagcgactacctcgtccatcacgcgtgctgccccgtgctggtcgtgaagcccaccaaggcgcacgacaagtgaactcgatctgctgctcctttgctgcctgatggatgtcctgtgaagtgaagacttggctatcttttgctactgattactcatggagccggtggctgctgttattacttgtgttgaaaataaaaggatatgttaagcttctgaggctggcagttcttatgtagatgcaacgtgcaaactgaaactaatacatggaactgccgttgaagcttctgagctcctgtgtagatgtaatgtgcaaaactgcaaactgaagcaaatacatgagtagtacttgtggatataaaaaaaaaaaaaaaaaaaaaaanaaaaaaaa

SEQ ID NO: 50957 - DNA, 503 bp, Oryza sativa
  Clone ID: PAT_MRT4530_53396C.1
gaaccgcgtacacacggcgcgacaggtaaactagtgagagagcgactgcgagatggaggagaagggcgcgtctcccgcggcggcggcggcgacgagcggggagccgggagcggcggcggggacgatgaaggtggtggtggccgtggacgcgagcgaggagagcctgaacgcgctgtcgtgggcgctggacaacgtcatcgggcgccgcgccggcgccgtttcggtcgtcgtcgtccacgcgcagcacggccccgaccacttcgtctaccccgtcgccgcgcacggtatcggatgtcagcacaccggctagaccatatatacaaactagtgttaacttttaccagttcacttcgcatttcacgagactgacacggcgtgtacatgtgcgtgtgtcacggaagcagccatagcctacgcccccgcctcggcgatcgaatccatgaggaaggcgcaagaggagatctccaggaaagtcgtgtcgcgcgcgctcgacgtctgcaagc

SEQ ID NO: 50958 - DNA, 225 bp, Oryza sativa
  Clone ID: PAT_MRT4530_53397C.1
atggcggggaagggggacgccaatgtggctggcgtgctccccctgccacctcagcacggccccgccacgtcggcaggaggacggtgccagagagcctgggtcggtgcaggaggttcggaggcgacggcgagcggaggaaaaaatttcgccggcggcgacggcgaggcgaggacggcccaggaagaccagcccagcccagcccagtccagcccaacaagttgttag

SEQ ID NO: 50959 - DNA, 321 bp, Oryza sativa
  Clone ID: PAT_MRT4530_53398C.1
atggcgacgacggtggaacttgatggagatggcgccgacagcgggtggaggtggtcctgtgcggggatctcgggcagcgacggcgaggtgcatggcacggaggcaggctgtggggaaccgacgggggatggccgacgtggacgaggttggcgacggcaggacgtggattttatggaggttgaccacgtcgtggtcctgtgcggtgatctcgggcaacgacggcgaggtgcatggcacggaggcaggctacggggaaccgacgggggatggccgacgtggacgaggttggcgacggcaggacgtggattttatggaggttga

SEQ ID NO: 50960 - DNA, 699 bp, Oryza sativa
  Clone ID: PAT_MRT4530_53399C.1
cccacgcgtccgcttctcccccagccagaggcagaggctcccgcgacctcgtcggcgacggcgaccgcgaccgcgcgacgacgaggaagcgaaggacgaggaagcgagcgcgccaccatcttcatagctcgctctcctcctcacctcaggtggtgaaccgaggagacctgcgtggggtgggggatggaggaggaggaggcgggtgtgagggagcgccgcggcgtgctcaaggtggtggtggccagcgggaccaacctcgccgtccgggacttcacctccagcgacccctacgtcgtcgtccgcctcgccgccatgaataagaagacaaaagtcatcaacagctgcctaaacccagtttggaacgaagagatgtccttctccatcgaagaaccagcaggggtcatcaaattcgaggtgttcgactgggaccggttcaagtacgacgataaaatggggcacgcgtttcttgagctgcagccggtggccgcggcggcgaagctgcggcgtgcgctgcggctgacgacgggggagaccaagctccggaaggttgccgccagcgtcgacaactgcctcatgtgcgacagcttcgtgacgtacgccgacggtgagatcgtgctcgacgccaggctgcggctgcgcgacgtcgagtccggcgagctgttcgtcactgtcaagtggatcgatgcgaacgccaagtga

SEQ ID NO: 50961 - DNA, 2382 bp, Oryza sativa
  Clone ID: PAT_MRT4530_5339C.1
atggccggtcagaccgtgtactacgccggtcagaccgtgccctattctagccagatcggacctcctgtggccggtctgaccgcaccactgaccactggtcagaccgggccatgggccagtcagaccggttccctgggagtttctctaggttttcataccacgactagcactattgattttaattattattcatcacctgttaatactgttagtcatgctactccacatattcctaatgcctacaatgatattaataggggatatcctcccgatactaggtatggccaatataacaatattgtgccgcaacaaccaccttttaggccaccaagtccaccaccagatccaccaaggcctgaaactgtggaggattggtttagaaatattatcaaggagaatttagcaaagctaaggaatcgtgctagggagtaccaaaagccgtatcctgattattatgacattttcccatatcctcgtgattataaaattcctgaatttaccaagtttagtggtgaggatagtaggactacatatttagccaacattgcatatgatagattgcttgattctattaaagagaaattgaatggccagatatttcttgatgttgatcatgtgttgcatgaagctctagctcaggaaagccgagtggatgacaatagcttacaagctagtttagatgaaaatgcaatatcatgtgtagccaaaccaagcgatggttcggattgtgttaataatttgtgcaatgatgccataataagtatagctgaaccaaatgttggttcgaattgtcttactagcttggataataatgcaacaaccattatagccgaaccaagtgttggttcggattgtgttactagtttagacaacgatggaatagccgaaccaagtggtgattcggattgtgttgctagcttagagaataacatcattgaagatatagccgatctaaatgacggttcggattgtattacaagcaaagatgaaatagcattgtcacctaagatcgaatcacaaatcggtcatgtggatgttggaaaagataatgacaatgtcttgcgggataatagtgaaataggatccaaagaagctatgcatacatatcaaaggccatatcctgaacacgtagattcggtcccatacccgcaagaatttgaggtgcccaacttcacaaaatttacaggtgaggatgctagaacaacaatggagcatatcggccaatttattgatcaatgtggtaaggccgatagtaatgatttgcttaagttaaagttgtttcctctttctttgtcaaactttgcatctacatggtatagtttacttgctcctaattcaatttctacatggtcacaaatggagcatgagtttcatgattattttaaagatgcaagcttgatggagcaaagaccgattgatacttcatcggtcacttgtgaaactatttcggttacatctatgcctaagaccggaattgttagtgatcttctccctgttagtcatattgatgttgacaaaaagaaagggaaaagtgttattattggggatcctcggcccaagaatagaatcaacaatgcgaaggccgaagatcataaagttgcaaaggatgagtcatctagttcccaaaagactaaaaagccgaagctcacttttgagatgcttatggctaagtacgagaaaggattagccggacaagaccgtttctcacaaaagaatcggtccggtggatcaaaggtgaaaaatgtgtgggtgaggaaagaagccaaagctccggaggtcgttgctatcaatgaggaatatcaaggtgttcatgtacctactagagatgcggcgaaaactatacaagcggagaagactaaagccgacgccgttgctgtcgacatcggcggtctgaccgagccagctagccggtctaaccgccagacaacggccggtctgaccgaccctcctggccggtctgaccgacggcttgtggccggtctgaccgggaccagaggccggtttgaccggggggttgaggtaaatcttggctctcttcggtattttaagcaagacgacttgtcggttgaagattacaagaccttgatgggaagcaattttgaagacgtcatcgacaagcgtttgaagactttgaaggagatgaagacacttcaagacggtgttttcagagagcaattaatgggagatagcttgaagaaatatttcccgagcatttggttcacgtatgttcaccaaaaaggcaggggggcatgtgtttacaccaaatttggcacctatggacgaaataaggaaaaattgccaaagtttggaaagtgccaggcttccttcacagggccggtcagaccgcagaggtacttgcttgggcaaaggaaaggagactga

SEQ ID NO: 50962 - DNA, 1068 bp, Oryza sativa
  Clone ID: PAT_MRT4530_533C.1
atggggcggccaccaatgccaagcacggggggcccgggtttccggttcacgcaggaggaggtggccgagatggagtcgctcctgcggcatctcaacaacggcatcccggacggctccttgatccagtccctcgccgacaggttcaccgcctccgccgcgcgcgccggcaaggtcggcgtccggtccaagcaggtgtggtactggttccagaaccggaagtactcgcagcgctctaggaactcgaccaagatgctaccggcggcgtctggcgaccacaagtcggccttcgctcgctcctcagttcaaaaatcagtaaagaattctttggagggtggccagctcgagtttgaggcaaagtccgttagagatggtgcatggtatgatgttgctgccttcctttcccatagattgtcccagtctggtgaactgaatatcaccagtaccggcactaccattgggatgattggggcactgaagtacaacagaacaacaacacaactaaatggagtcactgccaacgccatcgttgatctccctcgcagccgttgtcaccctcaaactgcacatgccatccgaccattaaggagagggggaggccgacaccactcattggaccatgtggttgtcgcccctgtccttaaggcggctggatctggtggcctagccatcgggaagaaacaggaagtatgggttcgattttctggatttggagctagggacgacgaatggattgatgtccgtacatgtgtgcggcaacgttctcatccatgtgtgtcaaccgaatgtgccgctgttcttcctggggaccaaattctttgcttccaggaaggcaaacatcaggctctgtattttgatgctcatgtccttgatgctcaaaagcgtaggcatgatgcaagaggttgtcgttgcagatttcttgtttgctatgatcatgatgactctgaggaaattgttccactgaggaagatgtgtcgtcggccagaaactgactacagacttgagattctacatgctgctggagcagcaaatgctgctaaagaggctgtggttgattcggtgattgcttag

SEQ ID NO: 50963 - DNA, 381 bp, Oryza sativa
  Clone ID: PAT_MRT4530_53400C.1
aaagaaactaagctagcattaattggggggtgattaacaaagctgcccttggtcatctcaagctttgcctttttttgcggcagaataaatggttttttaggccatcataactttacaagtaattaccccttacaaaggcctatgcacgaatggctggatccaggagttatccaagctattagtacaggtggtccatgagtgaacacacccgcgcttactgctgtaggccacactgattacgactcaacaggggacgacccaccaagcggctaccatcactacatagttgcggcagaacaagaatgacctactgcttaagtggcacgacgtccacatcaggagcagcgcatacatgggcactacccccaacggcatcgaaca

SEQ ID NO: 50964 - DNA, 216 bp, Oryza sativa
  Clone ID: PAT_MRT4530_53401C.1
gaaaataaagagaggccacgaagagagctcagctgcggcctggatctaactaaatgacaccggaggaggaggaggaggacaaccctgaaacacttgtccccaacgtaccaacaaaatcccacattagctgctgcatgcgaaagagaattctcgccagctcttgatggcaactgccgaaccccaaccgcggccaatgctcctcctgacaaggatggg

SEQ ID NO: 50965 - DNA, 235 bp, Oryza sativa
  unsure (1)..(235): unsure at all n locations
  Clone ID: PAT_MRT4530_53402C.1
caatgcttattcgacagctactagctagaagtaggtagaaaagcaaagagcacatcacacataggcttcctagccaagacctgagatgnnnctnattctcattaccctagctctgagtgtcactcgagtgcgtacggcgcagaatagtggcatactatcactcgtatccgaagaggtcgtcgggtgatcgtcaggaggcgcactggccacggacagggcgaggctggaagtcgcc

SEQ ID NO: 50966 - DNA, 4949 bp, Oryza sativa
  Clone ID: PAT_MRT4530_53403C.1
atatctcgctccgtcccattggaggagcagcagttggaacttgggaatagctagctgggacagccatagccaggagactaggagttggatctaaggttagaattgctcggactattggaccatgtgcttctgctccaccaactgtccatgacatcggcggtgacgatgccgtactccgcaggcatctgctatggcggcgcggtgtggaccacgtggggaaggcctgggggggcgacggggaactcatccgtcaccctgaccaggacgctcccgacaccggggtcaactccggcatcctcgccatcctccccgacggcgaggagttcccccatccaaaggctggccttgccaacgtggccccctggctcgtcaaaagcgttgagcctgaaagccgctccttcaaacgtatgtttctcgttgtcgtatatgctacaaatgaggttccaacttagcacgggaagtggagagggcagctgttacatggttgccaagtacaccaagctggcgatttatgtcttgatcctattagggcttggcatcctattaagccggcctatcgtgtggctatctctgtttggccatgtcggagccatctggaatcctgcaggtatcattatgctgacgatctagatcccagcagtagcaaaggacaggccaaatattgagttcgtgtttacccatctcaacacggaaaacggcatcgggatccaggacagggcttacatcctagccgtgggcttgctgatgagccagtcgtctggtatcggctacgagacagcggctcacatggttgaggagacaaagaatgcagaccggagcggcccaattgggatcatcacctcggttctgttcgcgacggtgttcggttggatggacctgttggctgtgacggctgtggtgacgaacgtcccctcccgcctcccctcccgcgacagcgccggcgactacgccatggcgcagggttcgtacaccgcctccgagcggacatacggcagcgcggtcgcacggatcgtcggccggggaaaggtgaccatcgccttcttcctcttcggcatggcgtgcatccccacgacgtcgaggacggcgtccgcgatcaccatcaacggggcgatgccgttgtcgcgcgtgtggtaccgggtgaacaagcacgaggtgcccctcaacgtcgtctggctcggcgtcgccgtggcgttcgtcatggctctcacgtcgctggggagccaggtggcgttccaggcgatgggttcgatcgcgacgctggggatgtacatcgcgtacgcgctgcccgtgttcttccgcgtgacgacggctcggagatcgttcgtgccagggccgttccacctcgggcgatacggggtcgtcgtcggctgggcgggtgtggtgtgggtggccaccgtcacggtgctcttctcgctgccggtggcgtacccggtggccaacaaggagacattcaactacactccggtggccgtcggcggcgtgttattgctcagtgttgcgctgttcggcccagtttttattgccgccctcttctttcccctcgtccggagggcgcggcgggcggcggctatacgcgagtacgcgacggcgggttcttcccctcccgcttgcaacggcttcgcgtgtggcggcgcgttcgaatcctccaccaccggcggcgcctgctcccggcgcggcggcgcccccgcccccttcgcttgcgactgccccgccgcccagccgtgtgcgcttccctgcccagcctccatgcgagctctcgtagcctcctccgctctcctccggagatctgccgcccgtgccaacctctccggcgcgggcttctgtaatggcgcgcctcccgtgtcctctcctctccgccgctttcccctccaggggattaaaaagagcgagggtattagcgtttcacttaggcggctccaggtttttgcccttgatgtgcaattagactatgagactgatcccccactcgatggtgtaaaagttctcgagaaagagtcgacactaagtgtcgctgtctctcaactcgcaagtgattttgatagagaatctaatttatgtttggagcggttctcccgcacaaggcgcacacctgtgatctccactggttctcttaagcttgatattgctcttggcattggtggattaccaaagggtagaatggttgaattatttggaaaagaggcctctgggaagacaacactcgcccttcatgttgtcaaggaagcgcaaaagaaaggaggctgctgtgcttatattgatgcagaaaatgcttttaacccttctgttgccgaagccattggtgtaaacgttgaaaagctcctgatagcccaacctgactctgctgaaaattctttgagcatagtgaacactcttgttggtggatcaattgatgttgttgttgtcgatagtgttagaacaaagttgagctcaaatcagactcctggaatcttcaaggaggtagcttgtggcggcaatgcattaggattctatgctgcagtcagaatgaggacttcaagaagggaattacgctacaatgaggcccaggctactggcatcggtatatcagtgcagataatcaagaacaaattagctccagcaactctgaaggaagctggcattgacatcagatttgggaaggggatctgctacgaatcagagatcctggagctggcttcttcccttggggttattatgaaggatgattctgggtattggatcaatggtgagttccttccaaacaaggcagaagctgagaaattcctacgtgaaaatgctgctgtggcggatgaaatctgcgcggctttggccattgcagccttcgcctcctttccttcaggtacacatattgctaagattcgttatagcatgcgatccatcggcgtgtgctacggcatgaacggcgacggcctcccgtcgcggagcaacgtcgtgcagctctacaagtccaacggcatcggcgccatgcgcatctactccgccgaccgcgaggccctcgacgccctgcgcggctcgggcatcgacctcgccctcgacgtcggcgaacggaacgacgtcggccagctcgcggccaacgcggactcctgggtccaggacaacgtgaaggcttactacccggacgtcaagatcaagtacatcgtcgtcggcaacgagctcaccggcaccggcgacgcggcgagcatcctcccggccatgcagaacgtccaggccgccctcgcgtccgcaggcctcgcggacagcatcaaggtgaccaccgccatcaagatggacacgctcgccgcctcatcgccgccgtccgccggcgtgttcaccaacccatccgtcatggagcccatcgtgaggttcctcaccggcaacggcgcgccgctcctggccaacgtgtacccctacttcgcgtacagggacagccaggacatcgacctcagctacgcgctcttccagccgagctcgaccacggtgagcgaccccaacggcggcgggctgagctacacgaacctcttcgacgccatggtcgacgccgtccgcgccgcggtggagaaggtgagcggcggcggaagcagcgtcgtcgacgtcgtggtgtcggagagcgggtggccgtcggacggcgggaagggggccaccgtggagaacgcgcgggcgtacaaccagaatctgatcgaccacgtcgcccaaggcacgccgaagaagcccgggcagatggaggtgtacgtgttcgccttgttcaacgagaaccggaaggaaggcgacgccacggagaagaagtttgggctgttcaatccaagacaagacaccgctgcattgctgcttcttggagtttttatctcaatccctgtagacaatgagggcgtgcaatccgttggtgtgtgctacggcatgatcggcaacgatctcccgtcgaagagcgacgtcgtgcagctctacaaatccaatggcatcacagacatgcgcatctacttgcccgacgtcgaggccatgaacgccctgcgcggcacaggcatcggcctcatcgtcggcgtcgccaacgacatcctcatcgacctcgccgccaacccggcgtccgccgcgtcctgggtcgacgcgaacgtcaagccgttcgtcccggcggtgaacatcaagtacatcgcagtcggcaacgagatctccggcgagcccacgcagaacatcctcccggtcatgcagaacatcaacgccgccctggccgcggcgagcatcaccggcgtcaaggcgtccacggcggtgaagctagacgtcgtcaccaacacgttcccgccctcggccggcgtgttcgcggcgccctacatgacggccgtggccaagctcctggcgagcaccggcgcgccgctgctcgccaacatctacccctacttcgcctacatcggcaacaagaaggacatcagcctcaactacgccacgttccaggccggcacgacggtgcccgaccccaacaccggcctggtctacaccaacctgttcgacgccatggtcgactccgtctacgccgcgctggacaaggccggcgcggcgggcgtcagcatcgtcgtgtcggagagcgggtggccgtcggccggcggggactcggccacgatcgacatcgcgcggacctacgtgcagaacctgattaagcatgcgaagaaggggacgccgaagcggcccggggtgatcgagacgtacgtgttcgccatgttcaacgagaaccagaagcccggggaagccacggagcaaaactttggagccttctaccctaacaagacagcagtctaccctatcaatttccagtgaaatcgttcatcatcagcgccagttgtcaaattcacgcgattgcttgcgctgtaatagcgtattgtattcggatgggaaactgtatttatatctcgagaggatgctctctcctttgtttaaaaaatatataaatagttataaagaaattctaaaaaaatgggatatattcatat

SEQ ID NO: 50967 - DNA, 1503 bp, Oryza sativa
  Clone ID: PAT_MRT4530_53404C.1
tcagagtttgcccagctccagcacgctcaattgctcatgttgtgcacagcgccgcacctgcagaaggtgcaggcggtgcaggcggtgctcctctgcaccccacatgctctgcagaactgaagcgatgatcggccggtcaagattcctagtcattgtaatcacatgtcgaccattacagctgtagtcgctgaccgtctgtgagctccttgtcctcacagaaatcaccatatcacgaaaagccactgcctggtgatacctatctagcaacagaagcttatcataatctaaatcaaacacaaaaactggcacaaccttgtcatagtcatcattatcatgaacaccagccaccttgtgcaactcttccaacgagtcagacagcacctgcctcatccgcttggagtccaagtattcactcacaatcagcgtgtaattatcaaacaagaacctgatcctgttcaaatcaaacttcaacctctgcccttcatatgccagattcccatcacgaatcgactgttcgatcgaaccccaatcaagcccggacgtatccctctcgtgtccatggatgtgaaagacctgaaccagcaacgagctctcgtaatgcactggaattctgagcgaaggcactagcaatgacttgtaagcactgagcaccagcgaagcaagatcagcaaccaatgccttctccgacctcggccggccgtggagcgcggcgagagggtggaactcgccacgggggagcacgccttcaccggagagcgcagggccatagtccaccggccctgcacccaggtcgatccaaatgtaccgctccttgccagcccagacgggggcgaggcagcgggagaagccaggtgaatgcgcatcggccggcgacgatgccgcggtgtaggcgtacggccgcggctgcgggccgaggttgagcaggtagatgtacaccgacggggcggagccggtgtcgacgagcgcgcggtagtcctcggcgacgaggtcgtcgacgacggagtaagggacggaggagagcgcggcggcgtggaacggcgccgcggaggagtcgaggtgcgcgcggacggcggcggcggcgcggggcgcgagctgggaggaggaggcggcgacctcgaggtggatcttgtgggagagcgcgaggcggtgcgggcggcggctggagaggaagcgcgaggaggagacggcggagttgacgaaggactcgaggaggcggccggtggcgggcgggaaggaggcgccggcgaggcggacggtgacggggacctgcgcggagagggagaggaggcgggtggggaggagcggggacggggtcgagagctggcggaggagcgcggcggggagggcgccgaaggtgtcgttgccggcggaggggtcgcgggcggcccccgccgcgaggaaggagtcgaggccgacaaacgcggcccccgtggcggcgggcgtgagcgaggaggagacgaggaggagtaaggggaggaggaggaaggaaggggctcgagccat

SEQ ID NO: 50968 - DNA, 969 bp, Oryza sativa
  Clone ID: PAT_MRT4530_53405C.1
atggcggcaatgtctgcttcgggccggagggtcttcttgctcggtgcccttctgctcgtcgccgtctcctgccatggcggctttggcggcgtcggcgtggcggagggtttgtcgacgaggtactatgctaagacgtgccccgccgtggagtccgtcgttcggtcggtgatggcgcgggcggtggcggcggaccggcgcatgggcgcgtccgtgctcaggctcttcttccacgactgcttcgtgaacggctgcgacgggtccgtcctgctcgacgacgcgccgccggggttcaccggggagaagggcgccggcgcgaacgccggctccgcgcgcgggttcgaggtggtggacgcggcgaaggcgcgggtggaggcggcgtgccgcgccaccgtgtcgtgcgccgacgtgctcgcgctcgccgcgcgagacgccgtggcgctcctcggcgggacaacgtggcccgtgaggctgggacggaaggacgcccgcacggcgagccaggccgcggcgaacggcaacctccccgggccttcggcgcgcgacatgacggcgctgtcgggcgcgcacacggtggggcgcgcccggtgcgccacgttccgcggccgcgtcaacggcggcgacgccaacgtgaacgccaccttcgccgcccagctccggcgcctgtgccccgcgggcaccggcggcgacggcaacctcgcgccgctggacgccgagacgcccgacgtgttcgacaacggctacttccgcgagctgacgaagcagcgcgggctgctgcactcggaccaggagctgttcgccgccggcggcggcggcaggtcgtcgtcgcaggacgcgctggtgcggaagtacgccggcaacggggcgaagttcgcgagggacttcgccaaggcgatggtgaagatggggaacctcgcgccggccgccgggacgccggtggaggtcaggctcaactgccggaagcccaactag

SEQ ID NO: 50969 - DNA, 798 bp, Oryza sativa
  Clone ID: PAT_MRT4530_53406C.1
atggcggcaatgtctgcttcgggccggagggtcttcttgctcggtgcccttctgctcgtcgccgtctcctgccatggcggctttggcggcgtcggcgtggcggagggtttgtcgacgaggtactatgctaagacgtgccccgccgtggagtccgtcgttcggtcggtgatggcgcgggcggtggcggcggaccggcgcatgggcgcgtccgtgctcaggctcttcttccacgactgcttcgtgaacggctgcgacgggtccgtcctgctcgacgacgcgccgccggggttcaccggggagaagggcgccggcgcgaacgccggctccgcgcgcgggttcgaggtggtggacgcggcgaaggcgcgggtggaggcggcgtgccgcgccaccgtgtcgtgcgccgacgtgctcgcgctcgccgcgcgcgacgccgtggcgctcctcggcgggacgacgtggcccgtgaggctgggacggaaggacgcccgcacggcgagccaggccgcggcgaacggcaacctccccggtccggtgtcaagcctcacctcgctgctcgccacgttcgccgccaagggcctttcggcgcgcgacatgacggcgctgtcgggcgcgcacacggtggggcgcgcccggtgcgccacgttccgcggccgcgttaacggcggggacgccaacgtgaacgccaccttcgccgcccagctccggggcctgggccccgggggcaccggcggggacggctaccttttgccgctggacgccgagacgctccgagtgtttgacaacgggtttttccgctag

SEQ ID NO: 50970 - DNA, 326 bp, Oryza sativa
  Clone ID: PAT_MRT4530_53407C.1
cgggcaaacaaaaaaaagcccttgaaaggttagcaaattccaacccaaaacaacttaaggaacccccccccaaacccttaagcaacacaagaaaaatctttaaaaaacgatggccggacaaactccaggggacgggaaaaacatttcaccggacattaggacaaatattgggcgggggacaattaacccacaacgttatacacggggaaacacattaatggccctatactactatacccaggcgcacacgggggcctacgaggaatgggtttacgggcggaattcttcgccgccgccgccgaggccaaattcgccggcaaaccccc

SEQ ID NO: 50971 - DNA, 1680 bp, Oryza sativa
  Clone ID: PAT_MRT4530_53408C.1
atggaggctcaaccgacggcggcgacgcttcctaataattccggcggcccatcgccggcgggaggcggcggctaccctcagtgggtcatcctcgccgaacacgttcctctcgaggacgaggacgagggcggcgacgaccctaactcctgcttcaccgccgacgccgctagcaaggtcaccgacaccgagaccgaggcggcctcccgctcctccgccggaaatcacgtcggcgtctccttcctcctcaaggcgccgccggcggtgtcacgcctacgcttccgttgcgtcccaagcggcagccgcggaggcgatagacggttcccctcgatgcgtgtcgtcgccgtccaccgcgactccctgctcctccggatgcaatatcggaaagggcgcgcctacgacaacgacatcggggtcgactacttcctctacaacgccggcgccgccgccaccgccacattgcaaaaggaagaggatgatgatgaagaagataaggaagatgatggtggagaagaaacttatcgtggtcgtgggtatcggcgttgggcggcccccaagcggtgggtccgcgatctgggtgtcaagaccaccggcatcttgcaccgccgcggcgacggcgacgacggcgatctcgtggtggtggcggagctcatcgcgaaggaggaggacggcgggacgccggaggagctcctggtgctccgctcggacggcgagtggaccctcacgcggccgcccgtcgtccacgacgacggcaaggccgaggaggtgtcccgctggaaatccgacctcgtcgtccccatcggcgacacgatgctctgctgggtcgacctgtatcgcggcatcatcgtatgtgacctgttcgacgaaattccccagctgcgatacgtctccctccccgtcgatgcccccgccgccaaattcgacaacggccgcggcgactactccatcaacccgcggatgtgcccgcggcagaagcgaagcttctgggtctccgacaacggcggcgagctgagattcctcgacgtctcgccccgctgctgctgcggcgatctaggcgccaccacatgcaataacgcccgcaacgccttcgtcatcagctcatggacgctaaagatgaacgatatgagatgggtgatggacgccatggtcgacgccaccgagctctggtccctcgacgcctacactggccatggcctcccgcgcgtcagaccggaataccctctcatgatcatggatgatccgcgcctcgtcttcttcgtggtgcaagaggagtaccaaccggaaatatcattttctgataggggaaagtggagggtcatgttcgatatgaggagcaagaaaatattatcagtgagccagtacgatgagtcagacacgtcgtggcagccatattcttggctcacttatttccccagcaagatctcaaattacttcacttccattggagcttgtagcaatgttgcaaagaggccgctgattgtcactgacaagccggcaatgtcaaagggagtagtagcttctcctgaggagatcttggcggcgttagaagaggttcctgaattggactgcgatgatatgctaagagcgtatagtattctttgcgatgacattggccgacaccgatttagatcgcttttgggcctcccgcaaacatgcaacgtggttgaacttatttcattgtga

SEQ ID NO: 50972 - DNA, 222 bp, Oryza sativa
  Clone ID: PAT_MRT4530_53409C.1
aggctgaatcaatttagataaataaataagcatcattcatccgtcgttccattatattttttttagtaatagagagaagcccaaccgcaacccacacgtactgtttggctatcttcattgccaatcatatgcacatatgtaccagctggtcagggtcccaacaatttggcaaggctgtgctgctggtgtgccctgctggatcccactgtgtgtgttgccaac

SEQ ID NO: 50973 - DNA, 3045 bp, Oryza sativa
  Clone ID: PAT_MRT4530_5340C.1
ccccccgcgccgggttgccgctccactcacaaagaaaactgcattgaatttggctattttaacatgttcatcaaaagctacagagaatcatccactttgaacagatcatgatttacaaggttcttggcttctacccaaattacatcactaaacaagtcacttctaccaaaaaggaagttgtaggaacaaaaatattcaacaatttgcatgtgttggctgtctattccgccttgtcgagactatttgtcccagccatcctctctcatgccaaatagccatttctgggggagagggccatatatggaggcgaacttcgccaagcatttcgttctgatgtcatagtgcttctgcgtgtctcggctaaaagcaagtaaagaccgcttggacgtgtccataccccgagcagagtgagcacactccgctgtccgggatgagcgtggatttgcatacagagaattcatgagcaagtcagcgcagttgaagttcttgtggacatagtctctaccttccttagcttctataaaccaagatttacagaaagcgaacacactgtccatgaaagcagcacctgtgaggatcaaattgtagcccttcttgccccgagcatatcgctcattcctgtactgccgccgacgtccgcctacccggcgggcgtccgacccacgcccaccctcagggcctccgccccacaccctgaatcctttctctacatcactgcaagtcatcatgatatcatcatccagttccaggacagcccttgtctttatcaaagggtcacccctaaatcggttgttaagggagttgatttcttccacacgtattctgacagggactgttgaatcaaaggcgtcgctggtaggatggttgcctttgttccagacaacaactatctctctgactgacccgcacacacagccgtccccgccgaacagctcccgttcccggcgcgcgtcggcggccgtgtcaggggagcggggagggacacgatcaccatccatgacagcaacccatccaccagaggcaagttgctgtgcatctatgtgatggtacctcataccattccaagcattcctccctttctttgcctcttcgattccaagatttaccggaacctctttgtattcttccttagttagcttttcaatcttgtacagcttaaccttccgtccataggtaccactgcaatccttctccaatgtccattcaagaggaaacttagtagctcgataaagtcgtagctccttctttttgttcccctctggcatcatataaatctcattctcatatttgaacacgaacgggtatgacagatgccatgcctcatctaaagcaataccaagaaattcccatgttgcaccttgatccaagcttcttgcaacaccaatatcaccttgcattgtgcttactgtttttgtttcaaagaacagaaagagtgtgtccccctgcacgtagaggaacgggtcagcgacgaagttgctcgggtacccgccttccgtcggggtcgcgcaggtcagcacggggttcgccaccggccacgccgagctgttcccattgctcctcccttccagctcgatggggcggagctcgagggggctcttcccgtagtacatcccgatcgcccacgacccctcgccatcaggcaagcacccaacggcgcgggagtcggggaggcggaacgacgagaccaccagccagaagtacacccctccgacgagcgccgcgcccgccgccgccgccaccaggaacgacacggccggcgaccgcgcggcggccagccgcgccaccaccccacgcatgctgctgccgctcggcctcatagctcgccgccccgccatccccagcctgcctccgccgccgccgaagccggcatcgaccgcccgatcggatcccagcctgggcgcgacctcgtgctccgagctggatggattcctcgtcgccctcccggcccgggagtacgaggggggagagattagtttaagcaggcggaggaggcgaggcgaggagaggccgagatcaggttctccacagaacgcatcaggctcgaatgaccttgcagaagtatcatcgtacactccagggatagcacgcccgacagtgttttcaaaaggatcctttgggttttcggtgttggcgtagagaagaatgcaaagaatcagggacactgccagccccaccaaggtaaatttcactctgttcagcacaggcttgacctgcccgtcgtaccatcccgtttcctcatactccacggtggcgctgaggaggcggttgccgacgtacgcccacccgaggtacatccgcaccacggcgagcgtgacggccagtatcccggacccggtggccccgagcgcgaggtgcacggcgtcgccgccggcccctccgcggccgccgaacgacgcgacggggaggccgacgaagagcgcgaaggcggcgccggtgagcgcgaggcgggagcagtagaccgtgaggtcccccgccgcccacgagaagggcagcgacgccgccagcgactcgtactcgttcaccggcagctgctccggcggcacggggcaccactccgtcccctgcgacgagctcccgttccgcgacggcgggaccgcgaaccggcggcgcccccgcccccgccgccgtccgcgggagcccccggccatgcataacaaaaatttcagtggttacaatctgctatgcagttgcagagaactattcacaagtataccataaagtgcatttgttttattggcatgaacatacaagtatgtttaaaataatatgtagtgtttcagaaaaggactgctccagataagacccatagatccagagtatcaattattgatatgattatattattttgaagaatttcacagctcacgccatgtgcatacgctattcaatattcagttcataagagtactgcagaggtataacagaaaagggaaaaatgaaaaagaacaaacacacacaatctgagaacagtagaatggttcaaataagaaggttatcatgaatcatggcaacttacagaaaatgaacctagaagccgatcacgag

SEQ ID NO: 50974 - DNA, 339 bp, Oryza sativa
  unsure (1)..(339): unsure at all n locations
  Clone ID: PAT_MRT4530_53410C.1
gaacggctcaacccgctcacgtccgcgatcagcgtgcagnggtagggcacttggtaaccgntggattcaaattgagtgattggtanacatccttctttttggtttgcaaatgngaatcntgtgactcaatcgagtccgccggcgacatagttcgacncagtgagccaggagacaggagcacgattggtgtgccattgaatcattcatgaggctcatagcaagcctaggctaatccatngacacaatatgaagttctttcttcaaataattctttccccttcgtttgcattaatttgantcaaatgagatggttttttagtacaaaaaaaaaaaaaaaaa

SEQ ID NO: 50975 - DNA, 501 bp, Oryza sativa
  Clone ID: PAT_MRT4530_53411C.1
atggtgtggagctgcgaaatcgatggctacggcgacaacgtagagctacgagcgcggcggcggttgtgtaagatccaggtcggcggctgcagcggcggcgtggagccgcgagtggaagaagtccttaccactctcctcttaccgatgtcaagctacaagagaagagtaaaatacttcccagattgtaaaccaagaccagtgcatattctctttgccttctctgtagaaattgctctagctgatgcatttgcctttcttttgtggcaactagtggagctctgtgatccaggatacaaactaaaagagtacacattggcacctgcttcatgggagtatattaggtcaacttattcgccgacggtcagggcatcgtcttcaacctctaaaatcattagaaaagatgggtggaaaggagacaatagtgatgaacacactttggtggttgtgatggtgctagagatgatacaaggtatggatgtgtgggagggatggcatggctga

SEQ ID NO: 50976 - DNA, 206 bp, Oryza sativa
  Clone ID: PAT_MRT4530_53412C.1
actcacgtgtgtgctggcccaacactacattaaccatgggcgcaatggcacaggtggtcggcaagccttgctttagagccttactaataccaagaaggctcatctatttacaaatacagggatccttatatcctgctcataagcttgtggccagccggcttgaattgctcgggccccactagggacttgtattacatatcttggct

SEQ ID NO: 50977 - DNA, 307 bp, Oryza sativa
  Clone ID: PAT_MRT4530_53413C.1
atacgcaaaaaaaaaactgcagaaaaaccactgcagaaccccacttagaaaacacccaatacaaagacgccgaaaaaccccaaaagaacaaaaaaaaagcggaaaaagggaaacggccccccgggaccgcccaaaccgaaccaaaaaaacctggacccacagaaccggaaccaccgaaaaccaaagggccaaaaccagatggaactgacagccaagggctcccaaccaaaaggagaatgcggacatggacctccacacctggggccggaaaaccccgaccgccaaaaccaggcgggccaaaccatga

SEQ ID NO: 50978 - DNA, 232 bp, Oryza sativa
  unsure (1)..(232): unsure at all n locations
  Clone ID: PAT_MRT4530_53414C.1
cncttccanaccttctntccntcaaagtgaacgngccgaagtccgctattncnctgtagacatcaagtnntaatctcgttttcatcnnnaaatttcttctgccagagccaagnccggctntgcagccgtttcgacgtcgtcgacctttttccggcggaccanagcaccagcaggnccaccnntnactggtgagaattttccccaaccttntttcnttgcttctatcgggttc

SEQ ID NO: 50979 - DNA, 375 bp, Oryza sativa
  Clone ID: PAT_MRT4530_53415C.1
atggtcgtcagcccgcaggccgtcggcggcgggaagtgccccgtcctcggctgcgtcgtcgacctcaactgcgagtgcctgccggggcagcggttctccgacgatgccgcctgccgcggcccgccggagcgccggcagcagtccacggcctcatcggtccgtgcgtcggtgttggtgatgtcgccttcacatagactccgcccgctctgccgttcagcctcgtcggtggagcgcggcggctgcaaacgacgtgatagcctccggggaatgatgaccttcggatggcttggtcggcagctcctcggcagcatagtgacgctggcagcgaagccgatgaagagcatgtgcggaaatatgcagtgccggttaggatga

SEQ ID NO: 50980 - DNA, 407 bp, Oryza sativa
  Clone ID: PAT_MRT4530_53416C.1
cattcaacattgaggtgaataaacaacccaaaatcttggaaccagtcaacgatcagcccgaatttcgccgttgttgcttgcctacctctccactccatcattcgcaaattttttgcagaacacagcaaggagtagcagagaatgagcgagatgcagccgcacgccgtgtgcttgccgttcccggcgcaggggcacatcacgccgatgatgaagctggccaaggtgctccactccaggggcttccacgtcaccttcgtcagcaccgagtacaaccaccgccgcctcgtccgctcccgcggcgccgccgccgcggccggaatcccggggttccgcttcgccaccatcccggacggcctgccgccgtccgacgccgacgccacgcaggacccgccgtcgctcagctactc

SEQ ID NO: 50981 - DNA, 548 bp, Oryza sativa
  unsure (1)..(548): unsure at all n locations
  Clone ID: PAT_MRT4530_53417C.1
tttttttttttttttttttttttttttttttttttttttttttttttttttttttttttttttttttttttttttttttttttttttttttttttttttttttcaaagaacgaaaggtatgggaaaacacactcggcccacccgggggggggggggggggggccctaataattcccgaccggtcccttcggggggaaaattttttcctttaagaagtccttataaaaatgggccctaaagcgtaaaaatctggtcccggggggaaaatgagtgagggtccaatttctaaaaaaataaagcccggtggcctaaatggaaaagcccggggtgcctaatggggggccttactcaaattaatttcgagggggtaaaggccccttttccaggggggaaaccggtggggcccccttcttttagggatccgcccacccccggggggggggggttttttttttcccccccgggggggtgtttttttttcccgggggggcggcccacggggggtgggcttttcccgcttgggccctggggggtgttggcncgaggac

SEQ ID NO: 50982 - DNA, 502 bp, Oryza sativa
  Clone ID: PAT_MRT4530_53418C.1
acagaacaatattgttcctattaactacataacatggattgtagtggaggctagcaattggaagctgttggtggagcttgagcacagagcatactgggccatcaggaattggaacatggactttgaaagagcaggagaatagaggaaaatgtaaattgctgaacttgaagaatggagagagaaggcgtatcacaacgctaagatatacaaagagaggatgaagcgctggcatgttaaaaggataaaaatcaagaaattcaagcgaggagacaaagtgctgatgttcaactctagggttaagctttttgaccatgggaaattgcgcagtaaatgggaaggaccgttcgatgtcattgacacctcttcgcacggggcaatcacactccacgacgattcagataacatatttaaggtaaatggtcaacgtttaaaaattttccttgagccggatgaaactttagatgaagaagtggatattattgaattaatcgattatgaatca

SEQ ID NO: 50983 - DNA, 687 bp, Oryza sativa
  Clone ID: PAT_MRT4530_53419C.1
atggccggcaggctcgtgtccctcgtcgccggccacctgctggccgaccggaggggcgtcgacgacaagctgcggagggtgcggcgcctggtcgtcaggatcgagagcgcggtggaggcggccgaggcgaggcggatcaccgggcgcgcgctcctcgcgtggctctcggacctcgtcgacggcgcgcaccagggccgctacttcctcgacgcgttccccgtggtggcggaccacgacggcgacggcgacgtcgaggtggcgccgtcgtcgttcaaccccgccaagcggctgcgcgtcgcggcgaggaggctggtgttccgcgacggcggcggtgtggctgcggagctcgacggcgtccttgccgacctagagagtgtctccggcgatctcaccgggtttatcatgatgcttcagagctgcccgccggcgatgcaccggccgctggccacgaacatctacgcggacagccagatgttcggccggcaggtccagaggcgccgcgtcttcgacttcttgctgcaagacggcgacggcgatgacggcggcgagccggcggcggcggagctcggcgtcctctcgatcatcggccgttccggcctcgggaagaccacgctcgtgcagcacgtctgcgacgaccccgccgtgcgccgccgcttctcgcggatcatcctggtggacttccactgc

SEQ ID NO: 50984 - DNA, 2640 bp, Oryza sativa
  Clone ID: PAT_MRT4530_5341C.1
atgacgaagccgccatccaagacgaaggtggagccatctaatgtgatgccggtcacattggataacttcgaaggagaagatcgtaaagctatggaggagtacatcaacgagctcacacgggaggcgttgatgagagcaactactaggactcatcaaggcgtgatcatcaagcccaggccacgtcccaagctcgctcccgacgtgtccgggtattaccccggcggtcagactggctctcaggccggtccgaccgcacatcatgatgccggtcagaccgggccctgggccggtcagaccggcacaattgttccaatacaggctatagatccaatgactaatgctagttatttgcattactttaaaacatttgatcctcctgtatctactgctacaagtaatccccaagttcccccacatattcctaatgcttataatgatgtttctaggggatatcctcccgatactagacaaggccagtataatcatattgcgccacaaacacaacctattaggccactaaacccaccgccaaatcaacaagggcctaataacttggaggatataattagtgatattatgaggaatagattcgggattgaaactaggaatcgtgctaaggtttaccaaaagccgtatcctgactatcatgataatgtgccatttcctcgtaattatagagttcctgaatttaccaagtttagtggtgaagatagtaggaccacatgggagcatgaaagccgagtggatgacaatagcttacatgctagtttagatgatagtgcaatatcatgtatagccgaaccaagcaatggttcggattgtggtaataatttgtgcaataatgccattgaagatatagccgaactaaatgacggttcggattgtatcacaagcgaaagtgaaatagcatcatcacctaagaccgaatcacaaatcggtcatatgggtgttgggaaagatgatgacaatgtcttgcgggatagtagtgaaatagaatccaaagtagctatgtatacatatcaaaggccgtatcctgaacacgtagattcggtcccatacccgcaaggatttgaggtgcccaacttcacaaaattcacaggtgaggatgctagaacaacaatggagcatatcggccaatttattgatcaatgtggtaaggccggtagtaatgatttgcttaagttaaaattgtttcccctttctttgtcaaactttgcatctacatggtatagtttacttgctcctaattcaatttctacatggtcacaaatggagcatgagtttcatgattatttcaaagatgcaagcttgatggaacaaagaccgattgatacttcatcggtcacttgtgaaactatttcggttacatctatacctaagaccggaattgttagtgattctctccctgttagtcctattgatgttgacaaaaagaaagggaaaagtgttattattggggatcctcggcccagaaataggataaaaaatgcgaaggccgaagatcataaagttacaaaggatgagtcatctagtatccaaaggaccaaaaagccgcagctcacttttgagatgcttatggctaaatacaagaaaggattagctggtcaacgatttgataaccaaattagtgattcgaaaagaccaagatcatctcgtaggaagagatttggtcaaacatcaaagcaatcggagctatcaaccataccaactccggttgtgatgccatggtctggtgggtcaaaggtgaaaaagtttaagaaggtgtgggtgaggaaagaagccaaagctcgggaggtcgttgctgccaaagaggggtctcaagatgttcatgtacctactggagatgcggtggaaaccaagcaggcaaaggagatcgaagccgacgccgtgactgccaacattaggggtctaaccgagacagctggccggtctaaccgccagtctacggccggtctgaccgaccttactggccggtctgaccgacggcttgtggccggtctaaccgggcccagaggccggtctgaccggagggtattgcagaagagtggaaaaattgagagcaacataggagcttccacttcgactaaaaatatgaagaatcattgttttgctcctggaaaacaaccacagccaaagtggataccttctggcttatctcgctctaaaaaaaggaggctacaacgtcttcgggccataggtcaaaaggaaaaggaggccgaagatgtggagaacaaaacatgtaataatttagagcctcaaaaagcatctaggcaagtgtggagatccaaagagccgatgcttgatttcaaaagtttggacgaaattggcaaaatcatagaccaggggcggtctaaccggcattgcacggccggtctgactggtggtagccagcggtctgaccggctctgcatggccggtctgaccgggcagatagggtggtctgaccggcattgcgtggccgttgaggtaaatcttgtctctcttcggtatttcaagcaagacgacttgtcagttgaagattacaagaccttgatgggaagcaattttgaagacgtcatcgacaagcgtttgaagactttgaaggagaggaagacacttcaagacggtgttttcagagggcaattaatggaaaatacttga

SEQ ID NO: 50985 - DNA, 549 bp, Oryza sativa
  Clone ID: PAT_MRT4530_53420C.1
ggacttgaagaggttggctttacattttaattacgagggaaaagatcgccgcaaaccgccatatgccatgagcaataacataactactttagcatatcatgcatgataacaattccaacacatacaagcctacttattctacggctcatatatgacagatacataataccaagtgcatgaactgtactgaacttgatggagcaaccaacaggacaaggagtggttgttcttctacaactgagctcggagcagatctatgatcttcttatgcacctgaaacgccttaatcaaaatataatctgatataagtgggctctatccagacaccgaattgtaaatagtaataaccctgggatactagctacttagggcagaactggaaaatgacggtttgacgcgggctatgattgacgcgcaagtggatgatcccgtaagagaacacaaacacgtaacgcttggtgagcaccttggacaatagcctgttatctcgccgtgacgtaacatagccaacgtatagagatgcttgaagcaccgctaacatctagaatg

SEQ ID NO: 50986 - DNA, 369 bp, Oryza sativa
  Clone ID: PAT_MRT4530_53421C.1
caaggcagcaacttgagcgcatcggccggggccgaaccggaggacacgccggccacgagcgtgccgccggcgtttgggccaccatccgccgcgactatcgtcgtctgggccaccgttcgccgcggcagtcattgtcattgtcgctgcgccacggtcacaagctcccgccggacgtcgcctgcgacgtggaggctgttgttggcgcggccaaggggttccacgcaggcgccacatgggccaggggcctcctagagcggtgcggcgccatttgcatcaccgcccctgccgccgccaagcatcgccgcgagccctcttgcctcgagcagcagcagccgctgtgccatcacctgcgcatccaccggcgggagg

SEQ ID NO: 50987 - DNA, 3984 bp, Oryza sativa
  Clone ID: PAT_MRT4530_53422C.1
atggaaggagcgagcctgcacttgcatgttctcgcgaggattcccgagacggcgcagcaggcgtttctccgctggggattgctccgtgattcttcaaattccactaaattgcaacatttgcaagaatggcaagaaatgtactcaccttgcttctggatggacgcttttgcactgatacacctgatattcatcatgagtatcttggttcagtttctgtataagagaataaggtctattttactcgatcatgaatatttaggacctgaaaaatggattaacctgttcatgcttgttatctgcactcttctatttgtaatttccgccaggggaaaaacaggaatcacccttgtagataacagcataacagagccactattgagtccatctacaggacagcagacagaaatcaaaaggccatgcccatatggaaaagcaaatcttctacaacttgtcacattctcctggatgaaccctgtgtttgctattggatacaagaaacctctagataagaatgatgtgccagatgtctatgggaaggactccgctgagttcctttctgattcattcaaaaaaatcatagatgatgttgagaacaggcatggtctaaatactaaatcaatttacacagcaatgttcctatttattagaagaaaagctataatgaatgcaggatttgcagtcttaagtgcaagtgcatcctatgttggaccatccctgatcaatgacttggtgaagtacctagggggagagaggcagtatggactcaaaagaggttaccttctggctgttgcttttctcagtgccaaagttgtggaaacagttgctcagagacaatggattttcggggctcgacagctcgggatgcggctgcgggcggctttgatatcacatatctatcaaaagggactccgcctatcctgcagttcaaggcagaaacacacaagtggagagatcattaactacatgagtgtagatgtacaaaggataactgatgttatatggtacaccaactatatttggatgttacccatacagctttctcttgctgtctatgttctccatcaaaatctaggggttggagcctgggctggtttagcagcaacactggcaataatggcttgcaatattccactgaccagaatgcagaaaaggttgcaggccaagatcatggcagctaaagatggtagaatgaagtcaacgacagaagttcttagaagcatgaagatactcaaacttcaagcatgggatatgcagtaccttcagaagctagaagctttacgaaacgaggagtacaattggctgtggagatctgtgaggttgtccgctgtaacaacattcatattttggggggcacctgcattcatatcctccataacatttggcgcatgcatattgatgggaattcctttgactgctggtactgttttgtctgctcttgctacattccggatgctacaagatccaatcttcactcttcccgacttgctttcagtgtttgctcaaggaaaagtttcaggtgatagggtggccaaatacctccaggaagaagaattgaaatatgatgcagttattgaaatacccaggaatgacacagaatatgatattgagattgatcatggaatattcagctgggaactcgagacaacatctccaactctgaaagacgtagaactaaaagtaaaaagagggatgaaagtagcaatctgtggaatggtcggatctggaaaatcaagtctattatcatccatacttggggagatgccaaagctagctgggactgtgagggtcagtgggagcaaagcatatgttcctcaaagcgcctggatcctgtctgggaacatcagggacaacattctgtttggaaatccatatgacaaagaaaagtatgacaagataatacaagcttgtgcgctgactaaagatcttgagttgtttgcaaatggtgatttgacggagattggtgaaagaggaattaacatgagtggtggacagaaacaacgaattcagatagcaaggtcagtatatgaagatgcagacatatacctttttgatgatcctttcagtgcagtggatgctcatactggaagccaacttttcaaggattgcctgatgggaattcttaaagacaaaacaatactgtatgtgacccaccaagttgaatttcttcctaccgctgaccttatactggtgatgcaggatgggaacattgttcagaaagggaaatttgatgagcttcttcaacagaacataggatttgaagccatagtgggagcccacagccaggctcttgagtctgtcataaatgccgaaagttctagcagagtgacatccactgagaacagtaaaccagcagatactgatgatgagtttgaagcagaaaatgaaacagatgatcaaattcagggtataacaaagcaagagtctgcacatgatgtatcacaggacatcaatgagaaagggaggttaacacaagatgaagagcgagaaaagggaggtattggcaagaaggtttactgggcatacctgagggcagtttatggaggtgccttagtgccagtcacaatcgcagcacagtccttcttccaaatatttcaggcctccaatgaccaaagtgttctagatctggaaatagcaaacaagcttggttggtgcgtattttcagtcatacaaattctggggaccattggtgttatgtcccaggttgcctggccagtttttgccatcttcgttccagtaacggtggtctgtttcatgtgtcagcgatactacataccaacagcaagagaattggctcgtttatcacaaatccaaagggctcccatcctacaccattttgcagaatcgcttacaggagcatcaagtataagagcatatggacaaaaagatcgtttcagaaaatcaaaccttggacttgtcgacaatcactcccggccatggttccataacatttcttcaatggaatggctttctttcaggctaaacatgttatccaactttgtctttgctttctctttgaccctgctagtgagccttcctgaaggttttataaatccaagcattgctggacttgcggtgacctatgcattgaacctcaactcacagttggcatctattatttggaacatctgcaacacagagaacaaaatgatatcagttgaaagaattttgcagtactcaaggatccctagtgaggctcctctagtagttgattatcgccgccccccaaacaactggccacttgatggaaatatcaatataagatgcttggaggttcgatatgcagagcatctcccatctgttctgagaaacatatcatgtacaattccaggaaggaaaaaggtggggattgtaggacggactggaagcggaaagtcaactttgattcaagcactttttcggattgttgaaccaagggagggaacaattgagatagacaatattgacatttgcagaatagggttacatgatttacgaggcagacttagcatcattccacaggatcctacaatgtttgaaggcacagtgagagggaatctggatccagtgaatgaatactctgatcaacgtatatgggagatattggataaatgccagcttggtgatatagttcgacagagcccgaagaagctggattcaacagttgtcgaaaatggggaaaattggagcgttgggcagagacagttgttttgccttgggagggttctgctaaaacgaagtaatgttctcatccttgatgaggcaactgcttcagtggactcctctacagatgcaattatccaagaaacaatccgcgatgaattcagggattgcaccgtgctgacaatagcacatagaattcacacagttattgacagtgatctcattcttgtcttcagtgaaggaagaatcatagagtacgacacaccattgaaattactggagaacgagaactctgaattctctaggctcataaaggagtattcacggagatcaaagggcttttag

SEQ ID NO: 50988 - DNA, 216 bp, Oryza sativa
  Clone ID: PAT_MRT4530_53423C.1
atggatgaaaccagctggcacgcccttggagcactcgaggaaagccttggacctgcactggagttaggcagatctcacaggccgccgtgttttccgtcaacagtcctcctttacgtcatgcaacatctgaccaagatcatccgcaccgtcgttgtcttcaacatcctcgttgttaacgaccaaatttgtaatatcagtatcggagatgaagactag

SEQ ID NO: 50989 - DNA, 293 bp, Oryza sativa
  Clone ID: PAT_MRT4530_53424C.1
aaaatgaaagctctctgagggatgcatcactgtgaacaggtagtcggcatcaccccgccatgcccatgcacatgcacggacgctcataagtttggattaggacgccattcgcaggtgtttttttcttcttctttttttcctttttttgcgagggcacagattctttggtattctggttcaggtactacagatgtgtatgatttcataagtaaaagtttgtattacagcttaaccttgttgtatcgtctcgaatgaatgaagctcctgctaaaaaaaaaaaaaaaaaaaaaaaa

SEQ ID NO: 50990 - DNA, 315 bp, Oryza sativa
  Clone ID: PAT_MRT4530_53425C.1
atggcatggctagagtacgccaaggaggaggaggcgaggggatacggggagagaggcggggagagacgccgggaggagcggcgagacgaggcgcaggtggagtgggagcagcgggaagaggagtgcgacatgggcggacgagaggaggagcgagtggcggtggaggtggagggtctccagggcggcggcggggacggtggcgcgaaggtgccgaactcgaggaggtcggtgagggccacggcggcagccagcggcggcgtcgccatggctgggcggaattggattggaggttggggattaattgagaggagttga

SEQ ID NO: 50991 - DNA, 1568 bp, Oryza sativa
  Clone ID: PAT_MRT4530_53426C.1
cactgttgctgctgctgctgctgcttgcaaacactgaataccctaacctctttcattaatttctcgctctgattttgaccgttagaacaaagctaagatgggccatacgtatactaggaggagtaccatcatattcatcttctttctagcttcctctcctcttcacattccctgcatccatccatctcaaccaccaccacctcatttcaggagatcatctcctccttttctttgctagggtttgtttgccataactactatctatcgcctcttcttcacctcacctgtcctgtcggccatggagagcttcgccagtctcgcaggaggtggcagcagcagcaccacagctcggttgccggagctgatctcgccggagaacccggaccacatctcgccgcccccgttgctgtaccagctgctcgccggcccggcgtcgtcggcgcggcagcatgggcatgatgggcatcaccacggcggcggtggcggcgaagcagcagcagcagctgtgcagggacaggtctcgccggcaggcgcggaggcggcggtcaaggccgagatcatgtcgcatccgcagtactcggctctcctcgccgcctacttaggctgcaaaaaggtcggggcgccgccggatgtactgaccaagctcacggccgtgccggcggcgcagcagctggacgaagccgacggccaccctcgtcgccggcacgagccacggcgtgatgacgacccggatcagctcgatcagttcatggtctcgacctgcagcatgctgacgaggtacagggaggagctggagcggccgatcctggaagccgcggagttcttcagcagggtggagacgcagctcgattcgctcgctgagagtaattgtgaaggcacgggatcatcagaggaagagcaagaccctagtgacaagcagctgaagcaccagcttctgaggaagtacggtggctcgttgggcgatctccggcaggtgttctccaagaggaccaagaaagggaagcttcccaaggaggccaggcagaagcttctgcactggtgggagctgcactacaagtggccctatccctccgagatggagaagatgacgctggcgcagacgacggggctggaccagaagcagatcaacaactggttcatcaaccagaggaagcggcactggaagccgacgccggtggcaggcacggccttcccgacgatggaagctgccggaggcggcttccgacactccggccacggcggcggccttgcggcggcggcggcgctgccgctgtacatgggcaggccgttcgttgtggacggcatgtaccggctcgggtcttgaagcctctggggatcgcatggtgtttgcatggtgttttttgcttggtaaatatttgctagcagcttcccatgatcagcctgtgggatggtgaaatggaagaactgatgaatcttcatcacgatctttcctctcatttttttttctttggtgtgtgataaaagctcagatgtaccacgtactactgtctgcttctttgcaaatggatatgtaattgaaagctttaattctaaaaaaaaaaaaaaaa

SEQ ID NO: 50992 - DNA, 196 bp, Oryza sativa
  Clone ID: PAT_MRT4530_53427C.1
cgataccgcccccaaattcctccgcttcccgcgcggatttcgccgccgggcggcgagatccgcacgattcgcgccccgatctgctctgacccggcgctcgcctcgccggattcggcccccgttttgcagggtttccgccgccggggtcgcgcgggcgttcgagcggagcggaaggggaggagacaggatagggatg

SEQ ID NO: 50993 - DNA, 460 bp, Oryza sativa
  Clone ID: PAT_MRT4530_53428C.1
aaaaagcaagtaatctaaggctagaatgatgtaaagagaatgacacaacagcccagttggtcacactttttcctttacacaatcacgtatacccaatacctaaaaaaggggatcaatcgaactatacattgagatttttcctttgatggaaagcaagcacacacgcctttttcatacaaccaacctaactcagccagtttacctttagagaaaaaggtgggaaccactgtttgtttcactaaaccaaacctgaagcagtacatggacagatgtgtctcccaatcccatggcattacaccagggctctgtcatcaggtcaggctctatgaaaaacagcaccacctcccaccactggttggttcgttggagtcgctcagcatcacgggttccccgttgcttaatgactgctcgcttctcttctgctcttgagattgaaataccttcctgcttagtatgccga

SEQ ID NO: 50994 - DNA, 1155 bp, Oryza sativa
  Clone ID: PAT_MRT4530_53429C.1
atggagagcttcgccagtctcgcaggaggtggcagcagcagcaccacagctcggttgccggagctgatctcgccggagaacccggaccacatctcgccgcccccgttgctgtaccagctgctcgccggcccggagtcgtcggcgcggcagcatgggcatgatgggcatcaccacggcggcggtggcggcgaagcagcagcagcagctgtgcagggacaggtctcgccggcaggcgcggaggcggcggtcaaggccgagatcatgtcgcatccacagtactcggctctcctagccgcctacttaggctgcaaaaaggtcggggcgccgccggatgtactgaccaagctcacggctgtgccggcggcgcagcagctggacgaagccgacggccaccctcgtcgccggcacgagccacagcgtgatgacgacccggatcagctcgatcagttcatggacgcgtactgcagcatgctgacgaggtacagggaggagctggagcggccgatcctggaagccgcggagttcttcagcagggtggagacgcagctcgattcgctcgctgagagtaattgtgaaggcacgggatcatcagaggaagagcaagaccctagtgacaagcagctgaagcaccagcttctgaggaagtacggtggctcgttgggcgatctccggcaggtgttctccaagaggaccaagaaagggaagcttcccaaggaggccaggcagaagcttctgcactggtgggagctgcactacgacaaatggccctatccctccgtacgcacgcatatatatgcttcccatttgatcaattcaaccacatttttctgcaccaaactcgatcttatgaaaatgcgtgaacttctcgggtgtacatgtgtgtatgagcaggaggtggagaagatgacgctggcgcagacgacggggctggaccagaagcagatcagcaactggttcatcaaccagaggaagcggcactggaagccgacgccggtggcaggcatgaccttcccgacagtggaagctgccggaggcggcttccgacactccggccacgacggcggccttgcggcggcggcggcggcggcggcgctgccgctgtacatgggcagctggccgttcgttgtggacggcatgtaccggctcgggtcttga

SEQ ID NO: 50995 - DNA, 408 bp, Oryza sativa
  unsure (1)..(408): unsure at all n locations
  Clone ID: PAT_MRT4530_5342C.1
aggcgccactattttagagctatgcacgtctgcatgcagcgcgtatcgtaatgctctggatctctcttattgtcgnggccgccgtacgatctgcgacgggtgaggccgtcttaagagcgcgaaggcggcgccggtgagcgcgaggcgggagcagtagaccgtgaggtcccccgccgcccacgagaagggcagcgactccgccagcgactcgtactcgttcaccggcagctgctccggcggcacggggcaccactccgtcccctgcgacgagctcccgttccgcgacggcgggaccgcgaaccggcggctcccccgcccccgccgccgtccgcgggagcccccggccatcgtcgggaggagaggcgggaggaggaggaggcgcgcgtggaggggaggaggaggtttagc

SEQ ID NO: 50996 - DNA, 959 bp, Oryza sativa
  Clone ID: PAT_MRT4530_53430C.1
ggggggcggacatggcggcgacgcggagggggaagaggaagagcgaggcgaggacgaggaagacgttgaagtggatgccgcccagccacagcgcgagcgccaccgtcgtgcggggcagcgagtagtccgcgccgcggaacaccgtcgccccgccctccgcgacgaccctcgcggcccccatcgggctccagcggctgtaagtttgatatgaccactaaggccccgtttggtagggctccaaactctaactcttagctccaaactacaacttcaatgagagctagctcctgttagagttggagacttgttaaaaagcgtttggctaggtttcagccccagatctgaaaaaaaatgaaaaagaaaggaaacgagacgccggctgtttgccgacccaggcgcgcacctgtgcaacgtcccgcgcgcgccgcccgtcgtcgtcccggtcgccgtcgcccgtcgccgcagacgccgccgtcgcccgccgcctcccgccgccaccatcgcccgccgccgacgatgccgccgtcgctcgctgacaaagatgctgccgtcgccaccgccgttgcctgccaccgtcaacgctgccgctgccgctgccgctgccgttcgccgacacagatccgcttcccgccgccgccaacgcagacgcccgctgacaccgacacacatcgggaagaagatgtgaggaggagagagaataggaggagaggaggtgtggaggggtagttgagtggcattttcatgtaaatagaataaaaaaattaaagggtgtgggtcttttgggtggagtggagctgtggagcagcaaaaacctagctccagccccgtagtttattttctagtagtagctctgctaactccgcttaaaaaaaaaaggaagatctagaccgtttgatacaactccagctccagataagttggagttgggagctagagctgtgacaaacggggcctaattc

SEQ ID NO: 50997 - DNA, 1806 bp, Oryza sativa
  Clone ID: PAT_MRT4530_53431C.1
ccacgcgtccgagagaagagaagagagggagccaaagaaagctctcatcttcctcttctcaaactccatctctctctcttcttcttcttcctctcctcctcctcctcgcttggaccccggattttttgcaagggggtaaggaggcgggaggagatggggagggaggagaggttcccggtgtgggaggcggcgctcggcgccggggtcgccgccgccttcgccaccgggctcgtcggagtctacctctccatgccggactccgactacagcttcctcaagttgccgcgcaacctcgaggagctccaaatcctcactggacatcttgagaactataccagtgattacaccatacaagtgttggtgggttactgttctgtgtacatcttcatgcagaccttcatgatcccaggaacaatattcatgtcattgcttgccggttctctgtttgggcaactccggggtgtggccctcgtggtatttgcagcctctgctggtgcttcttcgtgctttttcctgtcgaagctgattggaaagccattggtgttctcactgtggccagataagctcatgttcttccagaagcaggttggcatcaactcaaatattctagttgctctgcttattgtgttgaatatccgattcaagatcctcaggggcatccgttcattactgaaaagggtcaccccaacattgccaaacaccttcattaacttagcttcacccatagtagatgtgccctaccatatattcttactggcaactctcatcggtctcatcccagcttcctatgttactgtcagggctgggattgctctaggagagttaacatcattgagtgacctttaccgcgtcatgatcaccgaagcgccgatccgcatgccctcacctgaggcccgccgtggccggcggctggcgggggacgaccgcgacggtcgtctgccttccctcggcctcctcctccgcgtgccgtgtggcaccattgccgtggcggaggcgggccagcacggccaccacgacctgctcggaggccgcggcgccgcaccgctccaggaggcccctggcccgcgcggcgtccgcgtggaacccctcggccgtgccgacaacggcgtccacgtcacgggcgacgtccggcggcagcttctggaggtctggaggtccgcgaacgagggatcatcatcaccgccgctccgctccgctggccgcgcgctcgcctgccgccgccgcccgcccgccttccgcaccgactccttccgcggcgcctccatgctcaacatgctcggcatctccgcgggcgtcaccatcgccgcctacggcgaggcgcggttcgacgcgttcggcgtcatgctgcagctcgccgccgtcgccgccgaggccacgcggctagtgctcatccatatactgctcacctccaagggcatgtcgctgaaccccatcacctcgctggctcgctctcacattgcgccgtgctgcctagtgttcttgacgccgccatggtacttcgccgagctgcggatgccgccgcctctccactacactccaccggccgctcgcttgccgccgctccgctccgctgcacgctcgctgccgacgccgctccgctccgccgctcgctcgctcgcgcgccgctgctgctccgctcccctcggtcggtcgctgcgtgctcacccgcctcctcgggtcgtcttcatcgacctcttacgccccgtcctggagcaggcggcgccgccgccgcggccggccgcggacgatgtcgtcgccgccttgtcgcccatcgccggcgccgacgccctcctctccacccgctga

SEQ ID NO: 50998 - DNA, 123 bp, Oryza sativa
  Clone ID: PAT_MRT4530_53432C.1
atggcgagaatgaaggcgcataatggcaccggtgggtggaggctgagctttggagcaactaggcggaggaagagctatgggggcaatggggtagtggggtcgtccccattttcagcagcctga

SEQ ID NO: 50999 - DNA, 360 bp, Oryza sativa
  Clone ID: PAT_MRT4530_53433C.1
atggcgacggcgaggtggctgggcgtcgatagcagcggctgctgtggtggtggctgcgactgcggtcaccggaggtatggcggcctcggatggctagctgagggcgtgggagacggccgtatttggccggtgcggcatcgtttggtggaggggtcagagaccggcttggcgcagagaggcgcaaccgatggcagcgaaggccggctcggcgcgagaggcgcgattggcggagatggaggctggcttggcgcgagaggcgcagctgatggagggaggctggattggcgcgagaggcgcgtccggtggaggaggcgacctaggtgtgaggaggagctgccggtgggtgtagcgcggtcttag

SEQ ID NO: 51000 - DNA, 123 bp, Oryza sativa
  unsure (1)..(123): unsure at all n locations
  Clone ID: PAT_MRT4530_53434C.1
gaanggaagggccgggccacgcacgcgtccggcgtacgagatgtactaggcctaccggagcaggtgttgtggcgagtacgtttacttaccgggggcgcctattattcctatactcttcattcc

SEQ ID NO: 51001 - DNA, 169 bp, Oryza sativa
  Clone ID: PAT_MRT4530_53435C.1
ggcacgagccacaattcaaatattatagttgaagcatagtagtagaatccaacaacattgaagatcattttcgtatttgctctccttgctattgttgcatgcaatcctctgcgaggtttgatccgcttagtcaaagtgataggcaatagcagctacagtcgcatctgct

SEQ ID NO: 51002 - DNA, 316 bp, Oryza sativa
  Clone ID: PAT_MRT4530_53436C.1
ccaaaataggaaaaaagggcaatttgactcccttaaatatacgtcgaatcttattcatatccttaaaccacaaaaccaaatatgatgacttcttaaactattaaaaccgtctaaaacgactccctcggctgttttaagagtggttttcgctgacgtggtgtacatgtggccgcctagtcatcaaataaattaaaaaaagttaagctggcccacatgtcatcccctccctttaataacctctctctctccctcctttcttattctcggccccttccgcctcggcactggcgacggcggcgtccggcggcaagtgtac

SEQ ID NO: 51003 - DNA, 319 bp, Oryza sativa
  Clone ID: PAT_MRT4530_53437C.1
gagagaaaaagaaggggtccctatattttagcttaaggcaaacaaaaaattggggggtttttaaaaaaaaaaaaattttaaaaaaaaaagggaatttaaaaaaacccccgaaaccaaaagtcccttacccaaaaaaaataaaaaaaacttgcccaaaattttgaacccccgggtttcttcccgggagaaaaaaccggaatgtttttgtaaatttcacccaagggggggcaaacccctaggggaaagctgggcttatttgccaaagggaagggggaaaaaaaaatttgggggggggaaaattttggtggtgaaacaaaag

SEQ ID NO: 51004 - DNA, 421 bp, Oryza sativa
  Clone ID: PAT_MRT4530_53438C.1
gccacagaatggcacggaggcctcagtgcgttggagcacaacacgcgctctgggccttgccgttgccgacgggaggacgacgccacccgaccgaccgaacgccgggccgcgcacgacgcggcgttgtcgcttcgtgttcgtgttcggtcccgggcacgcgcgcgcgtgccatgatggcgccgcggggagacgatttcaattcagcgacaccgacctcgccgtggcacggtgccacctgcctaggcaggcacacagacagcgctgcggcctgcgggaggtgcacgtaggttcccgccgtcttcaccgcgcccctgttccccggcggccggcgccgtcaccatcaccggccgccgctgctattgtcgttcgcccactcaccgcaactaacgttgccatgtctccgttgccgggcgtccggtag

SEQ ID NO: 51005 - DNA, 3213 bp, Oryza sativa
  Clone ID: PAT_MRT4530_53439C.1
atggcggagttactatcggctcttttgcctgccctcctgaagaaagcaggtgagtctctcggcacagagtttagtttcatcgggggtattgaacgacggcgttcggagctgtataccttgctgcttgccgtcaaccaagtgatcaatgatgccgaggatcaggcatccaagaagcctgctgtgaagtcttggatcgcaaagctgaagctggctgcctgtgatgctgatgacgcccttgatgagctgcactacgaggagctccgctgcgaagcgctccgtcgtgggcataaaatcaatactggcgtaagggctttcttctcttctcattataatcctttactgttcaagtataggataggaaagagactccagcagatagtcgagcggattgatcagcttgtttcgcaaatgaatcgatttgggttcctaaattgctccatgccagtggatgagaggatgcaaacctattcctacgtcgacgagcaggaagttattggaagggacaaagaaagagatgaaattgtccatatgcttctaagtgccgagaccgacgaattgctaatacttcctattgttgggataggaggactgggaaagacaactcttgcacagctggtcttcaatgacgtaaaagtgaaagcacattttcaaaagcatatgtgggtttgtgtgtcagagaacttcagtgttcctgttattgtcaaggggataattgacaccgcaattgggaatgattgtggactgaagtttgataacctggaattgctacagcaacgtcttcgggaagaactgggccaaaagaggtaccttcttgtactagatgatgtttggaatgaagataaacagaaatggggagctcttagaacattgcttggttcttgtggaatgggaagtgcggtggttgtgactacccgaaacgtgaaagttgcatcaatcatggagtcaattagtccattgtgcctagagaaccttaacccagaagattcttggattgtattcagcagaagagcttttggcacaggtgtggttgagactccagagctcgttgaggttgttcatataagcggtgatgagtgtttagctttggaaaatctggctaaaattaagaaaatacccaaaaatgtccatcatatggcttttgagggtcaacaaaagattggtttcttgatgcagcattgtcgagttatccgcagtgtatttgccttagataagaatgacatgcatattgcccaggacattaaattcaatgagtctcctttgagagtagttgggcttcatattttcggcatcgaaaaatttcctgttgaaccagcatttatgaagcacttaagatatcttgatttgtctggtagctacataaatacactacctgaagcagctagcgcactttataatttacaagtgttgatactcaatagatgcaggaggctgacccacctaccagatggcatgaaatttatgattagccttcgccatgtgtaccttgatgactgtgctcgactaacaagcatgccagctggtctaggacagctcattaatttacggacattgacaaagttcgtacctggtaatgaatctggctataggattaacgaactgaatgacttaaaacttgggggcaagcttcagatatttaatttgattaaagtaacaaatcccatagaagcaaaagaagccaaccttgagtgtaagacaaatttgcagcagttagcactttgctggggcacatcaaaatctgcggagttacaagctgaagatttgcatttatatcgtcatgaagaagtacttgacgctcttaagcctcccaacggattgaccgttctaaagctgaggcagtatatgggcactacgtttcccatatggatggaaaatggaatcacattgcgcaacattgttaagctcaaagtaacggactccataaattgtatgaaacttccatcagtgtggaagcttccctttctcgaggttctccgactaaaagacatgaagaagttgaaatacttgtgtaacgggttctgctctgataaagaatgtgatcatcaattagtggcattcccaaaattaaaactcttgtcactagaacgaatggaatccttagagaactggcaggaatatgatgttgaacaggtaacaccggctaattttcccgtgctagatgcaatggaaatcattgattgtccaaaattgacagctatgcctaatgctccggttctcaagtcgttaagtgtgataggaaacaaaatattgattggcttatcgtcaagtgttagtaatctgtcgtatctatatcttggtgcaagtcaagggagtttagagaggaaaaaaacactaatctatcactataaagaaaacctggaaggaaccacagattcaaaggatcatgttttggcccatcacttttcatcatggggctcactcactaaattacacctacagggattcagtgctctagcaccagaagatatacaaaatataagtggtcacgtgatgtctgtgcagaacttagatctaatttcctgtgactgcttcatccaatatgatacattgcagtcaccactgtggttctggaaatcatttgcgtgcctgcagcacttaacaatcgagtactgtaacagcctcaccttttggccaggggaggagttccaaagcttgacttcattaaaacgactcgacattagatattgcaacaacttcacgggtatgccacctgcccaagtctcagtgaagtcctttgaagatgagggcatgcataatttggaacggatagaaatcgaattctgctacaacttagtggctttccctacaagcttatcgtatctgaggatatgcagctgcaatgtacttgaggacctacctgaaggactgggttgcctgggcgctctaagaagtctgtcaattgattataacccaagactgaagtccctgcctcccagcattcaacgtctatcaaatctgaccaggctctacctgggaactaatgacagcctaacaacattacccgaagggatgcataatctgacagctctcaatgatctggctatttggaactgccctagtttaaaggctttaccggaaggtctccagcagaggctgcacagcctggaaaagctctttattagacaatgccctacgctggtgagaagatgcaaacgtggaggagactactggagcaaagttaaggatattccagatttacgtgtgacaggggactag

SEQ ID NO: 51006 - DNA, 4407 bp, Oryza sativa
  Clone ID: PAT_MRT4530_5343C.1
atggcccctcccagcaagtggaagatatgttcttccttttcttttctcatattatcaatcttccatctttacacaagtacttctgctttgactgatacaatctcaagagtccaatctctttctggtagtacaactgttgtctcaaaagaaggaaattttgagctgggattcttctctccaggtaatactggaaacctttatgttggtatatggttcagaaccacatcaaagaaggctgttatctgggtggccaaccgagacaatcctgtcacaagtgctacatctccagagctcaagatatcagaggatggaaatttagtcctccttaacaagtttggagaaccaaaatggtcatcaaatggtacttggaataaaccaagaaagtcaatagttgcagttcttcttgacaatggaaaccttattctgagggatcaaggtaactcttctgatgtaatctggcaaagctttgatcacccaacagacacaatactgagtgggcagagatttgggatcaataagatcaccggtgaataccaggatcgtgtttcttggaaagatccagaagatcctgcaccaggtcctttctccaaccatgtagatctaattagattgaaccaatatgtctctctctggaatcaatctaaagtttattggcagtctgggaactggacaggacaagcattcacatcgatccctggaatgccactaaatactgaatacaattatgttttcattaataatagtcaccagctcaagtttatatacaccacaaaggatgtatccataatcacaagaatagttcttaccgttaacggtcaactccaatgccatacatggtccaacaaatcagaggaatggatagtacaatggtctctacctgcagctctgtgtgctgtttattcagtctgtgggccttttggagtctgcaaaacaggttttgatgagaaatgctattgcctgccaggtttcaggccagtttcctcgaggagctgggatcttggagcatggaatcaaggttgtgttaggaaaacagatatctcttgtgttgactctaataaacataatggccaacaagagaagcatgcatttctcaagattgccaacatcaaagttccaggcaatccaatgcaattgaatgttcaaagcgaggaggagtgcagatccatatgcctgaacaactgcatttgtactgcatatgcacatcaacatgaatgcattgtttggaatagtgagctccgggatcttaaacaattgtctgctggtaatgttgatgctattgatatttatgtacgtcttgcagcatctgatcttcaagttcaatacaatgaacataagacacatcatatgaggctaattgcagtgctgggaagtacctttgttgcactatgtgcttttggtgcaataatttggacgtttcgaaaaaggaatgcaactcaaaaggctttctccaatgatgattctctcatcctatacagttactcttttttacagcactgcacaaagaatttctcagataagttggggcaagcacctatggacgaaataggggaagattgccaaagtttggaaagtgacagatttccttcacagggccggtcagaccacaggaatttcttcattaactatgacgagcgggaacggttcaacaatattgctacacaatacatcaagaccgatcaagacgtcatgaaaggaaacgtgccgctacctcaagttgcagtttcaccgaaggtaacacaatctatccaacaagaagtagcatctacaatagattcatccatgactgtttttaaagataagttagatgcaacttttgagggtaaatttgatgagtttttaagatttaaattcggccctcttatggccgattacatgtttaaaaataaagcctctaccactgctagtcaagctcctatagatcaaacaagtagtggaaccgatggagcagcgcatatagccggtccgaccgaacctgatggccggtcagaccgcgatttcaccgtcggtccgaccggccaaacggccggtccgactggatattaccccggcagtcagaccgggactcaggccggtctgaccgcgcctctggatgtcggtcaaaccgagccctggaccggtcagaccggcacaatcataccgattcaggggatagatccaatgactaatgctagttatttgtatcatcttagaacatttgatcctcctgtatctactgctacaactaatccccaagttcccccgcatgttcctaatacttataatgatgttgctagaggatattctcacgatactaggcaaggccaatataatcatattgcgccacaaacacaacctattaggccaccaaatccaccaccaattcaacataggcctgataatatggaggagataattagtgagattattagggataaatttgggattgaaactaggaatcgtgctaaggtttaccaaaagccgtatcctaattattatgataatgtgccatatcctcgtggttatagagttcccaaatttaccaaatttagtggtgaggatagtaggaccacatgggagcatgtaggtcaatttttagcgcaatgtggagaggctaatagtgatacttttaaattgcgcttgttttctttatctttgtccggtactgcttttacatggtttacttctttaccggtaaattctattttttcctgggctcaattagaacaaaaatttcatgattatttccacactagtgagactgagcttaggttgtctgatttaacatcggttaggcacaaatacaatgaatctgttgctgattatattgaaaggtttagagatgttaaaaaccgatgttatagcttgaaaataactgacaaagatttggccgacattgcatatgatggattgcttgattctattaaagagaggttgaatggccagatatttcttgatgttgatcatgtgttgcatgaagctccggctcaggaaagccgagtggatgacaatagcttaaatgctagtttagatgataatgcaatatcatgtatagccgaaccaagcgatggttcggattgtgttaatgatttgtgcaatgatgccataacgattatagccgaaccaaatgttggttcagattgtcttgctagcttggaaaataatgcaacaaccattatagctgaaccaagtgttggttcggattgtgttactagtttagacaacgatggaatagccgaaccaagtggtggttcggattgtattgctagcttagagaatagcatcattgaagatatagccgaactaaatgacggttcggattgtattacaagcgaaagtgaaatagcattgtcacctaagaccgagtcacaaatcggtcatgtagatgttggaaaagatgatgacaatgtcttgcgggatagtagtgaaatagaatccaaagtagccatgcatatatatcaaaggccgtatcctgaacatgtagattcagttccatacccgcaaggatttgaggtgcccaacttcacgaaattcacaggtgagaatgctatgactacaatggagcatatcgaccgctttattgatcaatgcggtaaggccggtagcgatgatttgcgtaagttaaagttgttttctctttctttgtcaaactttgcatctacatggtatagtttgcttgctcctagttcaatttctacatggtcacaaatgaagcatgagtttcatgattattttaaagatgcaaacttgatggagaaaagaccggttgatgattcatcggtcacttgtgaaattatttcggttacatctatgcctaagaccggagttgttagtgatcctctctctgttagtcctattgatgttgacaaaaagaaagggagacgtgttattattggggatcctcggcccaagaataggatcaaaaatgcgaaggccgaagatcataaagatgcaaaggatgagtcatctagtttccaaaggaccaaaaagccgaagctcacttttgagatgcttatggctaagtacaataaaggattagccggtcaacgacttgataatcaaactagtgattcaaaaagaccaagatcatcttgtaggaagagatttggtcaaataccaaagcaatcggagccatcaactataccaactccatacaaacctccggttgtgatgccatggtatccatatccaatgtcactatatggttatccttttatgtattacatgccttggatgcatcaaccacctatgccgtattaccaagagtggaaggaatcacctaggtcaacatcaagtcattcatctaactcaagacaagaccgtttcccacaaaagaatcggtccggtggatcaaaggtgaaaaaggtgaaggtgtgggtgaggaaagaagccaaagctccggaggtcgttgctatcaatgaggaatcttaa

SEQ ID NO: 51007 - DNA, 3669 bp, Oryza sativa
  Clone ID: PAT_MRT4530_53440C.1
atggcggagttactatcggctcttttgcctgccctcctgaagaaagcaggtgagtctctcggcacagagtttagtttcatcgggggtattgaacgacggcgttcggagctgtataccttgctgcttgccgtcaaccaagtgatcaatgatgccgaggatcaggcatccaagaagcctgctgtgaagtcttggatcgcaaagctgaagctggctgcctgtgatgctgatgacgcccttgatgagctgcactacgaggagctccgctgcgaagcgctccgtcgtgggcataaaatcaatactggcgtaagggctttcttctcttctcattataatcctttactgttcaagtataggataggaaagagactccagcagatagtcgagcggattgatcagcttgtttcgcaaatgaatcgatttgggttcctaaattgctccatgccagtggatgagaggatgcaaacctattcctacgtcgacgagcaggaagttattggaagggacaaagaaagagatgaaattgtccatatgcttctaagtgccgagaccgacgaattgctaatacttcctattgttgggataggaggactgggaaagacaactcttgcacagctggtcttcaatgacgtaaaagtgaaagcacattttcaaaagcatatgtgggtttgtgtgtcagagaacttcagtgttcctgttattgtcaaggggataattgacaccgcaattgggaatgattgtggactgaagtttgataacctggaattgctacagcaacgtcttcgggaagaactgggccaaaagaggtaccttcttgtactagatgatgtttggaatgaagataaacagaaatggggagctcttagaacattgcttggttcttgtggaatgggaagtgcggtggttgtgactacccgaaacgtgaaagttgcatcaatcatggagtcaattagtccattgtgcctagagaaccttaacccagaagattcttggattgtattcagcagaagagcttttggcacaggtgtggttgagactccagagctcgttgaggttggtaaaagaattgttgagaaatgttgcgggcttccgttagccataaagagtatgggagccttgatgagtacaaaacaggagacacgagattggctatccatccttgaaagcaacacttgggatgaagaaagccagatactgccagcgctgtctttgggctacaaaaatttgccttctcatatgaaacaatgttttgctttttgtgcagtattcccgaaggactacgagattgataaggacgatctaatacatctttgggtatcgaatggatttattccatccaagaagatgtcagatattgaagagaatgggaatcatgttttttgggagcttgtttggaggtcatttttccaaaatgttaagcaaattggatcaattttccaacgtaaagtgtacaggtatgggcaaagtgatgtaactacattcaaaattcatgatcttatgcatgatcttgcagttcatataagcggtgatgagtgtttagctttggaaaatctggctaaaattaagaaaatacccaaaaatgtccatcatatggcttttgagggtcaacaaaagattggtttcttgatgcagcattgtcgagttatccgcagtgtatttgccttagataagaatgacatgcatattgcccaggacattaaattcaatgagtctcctttgagagtagttgggcttcatattttcggcatcgaaaaatttcctgttgaaccagcatttatgaagcacttaagatatcttgatttgtctggtagctacataaatacactacctgaagcagctagcgcactttataatttacaagtgttgatactcaatagatgcaggaggctgacccacctaccagatggcatgaaatttatgattagccttcgccatgtgtaccttgatgactgtgctcgactaacaagcatgccagctggtctaggacagctcattaatttacggacattgacaaagttcgtacctggtaatgaatctggctataggattaacgaactgaatgacttaaaacttgggggcaagcttcagatatttaatttgattaaagtaacaaatcccatagaagcaaaagaagccaaccttgagtgtaagacaaatttgcagcagttagcactttgctggggcacatcaaaatctgcggagttacaagctgaagatttgcatttatatcgtcatgaagaagtacttgacgctcttaagcctcccaacggattgaccgttctaaagctgaggcagtatatgggcactacgtttcccatatggatggaaaatggaatcacattgcgcaacattgttaagctcaaagtaacggactccataaattgtatgaaacttccatcagtgtggaagcttccctttctcgaggttctccgactaaaagacatgaagaagttgaaatacttgtgtaacgggttctgctctgataaagaatgtgatcatcaattagtggcattcccaaaattaaaactcttgtcactagaacgaatggaatccttagagaactggcaggaatatgatgttgaacaggtaacaccggctaattttcccgtgctagatgcaatggaaatcattgattgtccaaaattgacagctatgcctaatgctccggttctcaagtcgttaagtgtgataggaaacaaaatattgattggcttatcgtcaagtgttagtaatctgtcgtatctatatcttggtgcaagtcaagggagtttagagaggaaaaaaacactaatctatcactataaagaaaacctggaaggaaccacagattcaaaggatcatgttttggcccatcacttttcatcatggggctcactcactaaattacacctacagggattcagtgctctagcaccagaagatatacaaaatataagtggtcacgtgatgtctgtgcagaacttagatctaatttcctgtgactgcttcatccaatatgatacattgcagtcaccactgtggttctggaaatcatttgcgtgcctgcagcacttaacaatcgagtactgtaacagcctcaccttttggccaggggaggagttccaaagcttgacttcattaaaacgactcgacattagatattgcaacaacttcacgggtatgccacctgcccaagtctcagtgaagtcctttgaagatgagggcatgcataatttggaacggatagaaatcgaattctgctacaacttagtggctttccctacaagcttatcgtatctgaggatatgcagctgcaatgtacttgaggacctacctgaaggactgggttgcctgggcgctctaagaagtctgtcaattgattataacccaagactgaagtccctgcctcccagcattcaacgtctatcaaatctgaccaggctctacctgggaactaatgacagcctaacaacattacccgaagggatgcataatctgacagctctcaatgatctggctatttggaactgccctagtttaaaggctttaccggaaggtctccagcagaggctgcacagcctggaaaagctctttattagacaatgccctacgctggtgagaagatgcaaacgtggaggagactactggagcaaagttaaggatattccagatttacgtgtgacaggggactag

SEQ ID NO: 51008 - DNA, 855 bp, Oryza sativa
  Clone ID: PAT_MRT4530_53441C.1
cccccggccctgctgccccccacgccgccccccccctcgcccccccgcccgccagtcccgggtcgcgcccggcccggcggctccccgccccccccccgcgcgatgccgggcctcgccgccgaccaggacaccgtctcgctggtgcgccgcgtctcccgcgccctcaaccgccgcctcaccgacctcgtcggcctcctcttccaccacaagagcgccggatccctcggggccgtcgccgggttcgccatcgctgtcgtgttcgcgtggaagttcctgcggtcgtcgccggccaggccgcgccggccccccggaccgaagcggccgctcgtcggccctgctgcccccgattccgccgctcgcgatgcggccgagcctgccaatcctgggaagctgacgacacggcaaatcgtggtgaagcgactgggcgggtgtagaaaggtgacttgccaactgcttggtgttgtctttgaggagataactcctcaggagcttcagacacatgccactgttagaccttcagtggtggaactactactcgaaatagccaaatactgtgatttgtatctgatggaaactgtacttgatgataagagtgaggagaatgctctattggccctggagagtgctggacttttcaagactggtggcttgatgaaagaaaaggtactcttctgcagctctgaagttgggcgaacttcatttgttcgacagttagaggcagattttcacattgacacaagcctcgatataatttcccaactatctgtgccttctgatagtcatgttctacatgtttatcttcgtttctttgctaccagcggttcattcggtgccaactctttgtttcctcaatag

SEQ ID NO: 51009 - DNA, 931 bp, Oryza sativa
  Clone ID: PAT_MRT4530_53442C.1
gctgagaaggggatggaaggggaagaaggcaaaaagttaaggtttatcctctccttctaaaaaaaggggtgataatgggtgataaaaagaattgatcgcgctgcaggtgcccaaatgggtgataaaaagaattgatcgcttttggagatccttcctttggaaaggagaagaccctgacaaaaccaacccgggcagcagtttagttaattggcaaacggtgtgtaaaccaaaaactttgggtggtctgggcattccggatttagagaggttttcaagagccctccgtcttcgttggctttggcttggttggaaggacgaaaacaaaccgtgggctagtatgaacgttccctgtgatgatactgacaagaggctgtttcaggtagcgacgacaatcgagctaggtaatgccactaaaataagattttggcatgataattggctccaaaacagctgcccaaaagacatcgcacccttgtgcttcaggctggcaaaaagaaagcaaaaaagtgtccaacatgagctccataacaataactagcttgtctctttccggcaaataacatcaatagaagaaatccatgagcttgtacgccttgggagcatgcttcagggagacatgcttactccgtgccctgatgacatctcatggaattggaatgattctaaggtttacacaagtaaaagtgcttatctctttcaatttcagggatcttttgtttccatagatttctcttcaccttggaaggcgccggctgaaccaaaagttaaattttttggttggctagttctccaccagaaaactcttactacttaaaacttgcttcgaagacactggccgtgcaattggatttgttgtttatgcacaagcgcctttgaagacactaattatctgtttagcgaatgccctttcgtcaagaaagtttggtcccta

SEQ ID NO: 51010 - DNA, 336 bp, Oryza sativa
  Clone ID: PAT_MRT4530_53443C.1
atgcctcgagtcgctgaaccaaccttcggagagatcgacggctgcgacgaaccaacggtgacgaggagggtgccggtgccgagggagaagaacctggagaggatcaactccaagagggggatgaggtcgtatcagctcgggaagcaactctccttccggtggacgattgacaccgggccacggatcggcgtccacgtccgcgtcctcccggacgagtggcgcgccgggttcctcgccctcgacgtgcccaacagcaggagcacggcggttgccgccgtgctcgcccaccactcgcccatcgccgctctgcccgccggccgccggagagaaaagtga

SEQ ID NO: 51011 - DNA, 133 bp, Oryza sativa
  Clone ID: PAT_MRT4530_53444C.1
cttcctcctcctcatcagtatccatggacatcccgagcggagcctgatgacgcggtgctcttcgtcggggtctccctcgtcctcggcatcgcctttcccgccacctcctccggggcacccgcgtccctacacc

SEQ ID NO: 51012 - DNA, 1085 bp, Oryza sativa
  Clone ID: PAT_MRT4530_53445C.1
atggatggatgcgtggtcgccggactcatcaacgatcaagctcccatacccggctaccgccgccagaagattgcgttctggcaaattgaagatagggtggtcgtcggctacttctacatgggtgaagcgtgctgggatgcggtggacgtcgtgcgccacaatggagccttccatttcctcaccaagggggaggacatcatcgtgggcaatccggtcttcgctgaagcgggtgcgccgccccaagtgcaatgggagtatcgctgcttctcgtcgcaggggcgcggctacgacgggcagcacgtcgtggcgcgctacctcgtggagtccagcggagaactgctcatggtcgtgaggtgctctcctcgtcctggagagttcacgtcagcgttcaaggtgttccgaatggcacaacccgaggaagacgacgacgcaccctcactggatggccggacgatgctgttcgtcgggcgtccctgctccagatctgacggcgatgtggttcggtacatctggagggagctgccctcgctggaaggccggatgctgttcgtcgggcgcggctgctccagatcctacgacgcggatcagtaccctggcttcgagggcggcatctacttcttcgatcatcggatcgccgggccgctcggcgacgcgccggcgcagtacccctgcagcgactgcgggaaatggacgggaaaacctgcactccaggtggaccgcttcttcccggagcaagacccatcgaactacacctctcaagtttggttgctcaacgggtaagctagtttttgatctgtctaacaggtgcttcgtctgcattgtctttgtttctttttgctgagtttggaagtttggatggtattgtagtgctgagattgtagtttctgatcagtctccaactgttagaagaagcagaacacctttttctagtagaaatctctttgctattgcagctatgatcaatacaccgtttgataatttctgcttcccacttaattgcatgattcaatcattagtatattcctgttgcaactgattttcagtgcggacatgtgcgtatggttgtgcttaaaaaaaaaaaaaaa

SEQ ID NO: 51013 - DNA, 324 bp, Oryza sativa
  Clone ID: PAT_MRT4530_53446C.1
atgtctgtttgtacaatgcgtgcggaggccatcatccatgcatatgcatgttcggctataccctgctgctttatctctgcccttcgtctgtcatctacgcgggcatgagccacgcctgaggtcggcggccggcggacgtcgaaagaaacaaattaaagcgtcgacacaaaagcacgaatcccaaggttcatcaagcggttcaaaaatcgataaattccaaggaagaaatttgtcagcagatttatagcaaaaagtataaaagcatatattccttgtgaactttcgatcaatacacatattgttgcttcgctcaaggttgatcga

SEQ ID NO: 51014 - DNA, 3084 bp, Oryza sativa
  Clone ID: PAT_MRT4530_53447C.1
gttagttacatccactggattatgctacattagttgcaattcttagatgctgtaatcaacagcataaataaagtgtgtacggtgcctcctctacattaatatcatatacacaacgatgaggtcataggcaaaatcaggatccctggcacaggccaagatggaaacaaacttaccatgcaaacgtcaggcttgtcaactgttgaactcctctcttcagctcgacttggcaagcatcctagccgaatatgaactgcaagcacattggctggtagagcaaaaggccggctttgcgatagtaatgttaaaaatgatccaagaaccgcgtctctttcagtcaaagatctcctgggcttcgattttgctgtgctggtgttcatccttggagactcggtagtatttctcggcgagctgcctctgaccaataagctgagcaaacctctcgtcatgggtgatcacaatcaactggaagttctcctgccctttcctgctctccattattctcaaaagggcaccagcaaggctctctgcattaggcccatctagattggtggtcggctcatctagagctaatatgccacagttcagacagaatgtttctgccagtgccagtctgattataagcgacgcaagcaccttctggccggcactgcagcgccctcgcatttccagctcagcatcacctgtttgcatgacaacacgatagctgtatgatcgagtgccagcaccctcagagtcagaattaatgcttatatagtcgatatcttggcccctatatgtctgttgccacagttccttgattattttgtttatctcctccattttcatggtgtggaaccgcataagagccttatccaaagcagcatagtatcggtccaagtccttgtttgccatctcagttgtctggacattcatgccatcaacctttagttgaagaagttggttaaagtatcgcttctcaatatccttgtactgcgtctgtttaagttcaagcttgtgttttgaaatattactttgataaacggactgcgttccttgacacctattatactctgaaagaagcctatctttttcttgtgaatgttgcttaagatccgcttctatagtagacaggctgccaatggaaagtattttgtcctcaagtaattctatttcatgagtaagtcgttccacttcatcctttgttctcctgtagttaaggttgtcatcaatgtttcttttcaactgatcttggctcttcaatagctctttgttcttgcttaactccgccgatttttcttcttttctttccttacttttctgtagatcagactgcaactgagtatgtttttcctgtagttcattaagcttctcgcccttctttgaattcaggtaccctttgatacgctcattgtgtgtctcgagtgcatcaatttcctgctggaattccctttttctttctgccagctgatgatactcctgatcaagcttttccttcaaagcttcatgctcttgcaacaagctttctctctcttttgacaacggaccaagagactcctctaaatgcttctcttctaatgttagtttttctttctcctcagctagatgtcccaaatcctcttcagctttttgaaatttgtgcactgcacctgaagcttttagcttctcttccctaatatcatgccatcgcatctgagcattagtcagaccatcggtaagtgttctttgttgatcccttagatcatccacttcattgttcaatgtgtcccttgtcctctgcacagagttcaactccaactggatttgctccaaagatttaacaccttggccacgaacatcaagcttatattcaagattttcaacttgtggtcctaactgctgtatttcttgtacgtgcctatcaatcgtttcaactggctgtagcaatacctgcactgcatccttgtccattttaacttgagcaagaacactgacaaaatcatcaaatgtttgtgccttctcactttcatccgccaaaagttgtttcaagttcttctctgctagaggtatagcctcttttcccagcttcacaaattcctcataagttgcattgagtttattcaattgctggaaaaagtcttcagcatttgagcattccaatgagatcttgttcatgcgatctgcagtactttcacacgttgtcctttgcttctttacaaattcatcctcttcatcaggtgtgaaagcacgttgacagcaagggcacatgtggagctcacgagccaaattttcaaaaggctcatacatttgccgcattcccttcgcgtaacttaaattgcttggaagatgatataggtacagtgtgctaaatttctcaatggaggccaagagctgcaaaaatgatgtgaatcctcctacaaccttatctaataatgagaggggctgagttctgcccataacatctccatccctccttcgagacagctcgtcctcgagctgcggtggaagccatgcgctgtgctgcagcagctgcgccccctttcccggcgcgcgtggcccgcctggatcccacgccgttggcgccgcacgtgatgctccccgtcgtcgagcaacgctcagcgtaatcgcagccgccgctcgaggaagctgctggaagatccctcgctgctgctgtggtcgcagaagggaacggtgacgacgcgacacgatggtcttccatggcgatggctgagttgatggtgccccagcgagcgccgaccggactgttgtgaggtgtgacagcactgccgcagcctcggatgcgaacgacaactgagaaaatggcactacagccaggggctgcagcacctccgccgattggaccgatggcggtgaagagggcatcgtcatcaccggttcctccaccgcagccgcgaacagggacgatggcagagaaggcggtgccgtcgcgagtggcggagagggcgtcgtcgtcgtagtttccaacgccacccccttggcctcaaaacccgcacggagtgccaacaccaattctgtcaccttgtcgagcccagctgtgatctccgtgatggaggtctgcatggccctggaggattggcgcagcatgtggaggtcatggatggcaggcat

SEQ ID NO: 51015 - DNA, 2211 bp, Oryza sativa
  Clone ID: PAT_MRT4530_53448C.1
tttttttttttttttttttttttttttttaccgacttaaaattggaacatgacccctaattgaatatgaatagtagaacacaatattcgttcaggagacctgaaaatttcatccttacattccttggctccgggaacaggttacagcgaacatatctgtgatctatgactatgaactgaaacctttggtaaatatgaggctcaaaatagagttagaagatcaacacaacagacctgaacattccttggctcggtgcaattattttatccaggaacaggttacagcgagcatatctgcgatccatgactatgaactgaaacctctggtaaacatgaggctagactagatcaacaaaacagacatgcacggttgaacttgatgaagtgaaaaaacaaaggatcatcactggcccacaatgcagattacctcgccgtataccatttactgaaaaccaccacactttcttataaatcataacatggctaccctaaacaactgagaaacggaatggtgtttcagggaacatgagagcaaacgccagaacctcccaaaccggttgcagtacttcaggttaaatagctcactaaatcccagcaagattatgaaataccaaatcctctccgctctcagcagcatctgtgaattaatacatgactttccactttgttaccgatatatctcagatcttctttcaagatgcttgtgctgcatataaatgctttttggcagtgcacattagatgtcgtgaacactgtgtcaaattcccaactgtcaccttttcttcagcaatgaactagctctcaagaagattttatcaatctcatcaagctcggatactttgagttctttagcagatgaatcggtcctatcagaaagggaagcaatctttcgtagatgctcttcgaaatcatctggttcattgtcattattttctgagggaaacttatccagcttatctagatacaacggttgctccttgctttcctgtacctgctcctcctctgagtccgtctcaaaaatgtcagagagatcctcggattcagagtatgtgatagactctgaagccgaatcagcactaacctcataattttcatcctctagccttccagacccttctatactttctgacaggagatcagatacacttctcttgcgaactgagcaagaagaatattctttcgcagatgtactgtttacactatctgaaatacaagtaatatcttccgctgcattctgtcctttataatctctagctaacttcatctgtgcatgaagatctacaagctcctgctcaagcctgggaatgtaccgcctaagagctcggaggcgttctctgtattttgatttatccagtgccttttttctaggaagtgtaacttttggagacattatttcaggtggtggctgtgcatagttttttcctctgtacataataatcgtattcccttcttgaatatccagcacaattccaccacttagtctggctaactctgaggcaatttccttaacctcgtctggtgtgaatgtcttcacaattacctgtagcgtttggtgctttttccagtgcaaatgcatgttcaggatcactccctgatatattccacgtcttcctacaggcacataatttttacttttttgacccatcttgaggaaatagaagtgctcttcaggtgtaagcacctcaggatcatgggtaggttctgatgggtcatccggttcaatcttcgtcaaagctgcaacaagtcgttcttccttgtttcgagctagcttcagtttgtacaaaatcttctcctccgcagtcatcctttgaaactcccttttcttcttccatctcagggatttcaaaaatcttgtcactgccctccttccttttaactttttcctctttgctttgggcctaccagattcatcaaccagcgcaacatcttcttgtttctgctgaggttctgctatggtatgattttgactattgactggtcggcttgtatggatacagcaatatatttgaaggttataactttgccacccactgaagaacccaacatctcggtgaaaaaccttgtgggaagtataagatggtgagcaccgccgaggcgcgcgcagctcatggggaggcgccacgctggtagaaccgggggagggataaagcgcccgggacatcggccgccaccccttctccatcctccggagcaagagcacccggctgcccat

SEQ ID NO: 51016 - DNA, 2028 bp, Oryza sativa
  Clone ID: PAT_MRT4530_53449C.1
atggagcacgggagcatcatcgcgtcggccgtgggggtgggcgtcggggtgggggtcggcatcggcctcgtctcgtcgcggctgaccgggttggcgactggcggcggcgccacggcggcggaggtggaggcggagctgcggtgtctggtggtggacggccgcgacgtcggcgtctccttcgacgacttcccgtactacctcagcgagcagtcgaagctggccctcaccagcacggcgttcgtgcatctgagcccaacgatcctgcccaatcacatccgcgtcctctccgcgtccagccgcaccatactgctctgcggcccatcagaggcgtaccttcagtcgctcgcgaaggctctcgcaaaccagttcagtgctcgcctgctgctgctcgatgtcatcgacttcgcgtgcaagctccatcataagtacggcggtccaagcaatacacagacccgtgagagatccatgacagaggcagccttcgatagagtgtctagtttggttggagctttcaatctgtttcgcaagaaggaagaaccaactggaacaggaccattgagccgtgaaacaggcatccttgatctcaggactagcacttgttgtcctcataacacaccttcagtacgggttcagttatccttggtacctcccgagaaggaccatgatcccgaatcttctaaataccttgcatcagttaaaccatgctggagtttgaatgagaaggttctcatacaatccctttacaagattatagtttctgcttctgaaatcagtccagtcattctttacataagggatgttgatgacttgcttggaagttcagaaaaagcatactgtatgtttcagaaaatgttgaaaaaactatctggacgggtaatcgtgattggttcacaattcctcgatgatgatgaggatagagaagatattgaagaatctgtgtgtgctcttttcccttgtattctggagacaaagcctcccaaagacaaggtccttcttgagaaatggaagacccagatggaggaagattcgaataataacaataatcaagtcgttcaaaactacatcgcggaagtgctcgcagaaaacaatcttgagtgtgaagatttgagctcgatcaatgcagatgatgattgtaaaatcattgtggcttacttagaagaaattataaccccatctgtctcttaccatctgatgaataacaagaaccctaaatacagaaacgggaatcttgtcatatcttcggagagcttatcccatggattacgcatattccaagagagcaacgaccttgggaaagatacagtggaagcaaaggatgagacagagatggtcgttccagacaatgagtatgaaaagaagatccgaccaacggttataccagccaatgaaataggagtgacatttgatgacattggagcactggctgatatcaaagaatgccttcacgagcttgtcatgcttcctcttcaacgacctgatttcttcaaagcaatcattttcatcgatgaggtagacagcatgctagggaaacgagataaccatagcgaaaatgaggcatcccgcagagtaaaaaatgagttcatggctcactgggatggactcttgtctaagtccaacgaaaggatattagtccttgctgcaacgaacaggccctttgaccttgatgatgcggtgataaggagatttgagcacagaatcatggtcggcctcccaacgttggagagtagagagctgattctgaagacattgttgtcgaaagagacggttgaaaatattgatttcaaggagcttgccaaaatgactgaaggatacaccagcagtgacttgaagaatatttgcgtgacggcagcttatcatcctgtcagagagctacttcagaaagaaaagaacaaggtcaagaaggaaactgcaccagaaacgaagcaagaaccaaaagaaaagaccaaaattcaagaaaacgggacaaaaagttcggatagtaagactgaaaaggacaagcttgagtattctatagtgtcacctaaatag

SEQ ID NO: 51017 - DNA, 1842 bp, Oryza sativa
  Clone ID: PAT_MRT4530_5344C.1
ctatttgtcccagccatcctctctcatgccaaatagccatttctgggggagagggccatatatggaggcgaacttcgccaagcatttcgttctgatgtcatagtgcttctgcgtgtctcggctaatagcaactgaagaaagcttggaagtgtcgatagcccaagcagggtgaacatactccacagtcctcgaagagcttgcatttgcatacagaaaattcatgagcaagtcctcgcagttgaagttcttgtggacatagtctctgccttccttagcttcttgactccagtatttactgaaagcgaactcactgtccatgaaagcagcacctgtgaggatcaaattgtagcccttcttgccccgagcatatcgctcattcctgtactgcaaaggatcaccgtctatcattcgagggtaaaagcccaccatcctctcagggtgttctctccataccttgaatcctttctctacatcactgcaagtcatcatgatatcatcatccagttccaggacagcccttgtctttatcaaagggtcacccctaaatcggttgttaagggagttgatttcttccacacgtattctgacagggactgttgaatcaaaggcgtcgctggtaggatggttgcctttgttccagacaacaactatctctctgactgactcacatctagagtagtgttcaacaaatagtttcaggttccagagtcgagcttcatatgtcattgtgaccattgtaaattgagagtgctgcccttgatgtgtatatgcctcttcagcgccattgccaccaagtaagaaatgcacagcaatgcagacattaacaatacctatgagagcaatcacacaaaagaatagtgtgtttgaccatgttttctcactgagccttgctttggtagcagagatattcctgccaatactggttgaatatctacggattttcaggttgaagcgatgcacaggtaaaatacgagataactcacttctcctagttagaggaacccaaaaacttggaggaatgtagcaactgattgcaccttttacaaaacctacaaaagtgaccagagcaacagctaccaaaaaacccatgtaaccaaatagagaccgtcttgttgaatcacctgaagggacacgatcaccatccatgacagcaacccatccaccagaggcaagttgctgtgcatctatgtgatggtacctcataccattccaagcattcctccctttctttgcctcttcgattccaagatttaccggaacctctttgtattcttccttagttagcttttcaatcttgtacagcttaaccttccgtccataggtaccactgcaatcctgccctggacgatacaatgacccttcaaagatgaatagccttccaccgtttcgagctcctaaacttttgtcagatctgtaaatagggttttgcttatgttcactccaaggaccaagaggtgagttgctgtaccaaatttcaagctctgcattcttttctataccatgccgtgtaaaatctgaggcaaacagccaccacagtccatcatattgaactaatgaggaatcaataagtggcttatcaatgagcaccttctccaatgtccattcaagaggaaacttagtagctcgataaagtcgtagctccttctttttgttcccctctggcatcatataaatctcattctcatatttgaacacgaacgggtatgacagatgccatgcctcatctaaagcaataccaagaaattcccatgttgcaccttgatccaagcttcttgcaacaccaatatcaccttgcattgtgcttactgtttttgtttcaaagaacagaaagagtgtgtcccc

SEQ ID NO: 51018 - DNA, 990 bp, Oryza sativa
  unsure (1)..(990): unsure at all n locations
  Clone ID: PAT_MRT4530_53450C.1
aactattatagtattttgatagttattggtataactgacactccccgcggtggcggccgatctataactagtggagccccgggctgcaatgattcggcacgagcaacaacattgccaataaggcttataatgatggacagccagtccagtacctcctaaagaccttcaccggaagtagcacatgtgctttggatataccagtgacgtttgctaagggagtgaagaccaagcttcgcgaatgatctctttagcagtcattgaatttgtaatatcttattcgtttgctatataccttaaagctcttttagatgtgcgtaccagattctatattgttactttaatatcttgaataactcgctgttcactgtgtcgtgtatttttattgtgtaggttcgtttgtcgttgtctttttcccatctgatagtgccgttgatgtacttaaggcgatatagaacaatgattgatttgattattgtattaatgcacatgtatatcaacacaataaaattattaattactttttattttcgatgtctaattatacgcgtttattatgtttggtctgtttgttgtataatgttagtagatatctagtaattctttagtttcatatttctctatgataatcttcttggcgcggacttgtgatatataagaacaggagattaatattcgtatagagcaatatcattagcgtatataattctatatccagcagcttgtatttagtaattctacggttatactctctcattatggattcattgtatatagattatgttaattcctgcagtgcttcagctgtgcctactgctcccaaattgctttaatcgctatgcaccattacattactccaattcataatccgtatttattatcctgtcccatgactcatttcttatacttactgcattatcatgtcgtcctcacatctcccatctgataacatctaagcgtgtgtatatttccgtttgaataatgtgtattatn

SEQ ID NO: 51019 - DNA, 2717 bp, Oryza sativa
  unsure (1)..(2717): unsure at all n locations
  Clone ID: PAT_MRT4530_53451C.1
ncctcacataggcgaattgggcccggccccccctcgtgtttttttttttttttttttttctgttttttttttttttttttcccgaatcaagaaggttcagcattattattcaataaatcaactagggaatgacaatcaaattatcgggtctgacgactactactcctaaatgcctcttttttccctatgttcttctctgcttcagtacatccagtcatccgggggccagatgccaaccacaaacactacaaatgtatatacaagtaatgaattcttcactacaagaagtatgtcagttgctcccgcttcctcgacccgcctttgccgtagagctcattccattccttgatctgattcatcacaacgccttcgctagcgaagctagcggcgacttcatcctttgcctttctcaagtcctccatgtttagcggtctcagggtagtctctccagcatcgcctttgtctgatttatctttcttgtcagcaggcttgtctttcttaccttccttgttgtcaagcttgtccttttcagtcttactatccgaactttttgtcccgttttcttgaattttggtcttttcttttggttcttgcttcgtttctggtgcagtttccttcttgaccttgttcttttctttctgaagtagctctctgacaggatgataagctgccgtcacgcaaatattcttcaagtcactgctggtgtatccttcagtcattttggcaagctccttgaaatcaatattttcaaccgtctctttcgacaacaatgtcttcagaatcagctctctactctccaacgttgggaggccgaccatgattctgtgctcaaatctccttatcaccgcatcatcaaggtcaaagggcctgttcgttgcagcaaggactaatatcctttcgttggacttagacaagagtccatcccagtgagccatgaactcattttttactctgcgggatgcctcattttcgctatggttatctcgtttccctagcatgctgtctacctcatcgatgaaaatgattgctggtgcaagtttagcagcaaggctgaataaggcttggatgcacttctcagactccccgtaccattttgatgtcatactagccatagagatgttcaagaagctagctcctgctgcgtttgctagggccttggcgagcattgttttccccgtaccaggtggcccaaacagcagaacgcccttgcatggcttcaagagaccacctttgaagaaatcaggtcgttgaagaggaagcatgacaagctcgtgaaggcattctttgatatcagccagtgctccaatgtcatcaaatgtcactcctatttcattggctggtataaccgttggtcggatcttcttttcatactcattgtctggaacgaccatctctgtctcatcctttgcttccactgtatctttcccaaggtcgttgctctcttggaatatgcgtaatccatgggataagctctccgaagatatgacaagattcccgtttctgtatttagggttcttgttattcatcagatggtaagagacagatggggttataatttcttctaagtaagccacaatgattttacaatcatcatctgcattgatcgagctcaaatcttcacactcaagattgttttctgcgagcacttccgcgatgtagttttgaacgacttgattattgttattattcgaatcttcctccatctgggtcttccatttctcaagaaggaccttgtctttgggaggctttgtctccagaatacaagggaaaagagcacacacagattcttcaatatcttctctatcctcatcatcatcgaggaattgtgaaccaatcacgattacccgtccagatagttttttcaacattttctgaaacatacagtatgctttttctgaacttccaagcaagtcatcaacatcccttatgtaaagaatgactggactgatttcagaagcagaaactataatcttgtaaagggattgtatgagaaccttctcattcaaactccagcatggtttaactgatgcaaggtatttagaagattcgggatcatggtccttctcgggaggtaccaaggataactgaacccgtactgaaggtgtgttatgaggacaacaagtgctagtcctgagatcaaggatgcctgtttcacggctcaatggtcctgttccagttggttcttccttcttgcgaaacagattgaaagctccaaccaaactagacactctatcgaaggctgcctctgtcatggatctctcacgggtctgtgtattgcttggaccgccgtacttatgatggagcttgcacgcgaagtcgatgacatcgagcagcagcaggcgagcactgaactggtttgcgagagccttcgcgagcgactgaaggtacgcctctgatgggccgcagagcagtatggtgcggctggacgcggagaggacgcggatgtgattgggcaggatcgttgggctcagatgcacgaacgccgtgctggtgagggccagcttcgactgctcgctgaggtagtacgggaagtcgtcgaaggagacgccgacgtcgcggccgtccaccaccagacaccgcagctccgcctccacctccgccgccgtggcgccgccgccagtcgccaacccggtcagccgcgacgagacgaggccgatgccgacccccaccccgacgcccacccccacggccgacgcgatgatgctcccgtgctccat

SEQ ID NO: 51020 - DNA, 357 bp, Oryza sativa
  unsure (1)..(357): unsure at all n locations
  Clone ID: PAT_MRT4530_53452C.1
agggatattccgctaggcctcttcccaaaaggaaangaaatgtttgcagggatagttaattatcatgggaacagaaaagaatttatatctatgagctattgtcgggctcaacagagaggaccggaacaagatgatcatccgagtgcaaccggtatcaaaagtgtgccaatcacaagaacgggggatttattcatatgttaacaccgaactgaacatcaactccaccagcagctacccaaccatgacagtggcctggatttagaccaccgctacgcaaatgcaagctggcccccaatttattggcccatgaattgaatttacaagagaccaccggacttcttaaatccgtgaacaaat

SEQ ID NO: 51021 - DNA, 537 bp, Oryza sativa
  Clone ID: PAT_MRT4530_53453C.1
atggctacaatggatacaaccgttcctcacatcatggatgaacaagaagatatcatgatcaagtcctacaagtgctggaatccgattcggccacctgctacactgctggtttcgaacggccgcctaatctgtatacgacctccgttttcagcccgaatagggttgatttgcaccggcaagatcaacaacctacaaagaggtattgacggtgagaatttggtacttaatagccgtcaacagtcattattcacaagaaatggtccaatactagtaggcccaacgaaggctgaaatacaagcaagccagcttgacttgtatgaaggtacctttccaaattccaatttccttagccgccactaccagcctatctcactacctgcagaagtggagggccccgagggtggtgcagggacccaacaggtatggggatgggagacattttccacccgatcatcagttcggaagtgggggcaggtgaggaagtcaaggaccgagggcagagacgttccagcccaacccatccccaaccactattga

SEQ ID NO: 51022 - DNA, 1814 bp, Oryza sativa
  Clone ID: PAT_MRT4530_53454C.1
atggggctcccccgcagtggcgtgctggtctttgggcttgtgtgcgtgttccaactgtcgcattcgtcttcagatgatgacttcaccaaggttagggcggtgaacctgggaggttggttggtggtggaggggtggatcaagccttcgttgtttgatggcatctcaaacggggacatgcttgtaggctctctggttcttggaggtttggagctcatgttgtggcaatgtcggtgcattttactttcttctcatgtgactgtcggattttcgcctcaggatggcactcaggtgcagctgaagtcagtggggctccagaagtacctgagcgcaaatggtggtggcggcgggaacttgacagtggatcaggatgttgcttcaacatgggagaccttcaggctttggagagtttcttaccgtgaatatcaattccggtgcatcaaaggtcagtttttaacagcaagtaatggagatgtgatctcagcaactgcagattcaccaggagacactgaatcattttacatcgaaaggaacaattcaatgcttcatatcaagcttttaaatgggggctatctgcaggtcacaaacaataatcagcttacttcaaattatccttcccagccaggatgggatgatggtatggcaacatttgaaatgactattgttgccaacaacttacatggagattaccaacttgctaatgggcttgggcctgatcaggcaatggttgtcttaacagaacaccgaaaaaactttattacaggaaaagatttctattttctttcaaaaaatggtataaatgcagttaggattccagttggatggtggattgcatatgatcctaatccacctgctccatttgtcagtggttccctggataccctggatagagcattctactgggcacatttcaagtctgcacagtatggaggttctgattttgatatcaggatttatggcttgaagtgcatcattgatcttcatgctgctcctggctctcaaaacggaatggaacacagtgcaagtagggatggttcagtagattggccttcaccagctaacatcgagaaaacactggatgtcattaattttctggctcaaagatatgcaaacaacccctctctcctaggtattgagctattgaatgagccttctgcaggcgcggtaccactaggcactctagtgtcgtattacaaaacaggataccagattgtacgaagttattcggacaaagcttacgttatattctgccagaggattgggaatgcagacccaatggagctttatcaggctgacctgggtccaactaacactgttgtagacttgcattactacaatctgtttgatccgttttttgagaaacttaatgcaacagagaacatacagttcatatacaataacagaatgcctcaagtgcaggccttggataaagcgaatggacctcttgtttttattggagaatgggtaaatgaatggaatgtgacagacgcttcacaaaccgaataccagttgtttggaaaagcccaattagaggtctacggggaagcctcctttggctggtcttattggacagtcaggtgcaacagtgtgcactgggattatgaatggaacaaaaggaataggtacctcattggtggttcaccgttggaaagcccaaagtacatgcttcttgtggcaggatgcctactctatcttttatttatattgacatgatacttgaactcaccaccgaagatagaatttctcactttgagcatttactcattcacaaaatatatgaaaaaaaaagaagatatacgattcaaaaaaaaaaaaaa

SEQ ID NO: 51023 - DNA, 400 bp, Oryza sativa
  Clone ID: PAT_MRT4530_53455C.1
atatgcatcaattgttagatcgtaaacgtcttttcccaccccaaaagctagccaatgaggtgaggggatcccccacttatatattaggtccattgcccttccacaaccaatgtagaactattcaacaatctcccactttatacattggtgtcccttagccattcaccgccccttcaccgtttccccacggtctctcagccatacaattgttggatcgtaaagggcttttcccaccccaaaagctagacaataatatgagcagttcccccacttatatattaggtcccttgcccttccacaaccaatgtgggactattcaaaaataacctccatttgaaagtattatgcaacccctgtgctacatccgtatcgtgtgcatctcgaccagtaatggagcaca

SEQ ID NO: 51024 - DNA, 714 bp, Oryza sativa
  Clone ID: PAT_MRT4530_53456C.1
atggaggcttccaggaggtggccatatgcagcttggtttatggccgttctgggtttggtcgccgtgttttcatcgtcggaggcgtacgtcttctacgccggcggccgcgacggctgggtcgtcgaccccgccgagagcttcaactactgggccgagcgcaaccggttccaggtgaacgacaccattgtgttcttgcacgacgacgaggttggcggctccgtgctgcaggtgacggagggggatttcgacacgtgcagcacgggcaacccggtccagcggctcgaggacgtcgccgccggccgctcggtgttccggttcgacaggtccggccctttcttcttcatcagcggtgacgaggaccggtgccagaaggggcagaagctgtacatcatcgtgatggcggtgcgcccgacgaagccgtccgaggcgccggagccggccggggcggccgggcctgtctcttccaagtcgtggtcctggcaggcgttcccgccagccggtgctaccaccccgccgccgctgccgccgtcctggggctcggcgcctgagcacgcgcaggctccgggcaagagctcgctgggtggttctggcggcggggaaatgtcgcgcagcagctcgcttggcgcgccaccgccgacgtccggcgcggcagggttggccggcgtggttgccagtgttgtggttggggttttaggggctttgttgatgttctga

SEQ ID NO: 51025 - DNA, 474 bp, Oryza sativa
  Clone ID: PAT_MRT4530_53457C.1
cccacgcgtccgcaggacaagaactgggatcggacccagttcttcaaagccgacctctccccgctcgaggtaacaacaatttaacagcaagttgttcgcttcagtttctgaatttttacctgaacaattataccgtttcatcatcatcaacaacaaaacggagattaattgcagttgattagtcgtcgcgtacttgttccaattgaaaaacagttgacatttcacgtgttgttcaatcgtttgtgaggataagaaggaaactgctagtgtcactgtcaaagaaacagagttttgcgagagtatatatcttatctaggggacgatgttaacgtgtacggttgcaccagtagtaaaccacgggtagtatttttctaatggaaattaattctgataagggtcattgggtgcattattagctacgcaaacatcgtttcttttttatctgtcatactgctcacgtactgtttataagag

SEQ ID NO: 51026 - DNA, 2649 bp, Oryza sativa
  Clone ID: PAT_MRT4530_53458C.1
atgggcatggcgatgaggtgcgtcttggtcctcttctccgtctcccccgtgctgctcctgttcaacttcgagatgctggaggttgctctccatctagcgagccgcgaaaaggagctcgacaccgctgcggtaaccccttctgccagtttgagcttcctctcgaggtttaggataatgctggggatgaaccatcatcggtcgcggggccgaaggcataagagatattcagaagctccagctccagctccagcaccagtcccagcccatcaagcaagatcagaagctcctgcccctcttgttcatgtgcctcgaaaaggaatgccgtcgactcatcgcagccacattgccccagctagaagcccggtgcacaaagtgaaagatggtggtcacaccaagatcccgagatccgccattgttgctctgggtgtggttggattatgcctagttgttcttggagttgtcatagcagcattctcagtcagaagatcaaggaagttcaagaaggtgtgtacaaaggcattcaaaccatttcgtcatggatcaagagatcaaaggtcacctgctgctaccaggaaggtcagttcccaccctagcccagatccacttacactaagttccatagtacagtaccaacagaaccttccaaaccttaaacaatcatctgaatcaaagagtctatccattcagagcactattccgatgggtacagaactaatagtaagtgatcatgctgtgataaacaactcacaatctgatgaggttgaatctttccattccataccttgctctgatttatcagctggctccattacagagttacctcagcaaatttgtgatagaagagctattatgaaccgatctgagtatttcctacaaacacatgattcaccatctgattcatcatatcaatccctttcaccagattgtacatctcgtttgtctccaaaggatcaaactttcactgcttccagtcacctcagtttgcgtagcaaaacttgtccagaaaaatcagatggtgaaaatgctgaaataaactgtcatgatggattggaaataacttgcatttctgggtccatggaacatcaagaagcccctatcgaagagcgggccagaatcaatttcaggaacccaccatcacaacacatcttccctccctcctatcgtacagatacctcacaatccaaaatcaacatagcatttactatgactaactcaaaggttgaatcaagttctaaggaatcatcaaggattgagacctccagttcaatgggtataccaaaaccggcaccgcctcctccaccgcaaaagaaccctcctccaaatctgaaagggcaatgctatggccagcctccaccaccacctccattgccacttcagatacaggttggtaaagatgggtctcccctaccaaggttgaaaccattgcactgggacaaagtaagggctgctccaaaccgctctatggtgtggaatgatataagatcaagttcatttgagttcgaatttgatgagcagatgatcaagtctttgttcgcatacaaccttcaagggtcaatgaaagatgaggaggctatgaacaaaaccgcatctaccaccaaacacgtcattgagcaccataggcttcaaaatactactatcttgttgaagacattaaatgcaaacaccagtcaagtttgcaattctgtaatacaaggtaatggattatctgtgcaacaacttgaagcgcttgtcaagatgaaaccgaccaaagaagaggaggaaaagttactaaattatgatggcgatattaacatgctagatccagcagaaaactttgtgaaggtgctactaacaataccaatggcattcccaaggatggaggtcatgctctacaaggaaaattttgatgacgaggtagctcacatcaaaatgtcctttgcaatgatcgaaggagcttgcactgaattgaagtcaagcaaactattcttaagattacttgaagcagtactcaagacaggaaacaggatgaatgtcggaacattaagaggaggtgcaagtgctttcaaactggatgcgcttctgaaattggcagatatacgtgggacagatgggaagacaaccctactgcactttgttgtaaaagagatggctcgttcaaaaggattaaaggctttagaaaagctcaatgaaacacccagctcttgtcatgacacaccaactgaacgagaggagtattcatcaatgggtacagaatttgtctctgagctaagtaatgaactaggcaacgtcaagaaggtagcaagcatagatctggataccttgcgaaactcaatatcaaatctatcctgtgggctggctcaactgagaaatcttgttgagaaggacctagccagtgatgacaagaacaataacttcttgcaatgcatgaaatccttcctaaatcatgcagagaatactatgcaggggctcaaagctgatgaagctcaagtcctactcaatgtcagggaactaacggagtactatcatggagaggtcagcaaggatgagtccaatctgctccaaatattcatcatcgtgaaagattttcttggtttgctggataaggtgtgccgagaaatgaggggcacaaagcataaccaaactctcaatttagtccttccactcaagtga

SEQ ID NO: 51027 - DNA, 431 bp, Oryza sativa
  Clone ID: PAT_MRT4530_53459C.1
cccgggcgaggaatcggcacgagggagagagagaactagtctcgagttttttttttttttttttttagagaaacagacaacattttctcattaactaccactgtgcaacaacaaagcatgcagttacaagtttgattatatgcagaactgcactagggtgatgaatcaccatgtgggcgagcaacatgcagatgtatcaatgagaaggatttttcccttcccaataaatagttgtcaaaatcattgcaacatctgatactgcctctacaagtaagaggtcagacaaaaaaccgggtaaacagatttcttacccttttttcccatgtacagcgccaccaattgtacaacagctgcaaagagatgaggaactgatgaaaatatgttagcaccaggaaagccaatccatgactccattctcatctttcaatcgt

SEQ ID NO: 51028 - DNA, 464 bp, Oryza sativa
  Clone ID: PAT_MRT4530_5345C.1
tgtatatatttagacgggtaagtcctgcccaaacctctttaatttaagggggggaataataacccccttgggggttgtaacagcccatcttgcgccgaaggggttaccccagggttcccccaggaaaatttccccaccgagggggtgctagaaacccacaaacaggccggtgcacagctagaagtttgtctgaggtatgcccgcggagccacacgcacagctcgggaccatccccccgggagggatgcaatgcactgtgtgacaccacagtgctgtgtctgagagttagcctgctgagactgctcggatgccagaccgcttccacgccgcaatggaggaaccatttttctttttttttctttaaagaggaaaaaaacaaagtggacttggagattgttgtttattgatggagtgaaatgaaatgaatgggaatgatttcgataaaaaaaaaaaaaaaaaaaaaa

SEQ ID NO: 51029 - DNA, 456 bp, Oryza sativa
  Clone ID: PAT_MRT4530_53460C.1
atgggcggcaccttctccaccgccttcgccatggcggtggccgccacctcccctaccattggcactgcgccattctcgtctcttactatccgcctttggcttcggcccaaaccccttctctttaatttttggctccttcttcccgtacccaagtgcttctcctgggttgaatccgtctcggaggaaggggaggaagaatgcgttgaggaggattccgaggaatccggtgccgggggggaagacgatgacggggaggacaacgacgaaaagccgcggcctgagccggtggccgcctctgggttcgagttcgcgtcggccgccggagggctacgtggagcccgccccgttcgacgagctgaccccggagtcgcccgaggacgtggcaacggcgtcaaggtggtggatcccgtcgacatggaccgggagcagcgccctagcgaccagttcaacgagcgg

SEQ ID NO: 51030 - DNA, 428 bp, Oryza sativa
  Clone ID: PAT_MRT4530_53461C.1
agacttgccatacttacacgcgcatatccatttcattaaacgtacggacttgcataatctacgcttctgacaattaccttagacaagaagcctgatgcacccaacacagaactgctggacttaactccggtggtcaaaacagaccagtgtattattgtgacatactcgaccctagaggatgcaccttattcgtgttatacttgagcaacctggcttgttagactgcatctagtgccctaccacagtcaaaagcttcagtgctttcgttaaacccatgggatgatcaccggtgcagggctttcaagccttttattattgcatgggtatgctctggcttggccactgaaatacgaatatatgcctttagtgccatattgtgataggggcggatcattactcccattttcggccgggggccctttattttc

SEQ ID NO: 51031 - DNA, 1388 bp, Oryza sativa
  Clone ID: PAT_MRT4530_53462C.1
gcacgaggcttcaccccccctcccctccctccctccgccggggcgccgtctcaaaatggccgccacctcctccaccgcctccgccatggcggtggccgccacctcccctaccattgccactgcgccattctcgtctcttcctctctgccttcgcctccgccccaaacccctcctcttcacttctcgcctcctcctccccgtccccaagtcctcctcctgggttgaatccgtctcggaggaaggggaggaagaaggcgtggaggaggattccgaggaatccggtgccgcgggggaagacgatgacggggaggacaacgacgaaaagccgcggcctgagccggtggccgcctctgggttcgagttcgcgtcgccgccggagggctacgtggagccggccccgttcgacgagctgcccccggagtcgcccgaggacgtggcagcggcgtacgaagcgctctacgggccggcctttagcggcgagacggtcatgggcaacaacgtcttcgaggtcaaggtggtggatcccgtcgacatggaccgggagcagcgccctagcgacgagttcagcgagcgggtcgtgcaggtcaatcgcgtcaccaaggtcgtcaagggcgggaggcagttatccttccgtgcgatcgtcgtcgtcggcgacatgaagggccacgtcggtgtgggcgttggcaaggccaaggaggtcaccgaggccatcaccaaggccgccatgaacggccgtcgcaatctcgtcaccgtgccgctcaccaagtattcgaccttcccgcatagagcagatgcagactatggagcagccagggtcatgttgaggcctgcttgccctggatctggtgtaattgcaggtggagctgtgagggtcgtgctggagatggctggggttgaaaatgctctggggaaacagctgaggagcaagaaccccctcaacaatgcaagagctaccatcaaggcgacccaaatgatgaggcagttcaaggatgttgctgcagagcgcgggcttccaatggagcagctatggaaataatcaaataaatcaaccttaaattccctccaatatttttctttctccatttcttgagttcattttcagttgtatctgtcagtggggataatcctacatttaagtcctctccccaccctaaatgcattatgtgtctccacatatacatggcaaagctttagatgaattgatctgcgaatacctttagcttcactagtaatagtgcatgtgcaagacacgttccgcacgtataaattcgagtttattatgttttcccactatgcaaaataaaaagaaaatataaatgtgaagtttaatatgccacatatctctctgtttacaatttgaaagaccaatggaaaacatccaattcaac

SEQ ID NO: 51032 - DNA, 363 bp, Oryza sativa
  Clone ID: PAT_MRT4530_53463C.1
atggtggcgggaggtggccccggctccggtggcggtgaggccagcggcgtgtataatggtgtctcgggctcctactcactctcgttgccggcgccggattcctcatcgatgatgaacgagaccaccgacagagctaccaacgatcttcccttgttcctcgagaaggacaaaggcatcacaacccccaagccaggaggagcagcagtagcggcaaagcatcagaaccttccggagctaacccaagggcagcaacctaagaatccaaccgagatcaccttcctcttcgtcgacagcggggagaagggccggcgtggcgagcggtccttggatccacctgctggtggctaccactccattccctag

SEQ ID NO: 51033 - DNA, 429 bp, Oryza sativa
  Clone ID: PAT_MRT4530_53464C.1
atgttgggtgaggtcgaggagggcctcgtggaagccctactgggtgtcagcgaggaggagaaaggcgtcgaggaggtggtcgccggcggcagtggcaagacagagcgtgtcctctgggcgttcggggcacctcgtgttcagggcgccgacactcagtgcgtcgttgtagcagcgctgacgcttggcgatggcgccggtgttgaggattttgtggcgcgcgaccggcgaagacgccgctggtggctgcggcggcgaacacggggccattccggagcagtagcagctggaccaggcgccgcccaccgccatctccttcaccgatgctcccagcgtcgccggcgaagaggacctggtgctggccatggaggcggcctgatttcgttatcggtgttcaacagcttctacttcacctccattaatcctccatga

SEQ ID NO: 51034 - DNA, 1240 bp, Oryza sativa
  Clone ID: PAT_MRT4530_53465C.1
cgccgccgacgacgacgacgacgacgacgaaaccgccggaggcagagaggagcagagactacaaggggtacacgagggagaagagatggtaaggtggcgccgctggatctgctgcaattgtcaagtgaacgagtctgatcagcttgaaaatggacatgccaaggtcctgactagtaatgcagatggagtgacaaagggtttgaaagattctgctactgaaaaagctcagccacaaaattcggctctcactatcaatattcctgttctatccttggacgaactagtagaaaagacagatgattttggctcaagtgctttgataggcgaaggttcttatggtagagtgtactacgctgttcttgacagtggaacaaaaattgcagtgaagaaacttgattctaatgaaaatgagcccacttcagaattcttgacccaggtcgctttggtttcaagattgaaacatgaaaactttgtagatatgttgggatactgcacggagggtaaccttcgcctagtagcatatgaatttgccactatgggttcactgcatgatgttctacatggaagaaaaggggtgcaaggtgcacaacctggtccagcacttgattggatgcaacgagtaagaatagctgttgatgctgccaaaggacttgaatatctacatgagaaggttcagccctccattgttcatagggatattagatcaagtaacatactcttatttgaagacttcaaggcaaaagttgcagacttcaatctctcaaatcaggctccagatatggctgctcgtctgcattctactcgtgtactgggaacctttggttatcatgctccagagtatgcaatgaccggtcagctgacacagaaaagtgatgtgtatagcttcggagttgttctcttggaacttctgacaggaagaaaaccagtagatcatacaatgcctagagggcagcagagcttggttacatgggctacaccaagattaactgaagataaggtgaagcagtgtatagatccacggttgaatggtgaatacccaccaaaaggagttgccaagcttgcagcggttgcagcattgtgcgtacaatacgaagctgagtttcgcccaaacatgagcattgtggtgaaggctttatctccactgctcacaatatcgctgttacttgtgttgctttaccgttcgttcaagtcttgggagataaatcaaattagtcaccacatgttgctactgctaagttga

SEQ ID NO: 51035 - DNA, 390 bp, Oryza sativa
  Clone ID: PAT_MRT4530_53466C.1
atgcggcggcatgaggggaggagaagaggaggaaaggaggtggcggcctgtggcaagggcgaggaggagaggcgggtggcggggaggggaggaggagaggagggtggctgcggagggcgacttggggggaggagaagaggcggcgccggcccggatctggccggcgtcgaggaggcggcaaccggggacgagggggaggagctcgaggagaggcggcggcggcaaggccgaggaggagaggaggcggcagcggcgagggcgagggggatttgggagggcggtggcggttggatttttcagcagcctggcagcgtcggtggagtggacttagaaaatttcagcccttctacccgcctcctctatatatacatgggcatcctgtgcgggtga

SEQ ID NO: 51036 - DNA, 327 bp, Oryza sativa
  Clone ID: PAT_MRT4530_53467C.1
gggaaacaagggggctccaatatttttttggaaaaacggcacccagggcggctttttttttcaaggggaacaccccaataaaaaggggggacagagtaccaaccccccacccaatttcaatggacttccccgcaattaaattaaacctgaaaactcccaaaatcaatagaccctacttttttaaggaaaaagagccgggccttggaatgcaaagcatcccgaaaaaacttccttgttttttcattcctgaaaccccagaatgggaaccaagccaagaacccccaaaggtctccctttttaaaggtttaacccgggattttggccaat

SEQ ID NO: 51037 - DNA, 108 bp, Oryza sativa
  Clone ID: PAT_MRT4530_53468C.1
atgtggcaggtccatcagtgtgtgaggatgccagcagcggtgttgcctctgcagggcgtctccgccgcctcgggagctaccggctgccctcgtggaaccggcaagtga

SEQ ID NO: 51038 - DNA, 963 bp, Oryza sativa
  Clone ID: PAT_MRT4530_53469C.1
atggcggcggcgggggtgtcgaggagcatggtgctgacgctgctggggttctgcgtcagcgtcctcttcatcgtcttcgtctgctcccgcctcgcctgcgccctcctcaggcgacgccgcggccgcgcccgcctccgccgcgcctcccctctcgccgtatcgggggtcctctccatctacgtcgaccgccacggccaccaccagccctcgtcggccgccggggccgcttccgggaccgggggcctcgaccccgccgccgtcgccgccttccccacccgcgccttctcccccgccgcctcctcctccgcctccgcctctacccagtgtgtagtctgtcttgcagaatacgaagagaaagatgtgctccgtgttcttccctactgtggccacggctttcacgtggcctgcatagatatttggctaatgcaccattcaacatgcccagtttgtagaatttcgttgtgcgactaccctgatagcaagcacacgatgtctcctgtaccaagtgcagtgataataccattacctcaatgttctcctggagcagcaagatcagatcaatgcaattggctattggtgggaacagggcattcgccaagggcatcaactatttgtagtattggaaatatccgagagaaggtggatccgtggtttgctgtcataggttagtgttggaggtgttttgctgtaaaagatgcaaaaccttttatgttacttgttatgaaaaccgcggttgtttgtgatcatattcaagattctatttttgtccacgcatggatgtcggccggtccaatcatggctcatacaatagatctgaactttgtgtgctcaaagcatcagcagcagcaatggttcttcttccctgctgcaacagggaaaagtcgtgttgaaccaagagatgctgacgcagggcttcactcatgtcttctccccgaccttcgggaattagctctgaagatctga

SEQ ID NO: 51039 - DNA, 1605 bp, Oryza sativa
  Clone ID: PAT_MRT4530_5346C.1
atgacgagcgggaacgagttcaacgggattactacacaatacattagaaccgatcaaggcgtcgtgagaggaaacgttccgctacctcaagttgtagtttcaccaaaggtaacttccgattcgcccaacccatactttgctattcaaaagaccgtgcctaccatagccggtcagaccgtgcctaccatagtcggtcagaccgtgctctatcctggccagatcgcgcctcctgtggccggtgtgaccggttccctggaaatttctccaggttttcataccatgactagcagtactgattttaattattattcatcacctgttaatgctgttagtcatgctactccacatatccctaatgcctacaatgatattaataggggatatcctcccgatactaggtatggccaatataacaatattgtgccgcaacaaccaccttttaggccaccaagtccaccaccagatccaccaaggcctgaaactgtggaggattggtttagaaatatcatcagggagaatttagcaaagctaaggaatcgcgctagggagtaccaaaagccgtatcctgattattatgacattttcccatatcctcgtgattataaaattcctgaatttaccaagtttagtggtgaggatagtaggactacatgcgagcatgtagaccaattcttagtgcaatgtgccgaaccaagtgttggttcggattgtcttactagcttggatgataatgcaataaccattatagccgagccaagtgttggttccgattgtgttactagtttagacaatgatggaatagccgaaccaagtggtggttcggattgtgttgctggcttggacaatagcatcattgaagatatagtcgaactagatgacggttcggattgtattataagagaaaatgaaatagcattgtcacctaagaccgaatcacaaatcggtcatgtggatgttggaaaagataatggcaatgtcttgcgggatagtagtgaaatagaatctaaggtacccatgcatacatatcaaaggccgtatcctgaatatgtagattcggtcccatacccgcaaggatttgacgtgcccaacttcacgaaattcacaggtgagaatgctatgactacaatggagcatatcggccgctttattgatcaatgtggtaaggccggtagcgatgatttgcttaagttgaagttgtttcccctttctttgtcaaactttgcatctacgtggtatagtttgcctgctcctagttcgatttctacatggtcacaaatggagcatgagttttatgattattttaaagatacaagcttgatggagcaaagaccgattgatacttcgtcggtcacttgtgaaactatttcggttacatctatgcctaagaccggaattgttggtgatcctctcactgttagttctattaatgttggcaaaaagaaagggaaaagtgttattattggggatcctcggcccaaaaataggataaaaaatgcgaaggccgaagatcataaagttgtaaaggatgggtcatctatttccacaaggccaaaaagccaaagcccacttttgagatgcttatggctaaatacaagaaaggattag

SEQ ID NO: 51040 - DNA, 273 bp, Oryza sativa
  Clone ID: PAT_MRT4530_53470C.1
gcacgaggcctcgtgccgaattcggcacgagggagagaactagtcgctcttgcaccatccaccatgaaaatcaaaatcattgctccaccagaacgtaaatactctgtctggatcggaggatctatcttagcttccctctccaccttccaacaaatgtggatctccaaagaagaatatgatgaatctggaccatcgattgttcacagaaaatgcttctaaatccacttgtgaaaattcttgtagaaatagaaaaataatataaaaatttaattt

SEQ ID NO: 51041 - DNA, 855 bp, Oryza sativa
  Clone ID: PAT_MRT4530_53471C.1
tgccctccccaaaccacggcggcgagggttaatggttttggagtctaaacatggtttatatcatctaaagttcgaaatgatgctaatggttttggagtctgaacattcttctttcacggccttctctgccgctgccacctgctgccgccgggctgcctttgccgctgcgagctgccgcagctgcacgccttcttcccggcgcccttctgcagctccacctgcccgccgcctcccgcagaccgggcgccgcttatgtcgttgaactccgagttgaggatggtgtcgaactcaacggcgaagaggtggttggtcacgttaacattgccatgccatcaaagctgagattcgcgctggtgaaccccttgaagacgaactgctcgtggccgccgccttcagcagcccgccggcgccgcctcccgcagacccgacgatttggggattttcggaagaactaggttttgggtgaggaaagggggagggaaatcgaatcgattcccgatggcagcgacgccgattctggttgtcgacggcagcgcggcgcagcatactcgcaaaggcagctggctggcggcggtgacgcgagagctgtcgcccgcgcgtgggctagctgacggcgtgccggctgggcagcggcgcgcgtactggtggcggtggcccggcagcagcggcggcgcgcgagctggccggtggaggtgccggcagcgaacgtcggcggtggcggcgtgcgggctggaggcgccgacggcggtggacacgggcggtgggcggcagcggcgcgggctgggtggtggcctgggcgacgcccaccaactgtttgacaaaatgactataagggacgtggtggtgtggagctaa

SEQ ID NO: 51042 - DNA, 441 bp, Oryza sativa
  Clone ID: PAT_MRT4530_53472C.1
atggagcgagcggctggtactggtagcggcggcgacgatgacgagctcgtgctgccgccggcgtcgtttcaggacgggcttccgtcgtcccgctcctacccctcctgcatcggcggcggtagcgcagcggcggcgtcggcgtcgctggagcgggagctgctgtaccgcgcggagctgcaccagcaacagctgggcggcggcggcggcgtagagcggcggaagaggcgcgcgatgaagaaccgcgagtcggcggagcggtcgcgcgcgcggaagcaggcgtacctgcaggagctcgagcaggaggtccgcctcctccgcgccgagaacgccgccctgcgccaccagtgccaccagctgaaggccgccgcggcggaggcggaggcggaggcggcggcagcggcggcggcggcgaagaagccgacgtcgtcggcgacgttctga

SEQ ID NO: 51043 - DNA, 537 bp, Oryza sativa
  Clone ID: PAT_MRT4530_53473C.1
atggacggcggagtgtgcgggagaggggtttgcgggaggcggcgccggcgggctgcgaaaggcggtggccacgagcagttcgtcttcaacgggttcactggcgcgaatctcagctttgatggcatggcgacgttaacgcgaccaaccacctcttcgtcgttgagttcgacaccatcctcaactcggagttcaatgacatacgccctgtctgcgggaggcggcgggcaggcggagctacagaagggcgccgggaagaaggcgtgcagctgcggcagctcgcagcggcaagggcagcccggcggcggcaggtggcagcggcagggcggcataattagcataactaatgcttgggctagagacaaggcaccggggatgcggaacggcggaagacgccgggcgcatggaagatcggcttctcccggcgccggaggtaatatcgggatggaggcgctgggccggggcgggagcgaggtgcgccgggagcttccgtcgccggggacgccggatgaaatgaaaagaagcgctacacgcggatga

SEQ ID NO: 51044 - DNA, 216 bp, Oryza sativa
  Clone ID: PAT_MRT4530_53474C.1
aggggctgaagattaacttaagtgtggactgtcgcatacatcgaggtgcaagatcaatttaagaaaacgctgacacacgctcacacaaatgtacatcattactaatcatgatagatacctaaccatggggcgaattatggtttaccttttcctgctgcgtcctgctcatttgcactcggactgaactgccgatgtttctgtctgtcgacctgaaag

SEQ ID NO: 51045 - DNA, 469 bp, Oryza sativa
  Clone ID: PAT_MRT4530_53475C.1
gcgagcggcggccggcgagcagagcagagcagagcagaggagagagccgacctccatcttggctccaaccgaagcttaagcgcctcgtcgtagtttgggccaaataagtttgcatttttgatttcttgttttttctgggtgctgaggaagagtgttattaaagctgtgaggattgaggagattgattgaggggggacgcccgattgggatcccgtgcccgacattgacattctcatgctgtcgtcagcgctcgatggcctcgacagctacaccgacctcgttgcgggttcattggtagccgacagcatcttctcagctctcacctgtttcccaccatcgcaagaacggttgctgcacgtctcaactcatgtgggttctagttctaagcaagatgattctgatgtttccatcactgaggagggtaacacaacaagaacaagaagtgatcgcgctgccggattagcttcag

SEQ ID NO: 51046 - DNA, 1462 bp, Oryza sativa
  Clone ID: PAT_MRT4530_53476C.1
cccacgcgtccgcccacgcgtacccaaaatctgaaactctgaaaccacaaaccagactccacaagaccacaactcgttaatccctcgatctaaagaaaaaaaaaactcgttaatccctcacgcggcttctcaaattcgcacgcgacgggataaaaagaaaaaagaagaggaataattcgaagggaagaggaggaggaggatctcaatatctcatcctgctgccactgctcgactcctcctaccctcccccaaatccgcgagcctctagggttcgtgggatcccccggaaatggatccgaaccctagacttctcatcctactcgtcctcctcgcgttctccgccaccgtggcggtcgccgaggacggcgaatcgacggggggatcgaaggtctcgctggggcgccgtgcaggggggttcttgcacgggctgaagaaggaagcagtggtggagggagaccatggggtggccctcgatgaggtcggccccgggctgttcgatgcgctcttcgcgagtctctcgatgatcttagtcagcgagattggagatgaaacctttattattgcggcgctaatggcaatgcggcaccccaagtcaatcgttctgtctggtgcgctatcggcgctctacgtgatgacggtactatcaactggacttggtaggatagtccccaacttgatatcaaggaagcacactaacagtgctgctacagttttgtacttgttctttggactacgtttgttatacattgcttggaagtctgacccaaagggatctcagaagaaggaaatggaagaagtggaagagaagcttgagtcaggtcaaggaaaatcaacccttcgccggttctttggaagattttgtacaccgatctttttggaggcttttatcttaaccttcttagctgaatggggcgaccgaagccaaatagcaactattgcgcttgcaacccacaagaatgcaatcggagtagcagttggagcatcattgggccacactgtctgcacatcacttgcagtcataggtgggagcatgttggcatccaagatttcacaacggacagttgcaacaatcggaggtgttctcttcttggggttctccgtgtcatcgtacttctatcccccactatgattaacagcattaacagctccttactctttcttgataccctttggtcaccctgctccctgtgttgagcaaatgagtagaggaattaaattgattctttgggcacctctacgctacgattcgcaattcatgtatagcccttgcaaatgaaattgttcctgaccatgctacttcacttcagtctatagcagaagccgtctcgatgatgaaatcatgtctgattttttgcttggttgtacctgacatctaacttatacaatatatatacactatgttgttcaaggttccttgcgtataaaatattattctggtaccaaaaaaaaaaaaaaaaaaaaa

SEQ ID NO: 51047 - DNA, 311 bp, Oryza sativa
  Clone ID: PAT_MRT4530_53477C.1
aaaaaaagttgtctttcatatttaaaaaaaacaaatgaagaaaaaaaaaaaaaaaaaaaaaaaaaaggaaagggaaaaaaaaggaaaaaggcccaacattatacaggaatcccgccttcggaacgggggcgtgcgaccctttctctcttctctggtgacccctaggttcagtggcgcgcccctcggtttacaacctctggactgggatgcccttggcgttcctctacctcgtgggcttgcgccacttccccctttcgccggctggggtaaaaaggggatgggcccgcacaccttcgcctttgccaacaatt

SEQ ID NO: 51048 - DNA, 234 bp, Oryza sativa
  Clone ID: PAT_MRT4530_53478C.1
atgggcatggcgtgtgggagtcgccgagtcggggagcttggagatttggaggggcgcgaccagcagtttgggcatcaggaagtagatcttgccatgagtagatggcagaagccgcagaacacaccatgtcgttcacggcacctcctcctggcgcaccagctccggatccagctcctgtcggcgtcggcggcggcgcagctcctgtcggcggcggcgcaccacctccgccaatag

SEQ ID NO: 51049 - DNA, 1968 bp, Oryza sativa
  Clone ID: PAT_MRT4530_53479C.1
atgtggtccttcgtacaggatgggtgctggtccggcatcgtgctcggcggcggcggcggcgtcgtcaccgtcgcgttccccatcacccgcgaggtgatcgacttcccgccgcgcttggtgcgcccgcgccgcgactacgtcggcggcgagtgggtcccgtcggaggcggcgatcgcgcaccagcccaagcaggcggcggcggttaggatttaccgggttggggacaaggtggaggtgaggagggaccgggaggtgtacggccgctcctggttccacgccaaggtgaccaaggtgatcgacaagatgagctatctcgtcgagtattccgatcttgagaaggagacggtggagtacctgcactggcagttcatcaggccgtccgaggtgcgctcgccgcaggattgtgatctccggtttggccccggcgccgccgtcgaggcctactgcgacggggcgtggtcgcctggcgtggtgcggagaattgtcggtgagggtgagtacgaggtaagtgtcaatgggaagaacaatgagattgtggtgaccaaggcgcgggagctgctccagcctcagtacaagtggaatgggaagaattggaggattgtttctgccaagagacgcttgagccaccagtttgtgtctggaaaaaaccgaaggtcaccagctgatgaacactccagtgatgatgaacaaaaacaagatactgaatcttctgcctggacaatgtcaaggaaaaggtcaaagaaggaattcaaggcaacagaactgcctgaagtcaacttacctgaagattctaatgctgtgtcaagagagggtgatagtggttcaaatactaagtatcaacaagatgatgcgtcaaatctaacaactgttttacaatctgcagttgctacaatgaagggctttgaagaatcagatagccaacataactcgtgggatgcaaccagtactgtccagcccaaacgtagaaagcaagctgcaaggcgactgaaaagatattctctcgagagacagttgaagggtgaaactcatattcagcagcagcttgataagactttggaggataacctgaatgcaaatcaagtaacatatcaagaactgttgccattaacacctccaggctttgaatcaattgccagtggaaaacgttctcgtgattggaacactgatggtttgtctgaaattaacttacattctagtctgttcgatgatgagctggctgctacaatcagtagcatttgtcaagataatcataatggagatgcggagactgacaatatggttacccaagtagctgaaatcagccatcttatggataaacctatgttaccttttgacctttcagttggatatgagctccccggtcagcaggccctattcaccaagactaaggatacatggtctgcatttgaaatgatggaagtgtttcggaaggatccacaggagccacatttccttccactacagcagtttccagaagcggtgcgtgaaaatatggctatagggttattttggtcatatatagatgctggggatgcaataagtaaattacgcataacggacagcacgaagatatttgagaagcacaacacaacactcaactatttagtggaaaatggattcaatgtccagtctttgcagtgcaagctaaacaaggcgctccagttcaaattggatcgcacccattctctcgcatacagggagaagctgaaagaacaggtgctggaaaagcaatcttccttgtcccgcattggtgcatcgcgtgatgaaaatgatagtgctatggccaagctcgagatggaacttgggagacaccgatgggatggccagatgatgtcaaagaagatggaggacgaagaggcggagctgtcaagactcaaagcggaggatagcaacgctcaggaggcatgccgggatgctgaaaaacagtttcgcagcgtcctggttgaggaggaatgcattaacaattga

SEQ ID NO: 51050 - DNA, 245 bp, Oryza sativa
  Clone ID: PAT_MRT4530_5347C.1
tctttcgtccgccggtgactctcctacgcggggggctgattctgaccacccccaccctcactcgcctcgttgacggaaaattgcatttcgcgccgctcgccgctccccccccctcttggaggccccggagctagctgcttggggggatcctcctccgctcggcgggcggtgatctcgcggtggtccccgaggaggcggcgaggtcctggctgcgaccagatgccccgatcccagcaatgatgcgc

SEQ ID NO: 51051 - DNA, 212 bp, Oryza sativa
  Clone ID: PAT_MRT4530_53480C.1
gttactctccatacctgtgaaccacccacgctggaaatattcttggatatcgaagattcattttgactctaaatgtagttatacatccactctgttcaatttgagaaatggaatccttggtatattttttccaagtaacattaacaccatcctgagttttatcatggccccatatcttgataataatatatctttccccctgaaaaaaaaaa

SEQ ID NO: 51052 - DNA, 1797 bp, Oryza sativa
  Clone ID: PAT_MRT4530_53481C.1
cgccgcgggcggcgcgcgaagcaatggagcgcgattttggcggataaatttgggcgcgcggaggcgggggagctcgacccacgcgtccggccgcttccaacctcaggtctcaccccaaactcgccgccgccgccgccgccgccatggagaggaagcaggcggagtacagcaacctcgacgagaggtacgcgatccagggggagaagtaccaggggcagcagtacagccacatctacttcacgcgactccaccacatgcgcaacctcctccacgccctcgtcccctcctggaagccgcaccttcctgttactactgtgttgggacttgaagaaggaaaggattgcataatcgttggaactttatataagcacatgaaattaaagccttccattcttgatgaatattctaaggagaggtctgctattcctcttgttaaaccacacaatttcatgcatcctgatgatcatctcattctggaagatgaaagtgggagagttacacttgcaggagccatacctccagcagcatatgttactggagttgtaatagctttacatgggaaagaaacaagtgctggcaactttcttgttgaagatattcttgaggctgggattcctcctcaaattacgttacctagcataaacgaggacaaatatgtggtatttgtgtcgggattaagtattgggagtgaaaaattcaatcctctgcaattccaacttcttatagaccatatcacagggcatttgggtgatgagaatgagcaatccatagcatccaacatagtacgtgttgtggtggctgggaattcggtacatatttctccaagattcttcaatggtcaggcagtagcatcgaaagatcaatccaggatagctgaaccaatcaaagaattggatataatgctcactcagcttgtggcatcattgcctgtggacatgatgcctggatctaatgacccagcaaatttttctttgcctcaacagcctttgcatagatgcctttttgctggagcagccacttataacactttttcatcgtgctcgaatccacatcaattcgagcttgatagtgtccggtttattggaacatctggacagaacatagatgacctctacaagtactctgatgccaaagacaagctggaattcgtggaaagaacactgcggtggcgtcatcttgctccaactgctccaaacagtctaggatgttatccatacacagacaaggatccttttctcgttgaaagctgtccccatgtttacttcgtcgggaatcaagataaatatgaaactcaattattgcaagggctagaaaaacaaaaagtgaggctgatctgcattccaagattttgtgatagtggagttgctgtcatgctcaatttgaggaacttggagtgcagcacgttgagtttctcaacaagcttcgatgcttgaccatgctctacttgtctggagtgcaagtgagttgatgtagcatgctgctgtggacatcttaatcctgaactggcgcagggttgtctaaaggatgtacttgtagttctttttttagattgtgatgacctaggtttctccaattagatgtgttgatataattgcctaaacctcgatgtatcaaaagctgaaatagagggtgcacggtttgtactaaacaaaaagaagcgtatgcttcttttctcggtatgagtatccacagctgatttattcgtcagatgttgtattctttctcatcagtcttagaaaatgtatatttcggatcagatatgcagatgcaaaattgcacagcaaaaaaaaaaaaaaa

SEQ ID NO: 51053 - DNA, 1281 bp, Oryza sativa
  Clone ID: PAT_MRT4530_53482C.1
atggcgattgggggatggcaggacgagaggtacgcgatccagggggagaagtaccaggggcagcagtacagccacatctacttcacgcgactccaccacatgcgcaacctcctccacgccctcgtcccctcctggaagccgcaccttcctgttactactgtgttgggacttgaagaaggaaaggattgcataatcgttggaactttatataagcacatgaaattaaagccttccattcttgatgaatattctaaggagaggtctgctattcctcttgttaaaccacacaatttcatgcatcctgatgatcatctcattctggaagatgaaagtgggagagttacacttgcaggagccatacctccagcagcatatgttactgacgaggacaaatatgtggtatttgtgtcgggattaagtattgggagtgaaaaattcaatcctctgcaattccaacttcttatagaccatatcacagggcatttgggtgatgagaatgagcaatccatagcatccaacatagtacgtgttgtggtggctgggaattcggtacatatttctccaagattcttcaatggtcaggcagtagcatcgaaagatcaatccaggatagctgaaccaatcaaagaattggatataatgctcactcagcttgtggcatcattgcctgtggacatgatgcctggatctaatgacccagcaaatttttctttgcctcaacagcctttgcatagatgcctttttgctggagcagccacttataacactttttcatcgtgctcgaatccacatcaattcgagcttgatagtgtccggtttattggaacatctggacagaacatagatgacctctacaagtactctgatgccaaagacaagctggaattcgtggaaagaacactgcggtggcgtcatcttgctccaactgctccaaacagtctaggatgttatccatacacagacaaggatccttttctcgttgaaagctgtccccatgtttacttcgtcgggaatcaagataaatatgaaactcaattattgcaagggctagaaaaacaaaaagtgaggctgatctgcattccaagattttgtgatagtggagttgctgtcatgaaaaatcggatggagtttctagacagagtgccatcagggaaggaacaaaacagaaccaaattgtgccagaggaaacagaataaaacagcatcgcatttactgactcaggttgaggtgaaaacaaaggatgcacagagtaaacaccacatgagccacatgccattctga

SEQ ID NO: 51054 - DNA, 1512 bp, Oryza sativa
  Clone ID: PAT_MRT4530_53483C.1
atgggcgccaccggcgacaagccgccgcacgccgtgtgcgtgccgtacccgtcgcagggtgacatcacgccgacgctgcacctcgccaagctgctccacgcccggggcttccacgtcaccttcgtcaacaccgagttcaaccaccgccgcctcctcgcctcccgtggcgccgccgcgctcgacggcgtgccgggcttcgtcttcgccgccatccccgacgggctaccggcgatgtctggcgaggacgaggacgccacgcaggacatccccgcgctgtgccagtccaccatgacgaactgcctcggccacctccttgcgctgctgtcgaggctcaatgagccggcgtcggggtcgccgccggtcacctgcctcgtcgccgacggcctcatgtcgttcgcgtacgacgccgccagggtgatcggcgtgccgtgcgccgcgctgtggacggccagcgcctgcggcttcgtggggtgtcgcctctaccgcgagctcatcgaccgtggcctggtgccgctccgggacgcggcgcagctcaccgacgggtacctcgacacggtggtcgacggcgccgccgcccgcggcatgtgcgacggcgtccagctgcgcgactaccccagcttcatccgcaccacggacctcggcgacgtgatgctcaacttcatcatgcgcgaggccgagcggctgtccctccccgacgccgtcatcctcaacaccttcgacgacctcgagcggccggcgctggacgccatgcgcgccgtcctcccgccgccggtctacgccgtcggcccgctccacctccacgtccgccgcgccgtccccaccggaagcccgctgcacggcgtgggttccaacctctggaaggagcaggacggcctcctcgagtggctcgacggccaccggcccagctccgtcgtgtacgtgagctacggcagcatcgcggtgatgacgagcgagcagctgctggagttcgcgtgggggctcgccgacagcggctacgccttcgtgtgggtcgtccgcccagacctcgtcaaggggggagagggcgacgccgccgcgctgccgccggagttccacgccgccgtcgagggccgtggcgtcctcccggcgtggtgcccgcaggagaaggtcctcgagcacgacgccgtgggcgtgttcctgacgcactccgggtggaactcgacactggagagcctagccgccggcgtgccgatgctgagctggcccttcttcgcggagcagcagacgaactgccggtacaagaggacggagtggggcatcgggatggagatcggcggtaacgcgcggcgaggggaggtggcggcgatgatacgggaggccatggaggggaagaaggggcgtgagatacggcggcgtgcacaagagtggaaagagaaggctgtacgagtgacgctgccaggtgggcccggggacaccaaccttgaccgagtcatccacgacgtgttgctgtcgtgtaaggataaaattagcagggtgaatggtgagagtgtatga

SEQ ID NO: 51055 - DNA, 1831 bp, Oryza sativa
  Clone ID: PAT_MRT4530_53484C.1
atggatcttctctggactctgctggcggagtacaagtgtagtacgctgcgaagtccaggcagcggatggtggaaaactaacaagcaggctcaggctcagggcccgcccgcggcggtcgcggcggaggaggcgcccaccgcgcgcaaggagtgctatggcgtcttctgcaccacctacgacctcagggcggatgagaagacaaagtcctggaagagcttagtgaatgttgctgtgtcgggtgcagcagggatgatatcaaatcatctgcttttcaaacttgcctctggtgaggtttttggaccggaccaaccaatagcacttaagttgttgggctctgaaagatcaatacaagcacttgaaggtgtggctatggaattggaggattcactgtatccattgctaagggaagtcagcattggtatagacccttatgtagtcttcgaagatgcagaatgggctcttcttattggggctaagcccagaggtcctggaatggagcgatctgccttactagatatcaacggtcaaatctttgctgaacaggggaaagcacttaactccgtggcatctcggaatgtgaaggtcatagttgtcgggaacccctgtaacactaatgcattgatttgcttaaagaatgctcccaacataccagcaaaaaactttcatgcattgacgaggttggatgaaaatagagccaagtgccagctggcactaaaagcgggtgtattttatgacaaagtatcaaatatgactatttgggggaaccactcaacaactcaggttcctgattttttgaatgctaaaattaacgggagaccagtgaaagaagtcattaaagacacaaagtggttagaagatgaattcaccaaaacagttcaaaagcgtggaggagtactcatacaaaaatggggcagatcttcagctgcatcaaccgccgtttccatcgtggatgctattaggtcccttgtaaatcctaccccagaaggcgattggttctctactggggtttatacgactggaaatccttatggcatagcagaggacatcgtgttcagtatgccatgcaggtcaaagggtgatggtgactacgaactagttaaagatgtggcaatggacgatttcctctgggaacggataaaaaagagtgaagctgaattgctcgccgagaaaagatgcgttgcccatcttactggagagggcaatgcattttatgctattaggtcccttgtaaatcctaccccagaaggcgattggttctctactggggtttatacgactggaaatccttatggcatagcagaggacatcgtgttcagtatgccatgcaggtcaaagggtgatggtgactacgaactagttaaagatgtggcaatggacgatttcctctgggaacggataaaaaagagtgaagctgaattgctcgccgagaaaagatgcgttgcccatcttactggagagggcaatgcattttgtgatcttcccggagacaccatgcttccaggagaaatgtagaatcattgttgcggtaaccctggcttgtgttatttcacaggggttttcgacggaaacacacacacacaaactactagtagctgagagaaacaactgcttgcagattacttgcagcagttatttatacgtatgtataataagtatttatttaataaggatgccacagaaatttcaactatgttgccgagtttgtacactataatacaatcaaccaaatgcaatgcggctgatcgtatagcatataaaaaaaaaaaaaaaaagcgaggcaaagcaaagaaaaaaaaaaaaaaaaaaaaaaaaaaaaaaaaaaaaaaaaaaa

SEQ ID NO: 51056 - DNA, 241 bp, Oryza sativa
  Clone ID: PAT_MRT4530_53485C.1
gaaaaacgaacgacaaatcatttgaggtgtatctaacccaaagacctgcacgtgaccaaaaatgacaacactggctgcaccgaccggccaaaccgctcgactgatgaaactaatcacgcgacacgggcatagaaaagcttggttcggaagtgcacgcactaaacctagggtccatcccatctttaaacggcactcgaaaagcctacaactctgaagctagtaccacttacccctcaatgtc

SEQ ID NO: 51057 - DNA, 588 bp, Oryza sativa
  Clone ID: PAT_MRT4530_53486C.1
ctagcttgttgggtcatcctcatcactatctgatggttctgtacccatatcatatagatccctcggcctatatggttgtgcaacatgccatccttgtgcttttggttccgtgtccacctccactatgccgacgtccacgtccgtcttggtccgcctcggtgcgtgggcgagcgcctcgtcgccgtcgccttcgtgcaccaccgggagcaacagcacggtcgtcgcctccgccaccacgggcacggcggggcgcgagacggcggcggaggcgctgtcagtgtcgtcgtcgtccatctcctccccggcgaccttcctccctgcacggtcgatctccagctccacacgcgccctcgcggactccgtctcgaccacctccaacgcgcgctccagctccgccacgtagttgttaacagtgaaatttggtaagcccggagtagtcatcggcgtagagtcagcatcggcttcgaagtcctggggtctatgtaatctgtcctcacgatcaatacaattcggcgcatcgccaccttttttacttctacttttgtttttacgttccggcggaacttggcacccgacgcggggctgcat

SEQ ID NO: 51058 - DNA, 327 bp, Oryza sativa
  Clone ID: PAT_MRT4530_53487C.1
atggatggtggacagaaccaagcgggagatgaagcctcggaggatccctatgcctactaccaggagggagatgaagacgatggcactcaccgtggaacgtacatgggcccttcacgacgctggacgtcaatgaacagggcccacctccgacgaaaacaggtcgaaaacgggcacccctatcattgcggcaaggttgtcgtctctaacgataagcgcggttaccgtgaaataataataacgaagcttaccgtcggttttaaaatccctgtgtgccgttggttcgaggtccagcagtcgttggtcatgaacagaagactggcttactag

SEQ ID NO: 51059 - DNA, 329 bp, Oryza sativa
  unsure (1)..(329): unsure at all n locations
  Clone ID: PAT_MRT4530_53488C.1
gaagaaatagtttcnaatctcgaagagacaacttatagaaagttcgatacaaacatcgcactaccctgttactgcacattgtaacataacatattctcgtgaacatatacaaacatcacacaaacgaagcaccagcaagcactctagagagtcaccccccaaaacttacccagacaaatgcagctgcttaattactccattccagcgatcttcttcttcaaggcctcgatgtacgtcgacaactctttccttgaaaaagatgtagcggtacacgaaccagccggtgtagccgatgccgaccagctccaggatcttgttgagcaacccca

SEQ ID NO: 51060 - DNA, 2371 bp, Oryza sativa
  Clone ID: PAT_MRT4530_53489C.1
gcacgagggcacagtacactacccagcctgccgctcgatcgatctggccttctccgccgcaccgccgcgcggcgccccgaccgtcgtgcggccgcaggaggatgcaggcacccttcctttcgccgcttttctcctctggaagaagggctctcccatagacaacggctaagaattacaaggctgcttctttcgggagtagtttttctgttaattttacaagggaaataggtgagatttctgaggtgtaaaaagagaattagtagtgctgtggctggggaagatgaccaagatcagctgcttctctgctcttctcgccggcaagaggaagttatcaaaggttacgagcaagattggttacggcaagaagtctggtggcaatgagttccagaaggtgaaaccggtggagttcatggaggggacggacaccgtcgacatcgtgaaaggcggtggtgacattgtcctggcatgtgacacaaaggttgtcgctttcaacgccgctgagttggcttgtgaaggccgcgacaaggacgatgacatggtctcggtgaagagggacacatctgacgtcgacctcgtcgccggcggcgacgcagactcttccggctacaatagcgacgccgccgacaaggatgctagcagcgccgccgcagcaccggacgctagcgagcccggggttggcctcatggtgccggccatggcatcgaggctggaacgctcgtgctccaacatcgagacggcgaggcgtggctcgaaagcgttcgaacttccggcgaagtcgctctcctacggcgacctcatggccttgcctgccggtggctcagccacagccaccccagtcggcgcgcccgacgacagcccagccgcgtccgtgaagacgacgtgcagcgccgaccacgtcatgctgaagaagtgttcgtccagccaggtgctcccgtcccggagccggaagctgtggtggaggctgctcctgcgaagccaccggaacctgcaccggccggcggcgaccgtaccagcagcggtgccgtcggcggagcagcggcacgacgggtacgcgtccgacacgctcgacgcgggcgccgccacggccgacgtcaagaacaaggggatcgccgtaggccacgagcccatcccgaaccaatggatggcgttctcgtcggaggccacgtcgctggaccgggtcagcgcgtgggtgaacagcctcgtggacaacccgttcaaagccaacgaggaatgcatcgtggagcacgacgacgatgacgacgacacggctcgcccgcattgcacggagatcggggagccctcgtcgttcggcggcaagttccccgcccaagcgcggcggcgcatggccggcgaggccatcaaggcgaacagcatcatacaaacgctcaccacgtcctcgtccgtggcgcacatatcggggatggggctcactgtcatcccggtgatctcgccgttctccagcctccgggcagtcaatctgtccggcaacctcatcgttcaaatatcatctggatcattgcctaagggattgcactcactcgatctgtcgaggaacaagatatctgtcatcgaggggctgcgcgaactgacgaggttgcgcgtgctcaacctcagctacaacaagatttcacggattggtcacgggctgtcgaactgtggggcgatcagggagctgtacctcgccgggaacaagatcagcgacgtggaggggctgcaccggctgctgaagctggcggtggtggacctgagcttcaacaagatcaccacgacgaaggcgctggggcagctcgtcgccaactacagctcgctgagggctctcaacctcgtcggcaacccggtgcagacaaacatcggcgacgacgcgctccgcaagtcggcgtcgggcctcctgtcgcggctcgagtacctgaacaagcagcccgtgaggccgcagcgcgcgcgggaggcggccaaggacagcgtcgccaaggcggcgctcgggaacggagggtggagctcgcgcaggcggccgacgccgtcgtcgcggcggctgagccagagccccggctcgtcggtgaagaaccgggggagggataatgggagcggcagccataggggcagcaggagcaggtccaagagcaggcctcaccagggcttcagccttgcaaggaagtgaagcaatttgctaggcaattaggcatatgatgctctactgcattggaggaaaatttcaaatgtgatgtgcttaatctttgaaactgccatgcgccatgctgtaggatcaaataatgcacaatcatcctcgtttatttggtgcgcactccaatccaagcgtttcctgaaactttgttatctgaaatggaagaacagagcacaagtggaggagctacat

SEQ ID NO: 51061 - DNA, 3192 bp, Oryza sativa
  Clone ID: PAT_MRT4530_5348C.1
atgacgagcgggaacaagttcaacaggattagtacacaatacattaggactgatcaaggcgtcatgagaggaaacgtcccgctacctcaagttgtaatttcatcaaaggaaaaggaggattattgcgtcagcgggctagggtttcggtggaccgggcgcacgggcgatggttcacgcgaacggacggccgagaacgatccatccaaaacggacggccgagatcgatcggtctacgaccggctcacggaagagggcgacgatgacgtcagcgatgacgtcaccaccggcggcggcggctcggcggctcgggcttgcatgctcgctggtgaacggcggcgcttcggcacgaacggagagcaccaacgggtagagcgcgacgcggcgaactcaccggtgaccaaaggagcggcggaagaccaacggacggcgacggcgacgacgaagaaacggcggcggtcttcgggtcgacggcggcgatggtgctccggcgatcttcggcgacggcgaaggggcggacgaggacggagacgcgacggtgaccacgacggcggtcttcccgagcgacggcgacgtctggaacggcggcggcgcacagctggagcgacggcggcgacggcggcgctagggcacacggcgctagggcgcgtgccctatcctggccagatcgcgcctcctgtggccggtctgaccgcaccactgaccaccggtcagaccgggccatgggccggtcagaccggttccctgggagtttctccaggttttcataccacgactagcagtactgattttaattattattcatcacttgttaatactgttagtcatgctattccacatatccctaatgcctacaatgatattaatagggggtatcctcccgatactaggtatggccaatataacaatattgtgctgcaacaaccaccttttaggccaccaagtccaccaccagatccaccaaggcctgaaactgtggaggataggtttagaaataatatcatggagaatttcgcaaagctaaggaatcgtgctagggagaatcaaaagccgtatcctgatttgatttttatgacattatcccatatcctcgtggttataaaattcctgaatttaccaagtttagtggtgaggatagtaggaccacatgggagcatgtttagagatattaaaagccgatgtttcaatttgaaaataactgacaaagatttggccgacattacatatgatggattgcttgattctattaaagagaaattgaatggcccgatatttcttgatgttgatcatgtgttgcatgaagctctggctcaggaaagccgagtggatgataatagcttacaagctagtttagatgaaaatgcaatatcatgtatagccgaaccaagcgatggttcagattgtgctaataatttgtgcaatgatgccataatgagtatagccgaaccaaaagttggttcggattgtcttgctagtttggataataatgcaacaaccattatagccgaaccaagcgacggttcggattgtgttactagtttagacaacgatgggatagccgaaccaagtaatggtttagattgtgttgctagcttagagaataacatcattggaaatatagccgaactaagtgacggttcggattgtatcacaagtgaaagtgaaatagcattgtcacctaagactgaatcacaaatcggtcatgtggatgttggaaaagatgatgacaatgtcttgcgggatagtggtgaaatagaatccaaagtagctatgtatacttatcaaaggccatatcctgaacatgtagattcggtcccatacccgcaaggatttgaggtgcccaacttcacaaaattcacaggtgaggatgctagaacaacaatggagcatatcggtcaatttattgaacaatgtgatgcaagcttgatggagaaaagaccggttgatgattcatcggtcacttgtgaaacgatttcggttacacctatgcctaagaccggaattgttagtaatcctctccctattagtcctattgatgttgacaaaaagaaagggaaaagtgttattattggggatcctcggcccaagaataggatcaaaaatgcgaaggccgaagatcgtaaggttacaaaagatgagtcatctagttcccaaaagactaaaaagccgaagctcacttttgagatgcttatggctaaatacaagaaaggattagccgagtggaaggaatcacctaggtcagcatcaagtcattcatctaactcaagacaagaccgtttaccacaaaagaatcggtccggtggatcaaaggtcaaaaatgtgaaaaaggtgtgggtaaggaaagaagccaaagatccggaggtcgttgctatcaatgaggaatatcaagatgttcatgtacctactagagatgcagcaaaaactatacaagcggagaagactaaagccgacgtcgttgctgtcgacatcggcggtctgaccgagccagctggccggtctaaccgccagacaacggccggtatgaccgaccctcctggccggtctgaccgatggcttgcagctggtctgaccgggcccagaggccgatctgaacggggggcattggagaagagtgagaaaattgagagcaacacaggagcttccacttcgaccaaaaatatgaaaaatcattggttagctcctggaaaacaaccacagccgaagtggataccttatggcttatctcgctctcaaaagaggaggctacagcgtcttcgagccataggtcaaaaagaaaaagaggccgaagatgtagagaacaaaacatgtaataatttagagcctcgaacgacacctaagcgagtgtggagacctaaagaagtaaaagttaagagatcggtgatttcccaaagtagtgataaatccaatttgatgagagaagaatcatcggtcattagagataagtctccttcacatgatgctatggatgttagtacggtattcatcttgccttcgaaatcatgcaatcaagaaagccgattttgcttggggggcaagacattaatatgctcatcagggaaccaagagaagatgaacggcgatggatacaataccacatctttgagccgccgtttgttggatgctaaggcaagatatttgaaagatcctccacttaaggttgatcggaagattcggcgagggagtgaagcttgttaa

SEQ ID NO: 51062 - DNA, 1059 bp, Oryza sativa
  Clone ID: PAT_MRT4530_53490C.1
agcatgatgattacgtgacattatagaagagctatgacgtcgcatgcacgcgtcgtaagcttggatcctctagaagcggccgcggcgccgatgccggttgccggagcggggtggtgggatctcgtgaacggctcgacggcgtggcaggacgggatcttcctctccctcgccgctctctacggcctcgtcgccgcatcctccttcatccaagttgttaggatacagtacagagttcctgaatatggatggacaacacaaaaggtctttcaattacttaatttcattgtgaatggagcgaggtgttctatctttgcagtccgccgccaagtccaacaagtgaaccctgagatctttcagcatgttattcttgatcttccggggcttgcattcttcacaacgtatgcaatgttggcacttttctgggctgagatatcttatcaagcacgtggtctagagactgaagggcttagatcaggtttctacactattaatggtgtaatatatgtgatacaggttctgctgtgggcgttgttgtggcacaatccaaacccatctatgatagtcctttcgaagttgttcattgcaggcctatccttttctgcagccttgggttttctgctatatggagggaggcttttcttcatgctgaagcgttttcctattgagtcaaaagggaggcagaaaaaactgagggaagttgggagagttgccactatatgcttcctttgtttcttggcacgatgcattatgatgtgctttgatgcatttgacaaaaaagctgaccttgatgtgcttgaccatccaattcttaatttcatctattacctgatcgttgaaattcttccttcatctcttgtcctgtttattctgaggagaatcccttcgaagctacggctcgcccagtatcatcccctcaacagtggctaggggatgaaaacggatgaaaacatgaaagctaaaaatatggagaggcctgcaaagtgacacggctgcaagcccaggacatgaaaaaaaaggatgacccatggtctaaaatctctaacccttgttcaaaatgtg

SEQ ID NO: 51063 - DNA, 635 bp, Oryza sativa
  unsure (1)..(635): unsure at all n locations
  Clone ID: PAT_MRT4530_53491C.1
tcccggggtggtagggatnatctgcctcgaagagattggttacntgtgatacaaccaatgaccattccaagagtacaatctgcccagcaagtctttgcttgttaccttgttgcacctcccgccttgntcctgaagttcatngcttatgcttgnctggaagagttagtcctttctgattatgttggcgaccagtggatggcagctatgnatatgattgcaatgcaaggattggagcccagagaaatctgctgctcccggattgagctagcagctgagtcagttagtgtagtgttgccaattaagatgcccaatggtaccccttcgttggagtagctacccgccagtatgtacagatctgtgcctcagacgtctgtcatngactcattgtgtgtattgtatcttaaggtctagctcattatgctttagtgaacacataacttgatatgcttatgaagctctgtttggacaagggtccatctgaggagagagcttgttgtgaattggtaagaatattggtggaagacaactgttctgaccgaagaaaatcgtcatgagatgtctcctcctttctgtaattcagtagtcagtaaattcagctcccaatagagttgctccaaaaaaaaaaaaaaaaaaaa

SEQ ID NO: 51064 - DNA, 1014 bp, Oryza sativa
  unsure (1)..(1014): unsure at all n locations
  Clone ID: PAT_MRT4530_53492C.1
atagcaaattggaggaatcatcccattaaaaacaatangaggaatggcccaggcaacanttgctaacatctaaatcttttttttttctctgattcttgtgacagagctgagtcacatttttctatttgccggaacaagtttgacaagctttgccaaatcataagacttgaaatctcttccaaaacacaagcttatatccaaggcagtccttccatccttggttcttctcgtcttatctgcaccattgacaagcaatatctttgctatatctctatttctactctgtatagctaaatgcaacggtgtccagccatcattatcagcaacattgacatcaaccctattcttaatcagtaacttcacagtttgcagggcaccaacttgaactgcataatgtaatggtgtggctccatccctatctctgacatgaggatttgcccctcttcgcaggagatggctaatgacggcctcctttttgcctatgacagccttgtgaagtggggtgaaaccatctttgtcaagtaaattgatatcgacaccactatcgagcaggctgtccatgagaggtatctgcagcgccaatgcgtaactatgaagtggatgccatttcggtgatgatattttggtgatatccggggtctcgttctgatccaggatagccatttcttcaggcgtcaagagaagctcgatttctcctcgaagctcctcttcttctcgctgctcttgccgccgcgcggcgccgagcctggagaacagcgagggggaagggaacgaggagaagctgctcctccgcccggtggcctcctgccgctcggcctcggcctctgccccatccccatcctcgtcgtcgctcccggagccgccgtcgtccggctcctcccagaacacgtcgccgtgggaagggcgcgcggcgcgcggcgccgccccggggccaaccgagagaagcggcggcggaggaggggaagggtggtgcgggggcggtgggaggcgcggagagcgcgcgcgccggggcat

SEQ ID NO: 51065 - DNA, 992 bp, Oryza sativa
  Clone ID: PAT_MRT4530_53493C.1
tatgtaattttagaatctacatatgtaatttcgagatttacattataaatacactaaaattacatatgtattttaggaagttacaatgtaaatacatgccgactattttttagtgaaaaatatggcgccataaatataactacacccaaaaaaaacaccttattattaccccttctaatttccaccaataaattatcctttcatagctgattattacaccttaaattaatttctaaacaaatgcctcctttctttaattagaggcaaacccatccgaattacaagataaattaattaattttagttacgcaacaacaacttataataaatcatcggaaagaatcaattgcagcactaatccattcccggacgcgtgggtttaatcggcttctcatgtcgttcatgcgtcgaagctgatctcccactcgtcgtcttcctccccgaccttgaggaaatgcgatcctcggtcgatcaccttcgtgccgtcgtccctcgcccggctcaggtgctcgcacgggttgatctccatcgtcaacctcgccttctcccccgccctgacatgctgactgctgaacccgaccagctgcctcgccggccggctcgcccccgccgtcgcgttcggccactggacgaacaccagcaccgagtgcttgccgtccatgcccccgtggttgtgcacctccacggtggccgggaacttgagccgctcgcacccctcctcgccgatctcctccacgtggtagctctcgccgccgtcgccagccggcttcgggatcacgccgccgaggaggtttcggttgggacgacgtggtttcgcggcggcgacgaggcggcgggtgaatttggagtagctgaggccgtagccgaacttgtagacggggttgccttggtagaagcggtagctccggccggggtagccggtggccgggtccccgcgcatcacgcatgtcggtcatggggatcctggtgaactcctccagggtaccatgtca

SEQ ID NO: 51066 - DNA, 210 bp, Oryza sativa
  Clone ID: PAT_MRT4530_53494C.1
atggcgaccacgaccatcctgtgcgtgctgtgcttcaccgactcgctggcctacctcagattccatgggaacgacggatccgccctggctgcggcgcggggagcacggccctggggcctcgggcggtggagcgtgactatcggcctcgacctcgtcacgacggacgccaccgggccgcgggcggtgggtgatggtttgggtcctacatga

SEQ ID NO: 51067 - DNA, 855 bp, Oryza sativa
  Clone ID: PAT_MRT4530_53495C.1
gaaaaataaaacttcggcgaggaggcaaaacaaatcaagccaagataacgcggaagagaacgagaatatcacggctattaagacctcggaatccacgggtgatgaagaccaaatcctcgagcgttctcagcaactccttcccaatcctcctcctcatcttcctcgcggcggcagcatccgttccccagatcgccatgtcggccgagcagccggagcaggcggcccccgcggcgcaggaggcgaccgtgcagatcgtctacctggaccgccccgcggacgccgaccccgaggagttccacatccgcaccctcgcccccgtcctcggcagcgaggagaaggcaaaggaggcggtgctctaccactacaagcacgccgcaagcggtttctctgcaaaacttactccccagcaggtcgaggagctcaagaagcaaccaggtgttcttcaggttgtaccaagccagacataccagctccatggacccggggctggcactggcacaatgaacacctttagtcttgtgtagtgtaccggcctagctgataaggtagtgtaatgcaagtgtttctggtgtgtgcatctcatggcatggttgtaatactatatggtagtaacaataagagatgcaacacctgtacatccccagtggatacaatgatcttttagcttgtatcctaagtttgtaatgagtattaaaaaaaaggctgtaatgcactaatgtataacaagatcatttgatactatatataactatgtgttgatctaaaaaaaaaaaaaaaaaaaaaaaaaaaaaaaaaaaaaaaaaaaaaaaaaaaaaaaaaaaaaaaaaaaaaaaaaaaaaaaaaaaaaaaaaacac

SEQ ID NO: 51068 - DNA, 590 bp, Oryza sativa
  Clone ID: PAT_MRT4530_53496C.1
atgttgttgcagtcggaggcgacgttgctcgagctgctccggcgtctgcagcagctggagctcacggtggacaccttgacggttactgagattgggaaagcggtgagcagctaccggaagcacaactccaagcagattcgtcaccttgttcaattgctcatcgatgcattggatggaattgttactttgtggcaagtgcagccaaaaggaccagccatctccttgcttagcacaacagattgcttttctcctaagcataggtggcctgaagatgtagcttggcatccagatggtgaattaatttttgcaatgtacagtgctgataacggcgactctcaagtttcactgatgaatcatagcatatcaggacaagtaagaactctgctagaagtagcacacttcttcacatccattgcaaggttttctccatgtgtcgagaatgctcattagttgttataatccaattaaattggttccatcaatagtatagttgcatgaagtactatcagcttagcttaacttgactgtgcaaattgatcaagaaaatataacgacacctgaatgttttttcctggtgacattctatctgc

SEQ ID NO: 51069 - DNA, 279 bp, Oryza sativa
  Clone ID: PAT_MRT4530_53497C.1
atggcaagaaggaaaaatagaaaatgcaatgcaagcatactgatcttagctaagccaaacaggttggaaacatatacagcaagcagggcctacttgattgtgaaaggaaaagattttcaatggagagttgagcacatgtggttggactttgatttggcaattgggaacaatgtaataactgatactacattgctgattgttgctggcgatacaagacaatggagtgtactcacctgtgacctacctgcctctgcaagtctgcatgacgggttcacctaa

SEQ ID NO: 51070 - DNA, 1065 bp, Oryza sativa
  Clone ID: PAT_MRT4530_53498C.1
atggcgtccgagctgcgcgccctcgccgcggtctcggccgccgcggccgcggccatggcgtacgcgcgcttcgccaccgcgcgcctggccccgggcgtcccgcgcctcgccgcgctcctcccggtgctcgccctcctcccgttcctccccttcgccttcgcctccatccacctccgcaccatctccgccttctccctcgtctggctctgcgccttcaagctcctcctcctcgccgcgggacgcgggccgctccacccgtcgctcccgctcgtccgcttcgccgcctgcgccgcgctgcccatcaaggtcgtggacgacgagaagcggaaacccaccacctccacctcctcctcctcccggcgtctcgctccggcgttcgtgctgtcctacgcggccaaggcggccgtcttcgcggcgctcgtctcggccaggtgctaccgggaggggatgccggcgtacgcggtggtggcgttcgacggcgcgcacgtctacctgatgctggagctcttcctggcgtccgccgcggcggccgcgcgcgtggtgctcggcgcggagctggagccgcagttcgaccggccctacctcgccacgtcgctcgccgacttctgggggcggaggtggaacctcatggtccccgccgtgctccgcccgagcgtgtacctccccgtgcgcgcccgccacggcgccgcggcgggcgtggccgcggcgttcctcgtgtcggggctcatgcacgaggtgctgttctactacatcaccctcgacccgggctgcaccacgggcgaggtgaccgcgttcttcgcgctccacggcgcgtgcgtggtggcggagcggtggtggctggaagaagctcgtcgtcgcgcgtggaggtggagggcgccgcggcgggcggtggcgacggcgatgacgctggcgttcgtgacggggacggggtcgtggctgttcttcgcgccggtgacgcggagcgggctggacaaggccatcgtggcggagtgcgaggggttcatggccttcttggaagaggccgggtggaaggcggccgccgcggcccgtttgcttccgtcgtga

SEQ ID NO: 51071 - DNA, 369 bp, Oryza sativa
  Clone ID: PAT_MRT4530_53499C.1
tttaataattttttttttttttttttttttttttgagtgtttttttttttttttttgcggcccatcccaaagggagctaaaattatgatcttaatgcaatttttataaacgatcaaagaatgaaacactggtggaacacatggaaattgtttacataacgttacaacaggggatttatatagacagatacaatgtcttgcactaaaaactgacaatggggacaatggaaccacaacatagaattatcccctactgtattggaaggtttaattactgcaaaatttgaccttcatggtataaccgcatgatacactttcgtggagtgaacatgcccatttttgaaatttcctccaaaacccagggttgggg

SEQ ID NO: 51072 - DNA, 2217 bp, Oryza sativa
  Clone ID: PAT_MRT4530_5349C.1
atgacgaagccatcatccaagacggaggtggagccatctcatgtgataccggtcacattggatgactttgaaggtgaggatcgtaaagctatggaggagtacatcaacgagctcacacgtcccaagctcgctcccgacgtggtaagtaatgacgaggtatcgcaatctatcaaccaacaaattgcatctacaatagattcatctatgactaattttaaagatagattagatgtaatgtttaaggaaaaggttgatgggtttttaaggaataggctaggttctcttatggatgattatatattaaaagataaagcctataccactgttgatcaatctcctatagatccaatagggtctaataccgacggggcggcgttcacggccggtccgaccgggcctaacggccggtccgaccacgacacagccgtcggtccgaccggccagatggccggtccgaccgggtattatcccgtcggtccgaccggccagatggccggtcagaccggatattatcccaccggtcagaccggccctcaggccggtccgatcgcgcagcatgacgccggtctgaccggcccagcccgaacatttgatcctcctgtatctgctgccaccactaatcctcaaattcccccacatattcctaacgtttataatgatatttctaggggatatcctccggatactaggcaaagccaatataatcatattgcgccacaaactcaacctattaggccaccaaacccaccacaaaatccacaagggcctaataacatggaggatatgattagtgatattatgaggaatagattcggtatcaaaactaggaatcgtgctaaatcttacaaaaaaccatatcccgattattatgataatgtgccgtttcctagaaattatagagttcccgaatttgccaagtttagtggtgaggatgccgaaccaagtgatggtttggattgtgttactagtttagataatgatggaatagccgaaccaagtggtggttcggattgtgttgatagcttagagaatagcatcattgaagatatagccgaactagatgacggttcggattgtaccacaagcgaaagtgaaatagcattgtcacctaagatcgaatcacaaatcggtcatgtggatgttagaaaagatgatgacaatgtcttgcgggatagtggtgcaatagaatccaaagtagttatgcatacatatcaaaggccgtatcctgaatatgtagattcagtcccatacccgcaaggatttgaggtgcccaacttcacgaaattcataggtgagaatgctatgactacaatggagcatatcggccgctttattgatcaatgtggtaaggacggtagcgatgatttgcttaagttgaagttgtttcccctttctttgcaaagctttgcatctacatggtatagtttacttgctcctaattcaatttctacgtggtcacaaatggagcatgagtttcatggttatttgaaagatgcaagcttgatggagcaaacaccgattgatacttcatcggtcacttgtgaaactatttcagtttcatctatgcctaagaccggaattgttagtgatcctctccctgttagtcctattgatgtagacaaaaagaaagggaaaagttttattattggggatcttcggcccaagaataggataaaaaatgcgaaggccgaagatcataaagttgtaaaggatgggtcatctaattcccaaaagaccaaaaagccgaagctcacttttgagatgcttatggctaaggacaagaaaggattagccggtcaacgatttgataatcaaactagtgattcaaaacaaccaagatcatctcgtaggaagagatttggtcaaacatcaaagcaatcggagccatcaaccataccaactccatacaaacttccgtttaatcggtccggtaaatcaaaggtgaaaaatgtgaagaaggtgtgggtgaggaaagaagccaaagctccggaggtcgttgctatcaatgaggaatctcaagatgttcatgtacctactggagatgcggcgaaaactatgcaagcggagaagattgaagccgatgccgtgactgtcaacattggaggtccaaccgagacagctgaccggtctaaccgccagtctacggccggtctaaccgaccctcctggccggtctgaccgatggcttgtggccagtcggaccgggcccagagactag

SEQ ID NO: 51073 - DNA, 804 bp, Oryza sativa
  Clone ID: PAT_MRT4530_534C.1
ccatctccgaattccttccccccgccgctcgccggagcggggaacgtggtgtttccggcggcggtttaccccaatcgggagtcctcccccaatccgggtggacttcgagtttcgagtcggaatctcgcaagaacagtccgtcccggactcctcccccccatcggatcggccagaaaaatccatcggagtcagttccttcccccccgtgcgaatctgacgggggcgcaactcgtcccggatttctccctgttccccccccccctccggcgatggccgcggtcgccgccgagcagaagaaagtcgtggtgcacttccggtcgacgggcaacgcgccgcagctgaagcagtccaagttcaagattggtggaaacgagaaatttctgaagatcattgactttcttcgccgacaaattcaccaggatacagtgtttctctatgtgaacagtgcattttcaccaaatccagatgagttgataatcgacctatacaataactttggaatcgacgggcaactggtggttaactatgcatcatcgatggcatggggctgaaaggctgtacctgctggagagaggaaacttcaatcaacatggaaaaacctgtgtacaaaatttacttgccgaaacactcatcatgtaaattgctgagaatttaacttcaaagcgaagctctttcgaattattattcggtacacgttgatgtcagtagcagcagctgcaattttcacggggctttcagccccactgtaaaactgagacatccttcattaaacgccccagtgcttcagacaaaaaaaaaaaaaaa

SEQ ID NO: 51074 - DNA, 1291 bp, Oryza sativa
  Clone ID: PAT_MRT4530_53500C.1
gcaaaacgcgacgccccccgcaactcgggagggttggattcagactcttgatgttcggcaaatgtagcaaaggtgttctttttatgccgatgatgttattatgttttcaagaccaacggtgaatgatctctccattatcaagaatgttttggatatttttgtccatgcattgggcctaatgaccaacatgcaaaagagctcaataactccaattaggtgcaatgaagaagagttggaagtgatcgtgaatgtgttaccgtgtgagatcaaggattttccttgttcctatttgggtcttcctttaaatgttaagaaactgtctaagaccgacttgcatgctttggttgacaaggtagcggatgatctccccatgtggaaagcttccctcatgaatcggatcggtcgtctcatctcggtgcgggttgttctattcgccattcctatatatcttatgattgctatggatctaccaaagtgggttgcaaaagcaattgacaaaagaaggagggggtttctttggtcaggacaagaaaacaccaatggtggtaattgcttaatggcctaggatagagtgcgccgacctctagcttatggtggccttagtattcttaatttggaatatatgagttgggccctttggattggttggttatggctccaaaagatagacaatagtcgtgtttggcaaggattgctcgtccaagttccccgtgtttctcatgacctttttagttcggcggtgttgtcgcaaattgggaatgggcaatctaatttgttttgggtggacagatgggtgcatggaagaattattttggaaatggcccctaacttatgtgaattgaaaaggataatcaagcattgtacagtggctcaagcattggacaactaaaagtggatcatggacattagaggacctttgacggtgcaggtgcttgcagaatacatcaggatttgggaagcagtccatgagggtggtgctgcaagaaggaattctagaccagcactattggaagttctcaaagtcaggagtttacacttccaaatccgcatatgagaccttcttcatgggggcagtcaagtttgctccttggagaaggatttggaagagttgggcacatcttaaatgcaagtttcttcggtggctggcaatacacaactgttgttggacggctgatcatcttgccaagcgttacttgcctcatccagccgcttgcccctttgtgatcaagccaaggagacaatgcaacacattttggtttcttgtgttttcagcagacaaggtttgtcacta

SEQ ID NO: 51075 - DNA, 154 bp, Oryza sativa
  Clone ID: PAT_MRT4530_53501C.1
atgaagaaaaactcactcctaagcaagctcaaggataaaggggcccacatgtcaggtgcaaccatcctagataccgccataactatcataaacgccatgaggacttacctgtcaacccctctaccaaatctggaggtctactgggccggcccag

SEQ ID NO: 51076 - DNA, 465 bp, Oryza sativa
  Clone ID: PAT_MRT4530_53502C.1
ggagaaggaactcacctttgggggaggggttttaaggccaaaaaaagaaaagtaatttcgtttttggggggggcttggatggacaggtttttttttggaaaaaaaaacagggccggaggaaaaaaaaaaaggggggaaaataccaaaaggggcaaaaataccccccagggtttagtctaaaaatagggtggggggcacaaatttcccaaaaaaaaaggtgaaatttttgggtttttaaaagagaaaaaggggggctggggttttgaaaaaagattttttgattttttgggaaaaacgggggggggaacaccttgggaggggtttctccgggcccccaaaacaccttttttccctcaaaattggcccaaaaggggatctccgggaaaaaaaaatttgaatggcccaaattggttgtgaaaaaaaccccggggtgtttggcaaaaattaggggaaaaaaaagggggg

SEQ ID NO: 51077 - DNA, 366 bp, Oryza sativa
  Clone ID: PAT_MRT4530_53503C.1
atggcggctagcccttctcgccgtcgcttgtggcagctgcggtgggacctacaagcactgggcaggccgcctcaaggagatgtaggaatcgaggtcgccgcaagcaaaggggagcgagaagggcgaatagggcagcgggcagcggaggacctcttcgtcaaccagtactccctcatgtccgacggctaccggagcctcaacgacaacaacatgtcgagttatctgtcggatccggcaacgacggccgcaccaaggccgtggaagtcaccgagccaggcggcggcgcgctcaccggcgaatcccgtcccagcggcaatggggattgcagctaggttgggggtgaccacggctacggaggcagcatag

SEQ ID NO: 51078 - DNA, 2687 bp, Oryza sativa
  Clone ID: PAT_MRT4530_53504C.1
aatgacaaaacgattgtccttatcctgaaaatagagaatccagtggagttgaaggatttttgacctattagtttgtgcaatataatttataagaatgtttctaagtgcttggtgaataggttgagacctatactggatgacctcataccccaaagccaaagtgcctttgttcctggccgcttgataaccgacaacaccctcatagcttttgaatgcttccattttatccagaaaaataaacaaccacagaaggttgcttgtgcttacaagcttgatttgtccaaggcgtacgatcgagttgattggtgttttttggagcaatcaatggtcagactagggttctctcattgttgggttagctggttcatgaattacataaccacagtgagatactcagttaaattcaatggaactcttctgtctacctttgctcctacacgcagtctatggcagggtgacccactgtctcccttcctcttcttgtttgtagccgatggtctctccttattgctagacaaaaaggttcataacggtgatctttcccctatgcacatctgcagacaagccccgagtatctcccatttgttgtttgctgaagataccctattgttcttcaaggcaaataaccagcaagatttggtgattaaggaagttcttgaaaactatgctcagagtactagccagttgattaatccagtgaaatgttcaatgatgtttgggccttcatcccctactgcagtttgtgaatctatcagaagtattttgcaggttgcacaccctagttttgaggcttgggtttccgacttctgaaggcaggctaaaaaaaggcaggttccaaagtatgcaggccaggatctggaaaagattgatacaataggcagataatttcttatctagtggaggtaaggagatacttatcgaggttgttatccaaacaattccggtttatgtcatgggtctttttaagttacctgagtcggtatctgaggatttaacaaggttaactcggaatttttggtggggagctgaaaataacaaaaggaaaactcattggaaatcttgggacgactgtctaacaaaaccgaagagctttggggggctaggatttagagattttaaaatctttaatcaagccctacttgcaagataggcttggcgtctccttatgaatcctcatagtttgtgagcaagagtactcaaagcaaggtactatcctactggttccctaattgatacatgttttggaggcaatgcatcccctaggtggcgagcgattgagtacggtttggagttattgaagaagggtatcatttggagaggttggaatgggagatcaatctaggtttggcgtgactactagattcctagagattactctaggaagccaattacgaagagaggcaattgcagactaaaatgggtttcaaattttaccactgagaatggtgcctgggaccttaataggttaaactgacatttctggccagttgacgctaatatcattgctggaatattcgtatttcctctcatgtagaggaggactgtgttgcttggtatctagataaaaatggcatctttttggtcaggagtgcgtatatgctaggtttggatctttcacatgtgaactcaagctctagttcctcacctcttcgaatgaagaaatcttggaatctgatttggaattgtaatgtcccccaaaagtcaagaattttgcatggagggcagattctaattgtcttgctactatggacaaataagtataaacgaaaaatggaagcttcggcttcctgcacctatgtggtttagaggtagaagacactattcatgccctgtgtcgctgtccattagcaggatatctctggcttgcaatgaaagacttagggagtatgcgttggccctgcataatctgagagcagggtcgtcctagattttcgatcatctggagccgcttcctgaacctcaacgagcgatgtttctgatgatcttgtggagaaattggtatgttcaaatgaggtaattcacagcaaaccggcaccaccagtagaggcatcaaagaggtttttccaaagctatgtacatacactgttggagatccgacaacacgatgtgatcaatctggagaagggaaagcatgttgtcagtgttaaccttagctccagcgtgtcggctaaaaaaaaaacatgcagttgtcaatcagagatgggaacctcctcaatcgggatggatatatgaaattaaacgtcgatggctcctttgatgtggacatgaaaaacggtggcacgggtgctattttgagagattgttcagggaaaattatagccgcctcgtgctctcacctgcacagctgcggcagtgctctgaagcataacttcaggcaatcaaagaggggtgcttgctggctctaatggaccctcttcccgattgtaatagagaccgactgtatggtggtactgcatttgatccagtcgaaggagaagaatttgtcggaactggcttttctagtcaaggagatgagtgacctcttgactggtaacagggaattcttgctcaggaagatccatcgaaatcaaaattatactggtaatgttttagcaaataaagctcggtgtgatgtcttataaaaaatttggttagagcgtgagtttgatgatatatcacatattgtaatgaatgattatattcctgag

SEQ ID NO: 51079 - DNA, 855 bp, Oryza sativa
  Clone ID: PAT_MRT4530_53505C.1
cgcttgagcaagtatttggcagtttgctgccaactgctaccctatttcgcagtttgctgcaaactgctcaccctatttcaaatctaggtaagatctagctgcaggttatacagagaaggcacggtccggcctcctctgtgaccatcttcgttgctgctgctcgtagctagccaagctctagtagtctctggcgagtcatcttcctccgcgatgcagtccaagacgttgaacatgaacaagcttctcaacatcagtgaagatcactctcctaatggcggacgccactggatgcagcggatgcagccggacagctgctcggagcagaacgtggtggtgtaccagaacaacgcggagcacctccccagcggcatcccgacctacagcgtggaaatcatcaacgtctgcacggcgtgcacggtgtacgacgtccacatctcctgcggcgagtttgcctccgcggagctcgtcgaccccagccagttccagcgtatcggcttcaacgactgtctggtgaagggcggaggccggttgggtcctagcgaggccgtctccttccagtactccaactccttcgcctacccgctcgccgtagctaatgtcgcgtgtgagtaggttttttcagtggaaatgcgtgcgcatgtgttgtacgtagtcgactggcctattagctacgtactgtcttcgatgtttcagacattcagttgatcgagcttatttatctatgggtgacatgcttcgactttaaaaaaaaaaaaaaaaaaaaaaaaaaaaaaaaaaaaaaaaaaaaaaaaaaaaaaaaaaaaaaaatcaggttttcattattccaaaaaaaaaaaaaaaaaaaaaaaaaaaaaa

SEQ ID NO: 51080 - DNA, 459 bp, Oryza sativa
  Clone ID: PAT_MRT4530_53506C.1
atggcaatcctcttgacagctgtagcaggtggggtcttcttgctcatgagattaccaagtggtgatttgccgatgggcctccggattggagcaatacgaggcttgaaacgattgccggtgaacaatgcggcctttgacggtgcccttgacaactatccgttgaggcggaggttgcaccttcagctgtcgtttggtgttgaggatagtgctgagaaccgctctcctgattcatcatcttcgggtctgggcggaccgtactttatgagatgccgggtgccgatattgggaactcctgactctgactctgattcaggttccgggttggcacctggacttgcatttgtggctggtggccttgacgcggctcctgacattgccgttgcatctgctgcatctggtatatctggtaccgacgtcgcatctgtcgcaacaattcttccactgtctgagtctgattag

SEQ ID NO: 51081 - DNA, 1569 bp, Oryza sativa
  Clone ID: PAT_MRT4530_53507C.1
atggacgacaagctgctgcagctgctgctgctggctctggccgtgtccgtcgtctccatcgtgaccatctccaagctggtatatcgtgcaaccaacaagccgaggctgaacctgccgccggggccatggacgctgccggtgatcggcagcctccaccacctcgtgatgaggagccccagcatccaccgctcgatgcgggcgctagccgagaagcacggcccgctcatgcaggtgtggctcggcgaggtgcccgcggtggtcgtgtcatcgacggaggcggcggaggaggtcctcaagaaccaggacgccaggttcgccgaccggttcatcaccaccacgctcggggccatcaccttcggcggcggcgacctcgccttcgccccctacggcgagcggtggcgccacctcaagatgctctgcacgcagcagctgctgaccgccgcgcgggtgaggtcattccggcggatccgcgaggaggaggtggcgcgcctggtccgggacctcgccgcgtccgccgccggcggcggcgaggtcgccgtgaacctcagcgagagggtcgccaggctcgtcaacgacatcatggtgaggtgctgcgtcggtggccggagcaagcaccgcgacgagttcctcggcgcgctctgcaccgccctgagccagacgtcgtggctcaccgtcgccgacctcttcccgtcgagcaggctcgcgcggatgctcggcacggcgccgcgcagggcgctcgccagccggaagaagatggagcttatcttggagcagatcatacaagaacgagaggagatgacgacggacaggagcggcgatggcgaggcggggcccacaaacgagtgcttcctcgacgtcctgctcaggcttcagaaggagggggacacaccaatcccaattaccatggaactcatcgtcatgcttttatttgacatagtttcggggggcacagagacatcaactatcgtactaaattggactatggcagaactcattcgtacaccaagagtaatgactaaggcacatgctgaggtgcggcaaactttccaagcaaaaagcaccatcacagaggatgatgatattagtgggttaacctatctcaagatggtgattaaggagtcattgaggatgcactgcccggtgccccttttaggccctcgtcgatgtcgtgagacatgcaaggtaatgggctatgacatattgaaggacacaactgtatttgtgaacgcatgggcaatgtgcaggagctcaatatactggaatgatgccgaggagtttaagcctgagaggtttgaaaacaaatgcatagactataaagggagcaattttgaattcattccatttggatctggccgtagaatgtgtgcaggcatgaatcttggcatggcagatgtagagtttcccttggcaagccttctttaccatttcgattggaagttgcccgatggaatgtctcctgaagatattgacatgcaggaggcacctggactatttggaggtagacgcactagcctaattctatgccctattacgcgtgttgctccaagcgacctacaagtgatagtataa

SEQ ID NO: 51082 - DNA, 399 bp, Oryza sativa
  Clone ID: PAT_MRT4530_53508C.1
atggcggcggcggcggcgccgtcgtcgccggcggcggccgacccgacggacggcttcacggcggtgaggctgggcgagaggaacttccagctgcagtggccgtacgacgtgaagaacagctcgaggtacagcttcgacggaacggtgaggcggctgtgggtcttctccgacgacaagccccacacgccgcggagcaaaaccaaaccaaggacggagatcaggatgacgaagctatctgcgcgtcggctgctgcgtggggtctatcagatcatgcggggcgtccttgtcattcgccgtttaatggttgaggacttccaggttcctgttcacaccaggaaacagatacccgggtcagttcagagtggttggaccagctctgaccgggataagaggctgtga

SEQ ID NO: 51083 - DNA, 234 bp, Oryza sativa
  Clone ID: PAT_MRT4530_53509C.1
atggccgcccgccccccggacccggagctcatcgagttttattttttgaaagtccggcagggggatcctatatctccgatgatcttcatccttgccatggattctctgaactcccttttcgtcaaagcggaagagttggggctcctccaaccattggggatcccccaccgggtctccctctacgccgacgatgtggtcgccttcgtcaagccgacagtcggtgagctgcagtaa

SEQ ID NO: 51084 - DNA, 2221 bp, Oryza sativa
  unsure (1)..(2221): unsure at all n locations
  Clone ID: PAT_MRT4530_5350C.1
aaaaaaatggattcatattttacagagaccggaattaattacaaacgaaatttatacattatgtccatgaaaatatacctaccaagagaccaggaagttttagagtaaaggtgcataaattgaaactggaacgacttatgatactgctggaattcttcaccaaaaaaccttgggaactcgattccactgaatctccaaacagctccaaggtacaactcaagccatccatgttacaagtatccatagatcaccaaaggaaagaaaaaagaagagagaaaaaatacttaaaatactatacaaccaagacccaaataatagaccaccgatattgtacttagccataatcacaccctgcatttgcacatctttcaactctaacatcccacgaaataaatccaaagattttgacaggcattttctttctaggagtagctgccagaacaaagctaagctcagactggtattacatcgatgttcgatgtatcttcgcatcttaagactagcccatcaaggctagtagggaggatgcacttggcccactggcagccagtggagatgggttccgatggaggaacaatcatcaacacgttgtcgttcctttgaacaacccccataacactcaccgtgctgccctccttaatgtatccttctttcaggcgcattatccgatcatcacttgatagattcctttcacgcagccatctcaagaactcgggagacatgtccttgttatctgggtttatgtcaataacaacagattcatcaacataaggggttacccgtgctccatatcctgttttgaccaatgctcgtagtccagattggaaatcagagatgtagaaatcaacagcatgtctctccattgacctaagaccccaagtaaattggcggtgctcagtgttagcagctttcgaatcccagcccctgtactcatacaagcaagttgaagtgtacacacatcttgggaccctttgaaatgaggactcgagaggaaaatttccacatgtaacaaccccagtaactttcacatactgtccatcttttgctgttctgagatcagcatcaggatagcgactgacgaacccagtcacacctcttgttccccagcaaatgttccaaatcacaagagcagcaacaaagcaaaatatgaccaccacaactaccagcagaatagggttatgaacagctccaagaatgaaaccacctgctatgaaccccatcaaaaagagcagaataaccatccagagtattgtcttaggaatgctgcccttaatagagtaaccatcatcggcattcaggtttgtaacagctgggttgtgagcaaaagaagttgcacgcatcttcattgatacactaggatcaagagggcctgatacttttcgtggagcaccagatgaattcagaggtccagaggagataggccctgatgtgatcagcccagttgtaggaagaacaggaggtaaaggaccagaattctgacgtgccattggggtcactccgcctgactggggaccagatgacttctttcctggttctccatgcttattgagaggtccagaatttgattttgcccttgctgatcctccagcaccaggaacagatgatgaaatagaaccagagtagttggaccgaccaagagcattagaaactggtccagagttggaaccagcaccaccaaatgaagtatttcttgaaggttgattacccaaaggaccagacttccgcgacttttcaacatggaggtcaaacattttccctagttctccagatttctttatgtcacccccagtgtatggcattgctgtggagcaaatgactggagccttctccttaggttgctctggtcggcccgagacataaaggccattgcttagttggtgggatggaaaccgtgaacccatgttctaaaccaacaaaggcaactacaccttcagagtgtaaccaagtaatgctgctgtgtattcaagcaagactgtcaaacttttaggcacatcatcaatatttgcagactcagacaacaccttgtatcagcaccttcgctcaaccgacgacgatgccgctggacgacggagatcaggggggcggggggaggtcgccggcgacgaggaggaggggaatgcggtggagatcggcggcgaggaggtgggtgggggtgggggggggangtgagcttccagatctaggaggaggagtcgaggcggcagcagcagcagcagcagca

SEQ ID NO: 51085 - DNA, 272 bp, Oryza sativa
  Clone ID: PAT_MRT4530_53510C.1
atggagatccaatatgagcttaattcggatagggatccaaataggagtcctatggaccttggaggcccgagtcatggatcctatatattcgtgaggggtgtgattggctaaggaatcgcatcggtgtgggaatacggcgagaagaatgcacgaggaggagaaggtcgagccggtgcgatcgactacttcctctacatcgacgcgcgctacttcgtgagagttcattcgacttcttagcgccttcttccgctgcgcagcgcgtcgagtggtaa

SEQ ID NO: 51086 - DNA, 227 bp, Oryza sativa
  Clone ID: PAT_MRT4530_53511C.1
atgagcccaaagaaaaaggaggtgtggaaaatgaagacccgtgtgtacaagcaacagaagaaggaggagtatctagttcgttacatcgtgcagaaaatgaccctgttcaatcgactgttacacctcaccgcgtcccatttaatgatacagtcccagagggatggggagagggggagggggcgtggcatggttgtagcagaggaggtggcgcggatgtgggcaagggg

SEQ ID NO: 51087 - DNA, 371 bp, Oryza sativa
  unsure (1)..(371): unsure at all n locations
  Clone ID: PAT_MRT4530_53512C.1
caggggggagacacgaaaccggaccccgcccccccccagagacgcaacaancgcacgcgacagcgacggccgggccaacgcaccnacccaaagacccggcacaccagcaccagcacaaacaaaagccgcgccggccgcagaggcacccagacccagacgggcaacagcaccaccccggagcagcgccccccccccaagcgaaaaaggcccaacccaagggcccagaggcagncgggaccccgacaacgaacaagaagaaagagaccaggaccaaggccccccacgcccanacacccccacgaagggaccgcgacgcaggaagaccngcagggagccgccaccaaccncncacacgcccacaaaggagaccc

SEQ ID NO: 51088 - DNA, 570 bp, Oryza sativa
  unsure (1)..(570): unsure at all n locations
  Clone ID: PAT_MRT4530_53513C.1
gggtgcaggattcggcacgagaattgctggcattatgttgttctatgcaatttattctcaactctcttttctagatcaagatcacttactggctctaatcaacctgagccatctaacatgttgtngccttgccatgtattggagataaaacacctaccgttgcaccaaaaaaggtgaagancaaaacaaagggaaagccatcncgttctggtactcctgatagcccagctatgtgcacaaggagcaaaaataagantcctgcnatgggcactaggancaaaanaaagcttatggactaaatcatatatntggcttgctgattaggttttattttggtactgccatttctcttgtggangctgctgggttttgttgttgtgatgccctgcaaagtgctctagtcatagttgatatctcatttcgctattgtaaggattgctttctcatgaaatgtccctgttatggacatactattatggaccttatgccattgtgctcctgatgtntggaatgaaaanttgatttggttcctgcactactgggtatggaaatggaattgtgtgtgcatga

SEQ ID NO: 51089 - DNA, 485 bp, Oryza sativa
  Clone ID: PAT_MRT4530_53514C.1
atgtttttaaccggaacgaaaaagatcaaaaagcaccaaaacatgatttttggacatattggtgttactgggtgcgttcgtggcaaaaactcacttcgcgactcgcgcggcgaacttttgtcaattaatgccgatattgccactcgtgggtgcgatgtttttagccggaatcaaaaagttcaaaaagcaccaaaacatgatttttggacatattggagtgtactgggtgcgttcgtggcaaaaactcacttcgcgactcgcgcggcgaacttttgtcaattaatgccgatattgccactcgtgggtgcgatgtttttagccggaatcaaaaagttcaaaaagcaccaaaacatgatttttggacatattggagtgtactgggtgcgttcatggcaaaaactcacttcgcgactcgcgcggcgatcttttgtcaattaatgccgatattgccactcgtgggtgcgttgtttttaactggaacgaaa

SEQ ID NO: 51090 - DNA, 486 bp, Oryza sativa
  Clone ID: PAT_MRT4530_53515C.1
atgtttttaaccggaacaaaaaagttcaaaaagcatcaaaacatgatttttggacatattggagtgtatttggtgcgttcgtggcaaaaactcacttcgcgactcgcgcggcgaacttttctcaattaatgccgatattgccacaccagggtgcgatgtttttaaccggaacgaaaaagttcaaaaagcaccaaaacatgacttttggacatattggtgtgtattgggtgcgttcgtggcaaaaactcacttcgcgactcgcgcggtgaacttttgtcaattgatgccgatattgccactcgtgggggcgttgtttttaaccggaatcaaaaagttcaaaaagcaccaaaacaggatttttggacatattggagtgtattgggtgcgttcgtgacaaaaactcacttcgcgactcgcgctatgaacttttctcaattaatgccgatattgccacacgtgagtgcgacgttatataccggaatcaaa

SEQ ID NO: 51091 - DNA, 777 bp, Oryza sativa
  Clone ID: PAT_MRT4530_53516C.1
caatatcggcattatttgacaaaagttcgcgaagtgaatttttgccacgaacgcacccaatacactccaatatgtcaaaaaatagtgttttggtgcttcttcaactttttgattccggtatataacatcgcacccacgtgtggcaatatcggcattaattgacaaaagttcgtcgcgcgagtagcgaagtgagtttttgccacgaatgcacccaatacactccaatatgtccaaaaatcatgttttggcgctttttgaactttttgattccggtatataacatcgcacccacgtgtggcaatatcggcattaattgacaaaagttcgccgcgcgagtcgcggagtgagtttttgccacgaacgcacccaatacactccaatatgtccaaaaatcatgttttggtggtttttgaactttttcgttccggttaaaaacaacgcacccacgtgtggcaatatcggcattaattgggaaaagtgagtttttgccacgaatgcacccaatacactccaatatgtccagaaatcttgtttaggtgctttttgaacattttgattccggtatattacatcgcacccacgtgtggcaatatcggcattaattgggaaaagtgagtttttgccacgaatgcacccaatacactccaatatgtccaaaagtcatgcttaggtgctttttgaacattttgattccggtatattacatcgcgcccacgtgtggcaatatcggcattaattggcaaaagtgagtttttgccacgaatacacccaatacac

SEQ ID NO: 51092 - DNA, 218 bp, Oryza sativa
  Clone ID: PAT_MRT4530_53517C.1
gccgccgggtcgcctcattccccacagccgccgcctccttcctctcctcgatctccctattcgtcgtagcctcctccctcgttcgctccgcccgcaaccatgtcggactactgcggcaagtaccacgactagctcatccagaacgctgcccacgttggaactcccggcaaggccatcctaggtagtgaatgatcgatagactacaagcatttgagcca

SEQ ID NO: 51093 - DNA, 1587 bp, Oryza sativa
  Clone ID: PAT_MRT4530_53518C.1
atggctgaacagttcaacagtgtgctagtaggtgttcgcaagctaccagtgacggccatagtatcgcttaccttcatgaagtgcaatgagttcttcgtgatcagacatgatgaagcagtgaaacgtgtccagtcaggggaacattggtctgcgaaggccgctaatagaatctgcaagcgcacggaagatatcgatgtagcaggaagtattccaagatggacgggggagggggggcaagagacgccgacttacccagcctttgaggagtactatgaggcccggcatcacggggctgcgattgagcgggggaagaggattgccagtgttcaatgctctgcacttgtagacagatggaggcctgagacacacagcttccaccttcccagtggtgagatgacgatcactttgcaagatgtcgctatgatcttggccctcccgatacgaggacacgcggtgatgggcaagtcagatacttttggatggcttgcacaggttgagcagttatttagcatgccactcactattgagcaggggcaagggattgagtaccacctcccgcaccgtgtcatgcgacagttcgggaagagacaagaattcccggttgagaacatctcaattagagtggacctagacaagtacgatagggttaaaacaaagaaggtcaaggattgggggttagagcatagtcgatacatcgatgattggatgatagcgggaaggaacgataggacctatagactatccctacgtccaacttgcatggaagctgacatagaggaagaccgtgattctgatgaggggcggaatccctacgacgttcggactaggaaagttcgtcaaaggtgccgcaaacttgctacaagactaggttacaagtcagttggattggacaaggggaggggaaagggaaaggtacatgctacacctagcgacgacgatgatgacgacgatgaggactgcatcgcaccagacgcaaaggagataggcatgttgcagctgtcgatgcacctcaaaccgcagcccaccagctacaacttacgatctactcggccagggaaaaaaagcgcgaccaccttggcaccgtgctggaaggggcgacgccagccagaaggggaggcagaaggactaggtggtcggggagaggaggggggcgccagccaccctgatttcggccgtttcgtcgatccgcggtccctcgaagacgttgctgaggtctcatcagtgcgagagaaaggcatgatagcggcgccagccagtagcccgaggcagaaggtcctggggggctgcgccagccaccctggtgccgtggatgctccgtccttgggatgcttaatctcgccgtcgcagctgaagcagaagttcatccgggacggcgaggtgatctccgtgattttcaccggcgggtcggccggcggcggcgaggccgccaactcggtcggcctcgtcgtccaggaccggaggcacgtcgatatccaaccttcaccgtcgttatgcaccggcgaagaagagctgctcctgccgcaaggtgccgccactggcggccctggctatgagactttttattattatttgatcattttgtcataa

SEQ ID NO: 51094 - DNA, 360 bp, Oryza sativa
  Clone ID: PAT_MRT4530_53519C.1
ggtgcaagaaagatggatagcatatctggggctaaaattctcaagatgttaaaccaggatcagacagctgccagttccttgtgtaaatatcataagttagaaaacaatctcaagtgtgacaaaattctttttgcatgactaaaagctgtacttcccgaactagctaactgatgggatgcagcatcgtgaggggttttttctgtgcagattgagctccccgatgcagtatgatgtggacaagctccttcatgggtgattggatatcctgctaatatcttggtctgcttatctgcttctatgaggacctgacgtttcactgggcaaatcactaatcaatattccttggaaatgatggcaacg

SEQ ID NO: 51095 - DNA, 1834 bp, Oryza sativa
  Clone ID: PAT_MRT4530_5351C.1
gttgctagcttagagaataatgccattgaagatatagccgaactaaatgacggtttggattgtatcacaagcgaaagtgacatagcattgtcacctaagacgagttcacaaatcggtcgtgtgcatgttgaaaagatgatgacaatgtcttgcggaatagtagtgaaatagaatccaaagtagccatgcatacatatcaaaggccgtatcctgaacacgtagattcggtcccatacccgcaaggatttgaggtgcccaacttcacgaaattcacaggtgagaatgctatgactacaatagagcatatcggccgctttattgatcaatgtggtaaggccggtagtgatgatttgcttaagttgaagttgtttcccctttctttgtcaaactttgcatctacatggtatagtttgcttgctcctagttcaatttctacatggtcacaaatggagcatgagtttcatggttatttcaaagatgcaagcttgatggagcaaagaccgattaatacttcatcggtcacttgtgaaactatttcggttacacctatgctaagaccggaattgttagtaattctctccctattaatcctattgatgttgataaaaagaaagggaaaaatgttattgttaaggatcctcggcccaagacacttaggatcaataatgcgaaggccgaagatcataaagttgcaaaggatgagtcatctagtatccaaaggaccaaaaagccgaagctcacttttgatatgcttatggctaaatacaagaaaggattagccggtcaatgatttgacaaccaaactagtgattcgaaaagaccaagatcatctcgtaggaagagatttggtcaaacatcaaagcaatcggagccatcaaccataccaactccatataaacctccaattgtgatgccatggtatccatatccaatgtcactatatggttatccttttatgtattacatgccatggatgcctcaattctctacgccgtttcatcaaggatgggaggaatcacctagggcagtaccaagtcattctaactcaagacaagaccgtttcccacaaaagaatcggtccggtggatcaaaggtgaaaaaggcgaagaaggtgtgggtgaggaaggaagccaaagctccggaggtcgttgctatcaaagaggagtctcaagatgttcatgtacctactggagatgcgatggaaattacgcaagcaaaggagatcgaagccgacgccgtgactgtcaacattggtggtctaaccgagatagctggccggtctaaccgccagactatggccggtctgaccaaccctcctggccggtttgaccgacggcttgtggccggtctgaccggacctagaggccggtctgaccgaggggcattagagaagagtgagaaaattgagagcaacacaggaggttccacttcgaccaaaaatatgaagaatcatcatttggctcctggaaaacaaccacagccgaagtggataccttccggcttatctcgctctcaaaacaggaggcttcagcgtcttcgggccatgggtaaaaaagaaaaggagaccaaagatgtggagaacaaaacatgtaacaatttagatcctcgaacgacatctaggcaagtgtggagacccaaagaggtaaaagttaagagaccggtgatttcccatagtagagataaatccaatttgatgagagaagaatcatcggtcattagagataagtctccttcgcatgatgctatggatgttggtgcggtgttcatcttgccttcgaaatcgtgcagtcgagaaagccgattttgcttgaggggcaagacattaatatgctca

SEQ ID NO: 51096 - DNA, 171 bp, Oryza sativa
  Clone ID: PAT_MRT4530_53520C.1
atggcatcatctgacatctacaaggtgcaagatgctaacaattacagtttcgtcttcacaccatggcaggagagtcaagggacgacacagaaggggacgcaggcaccaggtggaggaccgtccatcagagatgcaattgatgatggtgagttaaagaagatgaagaaatag

SEQ ID NO: 51097 - DNA, 2196 bp, Oryza sativa
  Clone ID: PAT_MRT4530_53521C.1
atggagtcgctgccggaggacgtcctcctggagatcttctcccgcctgccggccaggtcggccgcccggctccgcgccatgtcgcgctcgtggcgcgccgagctctcgtcgccgtccttcgtcgacctccacctccggcgagccaacacgacggcgccgcccaagctcttctgctgcccttgcgacgacaagcttatgctcgccgatcagtggtgcctgtacgatctgcagctcggcggcggccctgggagggagctcgtgcgcggcggcgagttcggcgacgtgttgcctgctcctctcaccaagcctctccgtggcctcgtcttggtcatgtgctacggcaggaacggcgtctacgtctgcaacccttccaccggcggcgaggcgctcgccctccccgacaccgagctgccgtcgaaggcgacgttccggccgtcgttgggacccgggccaccgtactaccgcaacgtcgcgtacggcctcggttactgctcggcggcgaaggagttcaaggtcgtccgcatgttcagcgagggccactacgaggagacggcgacaagatgcgaggtgttcgtcctcgactcgccggcgtactggagacctgccgccgggaagccgcctccggcgtgcatcgtcgagaacaccggcgtgttcttggacaggtccgtgcacttcctctgcagtgacggtggtggtatggtcagtttcaacgtcgccgatgagagcttcggctcgctgccggcgccgccgccgttggcggcggcggtgtacggtgtggcggattggcggataagggagaggatgacggagctggacgggtgcttatgcgtgtgccaatatgcttgtggaagcgatggccatgggccttgtcgtctatggctgctccggcggcacggtggcggcgacgagacggcggcgcggtgggagaagctctgctgcatcgacccgatcccatggccttcgcgctcgatcgtgccgctatgcatgtacggggagaagatcttgatgcggacggggcgaagcgtggtgttcgccgtggacgccgccgcctgcggcggcggcgcaccggagatcctgttccggccggacgagcacgaggccaccgccggcgagttcgaggacacgcagttaccggcgctaggcctgtacgaggagagcctcgtgcccgtgggccgcaccgtcgaggagatcgtcttctcgtcgccggcgaccagggcttggtccgacgtcctcaagtggctgccggcgaggacggtgtcggagctcagcgtcgtgtgcaaggcgtggcgcgccatggtcaccaccgaccgcttcatccgctcgcacgccgtccacgccaacatggcggcgagaagaccgcggatcaggttcgtcatggaccccgtcggcggtgtacccgccgacattgatcgtcacactgacgagattcacgagccagacatctcccccaagccgttcgtctgctcccagccctgccatggcctcaacgtcggcagcttctccgacgtcctcgatttcgtctgcaaccccatcatggactaccacgaggaacttccactaatcgaaagcgacgacgactatgacgacgacggcgacgacgacatcttctacggccgcatcgcgctggggtacgacgaggagatctactggctggtcgacccagcgctcggccctgcatccgccaccacgacgacgccgccgacgtcggcgtgcgagctggtggcgctcgactgccgcaacgccgtcgcgcgccaccactacgacgtcgtgcgggggccgccgatgccaccgtgcggccgcgtctccgtcctccggctccacggcgcgctctgcgtggcgtgctcggaccgcgacgcgaacgccatagacgtgtgggcaatgcagcagggcgccggcaccgccgtctggtccatggtgtaccgcatcgagctcgccgggtactcgccggagtacacgtcggagaagacgacggtgatgggcgtcgacccgacgagcgggcgcatcctgctcaacacggagcagtcgctgggttactacgatcccaagacgggggagctggagacgatctaccgtgtcagaaggatgtaccaggaggcaaatgatggcagtggtgcatggtacgatgggaggttctgtgcggttgtctgtgaagagagcctgttttggtatccggtctggagggattatgctcagtaa

SEQ ID NO: 51098 - DNA, 1767 bp, Oryza sativa
  Clone ID: PAT_MRT4530_53522C.1
cattggcagtacaattattaagagcataagtacgtacataagtaggctcaatatgttttttctgctcaggtacataagttatcttgaaatcgcgaagaccccatatctaacagcacacatatataccaaccccatatatatatctggcagtacatacatatactatgggcgctgttctgatctttttgaagatgcattgtgttacactggcatttacgcacagctcgaagaaatgtgagtaactggacacacatttaggtcagagcatttagcagcaacaagaccgggcgactcctgcatatcaagatctttgtgcaacattccatcgggcagattccaatcaaaatggtagagaagattagccaaggcaaattccatgttggcccacccaagatttatcccaggacatattctacgaccagagccaaatggaagaaacttaaaattactccctttaagttctatatcattatcttcaaatctctctggcttgaactcctcggcattcttccaatacatactatccctgcatattgcccacacattcacaaatacagatgtacctttgggtacatcatagcccatgatcttacatgtctcacggcacttgcgaggggacaatagcggcactgggcaatgtaatcgaaacgattcctttaataccatctttagatagcttagttgggcaagatcatcttcagttatggtgtttttcccttggaaggcttgccgcatctcagcctgcacctttgccattactcttggggagcgcatgagctctgccatggtccaaatcagtgttgtagacgacgtatccgtgccagccccaaacatgtcccataaaagaacggtgataacttggtttgtaattggaattggcgtgccgccttccttctggagcctgagcaacacgtcgagagagcatgacttgctctccaccgccgccttatcgccaacgtcgtcgttgccgctcatcatgtccgtttcgatttggttcttccgttcttggatgatctcctctatgatgcgctccactttgttgcggttcgcgagaacgttccgtggccctgtcgcgaccatcgacgcgagcttggaggacgggaagaggtcggcgacgctgagcgccgacgtctggtgtagtatggcgtgcagcgcggccaggaactcttcacggtacttgcaccggctcccgacggagcaccggagcacggtgtcgttgaccaacctgttcaccatgtcggtaaggttcacggtggcgccggacgctgcggcggccgacaggtcgcgcacgagccgcgccacctcctcttcgcggacgcgccggaatgaccgcacccgcgccacggtcagcagctcctgcgtgagcagcttgcggaggtggcgccaccgctcgccgtactgggccatcaccacgtccgtgccaccgaaggtgatagccgccgtggtgctggtcaagtggcggtcggcgaagatgaggtcgtggtccctgaggatctcctgcgccgcctccggcgacgacgcgaccaccgtgggcacctcgcctaaccagagctgcatgacggggccgtgctcccgggccagcttcccgatgacgctgtgcacgctctcgctccaggacacgaggtggtgggcgctgccgatcagcggcagcgtccatggccccggcggcaggttcagtctcggcttcttggcatatgatgatatcagcttggacaggaagaccaacacaagggatgcgcccacagcgagcaacaccttgtcctccat

SEQ ID NO: 51099 - DNA, 420 bp, Oryza sativa
  Clone ID: PAT_MRT4530_53523C.1
atggagtggcgccggccgccggccggcctgggcggctgccgactgggcgctgctgtgctagccgctggcagcgtcgaccgtcgggctcgggcggggcgggagccgggagcgggacgccgggacgacgggagcaggactgtggcctgcgggaggccaccaggcgatggccggaaggcgcggcgggacggagagaggacgtgtccgtgcgggcgccggcgcggcgccgccgccacggctgggcgcgtgcacctggcgggaccgcaggagccggccagccgggaggagtggcgggggcaggagcgccggagtcgcgccggcggccggcctgccggctcgcgtcgcgggagcgctgtcgccgtgacgccgtcgagtgggaggggagagagcgcacgccgcgcacgggggagacggccatcctga

SEQ ID NO: 51100 - DNA, 252 bp, Oryza sativa
  Clone ID: PAT_MRT4530_53524C.1
atggccgtctcccccgtgcgcggcgtgcgctctctcccctcccactcgacggcgtcacggcgacagcgctcccgcgacgcgagccggcaggccggccgccggcgcgactccggcgctcctgcccccgccactcctcccggctggccggctcctgcggtcccgccaggccacagtcctgctcccgtcgtcccggcgtcccgctcccggctcccgccccgcccgagcccgacggtcgacgctgccagcggctag

SEQ ID NO: 51101 - DNA, 205 bp, Oryza sativa
  Clone ID: PAT_MRT4530_53525C.1
ctgaatgtaatgtagccattaccggtgatagctaaatccaaattttagagtttataaatactgacaattgttgttgactatgcaggctgtagaccacggcagaactcacttgaacgatgactcggaaaagggcgccgcttagaggatccagcttacgacgcgtgcaggcgacgtcatagctcttctatagtgtcacgtaatcatc

SEQ ID NO: 51102 - DNA, 765 bp, Oryza sativa
  unsure (1)..(765): unsure at all n locations
  Clone ID: PAT_MRT4530_53526C.1
attcggnctcgagaagaagggagaagaaggacctcttgaagccagaagacccttcagaactctcagagagaaagaaaaagttcaaacattaccggaggccccggttagtggttcataaacctttctctaagcttccgactctctctctcttacggggtctttgcagtccgtggaagagcttgttgggttatctcagctttcacctttccaggctctgattcaaagaaaaatctcaacttccttcaacaattcatctctacaatttctggatagtgtcttttttttagcaagaatggctcaacattctaatgttccaaagtttggcaatcaggagagtgaagacaacgttttagacacagctcattctgacaaagcccagaaaggtcagtctggttcaaagatgattaatccaaatgacaccaaggaaaattcggacatagtttcttctgctgacctaccccattcaaaacccagagttcattcagaggatccatctggaaagggatcagtgagaacaacacatgagttacaaaagagtagggaggatggtgatcctaaacaatttactgactctccagctcgccatggtggcggagattcttcccatcgaggtcatggagtaagttctgctgacaaccgtaaaagaccttcaagacaaagtactgggcctgagcacaacattgaccgttcaccccttcatcgccaggcaaaaaacccctggcagagatagtccttcttgagaagggaaaaaatcatatgatagca

SEQ ID NO: 51103 - DNA, 541 bp, Oryza sativa
  unsure (1)..(541): unsure at all n locations
  Clone ID: PAT_MRT4530_53527C.1
attcggccgatcaatcggacatnggananaaggnanctcctncancatgatcctgcctgatggagtctagagaggcctgattgganacatcaccctccaggttcnacnannaaagattcnacgcccaaggggatnaaatacactcaatgtggaagaggtccatcgctccccatggantnatccgacctctcccacnnanccngcttcccngagttggtgtcantncctcctctctgcccccggtattccttatagtttgggactggaacgacttcttctccacttgaacgtcgagatcattgagggccactggccccngnaggaagtccngncattctccagcgatcactatctcnncgacnttagcgcgtatgtcacctctgatagtgaatccgttccacgatgtgtntaatgtgantgnactctcnttgncngaangttantcataataaaacatcaccncntccataagancttggtctaaagcttccngcctangttgcatcancggccggtcgtcactgtcaggtcagttgggatt

SEQ ID NO: 51104 - DNA, 327 bp, Oryza sativa
  Clone ID: PAT_MRT4530_53528C.1
atgagctacaagcgatggttcgagcgtaaatccgacgaaggcaaaggtggctacctagtcaaagttattgaggcaggggtgtcatgggcgtcaaaggggactttgggaatgaagcggtgcctgcaacacaggggagatgcaatgtcctacacgaactcactgggtgccgatttcaatgtgagaagaaggaagacgggggatcttagaggagatggaacttgtggacatgcgacggtggagacaatggagcagacaccggttcaaggctcaaggatccttgggaaacatgagcttgatctcaagctcgtctgcaccgtgctcatgtag

SEQ ID NO: 51105 - DNA, 449 bp, Oryza sativa
  unsure (1)..(449): unsure at all n locations
  Clone ID: PAT_MRT4530_53529C.1
cccggttcgacccagcgttcgcccagcgtccgcccagcgtccgcccacgcgtccgcgacgaccacggtgggggcgggcatcacggaggtggcggcggcggctaccccggtgggcagtgccatcacggatgctgcggcggctacggataccacggcggctgccgccgttgctgcgcgaccgccgnctataagcgggggccggggggccgcccctaggcgcccancttattaagtctcagacgatcgtgcgacgtacgtccgtacggtcggcgccggtgctcgcttgcngcgtccgcttcttctctcccttgtgcttcctgtgtgctgcctntgtgtctgcccgcgcgtctgtgtgtgtccttntcttcgtctgtgcgcgtgtttgtgtttttgggccccttncgtgcgtttgtttctgcttgcgttctgtgttggtggttttgtgccttt

SEQ ID NO: 51106 - DNA, 3288 bp, Oryza sativa
  Clone ID: PAT_MRT4530_5352C.1
aatcaaggaatttcttcatcaaccatgatgagcgggaacgagatcatgtcggtcacattggatgatttcgaaggagaagaccgcaagtccatggaggagtacatcaaggagatcacacaggaggcgttgatgagggcgtgcactaggactcgtcaaggcgtgatcatcaagcccgggccttcctaagctcgctcccgatttgaccgggtattaccccggcggtcagaccggctctcaggccggtccgactgcacatcatgacgccggtcagaccgggccctgggccggtcagaccggcgcaattgtcccaatacaggctatagatccaatgactaatgctagttatttatatcattttaaaacatttgatcctcctgtatctactgctgcaaatagtccccaagttcccccacatgttcctaatgcttataatgatgttgctagggggtatcctcccgatactagacaaggccaatataaccatattgcgccgcaaacacaacctattaggacactaaatccaccaccaaatcaacataggtctgataatatggaggatataattagtgatattattagggatagattcgggattgaaattaggaatcgtgctagatcttacaaaaagccgtatcctgattattatgataatgtaccatatcctcgtaattatagagttcccgaatttaccaaatttagtgttgaggatagtaggaccacatgggagcatgaaagccgagtggataacaatagcttacaagctagtttagataaaaatgcaatatcatgtatagccgaaccaagcgatggttcggattgtgttaatgatttatgcaatgatgccatagaagatatagccgaactaaatgacagtttggattgtattacaagcgaaagtgaaatagcattgtcacctaagaccaattcacaaatcggtcatgtggatgttggaaaagatgatgataatgtcttgcgggatagtaatgagatagaatctaaaatagttatgcatacatatcaaaggccgtatcctgaacacatagattcggtcccatacccgcaaggatttgaggtgcccaacttcacgaaattcacagatgaggatgctagaacaacaatggagcatatcggccgatttattgatcaatgtggtaaggccagtagcgatgatttgcttaagttaaagttgtttcccctttctttgtcaaactttgcatctacatggtatagtttgcttgctcctaattcaatttctacatggtcacaaatggagcataagtttcaagattatttcaaagatgcaagcttgatggagcaaagaccgattgatacttcatcggtcacttgtgaaacgatttcagttacatctatgcctaagaccggaattgatagtaatcctctccctattagtcctattgatgttaacaaaaagaaaaggaaaaatgttattattggggatcctcggcccaagactagaatcaataatgcgaaggccaaagatcataaagttgcaaatgatgagtcatctagtttccaaaagaccaaaaagccgaagctcacttttgagatgcttatggctaaatacaagagaggattagccggtcaacgatttgataaccaaactagtgattcgaaaagaccaagatcatctcgtaggaagagatttggtcaaacatcaaagcaatcggagccatcaaccataccaactcccacaagacacatcttcctcacgtgcaaccacgtgccacataccaccacggtatacggacggaagacgtgacatagttcccaacccatcctagccatagacaagagtaccgacccaatcctgcctacggccggaacccccgggacaggcaggcaagactgagcccctagcagcagggcaccaaccctctgccatgacatctcgactaccgggccgcagctcgtgtagccttcatttgcctttgttgcccacgccggcatgcacacacgcctcagcgtcgtcgaccacatttgcttccccccctcgcctaggcctccctctgctacgtcaccgtccttggcgaagctgtggccgtcgacatcaaagacaagctccaaggttagcgctgctccccgctcttcttgctcctcgattctccctccaagaaagatggtggattctaatggtgagctcactgccgcaatgccgacgtctctgtatggcttgatgcacctggaggggagaacattggcctccatcaggtggcggttcgggtggccgacgctgacgccaccacatgggaagaccagcgccgcgggggttgctatgccggcaccactaccgcctatctgctctctgtcacccttttccctgtcggtcaccgccctcgccccctttctctcgtcctcatgccgcctaggtgcaggcaacctcccgaaaattatcatgatggtttcaccagactcaacgacaccgtgcgcctccagtgacagttcctcgttcatggccaccctgttgagctcgaagtggtagtccccttcggccagcaatggcgtctcagggctgccctcgaagttgtcattcagctgctcccgcagggtggcgaccatgtccgccggcgatgcctccaacaagaaatccatgtgctgcgagcgtgagccctccatcagcaacccgatcacaatcttactgtcgttggcatccacattggtgttgcggttgctgccaccgctgcttcctgcctccaccatcttgttgcaatcaacaatcgtcacctccaccacgccggagtcgaactcgacataggcacctagaggccagtgatccaacatcaccatgaggccgccacacacgaagtcgttgacgcccaaccacatgcactccggcaggggcatggccattttttgcacaccgtggatgcggcgttttagggcggccacgctctcctcgcgacgggcgaacaccgtgaccttccgtccccagctagccggtgggaggtaggcggtgacatggaccatatcatgcgtcgtgtcgccgccgctccacttggccagcccatggatccagcagaacctcgccgccacctgccaatggaggagaagcaggacatgcgagccatcgaagatgggataatactcaatgtcatggtcatcagcgagctccctgttccagtataaaaggcattgcgcggtcaccgggatgccatagcaactctccaccttctgcttgatctcgacaaccttgtcgaagggctcgaccacgacggtcaggcggcaactatggctgaccaccgtcggcaataccacaacgttcacatccat

SEQ ID NO: 51107 - DNA, 405 bp, Oryza sativa
  Clone ID: PAT_MRT4530_53530C.1
gaccaagccgtccgttttttccacttacgtgattcacaatggctgggcgtaattagcagcttttggctgcgtacgtctctcttgagcatgggagtggtctacgccgcaggggtgattagatactagcgctcctacggaaatgatatccgatgacgaggacggacaacggatcacaaaggtgctgccgcaagactagatagcgctgatggaaccagacggacgacacctactggcgccgatacatctgcggcatgaacattttccgcacgccgtgctaggaacttggcaagatcatcctatggttgggaggaagcctgacgctcaagatgtagtgacactaactaacgggcacgtggattttgactgcgaattcgaatcccatggtggtagcgatgctgttggaac

SEQ ID NO: 51108 - DNA, 155 bp, Oryza sativa
  Clone ID: PAT_MRT4530_53531C.1
agatacacaatatagtatatgtgacgccccacacttctaggccgggtcctctctagatctggcagctatcctagaacataaaggatagaccaagacaagtcttttctgcacagtttgtcctcactcgtacgaacccgggaataatttcccgagac

SEQ ID NO: 51109 - DNA, 220 bp, Oryza sativa
  unsure (1)..(220): unsure at all n locations
  Clone ID: PAT_MRT4530_53532C.1
aaaannnnnnnnnncctntttcaagcaattttttaaaaagcagaggtcccgccccctggncngacacatgaatcgtaccacataataaccgaccggtgccttacgacgcgctaatactgtgattagtgagtcattttataccttgacctaataatgttcatatataaccaccaatcaaaaaccaccttacatttagaaagcctcctactattcctcgtcc

SEQ ID NO: 51110 - DNA, 606 bp, Oryza sativa
  Clone ID: PAT_MRT4530_53533C.1
caaatgcaacagatgtcctgaccaagactagtggatctgataatgccaataaagaaggaaataagatctggccatctaagatgccaaaatttatagtcaagccaaagtctacccctacagatcctatcaagaaacagaagacggaaaccacggctggcccggatactggcaaagcgccagtcgcagaagaaaatagtgagcctgcgcagaacaatgtcctccaatccctctgccaaaactacgatagcgatgaaagtgagtgatgactgcgtggctgcttcgtgccgtaagcccgtaacaaccgtaaccgcgaatcgccaccaactgctgtggcattggttgcagcggatgacaattccactcacagaagaagaatattacgttgtgctaacattggataaccagatccctgaggatctattgttgccacaaatctgaatcccgggaattcattggttaagtatatacagtacttcaaaatctgtggctgctaacattgtccaggcgagatttatacgtgtgtggtttgttgctgaatgcctgaagagatcaaaagtcttgtaaaattgacagggaagatgtttgttgacgttgggttcttgcacc

SEQ ID NO: 51111 - DNA, 509 bp, Oryza sativa
  Clone ID: PAT_MRT4530_53534C.1
aataaaccttcgctcccatcccataactcccggactgcgctagcctaccgccgcctgccggagccgctcaccgcctcctcgcacgcgcccgccggacagccaggcgccgccgccagctccgagcgcgtgcccgccggagccgcgccccctaccccgccgcctcctcgcgcgcgcccgacgctcgccctaccccgccgggttcgccatcggccggcgccttctccaccgccgctgccgcctcctcgggcacgtcctctggagagctggggttgccgtcggccggttcctcctcctcgcgtgcgcccgccggggagccgtgatgggttacggccctagggttcgggcagatctgtgcaatttgtggcatatgatgtgcccaatcaaggaccaagaaaccatgctattgatctagtctacgatcgaatgccacaatatatgtcaggcatataacacaggggagtgcagaaatcctgttattttcactcaatctgggttatagggatgaaatc

SEQ ID NO: 51112 - DNA, 3664 bp, Oryza sativa
  Clone ID: PAT_MRT4530_53535C.1
aaacaacaagcatgttgattttcccatctttgatggtgaacaccctgaatcttggattagaaaagccaacaagtacttttccctgaatataactcctgaagaagacaaagttcccttggcagaggtttatatcataggcagagctgatcagtggatctctagcgccgatgttcctactgacaatttgtcctggcctgacttctgcattatgatatgtcagcgttttgctgttaagtccggtatagatatcattgagagttttcgcaatttgaaacaatatggctcagtcgattcgtatattgacaaatttgaagaacttatgcctcttgtcaaacgaaacaaaccacatctaaatgagtatttctttttggactatttcatctctggcctcaaggaccatatcaaacgacctctgaagtctctcaccatatactcattggttcaaacttatgaacatgctcgcaattatgatatccccagtgctcatccaagacagtacaacagttccactcaaccgaataccaaagcaccatttgttcctgccaggagagaattgcctgccctagagcacaaacctactacagggacacaaccaagaggagctgtcatagtggcaaatggtgaagttttgactacaacaacaatgtgcattgatcaaccttatgaaattcagggtcattcctttgctactaccttcagagttcttgatgtcaaaggctatgacattatttttggttgtgattggattcttcaacacagccctgttacccttaactttcattccagggagttaagtctgcatattaatgggcaattggaagtcacattatctgatgtttctattcccagaggacagactttggttaactctgctcatatgggtaaattgttatcccataatgcagttggggcagtacttctggttgcaccaacccaatgtcattcccttcagacatcctctgtcacacaccctcttgtttcttcagtcttacttcagtttttagatgtttttgctgagccacaacacataccacctgaacgagactgtgatcataccattcctttgttacctgattccaaaccagttaatgtgcggccataccgacttccacatcacaagaaaaatgcccttgaggagctcattaaacagctgctggattcaaatgtcattcaaccaagtgtgagtcctttctcttctcctgccattttagtcaaaaagaaagatgggtcttggcgcttatgcatcgattatagacagctcaatgcccaaactgttaaaaacaagtttcccattcctgtcatagaagacctcttggatgaattgcatggagcacgctatttttcaaagattgacttgcggtcagggtatcaccaaatctgcatgcatcctgctgacatatttaagactgcttttagcacacacatgggccactttgagtacattgttatgccatttggtttgaccaatgctccagccacattccaagctcttatgaaccggatattgagtccttatctcaggaaattcgtcttggtcttctttgatgatatcctgattttcagtcagtccattgaggaccatgctcatcatgtccagctcgtccttcagttactcagaaaatacaacctctttgctaagccctctaagtgcacatttggccaacaacatgtggaatatttgggttatataatttctgaacaaggagtagcaactgatcctgccaagatagttgcagttcagcagtggccttcaccccttaatgtcactcaacgacgtggctttcttggtttggctggatattataggagatttatcaaggattttggaattatctgcagaccccttttcaatgctcttaagaaaaatgagttccaatgggagactgatcagcaacttgcctttcagacaattaaggataaattgtctcaagcacctgtgttggcactacctaacttttcccttcatttcattttggagacggatgctagtggctatgggattggggcagtccttatgcagcaaggccgtcctctcgcttacttaagcaaatctttgggcccaaaagcggctggattttccacttatgataaagaggccattgcaatattagaagcactcaagaagtggaagcattacttcttggcttcctctttactgatcaaaactgatcaagccagtctcaaatacattaatgaacagaaaattacagatggcacccaacacaaattattgatcaaattgatgagttttgattacaagatagagtacaaaaaagggaaagaaaacaaggcagctgatgccctctctcgagccccacagcaagagactctccaagctataatagtgattgttccagaatggatcactcaagttttggccacttatccagctgaccctaaatgtaaatcattgataaccaagttaagcattcatcctactgcacgacctccctttacactgcacagtggaatcttgcggtataaggacatgatatatgtgggcaaggataccaatcttcttcagcaacaattgaaagagtcatttcattcttctcctttgggtggacattctggagaacgagctacttatcagtgcctcaagctccttttttactggcctggaatgaaatcagacattgccacccttgttaaagaatgccctacctgccaaaagaataagtttgaaaacaaattacctcctgttagtgatcgtgatagaatcttcacttcacatgtttggaagaagctctttgaggatgctggagtaaagttgcacttgagcacaacccatcaccctcagtcagatggtcagtctgagcgagtgaaccaatgcctggaaacatacttgcgctgtctcactttctctcgaccaaagaagtggcattctctgctagatcaagctgaatggtggtacaatactaatttccatacatctctgaatatgactccttatcaagcactttatggacagcaaccacctatggttggtgaagctcttttacctgcgtcactgttaactggatgcagaaacaggaagcaagcaaaagcagctttgctggactctgttaaggcaagcttggacaaagctcaatctcgtatgaaacaatatgctgatactaaacgttctgaaaggacatttcaagttggtgatatggcttacttaaagatgcaaccctatcgccacaatgctcttggattgcatagttctctcaagctttactcttgctattatggtccatttcgagtgctgaacaaaattggctccgtggcttataaattattgctccctccaaattttcaaatacatcctatgtttcatgtcagtcaacttaaacaccatattggtcctaaggcagttccagaacctgggcttcctctgattgattctgatggcaacatattaacagcccctcttgctgttttggagcggcgactgatccctcgacacaatgctccagttgtgcagtggaagatactttgggagaatctaccaatagaagctgctacctgggaggatgcatcctttatatccaagacttttccctggtttaacccatgaggacctgggtcttaatgggggaggcattgtcaggcccccgggatctgacagctcgtccgccgtcgtcgctagatcgtacccgagttcgtccaccgccatcgccat

SEQ ID NO: 51113 - DNA, 553 bp, Oryza sativa
  Clone ID: PAT_MRT4530_53536C.1
cggcacgaggaattggcgtgccattcgaggatactgagtttactggccaattgatgagctgctgttattggaaatcagaagtactggttggagatatcatacacagtacagagaaagagaagttgatcttttgttcatacaacttcatacatgaacatgagtcaagcaagaactgaagaaaccatacatgaatacataaacaaagggtcttcccttaggtctctctaggtcttgatctcttaatgttctaatgatctatgttttttttaaaaagaaaaaatttaaaggcagacaggcacaacaggttaagggaaggattagttcatttttagcatcatactaaaaagaaaaatagctagctatatccatttttgacaatcacgtctcgaaaatacactatactgagcagaagcaagtcagcaatttccaactttgcggccgaagtaactactctatcctatcccttttagaaagaaaaagaaatggaagcatgcaaaatttccccttttttatgagcgtttcgtataagtttttctttggtacatcttaattg

SEQ ID NO: 51114 - DNA, 143 bp, Oryza sativa
  Clone ID: PAT_MRT4530_53537C.1
gcctacgacgtcacgccgtgaggcacgagggcccgtgtctctagctgcaaatcgtgtcgccgcctccacttctgcggttcagcacctcctcagaggttgcaaccggtgctaactgccgacctcttactcttcggtcgcacacg

SEQ ID NO: 51115 - DNA, 549 bp, Oryza sativa
  Clone ID: PAT_MRT4530_53538C.1
atggattggccagcttcagcttccacttgcatcgccatccttctcttcgttttcttgatttcatggccgtcactgtgcgcctccgacgaccggcttgccatcggcaagacgctgtctcccggcgcaaccctcgtctccgacggcggcgccttcgccatgggcttcttctcgccgtcgtccaactccactaatgctacctcgtcgggactttacctcggaatatggtacaacaacatccccaagctcaccgtcgtgtgggtcgccgaccaggcggcgcccatcgccgaccatccttcctccccggcctccacgctagccgttgccagcgacggcaacctggtcttgtccgatggcgccaccggccgcgtcctttggaggactaacgtcaccgccggcgtgaactcgtcggcgtcatcgggaggaggagtcggtgctgtggcggtgctcgccaactccggcaacctcgtgctccggctgccggacggcaccgccttgtgggagacgttcgagaaccccggcaacgcgttcctgcccggcatgaagatcggc

SEQ ID NO: 51116 - DNA, 220 bp, Oryza sativa
  unsure (1)..(220): unsure at all n locations
  Clone ID: PAT_MRT4530_53539C.1
ggacgtgncagngnacgtgtgggtttgatccaggctacactgctcctcccaagaaagctcaacctgcccatntngcagtgaccatnaggtgagcctctnttccctctggaattnacaatatttaangttgatagctgggaatttncactgtagattatagaacaaggtgaatgttgagttagtgtctggtactctggttggtagctagtgctatgcaact

SEQ ID NO: 51117 - DNA, 436 bp, Oryza sativa
  Clone ID: PAT_MRT4530_5353C.1
aaaaaatgtaaaaattgtggcacacattcatatatacctgacttaattgtttaatcaaacagaacacgctagtttaaaatgccatctgaaatgtatctcagggaaaaatgtgaaacaatatacctcaatgaggtaaataaagtagaaattacatatttgaaatgggcataactgacataatacagctactgaaatggtgggaatcatttcctccattagctacttgaaagaggctaacagagcatgaatactcaattcacatcatatcacactgcaagaggcattggcaacacatggatgaacaaattcttcgtgctcggcagcaccaaacagaaataatctcttcatgcaagcaggagcaagctttaaaaacggattggtaagcacaaatagtagagacccgaagactatcaaactacaatttaagggagagatt

SEQ ID NO: 51118 - DNA, 1274 bp, Oryza sativa
  Clone ID: PAT_MRT4530_53540C.1
atgaagttactccttttcgtgctcgaaaagctttctggtattaaaataaattttcacaagagtgaactattcttctttggtgaagcaaaggaatgccaagaacaatattctcaaatgtttggatgccagattgggaaataccttatggaatatcttggtattcctatgcattttagaaagttaaataatcacaattgggaagtgattgaggagataattgaaaagaagttgagtagctggaaaggaaaacatatgtcggtcggaggtagattggttttagttgattccattttgttctttcagtgtttatgatgtgtttttttagataccgaaaggatttcttcgaaagaaatgattattatagatcaccttttttttctagcaaggagataatcataaaaagaaatttagactagtaagatgggatatcatttgtcaaccgaaagaaaacgggactagggttcataatatagagattcaaaatcagtgtttactaagaaaatggttgtttaatatgattaatgaataaggagtttggcaagaactgtatgttgaggagatatttgaaaaatcactcaattactcaagttaggtcgagacaaggagattcccatttttgtcaggtcttatgaaagttaaaggcaaattgttaaatcttggatcatgggtagtaaatagtggtaaacaagtaagagtttgggaggatagatgggttggaaattcttctttacaaggtaaattccatttgtctataatattgtttataggagaaatgtcttaattgcaactgttccacttaatgtttattttagtatagtgttggttggtcataacttagttgattggcataatttaggtacgttgattttgcatactaatttcaatgaaaataatgattcttttaaatggaatcttcatcagactggtcatttttttgttcaatcaatgtatttatctttagttaataatggacacatatagaaactaaagatgttagttaagtttaagatttttttacgtggtttttgtttaaatgagtgattttaaccgaggataatttagcaaaaaggagttggaatggaagtaaaagatcttgtttcaatatgaataatgaaactattcaacatcgtttctttgattatcacattgaagaatttctttggagaatagtttatagttccgttggactaataccttctaatagtatttctaatgtggttgggaattggctagcagtgtcgccattctcgcgcgagcaccaccgcctctcctcg

SEQ ID NO: 51119 - DNA, 1219 bp, Oryza sativa
  Clone ID: PAT_MRT4530_53541C.1
gtggatccccgggctgcagggcctaaagcgagacaattaatttaataagcgccccccaccaccagccatggagcaccaccacctcctgctgcaactctcgccgccaccgccgccgccgccgctgccggcggcgcacctcatgatgagcccgagcttcttcgacgccggcgtgttcgccgatgtcggcggcgactggatggaggacctcatgcatctcggcgagctgttcggcgtcggcgtcggcggcgacgatgatgataatggcggtgtcgacggcggcgtgggcggcggtgatgatcggatgcaagagtggcagaataattgcgagggcgccggctcgccggaccaccagcctagctgcggtgatggggatggcgatggcgatggcgacgtgagccctcgtgatggggagctcggcgacggcgacggcgacaactcggcgacgaggaagaggcgggaccggtcgaagacgatcgtgtcggagcggaagcggagggtccggatgaaggagaagctctacgagctccgagctctcgtccccaacatcactaaggtacgtactcagtgcttgattgctcgcgtcggcgtcgccatggcggcgccgccatgcgccattgccaacacaagcttaatgattgcttggcagatggacaaggcgtcgatcatcgccgacgcggtggtgtacgtcaaggacctgcaggcgcacgccaggaagctcaaggaggaggtcgccgcgctcgaggaggcgcgcccgatcaggccgcctccgccgtccgccgccgcgcaacggccgcagagacagccacgccgcgtggcggcggcggctgcccagctggcgagggccgcggacgccgccgccgtgacgacagcggcggcggcgccgcacggcgcgagggtggcgcacgtcggcgcggcgcaggtcggggaggggcggttcttcgtgacggtggagtgcgagccggcggcggccgcggcgagaggaggaggaggaggcgtggcggcgccggtctgcgccgccgtggagtcgctgtcgtgcttcaccgtggagagctccaccgtcgggtgctcgccggaccgcgtcgtggcaactctcaccctcaaggttagtgaagcagaggaggatgtgtcggcgatcagcgagtgcacggtgaagctctgggtgatggcggctcttctcaaggaggggttccggccgcaaccgacggtccagatctcctga

SEQ ID NO: 51120 - DNA, 520 bp, Oryza sativa
  Clone ID: PAT_MRT4530_53542C.1
gcacgaggcttgctcaagatcaacgagaacggccgcttcaccctacaatgccctgccaatgcctcggcagaggacaaggccaaggctgttgccaagcaggaccacgacctcttcaacgtggcacgtctcattactggtggactgtacatcaacatctgccttcacgactacctgcgagccatcaccaacacccaccactccagcagtgactggagcctggacccccgagttgccattgacaagcaattcgatggtgaaggtgtcccccgtggtgttggcaaccaggtcagcgtcgagttcaacctcctttaccgattccactcgtgcatctccaagagggatgagcactggatcaacaacttcttccttaagctcttccctggtcgcaaggccgaagatctccaggatgtcagctgggacgagctcggacaggccctcttcaactttgagcgcagcatccccaaggaccccagcgtccgcacctttgacggccttgagcgtcaggagaacggtaccttca

SEQ ID NO: 51121 - DNA, 442 bp, Oryza sativa
  unsure (1)..(442): unsure at all n locations
  Clone ID: PAT_MRT4530_53543C.1
ntccgaaaaaaaaaaaaaaaaaaaaaaaaaaaaaaaaaaaaaaaaaaaaaaaaaaaaaaaaaaaaaaaaaaaaaaaaaaaaaaaaaaaaaaaaaaaaaaaaaaaaaaaaaaaaaaaaaaaaaaaaggaagaaaactaaaaggagatcaaaaaaaaaaaaaaacaggggggcgtcttttgaaaaaaaaggggggggaccaaaaaaaaattccaagaggaaaagcttggaaaaacatgggagagtaaaaacgtgggggaccccaaaataggccctcagcaataaatgataactatgaatggcaatggtaaatggcaaagggcacgcacattgtgcccgtcacaaaatggtggaaaaaataagggggtaaggggcaccttgaagaatacttttgataaggggctggggctaggtgacctccctttatggaaacctttaaaggcga

SEQ ID NO: 51122 - DNA, 202 bp, Oryza sativa
  unsure (1)..(202): unsure at all n locations
  Clone ID: PAT_MRT4530_53544C.1
cttggaggacgaatgatgatttgggaggaggggaggaatgaagtttggtggcagctgatacgtgcaagttccctgatgaggttgatgttctctcacccttagtctgagctataagtggattcacgagntgcagatttcagaatgtgtcccctactagctgttgagcgatatctgccttttgtgggggttgtanatatacctg

SEQ ID NO: 51123 - DNA, 963 bp, Oryza sativa
  Clone ID: PAT_MRT4530_53545C.1
ggaaagaaaggtttgtttgcttcgcggccatagatagctatagctgctatcttaatctagctcgcctttaatttggcccccggcctctctctctctgcctgtgtcctaccagctgcacaaaaatctcccagaaaacaggcagaggggagagagacagatacgcatcaattaagctcattttcttcgatctgctggtgaaagaagaactgaagaagagaggtagctggactgaagaggccggcaatggcggcggcggaagtgcagtcggctgccgggtgggggaggcagctgcagcaggacggcggcgggtggaggaaagggccgtggacgagccaggaggacgcgctgctcgtcgagcatgtcaggcagcacggcgaaggccggtggaattctgtctccaagcttacaggtctgaagagaagcggcaagagctgcaggctacgatgggttaactacctgaggcctgatctgaagagaggcaagatcactccccaggaggagagcatcatcgtccagctccatgccttgtggggcaacaggtggtcgacgatcgcgcgtagcctcccgggcaggacggacaacgagatcaagaactactggaggacgcacttcaagaagggcaagccgtccaagaacatcgagcgcgccagggccaggttcctgaagcagcgccgcgagatgcagcagagccagcagctgcagcagccgacgctaatgccgacgccgacgccgcagagcaaggacatcatcgttgccgagaccggtgacgcgcgcaccgacgacgacgcgggcggcgccgcagcggctgtggcgccgtcgtcgtcgtcggcgtctttgtcgatggcgggccgagaggcggaggacttgatcatgcaccaggacgcgatggacgacctcatgatgtgccccgccatgtctaccacctcatcctccacggcgccgccgtcgccggccatcagctga

SEQ ID NO: 51124 - DNA, 327 bp, Oryza sativa
  Clone ID: PAT_MRT4530_53546C.1
ccggccgggctacttcaacaacctcgccgaggagaccaccaaagatccaagccacggatcatgcaaattccacagttctttggactaactgattgcatgggaggacaatatgaaaatgaacaacattgttctcgatttattttatttttgtcaaacctgattagatttagacccaggaagttaggtagttgagtacttctgtatctgctcatcgtctacaaaacctgtgaactgtgatgtaacagcgaaatttgccgtctgtttttctgtggcttaatcagtagaagaagatctgtggcttaaacaaaaaaaaaaaaaaaagcggcc

SEQ ID NO: 51125 - DNA, 642 bp, Oryza sativa
  Clone ID: PAT_MRT4530_53547C.1
gggagctggttgcgcaagaaacgaatcaaaaggtatgtacagatggaattcgaaagtagtaattagctgtccataaacaaatcacgaagaagaagaatgttcaaacgagttcatcattgattaattaaattttgaattataaaaagttccggagacgcactaaaacaaaagatgtggtatagcaaaagaattaatgtatgattaactatcatgtcataattcagaaatattctagtgctgcactcggagagggagcgacatcgtcaggcgaagtacatccaaggaaccttatggttaagacaaacgactacgggcgctatgacccatctccagccttctccaagcctcgcttcaagattattccgaactgatgattagacctgaacctgacttcccctttgttacggtgttcaaccaccgctcaactaattaacacagtacccgttagatgaagagtaatgctatatgtgtttgtctaaagtgtacgtactacaatattgatattagaaaataggttagtactagaggtggtcaaaaacatggtattggtgcttcggcaccgtcgcttctggtacgataaacattgtataaatatcgaaagaagtatatatattatcgcgggctcagtgtggcatacttact

SEQ ID NO: 51126 - DNA, 180 bp, Oryza sativa
  Clone ID: PAT_MRT4530_53548C.1
gatttgggtttgagatgtgcagtcgacatatcaagttatgagggagggtatataagtatgggcctgagcgctcaagttgtggttgggcctcaggacaccgcgaaagtgaacttttgggggaagacctcgtcggaggacatagtcgccgatcgaaagtatgagtgctcggatgcgcttctc

SEQ ID NO: 51127 - DNA, 144 bp, Oryza sativa
  Clone ID: PAT_MRT4530_53549C.1
atggcgctagcgctgcagcccacggcggtgcggccggcgacggaaatgggcagcacccaggcaagtgagatcaagcttgtcaacgagatcaggctatatattgatattttccgtttcctacccccggatgatatatattgctag

SEQ ID NO: 51128 - DNA, 1383 bp, Oryza sativa
  Clone ID: PAT_MRT4530_5354C.1
atggagcatgagtttcatgattattttaaagatgcaagcttgatggagaaaagatcggttgatgattcatcggtcacttgtgaaactatttcggttatttctatgcctaagaccggaattgttagtgattctctccctgttagttctattgatgttgacaaaaagaaatggaaaagtgttattattggggatcctcggcccaagaatagaataaaaaatgcgaaggccgaagatcataaagttgcaaaggatgagtcatctagtttccaaaggaccaaaaagccgaagctcacttttgagatgcttatggctaagtacaagaaaggattagccggtcaacgatttgataatcaaactagtgattcaaaaagaccaagatcatctcgtaagaggagatttggtcaaacatcaaagcaatcggagccatcaactataccaactccatataaaccaccggttgtgatgccatggtatccatatccaatgtcaccgtttggttatccttttatgtattacatgccgtggatgcatcaaccacctatgccgtattatcaagagtggaaggaatcacctaggtcagtacagaatcattcatctaattcaagacaagatcgtttcccacaaaagaatcggtccggtggatcaaaggtgaagaaggtgtgggtgaggaaagaagccaaagctccggaggtcgttgctatcaatgaggaatctcaagatgttcatgtacctactggagatgcggcgaaaactatacaagcggaggagactgaagccgacgccgttactgtcaacatcggcggcctgaccaaaacagctggccagtctaaccgccagacaacggccggtctaaccgaccctcctggccggtctgaccgacggcttgtggccggtctgaccgagctcagaggccggtttgaccgaggggcattggagaagagtgagaaaattgagagcaacacaggagctttcactttgaccaaaaatatgaagaatcattgcttagctcctggaaaacaaccacagtcgaaatggataccttctgacttatctcgctctcaaaagaggaggctacagcgtcttcgggccataggtcaaaaagaaaaggaggccgaatatatggagaacaaaacatgtaataatttagagcctcgaatgacacctaagcgagtgtggagacctatagaagtaaaaggtaagagatcggtgatttcccaaactagtgataaatccaatatgatgagagaagaatcatcggtcattagagataagtctccttcacatgatgctatggatgttggtgcggtgttcgtcttgcctttgaaatcgtgcaatcaagaaagccgattttgctcaaggggcaagacattattatgcttatga

SEQ ID NO: 51129 - DNA, 108 bp, Oryza sativa
  Clone ID: PAT_MRT4530_53550C.1
atggaatcccggtcgacggggcacccgggggatgacgccaatgacattggcaccttgggtcaacccataatgctagcatcatttgtgccatccactgagaaggactaa

SEQ ID NO: 51130 - DNA, 159 bp, Oryza sativa
  Clone ID: PAT_MRT4530_53551C.1
atggatgcaagccagaagcttggagcggccacgggccacgtgcatggtcgtggccacgacctggtgcttgtgtgcagcggcagcagcagcttctggccatcctacttcctgctgataagagaatatggaagccataagtcactgttgcaactctggtaa

SEQ ID NO: 51131 - DNA, 2562 bp, Oryza sativa
  Clone ID: PAT_MRT4530_53552C.1
atggcgatgtccgagtgcgcggcgacgatgccggcgacgacggcgcaccaccaccaccaccacgccgttgcgtacttcggtctttcttgcgctctcgccgtgctgcatcgtcgctcgggtggtggtggtggtgggtgtgatcttggcgccgggccgcggcggtgccggtggtcgcggcggagagagctcgcgctgcgggagagggtcggggagctggagagggaggtggaggagctccggcggaggaggggggaggatgctagggccaacgagaaggtggccggcatattcgcggcgcacgagcagcggtggttcgcggagcggaaggggctgcggcggcaggtgcacgccgtcgtcgccgcggcgcgggcgcgggaggcggcgcacggcgaggccgtggcggagctgacgaggcagctcgaggagcaggagcagcgcgcggcggaggccgcggagcaggaagcggggcggcgggaggaggccgaggggaagctgcgtgcggcggaggaggcggcggagcgcgccgggaaggaggcccaggagcacgccgccgagctgcggaagcacagggcggcgctcgcggagctcgcgaccgcgcggcgggagctggaggcggagcttgcccgcgcggcgcggcgcggggacgcggcggaggcggagctcggggaggccctcgagcgccgcgacgaggccgcgtcgacggcggcggagctctccgcggagtgcgcgcgcctgcggcgcgacgcggagcacaaggacaagatcctctccgcgatgctgcgcaagtccaagatcgacatggaggacagggagatgctggtgcgcgaggtgaagatgtgcaaggccaggcggaagcaggcggagctggaggccgaccggtggcggaagatgtgggagtcccgccatcgccgcggttccaggtcgtcggcgaggtgcgccgccgcggcggaccaccctggctgctccgacaagctgacatcccccgacgccgccgtggcgccgtgcgcgcacgacaccaagatactcttcgtggaccgcgtcgaggacgccgacgccgccaagaaatgccggcacacggcggcgccgccgccgccgccgacgaaggatcccaccaccgtcgaatgcgtcgaccgctatcccagccacgtcgacgacaagcctgtggtggaggagtaccaggatttgcaggagtggttcaagatggagacggagaagtacacgagcatgatccggcgccggcacagcgcggaggtggaggcgttcacggagcagctccggctcaaggacgagaagctggaggcgttccggtggcgcgcggcgagcatggacgccgaggcgtcgcggctccggtccaggctccaggagctcgaggcgcggctgtcggagcaggagcagcgccgcgccgcgctggaggcgctgctcgtcgctagggacgacgagaaccggtcgctcatggagcggctcgccgcgtcggacgaccaggggcgtgccctcgacgtcgtcgtcgtcgacggcggcggcggcggttgcgagcatcgcgctccgcgctcgccggagggcgctgaggctgcggatgctcgtctcgcggtcgcggagatcaaatcgctcgagccggtttcgccgggtggggacacgaacaaggtgttcgacatggaagaaacagaggcgcgcgacgtcgagatctcggttcagaacgacgtgtccgccgcggtgtcgccggacgagcttcagctggtcgaacacgacgaccaccgggcgatcgcgccggcgcgaaactcgtacacatgcgagatcgaggaggaagaagacgaggagaaggaactgccctcctcctcctcctcctcctcgctcgcgctcgtggtcgcggcgccgccggagcagaggaccacggcttccaagatggacatccaagcgctcgccgtgtcgtacaagatcaagaggctgaagcagcagctgctcgtcctcgagaatctggccgccgcagcagccggaggcaaggacacggtgaccaccgcaacaaatccgtcaaccaacaccgccgccgccacagccgccggcggcggcggcggcggcaggcagcagtatccgaggagctaccagatgatggtgtccttcctgagcaagcacgtcaagaggtaccagtccctcgaggacaagatcgacgacctctgcacaagaatggaggagagcaagcgtggcggcgggcgggagcggcatcatcggcggcggcggcagcggcgggagagcgaggaggacgggagcggcgaccgggagcagagcgcggcgctggcgcggttcttggaggagacgttccagctgcagcggtacatggtggcgacggggcagaagctgctggagatgcagtccaggatcgcgccgagcctggaacgcgccgccggcaatggcggcggcaacgacggcgtggacatggggaggttcatggacgtggtgggcgcgctgctgcgggacgtgcagagggggctggaggtgcggatcgcgaggatcatcggagacctcgagggcacgctcaccttccatggcatcctccacaccaccttctga

SEQ ID NO: 51132 - DNA, 1514 bp, Oryza sativa
  Clone ID: PAT_MRT4530_53553C.1
atggacagcgggaacgtggtggtgtgcgacaacggcaccgggtatgtaaagtgtggctttgcgggagagaacttccctacatctgtgttcccttgtgttgttgggcgaccattgctccgttatgaggagtcactccaggagcaggaattgacggatattgtggttggagcggcttgtgctgacttgaggcatcaacttgacgtatcatatcctgttacaaatgggattgttcaaagttgggatgatatgggccatatatgggatcatgcattttacagtgagctgaaagttgatccttctgagtgtaaaattctactgacagatccaccactcaatcctgtgaaaaatcgtgaaaaaatgattgagacaatgtttgagaaatacaactttgctggggtattcatccaggtccaagctgttctttcgctatatgctcaaggtttgctgactggacttgtcatagactctggtgatggtgtcactcatgtggtgccggtagttgatggattctcttacccacatattacaaaaagaatgaatgtagctggaaggcacataacatcttatcttgttgatctactctcaagaagagggtatgctatgaacaaatctgccgactttgaaacagtccgggaaataaaagagaaactatgttatttaagcttgctgtcacatttcatagaattgaaaagggaaaatatgtacagctatgattacaagcgtgaataccagctaggacttgaaaccactatccttgtcaaaagctacactcttccagatggaagggtaatcaaagtgggcactgaacggtttcaagctcctgaggctctttttactcctgatcagtaccaacataacattgataaaacatttgttgagcaggaactcatagatgttgagggtgatggaatggcagatatggcgttccgttgcattcaagaaatggacatcgacaaccggatgacactttatcaacatattgtcctgagtgggggaagtaccatgtatcctggtctgccaagtcgactagagaaggaaatgcttgatcgctatcttgatgtggttctgaagggaaacaaagatggactgaagaaattgcgtttgcggatagaggatccgccacggagaaaacacatggtttacctgggtggtgcagtactcgctggaatcatgaagttaaatgccttgcatacgatgttgctcttggtgaacaacaatccattgtccaatgatgtgcaagcggggaattctgaatttatgagacgcaaccaagccagggtagtggctccaatgattcaaaaatgcgtgccgtcccaggaaaggccagcattcagagagcacttacaacccaactccgcaagggcatgcgccacacgattacaagatctagggcaatacaaagaagcaaaggaagcagcaatcactcttttaatctcaacgatgacgccttccttccttgatgatagggtggtgatggcagattattagcttactaaaaaaaaaaaaaaaaaaaa

SEQ ID NO: 51133 - DNA, 1590 bp, Oryza sativa
  Clone ID: PAT_MRT4530_53554C.1
atgagtcccaccatttcacctgtcctggttttcctcctcctatcacttcatcagagcatatgctccagtgctcatgatgctgcaagtgcaagcagcttctcctcctgccttgccacccatggtgtcagcaacttctccctccctgcatcaccaagctacaataccaccctcaacttctccatcagaaatctccggttcacgctccccgatgtcaccaggccggcagccatcgtccttccctggtcaaaggaggatctccggcgagccatactatgtgcacgcaacagttcgctggcgatccgtgtacgcagcggcgggcacagctacgagggcttgtcatacaccacggagaaccatgtccccttcgttgtgatcgacctcatgaacctgaaccgtgtccaggttgactcggtctcggccacagcctgggccgaggccggtgcgactctaggtgagctctactacgccgtgggacggtcgagccagtccttggccttctcaggcgggtcgtgttccaccatcggcttaggtggtgtcatctccggtggcggctttgggttgctgtcacggaaatttgggctcgccgctgataacgtattggatgcggtgctcgttgacccgaatggaagagtccttgaccggaattcgatgggcgaagacatcttttgggcaatttgcggtggcggtggcgggagctggggtgtggtgtatgcttggaagctccggctcgtgccggttcctcacaacgtcaccgtattcatcgttgaccgtactggaccggtcgagtacgtagctgggttggttcattggtggcagcatgtagggcccaatctacctgacgagttctatctctcagtgtattttcctactggatcatcagatggtaatgtctctgtctcatttgagggccaggttttaggaacaaaacaacaaaccctgtcagtgttgagccaaagctttccaatgttaggtgtcactgagtctgacctaagtgagatgagttgggtcgagtcaacagccaagttcgccaatgttggcacagtctctgacctatcgaatcggtcgcctggaacaaactcatacactaagagtaagtctgattatgtgaaggcaccaatctcgaggcatgacatggttgagatcgcccgatacctatcagctggaccaccagggtccatcatacttgacccttatggaggtgccatggctcgaatcgggagtgacgcgacaccattcccacatcgagctggcatcctctacagtattcagtatactgtatattggggacaatcggatcaagctagggctaatgagtacatcatatggctccgatcgttgtacacatacatgaccccccatgtgtcaaaggatccccgtggtgcgtatgtcaactacctagatctagacttgggcgccaacaactggacgcaccccataggtggatcatctatggaagcagtggcgcgtgcgagatcttcttggggtgcagcatattttgggaacaatttcaatcggttggtcagcaccaagacgacaattgatccaagcaatgtgttcaataacgctcaaagcattccccctttgaattag

SEQ ID NO: 51134 - DNA, 214 bp, Oryza sativa
  Clone ID: PAT_MRT4530_53555C.1
gcacgaggggacttggctcaaaacaagctaaatggtgagattccgaggttaatctactggaatgaggttcttcagtacttgggattacggagcaataatttagaaggaagcctctctcctgagatgtgccagttgactggcctgtggtactttgatgtgaagaacaatagcttaacgggtataataccagatactaattgggaactgtacgagc

SEQ ID NO: 51135 - DNA, 474 bp, Oryza sativa
  Clone ID: PAT_MRT4530_53556C.1
aaggttaagatcaccatcaacctgtgcaaaaacaactatgcataagcatctactacattcagcagcctgaaacataaagtccaaggcatacagactctggaagacactgaagtactatgccaaacggatcgtatttcaaaactcagctaacacctccactggtatcactaagacgaccacaacttaagccaggtgatcacttctccgccttcttaggagccgctgcattcacagcatgagctgcccctgcaggagctgatgtctctcttgggccctgagccaacctgtcctgcatactgacaatattgctgtcacagctagacttgctctaggcacgcttagactcaaactggtcagagagtgtattctctcttgccttctaagccttagactcgtggatactctccataagaacacgcttgctcttgcacatgtgacccatgaccttcatgtacatgtcatgatacatgtgct

SEQ ID NO: 51136 - DNA, 318 bp, Oryza sativa
  Clone ID: PAT_MRT4530_53557C.1
gtgcgaattgtgcaagcagcctacagctacaacagttttgctggcgtctacttcgatcaggctcaagctcaagcccaagctatgttggcccgtaaacgtggccggtcaagtagtgcggtagtcgtacccaagcgtacaacactgcgtcccgtggtagcattccgtaccgttcggtggtatctgggtatttgaagttggtacagtatagtagtacaggagagaaaataaagtcatgcatcatcgtgtgtgacaagttgaaacatcggggtgatacaaatctgaataaaaatgtcatccaatttaaaaaaaaaaaaaaaa

SEQ ID NO: 51137 - DNA, 578 bp, Oryza sativa
  Clone ID: PAT_MRT4530_53558C.1
aaagaaaaaatttttttttaaaatagacccccaaataaaaaggggtcctttgtttgggtaatcaatgacactttgattatacaaaaggggggggcaaaaaaaggtttttattttttttttacaggaaaaaagtcggcccccatgcggttttaaaaaaagggccacatcgatttttactcgtataaagcccattaattggccccatttttgtacatttttttgccaaggaaaacgattcacaaggcccccaacaatcagttgaaattttttcccaaaataaaagcctttccctcccaccagttaaaaaccgtttaaaaaattccaaaccggcccttgaaaaaggagaatttttctttttttattcccctttgtttttttaccaccccggggaacaggggaacaaatgaacccccaaattttttgcccactttccggaagggtgggtttgttccaacaccaattccaattttttcctccaaaaaaaaaaaaaaatttccaaccgaatccccaatttaaactgaaaataatggccctttcctacccacgtcgtttttgaagcttttgaatttttaaatttt

SEQ ID NO: 51138 - DNA, 1708 bp, Oryza sativa
  Clone ID: PAT_MRT4530_53559C.1
cggacgcgtgggcggacgcgtgggcggacgcgtgggcggacgcgtgggcggacgcgtgggggcgacgagagacactctcactgaacgaagctacctagcttaattacctagctactcgatcgatcatcagtctagatatggcggctttgaacggtaaggtggtggtggcggtgatggtggtggcgatggtggtggcggcgccgggggcgtcggcggcgatcacgtgcgggcaggtggggtcggcgatcgcgccgtgcatctcgtacgtgacggggaggggcggcctcacccagggatgctgcaacggcgtcaaggggctgaacaacgccgcccgcaccaccgccgaccgccaggccgcctgccgctgccgcgagacccgcgccagcgccaccatgtcgcaggccgccgggaacccctacgccgctgagctcgccgccgccaagaaggccgtcaccctcgccgcccgcctctgccaggcggtgcaaaaggacattctgcagtctggtgttcagtctaaggcggatcaaagtccggtgacagttgctgattatgggtctcaaatattggtaagccttgtcttgaaaatggaagcaccagcttcttcttccttctctatggtggctgaggaggactcggaagaattgaggaaagaaggcgcggaagaaattttagaaaatatcaccgagctcgtaaacgaaactatcgtagatgatggtacatacagcatttacttctctaaggaaggtatcctctctgcaattgacgacggcaagtctgagggaggtccatctgggcaacactgggtgctagatccaattgatgggactaaaggtttcttaaggggagaccaatatgctattgccctggctctgcttgatgagggtaaagttgttttgggtgtattggcttgtcccaacctttctttgggatcaataggcaaccttaatggtggctcctcgggagatcaagttggtgctctcttttctgctactattggttgtggagctgaagtagagtctttacagggctctccagcacaaaacattagtctctgctccatcgacaatccagtcgaagcttcattctttgagtcctacgaaggggcacactccttgcgtgatttaacaggctccattgcggagaaacttggtgtccaagctcctccagttagaattgatagccaagcaaaatacggtgccctagcccgaggtgacggtgccatttacttgcgttttccacacaaaggttacagagagaagatctgggatcatgcagctgggtcaatcgtcgtgacagaagctggaggtctggtgacagatgcatcaggaaacgatttggatttctccaaagggagatttcttgatctcgacacagggatcatcgcgacgaacaagcagctgatgccttcactcctgaaggctgtgcaagatgccatcaaggagcaaaaccaggctgcttccccgttgtagtagctgtctcaatccacaatccacaaatatcataatgtttccatataataataattgcagtgctgcttccccatcaacattactttaaatgtgtgtacagcaccactttgttgttgttgctgctgcaaattcagtatcttattgttgcagcatttctgcatctaagggtgaactggcaccacatgaatgttctttcatctggattcagaagaaataattaaattggcctgattctccct

SEQ ID NO: 51139 - DNA, 2640 bp, Oryza sativa
  Clone ID: PAT_MRT4530_5355C.1
atgatgagcgggaacgagatcgatgaggtcacatgggaagatcttgacgcggagcaacgcaagatgatggtggttacgcaggagctgttgatgaaatcatacatcaggaacaatcaaggcgtcgtgaagggaaatgtctcgcttccccaagttgtagtttcaccaaagacaggaatcggctatatgcaaaacctagataatggtatgactggtcatggcatcggtctaaccgcatcctatgccggtcagaccgtgtccaccatggccggtcagaccgtgtactatgccggtcagaccgtgccccccatggccggtcagaccatgtcctatcctggccagatcgcgcctcctgtggccggtctgaccgtacaactgaccaccgatcagaccgggccatgggccggtcagaccgggtgcttggccggtcagaccgggctatctatagccggtcagaccggttccttgggagtttctccaggttttcataccacaattagcagtactgattttaattattattcatcacctgttaatactgttagtcatgctactccacatatccctaatgtttacaatgatcctaatagaggatattctcatgacaactggtatggccaatatgacaatattgcgccgcaacaaccaccttttaggctatcaaatccaccaccaaattcatcaacgcctgaaatcatggaggaaaggaatcgtgctagggtttaccaaaagccgtatcctaatttttatgacgttgttccatatcctcctgattataaaattcctgaatttaccgagtttagtggtgaggatagtaggaccacatgcgagcataggtttagagatattaaaagccgatgttttagtttgaagataattgacaaagatttggccaacattgcatataatggattgcttgattctattaaagagagattgaatggccatatatttcttgatgttgatcatgtattgcacgaagctctggctcaggaaagccgagtggatgataatagtttaaatgctagtttagatgatagtgcaatatcatgtatagccgaaccaagcgatggttcggattgtgttaatgatttgtgcaatgatgccgtaacgagtatagccgaaccatgtgacggttcggattgtgttactcgtttagacaatgatggaatagttgaactaagtgatggttcggattgtgttgctagcttagagaatagcatcattgaaaatatagccgaactaagtgacggttcagattgtatcacaagtgaaagtgaaatagcattgtcacctaagatcgaatcacaagtcggtcaggttgatgttggaaaagatgatgacaatgtcttgcgggatagtagtgaaatagaatccaaagtagctatgcatacatatcaaagaccgtatcctgaacacgtagattcggtcccctacccgcaaggatttgaggtgcccaacttcacaaaattcataggtgaggatgctagaacaacaatggagcatatcagccaatttattgatcaatgtggtaaggccggtagtgacgattttcttaagttaaaattgcttcctctttcttcgtcaaactttgcatctacatggtatagtttacttgctcctaattcaatttctacatggttacaaatggagcatgagtttcatgattattttaaagatgcaagcttgatagagcaaagaccgattgatgattcatcggtcatttgtgaaactatttcggttacatctatgcctaagaccggaattgttagtgatcctctctctgttagttctattgatgttggcaaaaagaaagggaaaagtgttattattggggatcctcggcccaagaatagaataaaaaatgcgaaggccgaagatcagaaagttgcaaaggatgagtcatctagtttccaaaatgccaaaaggccgaagctcacttttgagatgcttatgactaagtacaagaaaggattagccggtcaacgatttgataatcaaactagtgattcaaaaagaccaagatcatctcgtacggagagatttggtcaaacaccaaagcaattggagccatcaactataccaactccatacaaacctccggttgtgatgccatggtatctacatccaatgtcaccatttggttatccttctatgtattacatgccatggatgcctcaaccacctatgccgtgtcatcaaggatggaagcaatcacctaggacagtaccaagccattctaactcaagacaagaccgtttcccacaaaagaatcggtccggtggatcaaaggtgaaaaaggtgaagaagtgtggtatttatcttgccttcgaaatcgcgcaaccaagaaagccaattttgttcggggggcaagacatcaatatgcttatgaagaaatcaagagagatgaacggcgatggatacgacatcacatttttgagccgccgtttgttggatgctaaggcaaggctaatgaataagccgagtcagtatttcaagcaagatgactcgtcggttgaagatttcaagactttgatgggaagcaattttgaagacgtcatcgacaagcgtttgaagactttgaaggagatgaagacacttcaagatggtgttttcagagagcaattaatgggaaatacttga

SEQ ID NO: 51140 - DNA, 309 bp, Oryza sativa
  Clone ID: PAT_MRT4530_53560C.1
atgtcgtcgtctaggccaccgtccgccgtggcagtcgtcgtcgtcgccgtcgcgcctcacgcacgagccgtcgcagccatcgccgctgctgcgcagggagccaccgccgcctccgcctcgcgcgctggagccgtcgccactgccgctggatcgatgggtcgatgctgccacgcgggagaaaagaaatgggaagagaaagagaaagagaaagaggaggaagaggaagggaatggagatgggaggatgacatgtgggtttctttgtgattttggagatgtaaatagagagactgttggagcatacatctag

SEQ ID NO: 51141 - DNA, 522 bp, Oryza sativa
  Clone ID: PAT_MRT4530_53561C.1
ctcattctatttaagcaattggcatacgatgcaaatttcctgcgtgtgcctgatattcggtggcttggggtcttcacatctgattttgaggattatcgccttccagactgctgcctacttcacttgtcgtctgaagacagaaggaaagctgaaggaattctctcaaggtgttacttgcacagggaagccccacaatggaggttggagttagaagccatgttgcaaaagggtgtcaaatttgagattgaggcgttatctgcatgttccatttcctttttatcagaagagtacattcccaagaagatcaaacaaggaagacatatataagattggttgtacctgtatctatccagaaattttcatgtggcaaaagtcttattttgtttttgtcatgctaactgtagtcacatgtatggcactctggtagtttaacccccagcaagtattttgtagcaattgtttatatatgacggtgatttggtgctgtctcaagaactgaaaaccacaaatttacagcaactg

SEQ ID NO: 51142 - DNA, 533 bp, Oryza sativa
  Clone ID: PAT_MRT4530_53562C.1
catatgttcgcccacaagacgctgcggattccggggcccggtaggcacccacccgccgccaccgccaccgccaccgcgccatcccatcctcctccctcctcttcccctgccgccacccatcgtcccagagaatgggctacgcggcgccctccgaaaaattctgccttggatccactcctgaaaccaccgcagagcacagttgcaccatccatggacctcttgcagaactactatggccttgctcgacctccaaagggggacccagaaaatgaaggcactgaaatggcgacatacagtataggtcagcatacgaaagctagaagcttatcaacgggcttttctcttgtaaatggtgaggttgacgatgctgaaaagccaataagacgccgccagaaatctgatgctgagttctcaacaagggagggcaacagtggtggtgtactgatgaaggccggcccgggcttgcgctgaggccaaaatctggcagtcgaccggaaataaacaacagccagcaagatcttgtagcaaccgca

SEQ ID NO: 51143 - DNA, 419 bp, Oryza sativa
  Clone ID: PAT_MRT4530_53563C.1
agaggaggaaactgaacatatacactattacagagtagccacattgatcatcaacggctagcacggtctcagttggttagcagaagacgctgatggccttcattgtggccatattctgcgcacagattagcgaggcgtagattaggttcaagcacaggcactcccatcaaaaagcgctagacagaccgctgtactcctgactgcaggtgctcgaccggcagcttacccgccgctagaggttctaacggatgattccctgcccgggcacgctcgggctgagatgcaatgctggcaacatctgctggacctgagcctctagtgccagtgcaccgacatccgccagatggtgatgagctacaacgagagcatgccgatgcacatagagcaaggatgttcgtcgactctgattgaaaactaca

SEQ ID NO: 51144 - DNA, 1508 bp, Oryza sativa
  unsure (1)..(1508): unsure at all n locations
  Clone ID: PAT_MRT4530_53564C.1
ggcggagaggaaggtgggcctcgccgagatcgagcggctgcgcgcggacaacaagcggctggccgcggaggccgccatggccgccgcggcgaggcggaagcggaagggcgggaacggaagcgggtggctgtggtgggcgcgggtgcggatggcggcggagtggacgccgtgccgccgcccatgtcgtcctgcggccgctacatcttccaccgcgtatgcaggttagacaccatagcaggcgtcgccatcaaggacggcgtcgaggtggcggatgtgaagcgggtgaacggcctcaccaccgacctccagatgttcgcccacaagacgctgcggattccgctccccggtaggcacccaccngcngcctttgcctgcaataacaacaatataaattatttcagagaatgggctacgcggcgccctccgaaaaattctgccttggatccactcctgaaaccaccgcagagcacagttgcaccatccatggacctcttgcagaactactatggccttgctcgacctccaaagggggacccagaaaatgaaggcactgaaatggcgacatacagtataggtaaagccatcactgtttgcttggatgatgaactacgaattggagatcaactaataaactaatttatgaatctgatcctcatccaggtcagcatacgaaagctagaagcttatcaacgggcttttctcttgtaaatggtgaggttgacgatgctgaaaagccaataagacgccgccagaaatctgatgctgagttctcaacaagggagggcaacagtggtggtgtactgatgaaggccggcccgggcttggcgctgaggccaaaatctggcagtcgaccggaaataaacaacagccagcaagatcttgtagcaaccgcagtgccttcatatggtgatggattgcaagctgtgaggaagtcatcaagcaccccagaattccaagattcagacaacagcattgcatctgtgtggcttaagagcaagtggaacttaaaaccagatgcattcaccctccctctcccaatcctgcttctcgacagcattccaaagcctattttcgacacctttccgaagcaaattgctgcttggagaaacaaggctgccagggattagtaaggtttgcattttggttatgtgctttgcaagtaagggttgtttttggttcagaataggcctggaggagttcggggttggtttatttttccccagccaaacagaagaactggttcaggcagtggatattataaagacagaaacacttttagatttataacttacagggatggtgcaaaatgatgtgttggatatattaaaccctagagttcaaaatacatattacagtgtactaaatttgttgcagcaaagcagcagcagttgttttcctgtcataaatttatactagttgggacctgaaagcccctttgggggttattggagcttatttttttgtacccaaagcagaactgcacatagggaaatatatagatcagaggg

SEQ ID NO: 51145 - DNA, 496 bp, Oryza sativa
  Clone ID: PAT_MRT4530_53565C.1
ggttccctccgtgttgttgttggtatttgttacgaccacagataaatccgcaagcgtacggaataccgctatagcacttcaccttcgggtgacccctaaaggatatcgaactcagggaacgattactaggacgggattcagggctgtcaccacctgctgtctacctctgacaaatccgtgggatacgcaacaaacaaagagaagtttctccgaacccggagcagagtgtaccgacaactccggtactcctccagaattcttcctagaaagctacacccatcgaggtagaagtcggatgagcgccaaacttccgggcactccttcagagcttccctcccctctctccacctaattctaatgtacaaaagatacaatagagcctcttgtaattcagctcaaagttgtgtttattgaagtgagtgagagctcctccttttataagctccaaatgacggttacaagtatgggaaatgatcaatgtgccctccaaccatca

SEQ ID NO: 51146 - DNA, 447 bp, Oryza sativa
  Clone ID: PAT_MRT4530_53566C.1
atcaacattcaactcaatagtcacaataagacacaaaacaaaacatagtagctcactcttcacaatatgaagcacgcccaccttggactcatgttgttctgcttggttcttctagttttctttgctatccctgcacaaatacgaggtcaaagcacaagcagggccccggtgggagttagcattggagaacttaaacttagtgtttgcttttcggcccctccatcgtggtcttgctgttcaaaggacaacctgtgctatccatcacttgaggcatgcctggaaaagtgcaagtacgatgaataggcacgcagccgactcagaggctaagtgctccgatgtgtgattgaattggacacaatatttactaataatcatatatccggtatatttgggaataacatatgtatatgttccaacagatatgcattttctaaatccatattgaag

SEQ ID NO: 51147 - DNA, 350 bp, Oryza sativa
  Clone ID: PAT_MRT4530_53567C.1
tgcttgcggtaggatccaggcatggcttcccaggtctccgccgccacatccgtgccgcagttacatggactccggacctactgctgttctacgtccatggggacgctggcatcggtgacgatgaccaagaagaggtcccagggcatacggtgcgactacataggatcatccaccaacgttatcatggggacgaccacgacgctgatgctgatcgcggggaggttcgggctggcgccctcgacgaacaggaagtcgaccgtgggactgaagatggaggcgcgcgaatgctggctgcagacctgggatcccgccgggttcacgctagcatacacgctggcctgcggcgccgt

SEQ ID NO: 51148 - DNA, 333 bp, Oryza sativa
  Clone ID: PAT_MRT4530_53568C.1
atgcccaccacccgtgtcgccgcccgcaccgccaccgaccgctcgcgccgccgtcgtggaaggccagaggtctccaaggccgcccgctcgccaaatccgttgccgtcgaggaagttccgagctaggacgccgatgccgcacgcccactcgccggatccgcctcccccactgcgcgccggccgtcgccgtagccgcagccgctccctgggggggatccggccctctcgagggcggcaccgccggatccaccgcccgttgatgccatcgctgcccggcggcgctctcggagagggagagggagaggagaaaagaaagaaagagaggagaggatag

SEQ ID NO: 51149 - DNA, 225 bp, Oryza sativa
  Clone ID: PAT_MRT4530_53569C.1
atgagtagtaacatctcagaagggatgggacaacaaccaattggaaaaatattccttttacaaagacatggacaaagaaacgtcgtcttgagcttcaagaagggacgacggtgcccagaacctcaggtgaagcagatctggaaccaccttgggggcgtggagatggtggattcatgtgggatgggccacatggatgaaccaccgggggcaatacatcgtggatga

SEQ ID NO: 51150 - DNA, 1635 bp, Oryza sativa
  unsure (1)..(1635): unsure at all n locations
  Clone ID: PAT_MRT4530_5356C.1
atcctaaaatttagtccaatgtaccatttactcttatcggtatgatctacctccaccatctcattctttgttggaatgctatttgtaccttattatctatactcctttcaaaaaacttcaatagtgcttgcgtcgtggatcccgactccgccgcgaccactgtagctgggatggggtgacgtgctctgacggcggcggcggtgggggggtggtgacnganctatccttgtctgacatgaagctcacctggacgctgcccgcggcgatgtgcgacttcgtgaacctgactcggctcgacctctccaacaccggcctccccggcaccttccccggcgcgacgctctaccgatgctcccagctccggttcctcgacctcgccaacaacaccctccacggcgccctcccgcgtgacatcggcaacctgtccccggtgatggagcacctcaacctgtcgtggaacagcttctccggcgccgtgccgcccggggtggcggcgctcccggcgctcaagtcgctgcacctcaacagcaaccggttcacaggggtgtacccggcggccgagataggcaagctcgccggcctcgagtgcctcacgctggccgacaacgcgttcgcgccggcgcccgtgccggtggcgttcgccaagctgaccaagctcacctatctttggatgtcagatatgagcatcatcggcgagattccggaggcgctctccagcctcactgagcttacgctgctcgacctgtcttcgaacaacctcaccggtgcaattccggcctgggtgtggcggcatgagaagctcgagtgcctctacctgttcaacaacagcctcacgggcgagctgccacgcaacgtcatgacggagaatctgattgagatcgtcttgtctatgaaccagctcagaggagaaatgtcggaggattttggtaacctcaggaacctcactttgctttctctttacatgaacaacctcaccggcacgatcccggcgagcattgggctgcttcccaagctcagcaccatctggctggataacaacaatctcttcggcgagctgccaccagaactcgggaagcactcaccgctcagcagcatcggtatctccaacaacaacctctccggtccgctcccggaaacgctatgcgccaacggggagctctacggcatttacgcctccaacaacaacttctctcgcaatctcccggctaatctcggggactgtgttctgctgcaggaactcgtgctcgacaacaaccgattctccggcgacttcccggagaagatatggctgctcccagagctagaaattgtaatgataccgaacaacttcaccggagtcctgccagccgtgctatcgtccaatatccagcacattgagatggggaacaacatgttctccggctctatcccgaggacagcgatcggtctgcttgttttcacggcggagaacaaccagctggacggtgagctcccggccgacatgagcaagctcgccaacctaattgaattgaaagtgcctgataatcgtataactggtccgatacctgcatccatcaagctgttgctgaacctaaaaagtcttaacttgtctggtaaccaactgattggtgccatatctgatggagttagaccaaa

SEQ ID NO: 51151 - DNA, 612 bp, Oryza sativa
  Clone ID: PAT_MRT4530_53570C.1
atggctcctcgcctcgcggtcgtcgtcgccctcgccctcgccgccgccgccgccgtcgcgcacggcgaggccggggtgcgcggcgccggcacgctccgcggctacgtcgcctgcctcgactgcgccccgggccacgacctctccggtgtggtggtggcggtgagatgcggcggcggcgatggcggcgttggacagctgcgggcggcgcagacggacgagcgcgggggcttcgacgtggccgtgccggcggccggcggagacgacgtcgacagttggcggagccacccgcggtgcgcggcgagggtcctcggcggcgccgagcagctctgcgcgccgggggggctcgccgtcgcgcccgtggtcgccgcgggcggccgggagaagcacgggtcgtacgcgctggcgtccagcctcgccgtcttcacgaggtgcggcggcggcgccctagcgtcgtcgacggcggcggccaccggtaacggccagagccccgcgccgccgcgggcgcgcagggcgacgccgcgcgccgggcgcgccacccctccgccctacgccggcccgggccttccgctcatctacttcttccctttcctgccaatcatcggcatcccctga

SEQ ID NO: 51152 - DNA, 295 bp, Oryza sativa
  Clone ID: PAT_MRT4530_53571C.1
aatcaaatgggtaatttaatccttgtaagcctgcgtcatctatacaaatggggagtgcctatactaatacactctattcccctaaccctccactcacaccttattaagatccttccctttaaaaatgaatccgatacatctaaggtctttacaactggtactttaagcttttactccaaaatatactgtcctctatctcctcctgaggccttgactatctaaaactccctattaacgtcttcaacttgcaagcctttttattttcctgcttctatttaatcgacttcttttttcc

SEQ ID NO: 51153 - DNA, 2325 bp, Oryza sativa
  Clone ID: PAT_MRT4530_53572C.1
atgaatctggacaaagcaattgatgctcctggtggctttctttttgagtggtggtcaatattttgggatatattcatagcacaaacagatcgggaacattctgatgttgcaacgtcatatattgagactcaacaagcaaaagcagagcatcaaaaacaacagcaacaacaatatcatcatcaacaacatcagcatcaacaaatacaaatgcaacaaatgttattacaaagagctgcacaacaacaacaacaacaacaacaacaacaacaacaacaacaacaacaactgcatagagatggttctcatctttttaatggtatcacaagtggattttctggaaatgatcttttaatgcgacataaccctgctattgcaaatgctatggcagtaaaaatatatgaagagaggttaaagctcccttcccaaagagattctttagatgaggcatcaataaagttgcaacaaagatatggggaaaaatatgggcaagtgcttgatccaaaccaagcatcattgttgaaagcagctacatgtggacaatcttcagggccaattttgcctggaggtattggtgacttatcaagtactctgcaacaagttcaggcaagaagtccgcgacttcctattccagaacagaatatcaaaattaggatcaatccaattttgacaaatagagatgttatttctgatggatcattacttggtctacaaggatctaatcatggtggaagaaattttatgctgaaaggttggtcactcatgcagaagccgctcctacaatcaccccaacaatttcaacaactccagtttctaactccacaacaacaacttttgctgcaaacccatcaaaacatggcttcccttccagctaatgatgtagagactagaagattatggatgcttcataacaacaaaaatatggccattcatctagatggacagattaataataatagtggtcatattattccaaatattggttcccctgaccaaattggtggatcacgtaataagatagatatgttaatagcgaaaattgctcatttacaacagttgcaacaacagggtcatagccagcagcaacagcttcaacagtctacaatctcccatcagcaggctcaaagcttgaatcagcttcaccatcaacaggctcaaagcatcggaagtatgctagatgggagcataccaaattcttttggattagctaaccgagcatcaaagaagagaaagaaaattgtctcatcctctgaaagagctaatagctcaggaacatcaaacaatgttgggtcgtcttcaagttctgcaccttcaacacctttcactcacactccaagagatgaaatgtccatgccacaactgaagtataatggtggtaaatcaaaatcattgtctatgtttggctatgatgacaccaaaagcttgatctctccaacaaatccactgggtgatgtagaccagttgcaggaagatggctccttggatgaaaatgtagaatcttttttatctcaggaagacatggatcctcaggagaccatggggcattgcatggatgccagtaaagggtttggttttatcgaggttgcaaaagctcgtgcaagtacaaacaaggttgattgttgtcatttctcgtcggatgggaaacttctagccacgggaggccatgataaaaaagttgttttatggttcacagatgacttaaacattaaagctatatttgaagagcattctatgataattacagatgtccgatttagctcaatcatgactcgtcttgctacatcttcctttgacaaaaccatacgggtttgggatgctaacaatccggagtattctctccatactttcataggtcattcaacatctgttgtgtcacttgattttcacccaaataaagaagatataatttgctcatgtgacagtgatggggaagtgcgttgctggagcatagataatggtagctgcgtgaactgtgttagggtatttaatggaggtgctattcagttgagatttcaacctcaccatgggaaatatcttgcagttgtctcagaaaagatgatttccatactagatgcagaaacgctgcacatttataggagtgatctacaggggcacttaaagaatatccattcagtttgctgggatgctacgggtggctacctagcctctgttagtgaagattctatcaagtctttggagctgtgggacatcagggagaagaatatcgtgaccattaacaatgctcatgatggcatgattccatcgctagcagcatcaaatgcatcagggttgattgcctcaataatcataggacaaaatggcagctaa

SEQ ID NO: 51154 - DNA, 422 bp, Oryza sativa
  Clone ID: PAT_MRT4530_53573C.1
ccatgcggattattgtctctcttttatccaccgcagggagggcgcacatcgcgactagccgtgcgtcagcagtggtcgggtcggtcggttacaagatgatggcttgcagggccctaccgctgctaacgctgccggcgcccttgcgtctattgcgtccgtgcgacgacttgctcgcgcggttcgaatccgtgcgtcgacgagcctgtgcctacttattggtccggtgctgtgccaacctcgtcggtcccgtaggccaggaggatccggcgtaagacgccgtgctcatggccatatcccaggtatagaactctaaacgtgaggctgatacagatgacaaatgttgacatgggtggaactgtgacagacgatgctagacatgtagggcttgaattggataagcatgttaatgcatagcctacagt

SEQ ID NO: 51155 - DNA, 163 bp, Oryza sativa
  Clone ID: PAT_MRT4530_53574C.1
gggatggtactcttatagaatcgccgggaactattctaatccaataatatattgcgcgggcgaatatttactctttcctgtcttatttgctaattcataaccttataaaataagacaatttcttttgcttacatccgacataccacccactgaaggattggga

SEQ ID NO: 51156 - DNA, 333 bp, Oryza sativa
  Clone ID: PAT_MRT4530_53575C.1
cggacgcgtgggtcagcatctaaatacatcgatcttgactccggatttttcaaaaaaaaaaaaagggaaaaaaaaaaaaaaaaacaaaaaaaaaaaaaaaggaaaactggattataaagctacccagtttacaaaaacgtggggggccctttttgaggttccaaatttacttaccctggcttgcgacgttgttctttttttttagggtcacctaatttaaattacctggccgttgttttacaaagtcgggtctgaaaaaaccctggtttacccaaatttaatacccttgaagaagatcccccttttcgccgttgccataattggaaaagggcc

SEQ ID NO: 51157 - DNA, 741 bp, Oryza sativa
  Clone ID: PAT_MRT4530_53576C.1
gtcgtggtaagcatatatgcatttgcagctaaatgactattacatttacttacggcggaaaaattaccagatgatgctacacgtgctttgctaaaagcctaaaagtaaaaggcgattagcgcagatttacaaactttttacttttaaaatgaggaaatacataagatgaatgtgaaacgctacggataatggattgaagattttacatacaacatatgtgcacgaaatatgtgcaaaaataacaactacaatgtcatacagcgctgttcctggatatcacggtcgtcgcaccttcacacgtttggcatctgcgcatgcagcctccaggtctccaaggaagaacaagatccgatcggatatctgccgctgctcgtcctcgctactctgcgcaggagcgtccttgctatcgcagctcacatgctgtctcgaccccaagtacctctggatctcaccctggtaaatcaggtagtaatcgcttccttctctgataatcctgacacccagcccatatcggtcgcatcgatcctgcacaatgaagacgtccttccatgacctggagccctctggcgcgtagaacgctgcagcatccgctccccacctgtccttgaacagcctgcgccacagctcgtcgtcggaggtcaacgtgttccacttcctgcacacttggggagcagaggcgagagattggtgatccaggaggtggaagatcttgatgcacagctccgcaggcagaccatccat

SEQ ID NO: 51158 - DNA, 456 bp, Oryza sativa
  Clone ID: PAT_MRT4530_53577C.1
atggggaacgcgtcgtcgatgctcacccagtacgacatcgaggaggtgcaggagcactgcaactacctcttctcgcagcaggagatcgtgtcgctgtacgagcgattctgccagctggatcggagcgccaaggggttcatctccgaggacgagttcctctccatcccggagttctccctcaacccgctctccaagaggttgctgcgtatggttgatgggctgaacttcaaggattttgtttccttcctctctaccttcagtgcaaaggccagcgttcagcaaaagattgagttgatattcaaggtgtatgacattgatggcaaggggaagcgagtaataacaaatgtactggaagaagctggatacacaagggattgcacgctttctttggaagattttaccaggattatagatcatcctggcctaaagatggaggtggaagtgcctattgactag

SEQ ID NO: 51159 - DNA, 1211 bp, Oryza sativa
  unsure (1)..(1211): unsure at all n locations
  Clone ID: PAT_MRT4530_53578C.1
ggcgattgggaccctcgaggccggccgggaattgacaccgaagcacataataatgctcggtcgcgtcgcctccgcctccgcctccgcctccgattgcgtcatcgagatcgatcgcgaggaatatacgccccatatatactctactactcgccttcgtctccttcgcccacacgtcaccgccgctcgccgccgccgcctcgccgttgacgggcgggaggaagggcggtggccatggggaacgcgtcgtcgatgctcacccagtacgacatcgaggaggtgcaggagcactgcaactacctcttctcgcagcaggagatcgtgtcgctgtacgagcgattctgccagctggatcggagcgccaaggggttcatctccgaggacgagttcctctccatcccggagttctccctcaacccgctctccaagaggttgctgcgtatggttgatgggctgaacttcaaggattttgtttccttcctctctaccttcagtgcaaaggccagcgttcagcaaaagattgagttgatattcaaggtgtatgacattgatggcaaggggaaggtaaccttcaaagacctggtagaggttttgcgggaccaaacagggtcattcatgacagaggaacaaagagagcgagtaataacaaatgtactggaagaagctggatacacaagggattgcacgctttctttggaagattttaccaggattatagatcatcctggcctaaagatggaggtggaagtgcctattgactagtggcccgtgcatatctctggttttggttgctgaacataactgtgcataatcaataggacatgcaatgcaacagaagaacgggcgttcatccttctgctttcttctgtactgtagttccacaattccacatgcctcaaccccagtagtttgttacgatgcatgactgaatcttttgctcatctcgccgtgagcctgtcaatgtaatttagtggatcttgtcccctattgtagagacaaaaactccaaattttggcgatgtgcaccggtttcacatgttgaattgtgttgatgcttgatgtgcacatcccaagtcgtgagatcaaatatggatggctcagattaagtattaatacctaagcttgttcgttactagggattaaatccccaaggggaaccaaccagggagggattgcnntgaatcccttccatgtcactcaaaaaaaaaaaaaaaa

SEQ ID NO: 51160 - DNA, 153 bp, Oryza sativa
  Clone ID: PAT_MRT4530_53579C.1
atggggaacgcgctgcgcttcagttattcctctgatcttgtatctactgacaccggcaagatgtgtaacaggaacaatctgaaggacaccctgctctctgtctacgggaacaatctgaaagacgccgtggacgacgaactagtcgaggcctag

SEQ ID NO: 51161 - DNA, 389 bp, Oryza sativa
  unsure (1)..(389): unsure at all n locations
  Clone ID: PAT_MRT4530_5357C.1
ggcgtctgcggatgcggtctcgccggcgccggcgacgtccgccgcggcgcanagcagctgggaccgtggtgctgagggtgtccatccactgcctcggatgcaagaagaaggaagcagagaagaaagaggaggagcaggaggcgaacaagcgacgaggcgaagaaggacgccggcgggagagcgaggcggcgccgnaggaagngcgaagggcgacgacgttggcgccgaacccgccaaagaagccgttcccgcggcggcgttgaaggaggttagcaatgacgacgaaggagcaaaggacgagaagagcaagcccaaggacgccggcgacgcgcgccaccngcngccgccacaacgacggagagttccttcantttttgcctacgccacgg

SEQ ID NO: 51162 - DNA, 1361 bp, Oryza sativa
  Clone ID: PAT_MRT4530_53580C.1
atgaccacgctcctgcgccgcctcctcttgggcgccaccccggccgacgcgttgctcaccggccgcctccccttctccacctcctcccgccgcacgccgcaccgcttccgccgcagccgccgctccccgaaccctgcgccgccctcccctgaagccgtctccgcggccatcgccaccctcccgtcccgtctcaccccgcctctcctctcctactccctctcctccgtctccgacgcccgcctactccttccggtcctcacccactcccttcgtctcgccaccttccgccctgacccgggccccttcctcgtcgcgatcaagcgcctcgccgccgccgatctctacgccgatttcgaccgcacctgcgccctcgccttctccctcctcccctctctcccgtcccccgggcccttcctccgcaccgcgctctacttctactgccagttccgcaagatcggcaaggcgttccacgtctacaccctcatgcgcgcctccgccgaccccgccgcgcgcccctccgccgacacctaccacgcgctcttcaccgcgctcttgtcccgcggcggcggcgacaccatggtgcactacatgtacatggacaccgtctccgctctgttccggcagatgctggaggagggtgtcccgccggacacgcgcgcgctcaacgtgctcgtcaagggctacgcgcagtcgctgcacctcaacgacgcgctgcgcgtgttccaccagatgcggcccgtctacggttgcgaaccggacgccctcacgtacagctacctggtgcacgggctgagcgagcagggccggacgaggaacgcccgtgaggtgttcgatgaaatgctggccaaggggctggcccctacggagccggcgtgcaacacgttcgtcagtgcgctggccatggcaggggaggctggggaggcggagcgtgtgatgtgggacatggctcgggcgggaagggtggtcgacgacgtcacgaggagggcggtggtggaggagctgtggagatcggggaggagggacgacgccgaaagggtggtgagggagatggaggagcgaggcatcgtgggtggcgctgagcggagagccttgctacgttcgctgcacgatgagttcggtgacgacgatttggatgttgatgatagatggcggaacacaaggtgattgtctgacagatggagagttgagaagcactcataatccatccggccatccatgtcccaaaaacatggcaatcaacattgaacactactaaatgccatgagatgtaacagaaaattttgtgataaagtatcagtaaaattcatttgcaatgatataagggttaactgcaagattgatatttaaaaaaaaaaaaaaaa

SEQ ID NO: 51163 - DNA, 586 bp, Oryza sativa
  Clone ID: PAT_MRT4530_53581C.1
ggggaaaaaagcagagggaaattatattaaaaaacccggccccccaggggaaagggggcaggagaccctgaagaaaacccccagaggaaaaaagaaccccccaagctaggtggggacccctccaaaattgggggaaaccccccccccctggcaacgaaaaaaaaggttttatttagggggcaaaaaaaaagggaaggcccgcccacaaaaaagcgggggaccaaagcaagcaaaaaaaggccccgaacaaagctttgatcgaaaggagcagcacccaaacaaaaaaacctcatgcagccgggggaaaaaaaaaaaaaattcaattgcaggaacaaaaagaacaccccctgcaattggggccacacttgcagggggtgaaacccaaacccccgtttttgccggtttccaccggcattttcatttctccaaaaattgccttggtggggggggcaccgaggacaaagggcttggggggggggtggggcccccacaatagggaacattttggatccccccaaaccccccccccactgggaacccctgccccaacccaaattgcccccccaaaaaaaaatttttttttttt

SEQ ID NO: 51164 - DNA, 525 bp, Oryza sativa
  unsure (1)..(525): unsure at all n locations
  Clone ID: PAT_MRT4530_53582C.1
ggcgcccgtggtgttcttctagacggcgagctcgatgtggggaggaacgataccagcacacttcactgacatgacacgattgggactgttgtacaaatggagccactactacaagcgctgccaaggactgccgaacacaaccgttatgcacgagctgcccccagctctgaaacaataacacccgctacgcggccgccatttcggaggtggccaccatttttccgccaactgcgactgttagggcatgacccccagtctggactaatgaacactgcatgaatgcaggactaccgcttacttggatcaactgcgtgaacgtcgtgcgcctgcctgaaacatcgatacagagacccatagcgtgctgccagcgacccctggacgtaccagcatgatactgacctgaagggcganaaaggcgaaaggcccaccacgagctaccacattgtggtcacctcgtgagaatggattcaccccatgctggccagcagcgagcagcaactgtgcttacagtagagagacaaagag

SEQ ID NO: 51165 - DNA, 261 bp, Oryza sativa
  Clone ID: PAT_MRT4530_53583C.1
atgacggagcttggggctcctcaccgggagaccgcgcaggcccccctttgccggttcggccgggggctcggggaggagggcggacacctcaccctcgggcccgacgtccccgagggtgccaggccacgtgggcgattcctcgtcgccgcgtcgcgcaagccgccgtcgtcgccggtcaacgtgcagccgcgctgcgccgtcgccctagccgtcgccgttgcctcctctcgccgctggcgggtgcgcgtgaccgagggctag

SEQ ID NO: 51166 - DNA, 930 bp, Oryza sativa
  Clone ID: PAT_MRT4530_53584C.1
atggcggcggtaactgtgctcgattgccaagtgttcggcattcacaagatggtgctactctccgagacagcggccgcgccaccgccgccgccgccgctggcggagcagcagacagcgccaccggcggtcacgctacggcttctcgtccagcgggcttgctgctaccacgacagcgacgacgacgccgacggtgtcgtcgaccacgacatggacacaatggaggacgtgatctgccgagcgccgctccgcgagctgatggcggatgatcgcgacgacgatggcgcctcggtggcggagcgggcgttccgggagatgttggccgggatcgagcaccagacgctgctcccggaggtcgagccggaggtgtcgaaggccgcggcgcgcgtccgggcggtgtgcgagggtcgcccggaggaggagatcgccgggctcgagctccgcctgcacgtcctgctcgtggtgcacgtgttcggaggcgccggcgacgacgacgagatcgggagcgacatggatctcagcgacgtgtgcggggaaacagaggacgacgacgacggcgtactcatcagcgacgaggacgacgacgagtacggcgtctacggcggcggagggtgcgccatggcgcgggagggcgggccgagcgacggcgcgctgctgctgtcgggcttcgcggcgcgctccgacggcgcggagctcgacgacgacgaccagctcgaggtgacgccgcgggacgtccgccggctggtgcgcatggcgctggacggcgaggacgtcgagcgcgacgaggcctaccagcgggcgcttgccggcggcacggccgtgtcgccggtgtcgctcgccgcgatggtcgaccaggcgctccagtccgttcgccggcagcagcagaacgcgccgcgagacggcgtggttcgccggatgcgcaccggattctga

SEQ ID NO: 51167 - DNA, 479 bp, Oryza sativa
  unsure (1)..(479): unsure at all n locations
  Clone ID: PAT_MRT4530_53585C.1
gtcnagattgctcagatgttctctagaccgccgaggtgtttttgcattggatgccccgttcaccatcaggtgtgccttctgattcagctatgagaaggctgccccactgaggaagggggagtaacaccctctgtttattctcgtaaagaacctgttcacttgactgataaagagaagccaaaaattgcaagtctggtctcgaatcatgccatatagagagtcgttcgcatgggctatgattccactgtttgagaacaaccaggctggtggtgctgcctctcccagtagccctntagcaccaagtatgtcaggctcaagttctcaagatagtatagtggagcctatttccaagctcactttggatggaaagctcaatcattattcaagtggaagctcagttattgtagagatatcaaatttgaaccaagtgaaccatatttatcgaaccttgactttctccattctatttaaaaaaaaaa

SEQ ID NO: 51168 - DNA, 228 bp, Oryza sativa
  Clone ID: PAT_MRT4530_53586C.1
ccggccgggaattacatttcgaattctagggctttgttggccaacataccacccccaacctgaagacttcccctccgccgctcgcgtcagacgactatttccccgatgagtactgccgaacaacgggaccgtggattaccccgccttccagatggtcgtcgtctgtgatgacgttaatgataaaattacttatgagaagaggaatatcactgcagagtatgaatagaa

SEQ ID NO: 51169 - DNA, 446 bp, Oryza sativa
  Clone ID: PAT_MRT4530_53587C.1
cccacgcgtgagagtacgcgtgggccaagtccaacgagccacaccctgaaaggctaaaattgcgcaagcgctgccgacggcgccatggaccgcgatgcaagagcaggagacgaccctgctaccgaaggaccaggtgatttgcctggcgaggccaagatgaccctgcgatatgtttgcctactcttacaagcgggcaccttacaggcagatgccagagtatccaaaagataagctagtcacgaaagagtgctctacctagagcacaaaaggcgatctacacatcaactacgaggagcacagccagcaaacctcccaaaaacctaggaacgcagaagctggacgtaagactaaggcgcgtcaaagcagcctgtattcagagcgtaaaaggcaagctagacacgaacgaggaggaacacaagcgccaacctgactgaccgcgagggagc

SEQ ID NO: 51170 - DNA, 365 bp, Oryza sativa
  Clone ID: PAT_MRT4530_53588C.1
ttgtttttttttttttttttttttttttttttttttttttttttttttttttttttttttaaaacaaagttcccacgccataaatggggggcaaagggcccccaacgcagtttttgaattcaaaaagactggccaaacagcccaagggtttcatcatagcaggaaaggtttttaacccgccacagaaaagggaccctcaggcaaaaagaaaactggagggggggaccactagcaaaatccgggcttaggaaacccccctgattttggggccagcacccgttccccctgccggggggggatcgcccttgaccatgccgccggccatgtgcgggccagggccctggtacattttggggaagaagggg

SEQ ID NO: 51171 - DNA, 872 bp, Oryza sativa
  unsure (1)..(872): unsure at all n locations
  Clone ID: PAT_MRT4530_53589C.1
gggctgaggctcctggagagagcggcagagattggacccgaggagaaggagcccatcatcttctacctcagcctcctctgcaattccctcatgctgttctgctggttgtgtatgctcgatatggatagctgtagatgataccagtgttctcaactgctgctgctccactgccacatctaaccgcgttatcctcttgaaattccctatgtataacacagagagcttggtgagatgagaaaggagctgtgatagctctttcccattggcaacacaatccgagatataaagttcctcaacaggaagctgccatttggcatcactcaaactggttaacggcacgaacaaactgcctgaaccactcacagataaaatcttcaatgaggatagcattagaagggactccatatccaaaggcgggcatttctccatagacaactcttgcaattctgttaaattattgaagactaacaccttttctagactgtgcaagttattattgccagtaatagacaaagaggaagttttagagtatttcaattcctccattagatttgatcccacatctgttattctgacatagtccaaagtttgagtccaagggataggtggaaatgacgagatttctatacacaaagatatttcaaactcttctaatttcggaaaccaagtcatattcacatctttcttccgagggtcaccaatattatcaataaatggcagctccaagagattagggcaatttttaatttccaaggtttgcaaatctgggaagaaagtattacagtcctgagtaatccattctgtcaactcctctaagtcgatcagtgttagcctttntaaactacaacaccatngctccagaacgaacttac

SEQ ID NO: 51172 - DNA, 550 bp, Oryza sativa
  unsure (1)..(550): unsure at all n locations
  Clone ID: PAT_MRT4530_5358C.1
gtgaaggtggacgccgcgatgcacaaggtgacggtgaccggcacggtggacggcgacacgctcgtcaagaggctgtacaagtccgggaagcaggccgtgccgtggcagcacccgcacgtggcgccggcgccggaggcggtcaaggcgatagaggccgtcgccgcagccgcaggcaatgcagcagcagtggtcgccgtcgtacctgtacatgccgtacccgcactcgtcgccggacacctactaccgcgactactacagcccngccgggacggcgcacgcgccgccgctgcaggacgagtaccgcatgttcgacgacgagaaccccaacgcctgcagcgtcatgtgaacgccacgcgccgtcgtcgtcgccgtcggctagcaggccaggccggccgggagaagtagtagttgaggagaggtagagtagcttgtttacactcttctccattgtagaggtcaaagctcttcttcaccgagcattttcctttttttttctttttccttttttttttcttcacttcctctcttacatgtctaaataactagagca

SEQ ID NO: 51173 - DNA, 2386 bp, Oryza sativa
  unsure (1)..(2386): unsure at all n locations
  Clone ID: PAT_MRT4530_53590C.1
gctgcgcagctttgcgcggggctccccgtcggcggcgcgcaccgtcggccggtggcggtgcgccagtgggcaagcttcccctcctgcatcctacttgcaagacgccccccaacaagcaggcagcgcgctaagagaaagaaaacaactctggtttgcctatatacatacatgtagacaaatccacaagctgatcagccaaccttcatagtgcataacaacatactccatcacgacgcctgtcctcggaagtcctactgactgtcagaggggaccccccccctgcatatgctaaggcctaaggtgctccatgtcattctgtggcccacccacggtcccaatggttggccccgccgcaagtttgcccgagtgtgcacaggttcccttggcttcccattgatcggccaaagcatctccctacttcgtgccctccgcagtaatactgattaccagtggtaccaggacaggatcaagaagtatggtcctgtgtccaagatgtccagccttttgctctgctgcttgccttgctcatacccaacctcctccactttgtcatcaggcgcaagtactcatcctataatctccctccaggttctcttggcttcccattgattggccagagcatctcccttcttcgtgccctccgcagtaatactgattaccagtggtaccaggacaggatcaagaagtatggccctgtgttcaagatgtcactttttggctcaccgacagtgcttatggctggcccggcggccaatcactttgtattcagcaaccaggacctcattttcacccagacaaaggcgatcaacaccatccttgggcggtccattctgacactctcaggtgaggagctaaagcaagtccgcggtgctctacagggtcatctgaggccagagatggtgacgaagtatatgcgtaagatggatgaggaggtcaggaggcacattgacctgaactgggttggtcataaaactgtcaaggttgcacccttggcgaagaggctcacctttgacatcatctgctcggtcgtctttggacaagggataggtcccatccgagaagcccttgccaccgactttgagacattggtgcaggctttgctatcactaccagtgaatatacccttcaccaagttcaacaagggcctgagtgcgagccggaggatcagaaaggtactcaggcaaattgctcgcgaaagggaagcagcattgcagcaaggccattctagttcagctgatgatttcttcacatacatgcttgttttgcgctctgaaggcacacactcgctcacagtggaggacattgtggacaatgcaatcgtactcctgactgccggttatgggaattcggctgttcttatcaccttcttgctccggtacctagctaatgatccagacatccttggcaagataaccgaggaacaagaggagatagctagtagcagaggacctaatgaacctttaacctgggatgatgtctcaaggatgaagtacacatggaaggtggcattggagacactacggactgttcccccaatatttggaagcttccgaacagctatcaaagacatcgaataccgaggctatcacattccaaaaggctggaaagtcttcactgctcaaagtatcacacatttggacggaaattttttcaatgacccggtcaagtttgaccctactagatttgacaaccagacttcaatcccaccttattgctttgtgccatttgggggaggcccaagaatgtgccctggaaacgagtttgcaaggaccgagacattggtaaccatgcactacctagtgaggcagttcaggtggaaattgtgctgcaaagaagaaggttacaggaaagatcctcttccgatgcctgttcttggactcccaatggaacttgagaccagaagccccccttgaatatgcttaaaatgatccacctgtttttagtttatgctttcactagttgngtgaagagttggaaatgttgcagttgtgaagatcttggtaaagttgttcagaaatgcagtgacttatgatcaaagctttggttcagttgcgcagataaatgtgtaatattccctctgttatttaatagataacggcgttgacttttgaacacatgtttgaccattcgtcttattctaaaaatttatgtaaatgtatagaatataaatcatgcttaaagtattttgagtgataaaacatctcacaacaaaataaataataattatgtttttttaataagacgaatggtcaaatgttcaacggcatcatctattaagaaacagagttagtaagacatctgcttagggggttccttttcttttgtttttctgaaaacaatgtctacgttgtgctattgttgggtaaatcagccagctgtttacttt

SEQ ID NO: 51174 - DNA, 2382 bp, Oryza sativa
  Clone ID: PAT_MRT4530_53591C.1
atgcggaatctcccagatacactgtcatccctcatggggttcaacaagcacctcacgcctagttggattgaatcagtgtctcacatcattgatgggttgtcacctaccaagccacaaatgaaagtaatggttgagaaggatgaaaatatcagtgatgacaatacagaatcagaggctaaagttcaaaaaattcaagatgaactggtttcactgaatgctcaactaaagcagataacactgcagaggagagaggcactaaataactacttggatttgaaaggaaatataagggtgttttgccgtataaggccttttcatcatgaagaaagttacagttcaagaaatctgttcactctggatgagagcaatgtttttctgaaagttgctgaaaccaagagaaaacaatacaagtttgataaggttttcgatcaattctcaacacaaggtgatgtattttccgaagttgaaccagtgataaaatctgctttagatggctacaatgtttgcatatttgcctacggtcaaacaggtagtggaaaaacttatacaatggaaggcaagcctacaaatttgggtgtcataccacgtgggattcaaacactgttcaaccaagcttcagaatgcaacaataggtttctgttcactttcagtatgcttgagatatatatggggaacatacgagatctactagccccaagaagcaagactaacgggattaagaatgtaccaagcctctccattaaatcagaccctgatggtggcattgagattgaagatctggtagcagttactgtgaatagttttcaagaagtgaaaagattgtatgaaatggggacccgtcttagatcaacagcttccactatggcaaattctacttcaagcagatctcactgtttgattcgcatctcattgacttccttgaatgcaactgagagaagaaaagcaacaagtaaattgtggatgattgatctaggtgggagtgaaagacttgtaaagacaaaagcaactgggaaaaggctcaaggaagggaaagccataaatttgtcgttgtcagccctaggcgatgtgattgacgcactacagactaaaaaaccccatgtcccttacagaaatagtaagcttacacaagtactgagagattctctaggatgtgaatccaaaacattgatgcttgtccatatcagcccagatgagggtgatttgtgtgagacaatttgcaccttgggttttgcaacaagagtgagaagtattcgcctggaaagtgaagaaccaccagagatgaaagcaaggaaggaaacattattaatagatttaggacagaaggtcaatgatttggaacatgaatgtgaagatattagaagaaaaattaagaatctcgaggagagtatggagcatttgacaggacctcagccaactatttactctaattttgacatgtcacatctatccagtgaagaactgaaaacagatgtatcaagtaatgtgaggaattcaaagaatcgcagagaagcctcttccaggttaccaaggttcatgaagccaactgcttctagccagcacaggataggcttaaataatcgcactcccattattaacaggctaaaaccaccagtaccaccaaggaggcggccttcctcagtttatgctgagtctgtaatggtcccagtaaatgctgccccttggcaatcagaatgcagctccgaatgcagtatgtccttaacaagtgacatgaattggacaccaagcatacgagatggaactgaatgtagccaggatgcatcagaatacgagattaaacaggtgattttctcagaacatgagaaatcatcgcatgatcaagtgacctgctacacagattatccacttgcagaatctagagatatacagattaaaatcgaagagaagggaattgtagacattgacaattggctccaccaacaaatcgttgagaagactagcacatttcgaagcaaaatggtgcttgatattcccggagtaactgaagctgaaatccatgtttctagtattccttcaccaactactatggcatgcactaaagaagatagccaggtaaaggatgaagtaatgggcctaacccttcaatcctcaacagactatgtcgaggatataaagcaaagcaagactgataatcaattcacagcaaaagaattatgcactccaccatttaaagaatttagcagcaacaatgaagtgaagggacataaaaacgaacatcctgtgtaccatgggagacccagaaggtcactacaggaagaactggaaaattgcacgctagagaagccaaacatggactcaaaatctcacaggtcacatgatgataaacacaaaacaggtaatgttctgtcttacaccggagaatga

SEQ ID NO: 51175 - DNA, 449 bp, Oryza sativa
  Clone ID: PAT_MRT4530_53592C.1
tcgaatgatttggtgatgttgtttttttctgacgctgatcggccggtgtgtcaccgggtcgatgccacggctcagcagcttcctcctgatgtgcgtgttccagtagttcttgatctcgttgtccattcttcctggaacctcccgctatcagagaccatttgttgcctaaaaggctgtgaagcttgatgatcagctcatcctcctcctcggtgaagttgccgcgcttgaggtcaggccggaggtagttgatccaccggaggcggcagctcttgccacagcggaggaggccggcggccttgggcagcgatcgccagcaaccttcgccgtgcgccttgatgtaggcaatgagccggtcatcttcctccttggtccatgctcccttgttggtgtgtgccttctcgcagcacggtgacctccccatgaagacgatgaagctttcttgattcttt

SEQ ID NO: 51176 - DNA, 1826 bp, Oryza sativa
  Clone ID: PAT_MRT4530_53593C.1
atgcccatgcccatcgggccaggtatccgcggatacccggacccgtgggtaaaattgccatccccgggcacacgtgaaggaactgtggtaggggagaatgagggcacacatgcgggtttaaggtggtacccgaacccggcacccgcattctcaaacccgaacccgctaagacttgcctactccactaccgcttctactgcttggttcgagtcgagggtttctccttctcccaagatggggagcgtggagctcggagcggaggaaagggaggtcgccggcggggagggggggagcaagggggcggcgcctcctgctagggatattaggcggtacaagtgcgatttctgcagtgtcgtccgttccaagaaggggttgatccgtgcccacgtcctcgaacaccataaggatgaagtggatgatttggatgattacttgggacgtggtggcggcgagacgtgcaaagagatggaccatgattgcaagcattggatcccagagaactccaaaatgcgagaaggccttgagtggactagtaccaggatggggagacccttctgggaagctccttcaagaatgcctctttcacgctcttcttcaggatggggagactctcctgagaagctccatcaagaatgcctcgttcacacactttttcagaggcccttttcctgccatgtagatggttgccccttcagctatagcaggaaggaccatttgaaccggcatctacttacacatcaaggaaagctatttgcatgccccatggaaggatgcaaccgtaagttcactataaagggtaatatccaaaggcatgttcaggaaatgcataaagatggctctccttgtgaaagcaagaaagagttcatctgtcctgaggaaaactgtgggaagacttttaaatatgcttctaagttacagaagcatgaggaatcacatgtcaagttggattatagtgaagttatctgctgtgaaccaggctgcatgaaggcatttaccaacttggaatgcctcaaggcccataacaaatcttgtcatcgacatgttgtctgtgatgtctgtggaaccaaacagctgaagaagaacttcaaacgtcatcagagaatgcatgaaggttcctgtgttactgagagggttcgatgccacctcaaggactgcaagttgtcattttcaaagaaatccaatctggacaagcatgtgaaagcagtccatgagcagaagcgaccctttgtatgtggattctctgggtgtggcaagagtttttcgtacaagcatgtaagggacaaccatgagaaatctagtgctcatgtgtacgttcaggctaatttcgaagaaattgacggggaacgaccacgtcaagcaggtgggaggaagaggaaagccatacctgtggagagtttgatgcggaagagggtagctgctcctgatgatgatgccccagcttgtgatgatggaactgagtatttgagatggcttctctcaggctgattcgtcgtgaaccagaatacagaaatgtgagatctttggatatcaagggtgttgatatggtttgagatactagtagcaacgttcttttcctttgtgcatgtataggtaaaacatggaagtaattttgataagacctctatgtactgtctcagacatcaagttaccagaagtccagaatgcagaaacgccagatctttatatgctcaagggtgtttatgtgctagttaggtagcaacgttctctctttttgtatgtataggaaaagtgaaaggaattttagtagaccctaatgtcttgtgacaggcatggtaatttatcaaggttggtttgttctacagtgt

SEQ ID NO: 51177 - DNA, 1551 bp, Oryza sativa
  Clone ID: PAT_MRT4530_53594C.1
atggacatcagcgaggtgctgggcgcaacggcggagtgggcggtcaccttggtggccatggctgtgggtctcctggtggtggcctacttgtacgagccgtaccggaaggtttggcacgtgccgggtcccgtgcctctgccgctcatcggccacctccacctgctcgccatgcacgggccggatgtgttctccgttctcgctaggaagcacggtcctgtcttcagatttcacatgggaaggcaaccactgatcattgtggcggatgcggagctgtgcaaggaagtgggcgtgaagaaattcaagagcattccaaatcgaagcatgccctcccccattgccaattctcctatccataagaaagggttgttcttcataaggggaccgaggtggacgtcgatgagaaatatgatcatctccatctaccagccgtcgcacctggccagcctgatccccaccatggagtcgtgcattcagcgtgcgtccaagaacctcgacggccagaaggagatcaccttctccgatctctctctcagcctcgccaccgacgtgatcggcctcgcggcgttcggcacggacttcggcctgtcaaagctgccagtcacacctgacgacagcaacatagacaagatcgccgctgataccagcgtggaggctaaggcatcgtcggagttcatcaagatgcacatgcacgcgaccacatctctcaagatggacctgtccggatcgctctccatactcgtcggtatgctcctaccgttcctccaagagccgttccggcaagtgctcaagaggattcccggcatgggggactacaagatcgaccgggtcaaccgcgcgctgaaaacacatatggacagcatcgtcgccgagagggaggcggcaatggagcacgatcttgcggcgtcgcagcagcgcaaggacttcctgtccgtcgtgctcacggcgagggagtctaacaagtcatcgagggagctgctcacgccggactacatcagcgcgctcacctacgagcacctcctcgccgggtcgaccacgacggcgttcaccctctccacggtgctctacctcgtcgcgaagcacccggaggtggaggagaagttgctcaaggagattgacgcgttcggcccccgctactgcgtgccgatggccgacgatctgcagaccaagttcccgtaccttgatcaggttgtgaaggaatcgatgagattctacattatgtcgccattgctagccagggaaacacttgaacaagtcgaaattggaggatatgtcctcccaaagggaacgtgggtgtggttggcaccaggagtgctagcgaaggatcctaagaacttcccggagccagaaatattccggccggaacggttcgaccccaatggcgaggaggagaggaggaggcacccgtacgcgttcatcccgttcgggataggaccaagggtgtgcatcggccagaagttctccatccaggagatcaaactgtcaatgatccacctctaccgccattacgtgttccggcactcgcctagcatggagtcccctctcgagttctag

SEQ ID NO: 51178 - DNA, 1282 bp, Oryza sativa
  Clone ID: PAT_MRT4530_53595C.1
ttttttgcaaaatatccttttaatgcagagatggcgggaatgggtttcagaatttttaactcctcaaaacagtctatatttggagaaactataactattcgaaacaatcaggcatgtcaagggtatacgacatggtgacccgctattccctttcctcttcatcctggcaatagatccactccagtgtatgctagacaagaccactaaaacatgaatcttaagcaagttgtgaggtagggcagtgcatttccgcacatccatgtgtgctgacgacgcggcggtcttcataaacacgatcaaggaggatgtatgcgcgttcgctgagttgctcaaccgctttggacaatcgactagattatgcacaaacctgcaaaagctagtcccacgtagtcctgatcaggtgtgacaatttggacttagatgacgtcctatagggcacgccagctaccacaaccaacttcccaatgaagtacctaggacttcctctgacagctaggcggctacaaagaagagacctccaaccgctttatgataaatcgatgaactgcatagcagggtggcgggggaaacataatggactggcgggactatctaccttggtaaagtcgatcctcacatcacaacctgacttcctcctgacgggcctgaaagcttccaaagaataagtcgagatccttgacaagcagagaaggaagttcctctgggccggcagagaagctttgacaggagggaaatataaaatcaactagacatgctggagggctgggcatcctaaaccttgaaaaagtttgcaagagcattacatctcagatggttctggcatgagtggaggtcaccagaaaaagcatgggtgggatcaggaacaccataagacgacaccgataaattcctcttcgcagcggcgatgaccttaacaattggagaggagccaaaataaggttttctgggattggcttggtaccaggggcgacgcctaaaggatataacaccgctggtctacgcgactactaagaaaaagagcgcaagtctacaacaagcgtcgcaatccgaccaatggttggttgacctcaacctactgacaagctcaggttggacgacggagctaattagccaactcgtcaatgtctggggtgttgtccacaacctataattgacggaacacgaagaggacaagatcacatggaaactaactagccacggcgaatacacgacggcttcggcctacaatgcataactacttggcaaaggagccaagagacggcccaccacctcctggtgggat

SEQ ID NO: 51179 - DNA, 374 bp, Oryza sativa
  Clone ID: PAT_MRT4530_53596C.1
tgtactcgaaggcggactcgtagatcttcagtgagggccggttagactacctcggcagccggtgtctgatccacgctcagagcatcctcgccatctgggcggtgcatgtggcgctcatgggcgccgtgaaggggtaccggatactcgacgggccgctcggctaggtgagccaaccgatctaccgactgggctccttctagcgattaggacttgacgatgacatgaaggcgttgggagggctcaaggtgagggtgatcaagaactggcgactcgtcatgttcagcatgtgtggcttgttgaggactgcatccaacaccgattatggcacgttggagaacgttgtgtgcgatgtgcacaacgttgacaacaacaac

SEQ ID NO: 51180 - DNA, 996 bp, Oryza sativa
  Clone ID: PAT_MRT4530_53597C.1
gaccatctctccctccctcaaggccatcgtcgagcacattacacaggagtggccacggtcgtctactacgctttctacttagctcacatggttgaagtaacgacactgatgaacttgctcatgcactctcttgagagcaaaaatctacattaagagaaccaacctgccgttagatatgatggagtcgaggtacgtcaaggtggattcgcgcttcttcctcgtcgacgacaactcctcctcctcctcctcctcctgcgccgccgccggcggcggtggcggcgacggcgattaccactacctcgacgcctgcttcctctgcaagcgggacatcaccttcaaccgccacatcttcatgtacaaggggaacgcggcgttctgcagcgacgactgcaggcaggaccagatggacatggactccgcgctcgccgccgtcaagcgccgccaccgcacgctgcaacgcagcagggacatgtcgtcctcctcctcgccggcgccggctgcggcacagtgcgccgccaacgaggcgggcctcttcgcggtgatcccccgccgccccaccgtcgctgacctcaccacccacgctgctcccgccgtgtctggcactgtgtgatcgatcgacgagcggtggtttgtctctgaatgtttttgccatcttccaagatggttcatcgttgtgctcagctgctattagcccatgtcaagaatcaagatgcatgaggtgaagacgatgaggccatgcgaacactagtctatctatatatagtatagtagtaatctcctggttatggagagagaaaggtgttgaaattaagagaaatcaatcgagatcatgatgatattagattccaaatcgagacatgtaacataagtgttcatgctttctccatcatgctggagcctgtactaagttgaaggatcgatcatgcatgtagaattaactagtactggtactggtttggtttgagcttaccccagctaattaattaagccttctgc

SEQ ID NO: 51181 - DNA, 1224 bp, Oryza sativa
  Clone ID: PAT_MRT4530_53598C.1
gcacgaacgaggacgccatctcctccctccgccgcggcgacgtcgagggaatcggggcggggccggagctagctagttcgccgccggcgagacgcgtgtgccatggtggcagcggcggggacgatggagctggagatcctggggatcaacttcgggtgcgtcctcgcggcgctcgcggacgccaagatcccggagaaggactgcctgctcccgctcgcctccaagctgctcggctacgccatcgtcgccgcctccaccaccgtcaagctccctcagatattaaagattttgaagcacggaagtgtaagaggacttagtgtagcatcctttgagcttgaggttgtcggctacacaattgctctagcatattgtattcataaaggactgccattttctgcgtatggggaactagcttttctgttaatccaagcaattattttggttgcaatcatttactattactccccaccaatgggaaccaagacatggatgaaagctttactatattgcggactggctccaacagtattgggtgggaaaattgaccctgctctttttgaagtcctctatgcttctcagcatgctatcttcttctttgctaggcttccacagatatggaagaattttatgaacaagggcactggcgagctgagctttctgacctgtttcatgaactttgctggttccatagtaagagtgttcaccagcatccaggagaagactcccttaagtgtgatactgggatctgcaattggcattgtgatgaatggtacgctcttgggtcagatagtgttgtaccagaagcctgctccaaagaaagagaagaagagagattgagcacaactgcacaacacaagaaaaggcagaatgttcatctctgtgtccatcttcagacaagcaaaaggctccagtgtatgaatttcttgcagagtcgtgtgatgatgaaaaacgatgggcaccatatacagactagatatggatatcttgcgtacttagttttagcatttagaagtgtcatgactgatgttagattattgttagattgctgtactgtgcaagctactgacagtggaaaaactgttctcttaactctatgtttgagactatttttttatcgtctgtttatttttcaggcataaatattgtaagcacggggctacatacaaaatccagaaagttgtttctcaataaacgcacccaattatcttctttttttaatgtgcc

SEQ ID NO: 51182 - DNA, 197 bp, Oryza sativa
  Clone ID: PAT_MRT4530_53599C.1
gagaaggtgacactttttatggggatattgtaccacgattggcttagggatccttaattgcccattcgattcttttgtaaacccccggttctgaagttcggtcagaaaccgttattgatttgagatgttccctttgttttgtactgtaatttatagggaggaaaggtaaggttgttactgcccaaaaaaaaaaaaaa

SEQ ID NO: 51183 - DNA, 498 bp, Oryza sativa
  Clone ID: PAT_MRT4530_5359C.1
cccacgcgtccgcccacgcgtccgcccacgcgtccggccttggtataaaaaacgagagcagaagaagacatgaaagaaaaaatataatcaaaatgtctatgtcgatgtggacatcatcacatatcaatggaagaagtccacatcatgccaccttccacaaacaaggtgttaattgacctaacaacgaacaagaacttatattcttcactaggaatctaatggtatttcaatgtattagatatagtttaagaaaagggataggccaggatgatctatttccaagtctttcaaaagaaaaaggagacaagatagtgttggttgttggacaacttactaggttgcttatgaaaacctctcttgatttatgcatttacctggtattattgtgctgttcacatggcccagttcatagtagagggcactaactttgcaatcagttgctaataccagaagtctatccagttttgatacccacagatctgaaaggaaaaggctgga

SEQ ID NO: 51184 - DNA, 1912 bp, Oryza sativa
  Clone ID: PAT_MRT4530_535C.1
gagagagagagatggcgcgcaccgagaaggttgccggcgatggctgctccggtggtggtggtggtggtggagaaggtcaggtggaggtggaggtcggggtggggatggggatggacgggaagggaatgatagagtgccggatatgccaggaggaaggggatgagggcgccatggattccccctgcgcctgcactggcacgctcaagttcgcccacaggaaatgcatacaaagatggtgtgacaagaaggggaacatcacatgtgaaatctgcaaccaggtttactctccaaattatgtcctccctccaaccaagtgttgttcagctgaaatggacatggatcttaggcaaagctgggttggacgaattgatccccatgattcgcattttcttgccattgccattgcagagcagcagctgctgcaagctgaatttgatgattgtgtgtcctcaaattcaagtggtgccacatgctgccgaactgttgttttaattttgatgttacttttgcttgtgcgccatgtagttgtgtttgtgagagatgttagcatgctgcaggatgcaacagtgttgtttagcgcaactcttcagttcgcaggattctttcttccatgttatgttatagcccgttcttgttatgcttttcaacaccggaggcgaagacaggtttaggggccacctgaacctggctggaagcatttactcaaaacaactcaacaccatcacagagagacgagaggaaaagcttgtgaagaagtaactcaaactccctttgcttggagcctctgcgaaagatttggcttaatttctcccccaacaagatgtagttgccgatttagaccatgggccctcgtgaagctcaactgtacataggagagcgacccacccccttcggcaaaacatttatgttttcgaaattgaattttagagaaaagaacaagtggatttaaaaattttcagtgtctttccagctgttaattctttctgaagagaagtggtcgatatcgaaatattgagcatggttaattgataatgcatatgactccagtcattattgaggtaaaaaaaatatagcctcatggaggcatatgtaagaatcctgaattacactgattatgtttgggtgactactgaataccaatgcacgccatacaacagcctctcttgtggaaacagtaggtgttctacatatgctattcagatttcagaattaggaacagatcagcatggacagcgagtttttttgctagcagataaccaaataccattgggaatgccttctgcattggctcaggacagttgctcagctgtctgacttcactggcttcaccttctctttgagaaactgccgaatgtgctccctcttccagttgtcgatccttatagtctccttctggtcgcctttgtcatcaagcataatgagctttggtggagagccatagacataacgagcttccacataagggaagtcgtctttatcctcttcgaggaagcccacgatttctggataaaacacaagctttctcatgcacacctcaataattgcaccagagaatgtgagcttgctgatagaatcatctgaatcctctgtacaacatttacggcagtcctccaccaattcttggtccttgacgaactccgcgagggcgttgcagtcggagcagagggcgagaccggtgaaccccagctcctcgcactccctcgccccgaaccgctccgcgccaaggcagagcacggagcagctcgtgagcaccagggcgacggccgccgccacgtaaacagatcgacccatccctcctacctccctcctccgccgcgcgaccagcgtggggtttcgagctcccgcgagcacaacggcggcggcggcggcggcgacgacgacgacggcgaccagcggcggtgaccttctcggc

SEQ ID NO: 51185 - DNA, 264 bp, Oryza sativa
  Clone ID: PAT_MRT4530_53600C.1
atggcaattaaggactggttcacgggaaaccctgggagacttaccatgcttaccacaagcgggggcaccggcggcgagggtgggcgtgatggaattgggtcggccggggtgtccggttgtccagctgccggattcaccacggcgtacgaggggactgcccactgccttttgaggggtgggggtgaaaccttagcgtggtgtggatggttaggggcgggttatgcgaagggtcttgtcacgattttccccatttgtagtatcatg

SEQ ID NO: 51186 - DNA, 730 bp, Oryza sativa
  unsure (1)..(730): unsure at all n locations
  Clone ID: PAT_MRT4530_53601C.1
gccgggccgcgggccgggaccggaacggacaggccgacccacaggaaggagacggcggcgctgcgagagatggaggtggcgggtgctcaggccggcatcctccccctcctcctccgtcaccccgcgtccctccggggctccctctccctctcctgcggcggcgcccgccggagctgggcggcggcggcggccacggcggaaggaggaggaggagaggagggtcgcggctacgagagggtgcccatggacacccccggcgcctaccgcctcgtcgaccgggccaccggccgcagcgtcatcgtgtggggcggcaccgacgacgtcagcatgccctcccccgcggtgctctccacgaccacgcgcgtccccgaccgcccaaaagaaaatgggagaagtacaagtattggaaattttggcagactcaaggcacagaaagttaaagttttagcaaggagatcagctcaccttaagagagaggattctggtcgcataagcaccagccggttcagtgaatctccttctgatgagtctgacgaagatggcacttattttgaagagatagggcaagaaacacaaggcaaaacagtagatctagagacgacaaaacccgtggtgcgcattctctgaattctgtcttgaggcagtatagaggtgctgatgactnggattttccaggatcagaggctacttctggctcccaaagatggggaaacatttctgatgttacatt

SEQ ID NO: 51187 - DNA, 820 bp, Oryza sativa
  Clone ID: PAT_MRT4530_53602C.1
tttttttttttttttgaaagaattatctgcacattttcaatatgtcaacaagtgtaacaatgtcctgtaggttactcacaaacaatggcatctctactacaatcatctccaacctaccaaagcaaccacaaaactaacagaacaaaatttcaaggactcgagtatatcaagaaggaaaaaaagaataaaatgagggggaaaacatataaactctcgcgacctcatagtggctgccttctcttacttcgccatgatcaattaatcgatcgatcgatcaatctgtgctaccctccgctgcattattctgcggtcaaggatttagcccaatcccacagagggagacttcaccaagctatcctttcgcagttcatagtgtcgaaaagaatgatgcgccaatatgatacagatgaaaagaatcgtgtagccatatatgatacagatgaaaagtctcgagtatttgcatgccagtcgatccagggcatagtcaggtatgttcagtgctgattgtgttctggttgttaacgaattgaccaatcttcccaccatccaacagcaatcagcctctccagtgaacaaatgaatcacaaccggtatgatatactccaatgcgcctaccccatttcccagaagtcactctttatcatactggggctccaaaatatggcagtttctaataaagtcattggagtaatttacgtgctttgtccaaaatggttgtaggttcttaaaagcaatgtctagccatggcttgcactggccattgtagtggatcactgcagatctcctaacaccctcaatgtctgtattttctcctcgtgcc

SEQ ID NO: 51188 - DNA, 1033 bp, Oryza sativa
  Clone ID: PAT_MRT4530_53603C.1
tcagtagcacatgaggtcctgggttcgactccccttgggagcaaatttttcaggatttaacagcgttgtgttttcagttcgactccccttgggagcaaattttccaagatttaacggcgttgtgctttcagtggtaggcgacgtacccgtcgacagcgaggcgcctgtggtgacttcgtcaatctctccaagatttgccagcccagtcttcgaagatgctcataggtatagggtttgcgtgcgcgtgttcatagggaggaacgcgctgttcttctactccgatgcccgtcgtaagagtcttgtggcggccaacacctctgctttcgccgccagatcatcccgttgtctgcacagcatggggtctctggggtcgccggcggggaggagatcagcacgccggttccacgacttgagggatgtggtctcggaacatgccgacgctgctaccgctacgttgtctgttgttgttttctctgcggttgctggaattttgcatttgatgcaagatacagacgaagctcggaaggaggacacacccactaagacaaatccttacttccgttccaaccagttgatggaagacttgatacgagagagggcgtcttacaacgaaacaacgcctgacgagaagaccgtggttcgagagtacatggaggatgatcaagccataagggcaaggttcaaggattggatgaaggagcatggcaggacatacaagcaggacgaggtggaggaggctaggcgattcaaaatattcaagtcagttgcaagattttctgatgcagccaacgatgattctgccaacgcagggcactcgacccgttttggcctgaatgagttttcagactggaaccaggaagaacttgctcggatgtgttgttgtatgccagctaggagtgatggggatctggcatcaggtatagctgacatggagtacaaggatcagggttgttttaaatctccgactatagctgccgctatgtccggttatatctgtttgagaagagttttagctcttttctcttccgtataa

SEQ ID NO: 51189 - DNA, 2342 bp, Oryza sativa
  Clone ID: PAT_MRT4530_53604C.1
tttttttttttttttctttgccttttttttttttttttttttatccaataaaagaaaaagtcagtcgggaagtaacttggtagtctgatacacaaaaggttacaaggtcacatgaggcagcacggctcaaacttttctggaaagcagagcatgttttgtccataatttgatacagagctaacagcacagtgcgggcaactaaaagcaaaaaatgacactattaaatctaataatcgatggggcctcctcgtagaagagacaatcaacagatgcgttgtctgcatgaccgggcactccaacctcatgtgtagatgtatttcatggcatttcttcagggtgcttttgctgcagataacacattccattccaactctatgccaaacagcccaacataaacaggtgtatatacttacagatgcctgatgtccaccatgactcctagatacgtctcaatagcatcccatcatatcctccccaaagtgtagagctctctgaagctgcctctctgatggtcagaatgagttcatttcaagactatatgtccgccgcttgagaagcacctgtgccgctgttcgatatggctcctcaaaggcatctaaaatccagctagctcctgtcgggccagcaacctcaattcctcccccttcccttagaacatcctcgcttggtctgattgctaccagtgtagcacccttaagcagttggcccccaggaagctcaatatgcggagcgtaccatagccgcatactaagtgctggcatgagtgtgcggtgcgagttcccagaagctgacacaggccgcacacgcagctcctgcagctgcctcttgtccatagtgaggacgccctgcccatcagcatccgtcaggtccaagctctcgagtgttgagtgatctgcgatgattggctgcagcaagtaatgccgtgccgaagcagcgatgagtgagctgatcgtccagacaacacggagcttaagccctccattcgtatagagtgactctgggatgttccctaattcatcgggctctctgctggaatcgggagaggcagccgagctgtctgcagcagttgggggcggcgcggccggtggtgggggtggcttcgacgttacagatgacgcgccgagtatgacacagctgccgagggtggaaccaaagtcagccttccacttgaggagcacgccgtcctcgatgccgagctcgccggtgggcagctcgatgtggaggcggcgcagctccttgaaggagcggaggacctcagacggcgaatggtgggagacgtccgcggcggcaggagccggtgcggcgggcggggcagcggagcgacgggagacggtcgccgcggccggggagaggatctgcccgagtgcctggatgggcctgacgatgccgccgagcaccaggcgcgcgagatgcgcgagcgcgccgcgcccccgcgcggcgggaggtcccccctccgccgccgcagcggcctgcgcggagcccgccgacgaggggggcgggtcgtcggatatgacgcagtcgacgcggacgaacaccgagtcgacgagggggacgagcgcgtggaaccgccgcgagacgagcgcgcatcgccccagcgccttcacgtcgccgatgcggccgaacacgtcgaggagcacctcgtcgggcagccgctcgaactggtcccccaacccctcctcctccccaccctcgtgcccttccatcctgataaagcgatggagaccggactggacggggtgtggtcggtagatccccacggagccgtcttgaataattgtctggccatcttccatataaatagcaccatcagcatatctgagttcttccagtcgatgggtcacccacaatgctgaaacctccccaccagcacctacagatttccttaccgccttgataacacccatctggtcgtattcatccaagaatgtggtcagctcatccagtagtagtactttggatgcttcagctaaagcaccggcaattgcaactctctgcttctcatccaacgaaaggttgagcttaccaagaccaaatgcaacatctgattccactgtcggcatcacaaccttgagaagggtggacttgccgcagccgttggggccgaggagcatccagagctgacccggagggacgcggagggagcagtccttgagcaccggcagcacccgcccccgccgagtcgtcaccgacaactcgacgccctggccctcgatggccggcgtgggtagggacgacgcgaggacacggaggcggtggcgagggcgggatacgagggcggctcggccggggtcgtgggggcagcggcagatggcggaggtgccgccggcgaaggcgtgcgccat

SEQ ID NO: 51190 - DNA, 297 bp, Oryza sativa
  Clone ID: PAT_MRT4530_53605C.1
cgagaggcttaaccgatggggaaaacatgggtggcgtcatgctgaataaacgacctacaaaactgtcttgtaaagtcacattttcccaatcaaaataaatattcagcatgacataatgggctgctctccagggggaacatggtgctgaacgtatacaaaaaggaatcaatgatgaagcatttgccatttatttcgaacaccggtggatccgaacactataaagctaggacaactttgtccatctggactgaaaaacagttcaacagtataccatgaaaattggtgtccacctacaat

SEQ ID NO: 51191 - DNA, 1022 bp, Oryza sativa
  Clone ID: PAT_MRT4530_53606C.1
gcccaaatcgacattgctataagtaaagagcaagagagtagaatacagcttggaattgaggtaagaaatttgcggggaaatagcctgaaaaaataaactgattttcaacaatatgatgtgtacaggagtaggcaaatttccccatagcttcatattcattccaggtatcaaagctcaaagtgaccgaagtagcgggcttgctttttctttatatatttggatattgtagacacatcaccttgaataattgtctggccatcttccatataaatagcaccatcagcatatctgagttcttccagtcgatgggtcacccacaatgctgaaacctccccaccagcacctacagatttccttaccgccttgataacacccatctggtcgtattcatccaagaatgtggtcagctcatccagtagtagtactttggatgcttcagctaaagcaccggcaattgcaactctctgcttctgcccgccactcagagtttggattggcctttgagagtagcttaacattcccacagcatccagtgattgtgatactcttgacctaacctcatccaacgaaaggttgagcttaccaagaccaaatgcaacatctgattccactgtcggcatcacaacctggtgatcgggattttggaagacatagctgcatggcctgttaatatacactgtaccagaagaaggatttaaaaatcctgccaaaaccttgagaagggtggacttgccgcagccgttggggccgaggagcatccagagctgacccggagggacgcggagggagcagtccttgagcaccggcagcacccgcccccgccgagtcgtcaccgacaactcgacgccctggccctcgatggccggcgtgggtagggacgacgcgaggacacggaggcggtggcgagggcgggatacgagggcggctcggccggggtcgtgggggcagcggcagatggcggaggtgccgccggcgaaggcgtgcgccatctctgcgagagaagtgagagcggtagatggagg

SEQ ID NO: 51192 - DNA, 168 bp, Oryza sativa
  Clone ID: PAT_MRT4530_53607C.1
atggcgacgatgatgagccctcgtgatggtgcattgctgcaggatgcaacagatcaggtagagagatcagccaatcaggttcaaaattcagcagtttggggtccagaagctgtgaaagggctttcacctcttctctttgcagtaatggcggcagccaagaactcatga

SEQ ID NO: 51193 - DNA, 180 bp, Oryza sativa
  Clone ID: PAT_MRT4530_53608C.1
tccatgcgtacgtgagaagagggtacccagtccctggctgcacatgttccagaatgctacagaatggtgttcataatgcatatgagtacataccgggacctaatggacggtcatatgatcacagacgcttgtagctatggactctctagaatacttaaaccttgctcgcgcgatgcactc

SEQ ID NO: 51194 - DNA, 294 bp, Oryza sativa
  Clone ID: PAT_MRT4530_53609C.1
ctggttagtgttaagcagatgctctcatgctgcaacaagacagatgccagcacttccaagtactccacagggccgcatacggtgaacagtgattggcggtctcatcctcccttaagaaggccggctacaacccttacagggttccctacgtgcccatctttgggtttgagggtgacaacaggatcgagaggtccagcaaccttgattgttacaggggccccacctcacttgaggctcttgaccatctcaacgcgcccaggagtccatcaggcaagcccctacgttttccctttt

SEQ ID NO: 51195 - DNA, 1621 bp, Oryza sativa
  Clone ID: PAT_MRT4530_5360C.1
ttttgtcgcagccgtatacgagcgtctcctactagtggaggcgcgcgcgccgggcgccaccgaagaaaggctctcaccaatccaacggtgctcgatccatccatccatccaatccgcctcgctccatccatggcgtctgcggatgcggtctcgccggcgccggcgacgtccgccgcggcgcagcagcagctgcggaccgtggtgctgagggtgtccatccactgcctcggatgcaagaagaaggtcaggaaggtgctcaggagcatcgaaggcgtgaaggatgtgaaggtggacgccgcgatgcacaaggtgacggtgaccggcacggtggacggcgacacgctcgtcaagaggctgtacaagtccgggaagcaggccgtgccgtggcagcacccgcacgtggcgccggcgccggaggcggtcaaggcgatagaggccgcgccgcagcagcctgaggctgcgccggccggggacgacgacggcggcaagggtagtgatgctgcggctgcggcggcgaaggaggccgcggcgcaggcagagagctcggaggagaagaagacggaggagaagcccgaggcggagaaggaagcagagaagaaagaggaggagcaggaggcgaagccaagcgacgaggcgaagaaggacgccggcggcgagagcgaggcggcgccggaggcgaaggcgaagggcgacgacgttggcgccgaacccgccaaagaagccgttcccgcggcggcggtgaaggaggctagcaatgacgacgaaggagcaaaggacgagaagagcaagcccaaggacgccggcgacgccgcgccacccgccgccgccacaacgacggagaggtccctgcacttctcgccgccgccgacgccggcggcgcacaagcagcacgaggagcactacccctacccgtactacggcgcgccgcagccggtgatgagctaccacatggcgcagccgacgacgagcgtctcctactacgcgccgcggccggagccggcgtactccatgcagcagcacccaccgccgccggcgtactccgcgccgccgccgcagcagcagcaatacccgccgccgtcgccgtcgccgcagccgcaggcaatgcagcagcagtggtcgccgtcgtacctgtacatgccgtacccgcactcgtcgccggacacctactaccgcgactactacagcccgccggggacggcgcacgcgccgccgctgcaggacgagtaccgcatgttcgacgacgagaaccccaacgcctgcagcgtcatgtgaacgccacgcgccgccgccgccgccgccggctagcaggccaggccggccgggagaagtagtagttgaggagaggtagagtagcttgtttacactctcctccattggagaggtcaaagctctccttcaccgagcattttcttttttttttctttttccttttttttttcttcacttcctctcttactgttctaattaactagagcatgtaattgtaatgagacacgccaaattatatatgtttttctcttatcattttgtataaggcaaagacatatacatatatataacagattacataactactataagtactaattatttttctatggaaaaaaaaaaaaaaaaaaaa

SEQ ID NO: 51196 - DNA, 290 bp, Oryza sativa
  Clone ID: PAT_MRT4530_53610C.1
ggccgacccggcgtcgcccgccccttcggcgacgccgacagagacagcatggacttattcatcgagcagggcgccacggagcactacgacaagctgacgccgcagctgtacacgcacaacaaggactacaaggggaggctcggggtgatgctgacggcgacagcgaggtgcgtgttcccggaccagcggctgcaggcggcgctgaccacggggctcttctcgcggatccacgtcaaggtgttcggagacgggcggtgcgcgtcaaggaggtgggagctcgagaagtggat

SEQ ID NO: 51197 - DNA, 465 bp, Oryza sativa
  Clone ID: PAT_MRT4530_53611C.1
ggccgacccctacgtgctgagaaaagtgagagatgaggaagggagagaagagaggaaaagagaggatgctgacgtggccacactgacatgtggggcccacgtggatcccacgctaagtcagctgccacatcggataaaaccggagtcaaaaccactaagagcaagtgttatggtagatgtgactaccacatctaaatttatccgtacttaggtgtcattcgaacctactaggatgaacatttagaaaagaaaatattaacgtgtgattaattgggttttaactattttagacttggaaatgaatttattgagattttaaaccaacttctacatagaaatttttcgtttgaaatacaccgtttagcgattcgaagagcatgctaataaaataatctgagataaaatcttatccagagacttttttccggtgagaatagaataaaaaaaaaaaaaaaaaaaaaaaaa

SEQ ID NO: 51198 - DNA, 1413 bp, Oryza sativa
  Clone ID: PAT_MRT4530_53612C.1
atggcggtggcgccgccggaggtagggcccgccgcggcggcggcggtcgccggcgggaagaaggaggtgcgcgcattggatggagcatcggcgatcggtgaagaagaggaggtggaggtggaggtggaggaagaggaagaagcggaggaagagagagaggatgaagaggagggggaggaggatgggggcgatgaagaagaggaggaggaggagggggtgaagtggctgaagcattactcctcgatgcaaagcatcttggtcgtcggcgacggggatttctccttctcgcgggcgctcgccgtcgcattctgctccggcgagaacctcgtctccacgtctcttgattcctatgaggctttgagggggaagtatgccaatgcagagtcaaatataatggtactgaaattgatgggggccacaactttgcatggtgttgatgcaaaaacaatgaagcatcacactgacctaaagatgagacggtttgatcgaattgtatttaatttgcctcatgctggattcaaagcaaaagagggtgatatgcgtatgatcaacttgcacaaggatctggtcagaggattcttccgcaatgcaagatgcctgcttcggccttccggtgaaatccatgttagtcacaagagaggaaaggtgtatgaaaactgggagatcgagaaactagcctctgaatcttcacttattatggttgagaaagttgatttccatatagaagactatcctggttataaccacaagagaggagatggtccaaggtgcgacgaacctttccctctaggtccttgttgcattttcaaattctccatcagaaaccataagaagcagaagaaatgtcattcaaagaagattggttcaatcccatcccttggaggcagccatgtccatcctgaaatattggcaagtgactggagtccatctcagccgtttcgaccagtcaatgcagttaacatgccagtaactttcgacccatactcactcagaattgctcaaagccatcaaccgggttttcctgtcaattttgttggcttatggacagcggctgcctgttctcttcagcattgcaatatccacccaatgctcaacattgtaaggccatcgcttcatcttttgcccattgcgtccatcattgctccacaaatgggcagaatcacaagtaccagtctctttgcacctcaggagcagccgaaacctgttcttaggccattgcaaagcgttagcagctacgaccttgccagggaacaccaaatgaatctgcggagggagtttgagatgagaggacaaacaatgcctgcaggaaccagcttggattacttcgagttcctggaatatctcttcagggatcctgctgagaaggagaagtggctgcaaactatgattacgttgcacgctacacggtggtga

SEQ ID NO: 51199 - DNA, 427 bp, Oryza sativa
  Clone ID: PAT_MRT4530_53613C.1
gcacgaggaactagtctcgagttttttttttttttttttttcatccttgaaaagcagaacatctagatatcatttttcagcatccatatggactatggagtacaattttatttacagaatggaaacgcccatatttggtacaacacaccattagcaagccatgagaatggtaattgcatacattctaatttaccaagggaaaagataatccttgtataattgtattttagcatttccattctagtaacctttgcttctttgttccagaaatggtagcatcctgagccatggttgtgatcagaaatcagaaatcaaatttcgcgagtaatcgccatgactgtctgcggggtttagccctgctttcatttctcgttcttggttggttggggtccttccctggctaccgtggcattgtaatgccgttgta

SEQ ID NO: 51200 - DNA, 2886 bp, Oryza sativa
  Clone ID: PAT_MRT4530_53614C.1
atggtgagtgggaggtccatcacctccggcgccgccgcgccgtgccacctgcgaccgacggaccggcacaccatggccgcgtgccgctcgcggcagcgaccacctctgccccccaaaacaagggcaaagggcccggcgcgccgctccgctgttgatattgttcttcctgttgagaaattgacaggaattcatggcgggtgcactggtgagcgcctctacgggggtcatggagtctctccttggcaagctatccagtatgttggagaaagaaagtacgcgatgttgagtgagcccgacttgcaagtgaaggcttggatgaaagaggtaagggagctggcctacgacatcgaggacaccattgacgctttcatggctcggagtgaaaaatccaatgagcctacaggtatcagaggatttatcatcaacaatatcctgaaactgagagagctgctctcaagctgtactatttctcaagagattgaaaaactcaagaaccaagttctcgaggtgaacgatcgtagaaaaaggtataagcttgatgtatctgtgtccatgggtaccggctgtgaatcaattgaccctcgcctgccagcgttttattccgaggtaggtggacttgtcgggatcgatgggccgagggacaaaattatcaagttgctaagggagaatgcagctgatgaagattgtggatttgtgaatcgacttaagatggtgtctatcgcagggtttggaggtttggggaaaactactcttgccaaacaagtttatgagaaaatcaaatggcagtttgattgtgctgctttcgtgtttgtatctcaaatcccagatatgaagagggttcttttggatttgctttgtggacttggggcttctggtaatacatgggatgatgagaagcaactcattgacaagatcagagaatttcttcatgacaagaggtatataattgtcattgatgatatctggagcatatcttcttgggagatcttgaagtgtgtattgcctgagaacaattctggcagtagaataattacaactacacgtattcttgacgtatccatgatatgttgctctactttcaatggaagtatttaccgcatcaaaccattaagtgacgacgactccagaaggttgttttgtagaagaattttccacggtgagcattcgtgtccatcacatctagaagagctttcaaaagcaattttaagaaaatgtggtggtttgccattggccatacttcatattgctagtttgttggcaaccaaatctaacacaaaggaagagtgggagttggtgctaaattcaattggctcagcacttgaaaatagccatactctacaaggtctgaaaaagatactgttactcagtttctatgatttaccaccacaattgaagacttgcttactatatctcagtatatatccagaagattgcatgatcaactccaaagagttgataaggaaatggatagctgaaggatttatcgcggaagacagtgggaagagattggaccaagtagcagagagttatcttaatgatcttatcaacagaagcatgatcttacctttcgacattactcatgctgatggtgtacaatattatcaagtccatgacgttgtccttaacattatcatatctatgtcgaaagaagagaattttgtcacgataatagatgggcataagtgcagttctttgcaggaaaagatccgtcgagtatccctccagttcaatgattcagaagatgttgtagtgccaacaaacataacaaacagaagttgtgtccgttcactcagtatatttgggattactaagcaagtgccatattttatggatcttcaatctttgcgagtgttggacttaggttattgtacattgttacagaatcagcacattgaatgtttaggaagtatgcttcaacttaggtatctggttctccattctcaattaatcactgaacttcctgatgaaattgggaacttgcaacatctagagatgttagatgtcacattatgttccatacaagctcttccagataccattgttcgattacagaaactcgtgtgtctatatgtgagtactaaagtgaaactaccagaaatgattggaactatgcaatgtttagaggagctgttccacatatcaagcaactctataagattggctggagatcttaaatgtctgaaaaaactgagagatcttgcaatagctgttgaagaccctgttgggacaaagagctctacattgagatacagggaagtagttcggtcatcccttactgaattgggcagacacaacctgcagtcactctcactgaattacaaaggtgatgagaatttcattctggattcgtcgatgggttcatgcttctcaactcagcgtctccggaaacttatcattgggaaaactctttccagggtgccagagtggatgagtatatttgacaatctcacacacttacaactgtgcatctcaaggatggaacagagtgatattaacatactcaaaggaattgactctctgatctttctccgcctcgtatttacagggcatgctcctgatggaaggatagtcatcgacaaccgaggatttcaagctctcaaggaattatatcttctatgtttcattcctgggatgtggccagtgttcgagccaggagctatgcaagaattacagaagtatcacctcactttcaagctacagaaagtacattgcaagaatagtgttttggactttggtctccagcatctttcaagcctccagcacataagtgcgataattattccatctggtgctaccagtgaggacacattggttgcagaggatgccatcaggagtgctacaagtatccatcccaaccaaccaatagctgaaatttttgtcgagtaa

SEQ ID NO: 51201 - DNA, 346 bp, Oryza sativa
  unsure (1)..(346): unsure at all n locations
  Clone ID: PAT_MRT4530_53615C.1
acggtngtancactngctctccttagtnttcagagaaaccggaagcnatggcgtctgcnactctcctcaaatcanctttccttcccaaaaaatctgaatggggtgccaccgccaagctgccgcccccaaaccggtgaccgtctccatggttgtccgcgctggtgcctacnacnataagcttgtctagaccgcgaaaaccattgcatcaccaggaaaggggtntccttgccatggatgagtctaacgcgacctgcggtaagangcttgcgtcnattggccttgaggaacacccnaaggccaaccgccangcttaccggacctccttgtcaccgcancgggcttggga

SEQ ID NO: 51202 - DNA, 2758 bp, Oryza sativa
  Clone ID: PAT_MRT4530_53616C.1
atgtgcactccaatctttctttttaattaacgaggcaattcatggcgggtgcactggtgagcgcctctacaggagtcatggagtctctcctcggcaagctatccagtatgctggaaaaagagtatgccaagaagaaaacagtagagaaggatgtgctgttcctgcgaaacgagctgagcagcatgaacaccgtgatgcagaagtacgcgatgttgagtgagccccacttgcaagtgaaggcttggatgaaagaggtaagggagctggcctacgacatcgaggacaccattgacgctttcatggctcggagtgaaaaatccaatgagcctacaggtatcagaggatttatcatcaacaatatcctgaaactgagagagctgctctcaagctgtactatttctcaagagattgaaaaactcaagaaccaagttctcgaggtgaacgatcgtagaaaaaggtataagcttgatgtatctgtgtccatgggtaccggctgtgaatccattgaccctcgcctgccagctctttattccgaggtaggtggacttgttgggattgatgggccgagggacaaaattataaagttgctaagggagaatgcagctgatgaagattgtggatttgttaattgacttaagatggtgtctatcgcagggtttggaggtttggggaaaactactcttgccaaacaagtttatcagaaaatcaaatggcagtttgattgtgctgctttcgtgtttgtatctcaaatgccagacatgaagaggattcttttggatttgctttctggacttggggcttctggtaatagggatgatgagaggcaactcattgacaagatcagagaatttctccatgacaagagtagaataattacaactacacgtattcttgatatagcggcgttatgttgctctaccttcaaaggcagtatttaccgcctggaaccattaagtgaaagtgactccagaaggttgttttgtaaaagaattttccatggtgagcactcctgtccatcacatctagtagaactttcaaaagcaattttaagaaaatgtggtggtttgcctttggccatacttcatattgctagtttgttggcaaccaaatctaacacaaaggaagagtgggagttggtgctaaattctattggctcagcactggaaaatagccatactctacaaggtctgaaaaagatactattacttagtttctatgatttgcctccacatttgaagacttgcttactatatctcagtatatatccagaggactagaagattagccccaaaaagttaataaggaaatggatagctgaaggatttattgctgaagacaggtgtaacagattggaccaagtagcggagagttactttaacgagcttatcaatagaagtatgatcttacctgtgagcattgcatatgatggcagtatacaaatttgtcaagttcatgacttggttcttaacattatcatttccatgtcgaaagaagataatttcgtcacagtaatagatggacaaaagtgcagctctttgccggaaaagatccatcgactgtccctccagttcaacgattctgaagatgctgtaatcccagccaacataacaaacaaaaattctgtccgttcaatcagtgtgtttgggtctactaagcaagtaccatattttatgaatcttcaatctttgcgagtgttggacttaggttattgtacattgttacagaatcaccacattgaatgtttaggaagtatgcttcaacttaggtatctggttcttcattctcaatttatcactgaacttcctggtgaaattgggaacttgcaacatttagagatgttagatgtcacattatgttccatacaagcccttccagataccattgttcgattatagaaactcgtgtgcctatatgtgagtactaaagcgagactaccagaaaggattggaactatgcaaagtttagaggagctgttccacatctcaagcaactcaataagattcgttgaggatcttaaatgtctgaccaaactgagagatcttgcgatttctgttgaagaccctgtcgggacagagggttataagttgcgatgcagggaagcagtgctatcatcccttactgaattgggctgacacaacctgcagtcactctcactgaattaattacaaaggagatgagaatttcattctagattcatcgatgggttcatgcttctcaactcagcgtctccggaaacttatcattgggaaaactcttgccagggtgccagagtggattagcatatttgacaatctcatacacctgcaactgtacatctcaggaatggagaagagtgacattaacatactcaaaggaatctccactctgctctttctccgcctcgtatttacagggcatgctcctcatggaaggatagtcatcgacaaccgaggatttcaagctctcaaggaattatatcttctatgtttcgttcctgggatatggccagtgttcgagccaggagctatgcaagaattacagaagtatcacctcaccttcaagctactgaaagttcattgcagtagtggtgttttggacttcggtctgcagcacctttcaagcctccagcacatgagtgcgattatcgttccatctggtgctaccagtgaggacacatttgctgcagaggatgccatcaggagtgctacaagtatccatcccaaccaaccaacaaatttattatataagtagcacaaagggaggattagaggaaggagaa

SEQ ID NO: 51203 - DNA, 303 bp, Oryza sativa
  unsure (1)..(303): unsure at all n locations
  Clone ID: PAT_MRT4530_53618C.1
ccgntgcagctgcagctcgtcgacccggacgtcgccgccaccgcgttccagaggaccaagtgcaccgtcctccgggccaagaagtccggatgctagctaacctacctacctgcaattttctcgagatttcagttttcttttgcttgttcttgcttgctggagattgttgccatgtatgattggaagattgcattttggattagaaattntaagattggttattgtgtagtgtgtactgtgtactgctactcatntggagaaattcgggacaattggataaaaaaaaaaaaaaaaaaaaaaaaa

SEQ ID NO: 51204 - DNA, 2289 bp, Oryza sativa
  Clone ID: PAT_MRT4530_53619C.1
atgacgatgcttccggcgacggcggcggcgctgctggtgctggtgctgcagctgatgtggtcggcggaagcgcaggtggcggtgggctcagggccgccggcgggctgcccggacaggtgcggcaacgtgagcgtgccgttcccgtttggcatccgcgacgggtgctccctcgagggattcggcctcacctgcaacaccacgagcaatcccccgcgcctgatgatcggcaacagcacactgcaagtcgtcaacatctcgctggccaactccacgctgcgcgccgtcgacatcgacggcgccgtgaacatcacctacgggcagatcgacggcaacggcacgtgggtcggcgtcgtcgcgagcccgtacatcgtgaacgagaccctgaaccagctcctcgtcacggggtgcaacatccaggtaacccttgtcggcagcggcgggaacgtcatctccggctgctcttccttctgctccatcaacgacatgtacacgggtggcgtgttcagaagcccaggcaacaagtgcgcgggcatcggttgctgccagcagcaggtctccatcggccgcccctcctaccgcgtggaattgacgaacctggacagggatcgtgagttcagcggtagggtgcccgaagcggtgcgcatcgccgagctgggctggttcgacggcctcgccgccgacctgctcaacgtgtcgttggcggacacctcgcgccggaacccggttccggtggtgctggattgggcggtggcgtccaccggcctggatgtcacgctcaacgccgggctgaacaaacaggctgccaataactggtcctgccccacggccgcctcgggcaggaagagcgcgtgcataagcagcaacagcttctgccgcaacatcgccgacaactaccgaagcggttacgtctgccgttgtgacaaggggtacgacgggaacccgtacgtcgccggcggatgccaagacatcaacgagtgcgagcgggcgaaggagaacggctgcttcggcgagtgcaccaacacgccgggagccttcttgtgcaggtgcccgcacggtgcccgtggtaacgccaccattccaaatggctgcaccaaatccaatctaggtttaacaattggagttggaattggtagtggtgccggcctttttatcctggcacttggtgctgtctttttaacacgtaggattaaacaacggagagcaagaacactgagacagaagttcttcaaacagaaccgtggccatttgttgcaacaattggtatctcaaaaggccgacattgcggaaagaatgatcatccccttggcagaactagaaaaggccacaaacaactttgacgaatcgcgtgagcttggaggaggaggacatggcaccgtatacaaaggtattctctcaaaccttcatgttgtcgcaatcaagaaatcaaatgtgacagtccaaagggagattgatgagttcataaacgagaccgaagtgccattgttggtttatgaattcatatcaaatggtacactttatcatcatcttcatgttgaaggaccaacatcgttgccatgggaagataggctcagaattgctactgaaacagctagatccctcacttaccttcactctgccgtgtcatttcctataatccatagggatatcaagtcccataatatcctattggatggctcactaacagcaaaagtctcagactttggagcttcaaggtgcatcccaactgaacaaaatggggttacaactgctattcaaggaacactaggatacctagaccccatatattactacacaggacgtctcacagataagagtgatatttatagcttcggcgttgttttaatggagttgcttactaggaaaaaaccatattcatacagatcggctgaggatgagagccttgttgcacatttcagtaccctacatgcacagggcaacttgggtgacatacttgatgcgcaggttatagaggagggaacaaaggaagttaatgatgtagccacattagctgtggcatgtgccaagttgaaagcagaagagcgaccgactatgagacaggtggaaatgacactcgagagcattcggcaagaagtactgcatagtgtgagcacaaagaaatctaaggagcttcacgtctcatggaaccatgcaataagtgaggggagtatcttctaccaagctgtcgacacttcaattgtaatagttagcgatgttggttccagcgataacttgtgcgacggcgctgtgatcggcagaaacagatttccggggacgcaatgccggcagtga

SEQ ID NO: 51205 - DNA, 329 bp, Oryza sativa
  Clone ID: PAT_MRT4530_5361C.1
acgcatccaggcaagggtgggcgtgatggaacggggcgggccctgcgacggcctatgtcgcttccggatacacctaggcacgataggggactgcccgctgccttgcaggagtgggggaaaaccttatgtgtggtgcgcttggttacagggggttaggcgaagggtcctgtcacgacctctttgtgacgtggatctgaatgtcaacattgtcgtttgtgtaccccggccggtcctggacggggattttaatgcacattctacttggaattctattcgggaatatctgggcgtgacattgcttgacttgtagcccgagaaagaaggttagc

SEQ ID NO: 51206 - DNA, 1926 bp, Oryza sativa
  Clone ID: PAT_MRT4530_53620C.1
atgatcgatccctgggcagcgtggttgatttgcctccaccactggacccttctgttgttcttagtcccctctgctgcaagaaggcagacgaacaagccaatctctgaaagaggagaaagaataaaggagaacggatatgtgatggagcagcagcttgcgtccatctccgtgacagaatcggcagaggggatgtggcggcaacaggaggaccaccgcgatggtcgcgctgtcagcggcgaggatgcaacagccggaggcggcgccaccggccggcgcaagaaggttgccgagtccgtacacgtgaagctgcaggcgtcgcgtgccttcttccggtctctattcgtcggcgagcaataccatagcgttggtgtccggaccaccactaggatctgcagccgcgaggctgtcaccgccgccgccattcccgacgaggagaagctccgcagcgagcgcacgaggtcggccgtggctcccgacgaggaggagctttgcagcgagtgcgcgaggtcggccgcagcggtggtgttggcagcgaaacggttgatctcggtatataaagagaggattgatgaattggtctgcgccgcccttgaatgccaatctgtgtctgcaaaagggaaacaagaaatagaatcattcagctgcttcttatcagacactaattcttctttgaagcaatggtcttcaagactgaagctagcgttacaagcttctccagagaaaagcaagaatgagtcgaaattcaccagtgcagcctgttcagtacctgctacaatagggaatgataggttgctctgcagcaacatagatgagcccgacttggttgtctctccttcacctcttgtatcgtggcgtgccggagcatgtatggtcgatagtggaaagcagttgtttctcttaacaccattgacaaaaacaaagacatgctcatccagatgcccaaaatcatcgacaacgcagttgaagacaactaccggcctggatcagctaaatcttcccaatatacctgttttgaaactgaccatttctgatgacgattgtctcgatctggagcaaagtgcgaaagcaaatgaatcgaatacttgtgtcatgacacctaattttatcaaagcaaagaaggggtcatcaggaaacagtctcttctcacctttcagtttcacagttcagaagagtggaagagcactacctagtccatgcctgaggacagcattgtcatgcaagcaacagatgttctctccaatatcagagggatcaagaaaggaagaaattccaagcaccggaccaacccagagcggcaaaccttctgaagccagtggtgatatttcatctgatgagatctcgaaggatctggcctcgaggtatccagacttttatgggttcaatcaacctaccatgactacataccgaaggagagaagcagatgatactcttgactggttcttatcgccactcaaaacctgtgtattaatggatccttcagatgaaaagcccattgcacctccagcaagagacagcaagtcatttatcgatactccatgcaaaggtttggaaagtgataaccttcagaaaataaaggaactttcagatgacaagcctatccagacttcatcagtgcatagcaaggccttgcttggtactccctggaaaggcttggagagcaatatcctgaagaagggacagggaatttcagatgataagcccatccaaactccagcaattcatagcagggcattgcttggtactccctggaaaggcttggaaagcaccaacctgaagggaaagcaagctggagaaacaactctcaagagagaactatggactagatttgaggcggtctctaccaacgagctccactttgacagttcagtcttccaacgatctgatggaaggcgtttcatagacatccttgaagaggaggcctcatga

SEQ ID NO: 51207 - DNA, 1606 bp, Oryza sativa
  Clone ID: PAT_MRT4530_53621C.1
gaaaactcctctcacttcgcgaacgcttcccatggcgctctcctccatggccgcggcgcaagagagctccctcctcctcttcctcctcccgacgtcggccgcctccgtgttcccgccgctcatctccgtggtcgtcctcgccgcgctcctcctgtggctctcgccgggtggccccgcgtgggcgctgtcccgttgccgtggcacgccgccgccgccgggcgtggcggggggcgcggccagcgcgctgtccggccctgccgcgcaccgcgtgctcgccgggatttcgcgcgccgtcgagggcggcgcggcggtgatgtcgctctccgtcggcctcacccgcctcgtcgtggcgagccggccggagacggcgagggagatcctcgtcagcccggcgttcggcgaccgccccgtgaaggacgcggcgaggcagctgctgttccaccgcgccatggggttcgccccgtcgggcgacgcgcactggcgcgggctccgccgcgcctccgcggcgcacctcttcggcccgcgccgcgtggccgggtccgcgcccgagcgcgaggccatcggcgcccgcatagtcggcgacgtcgcctccctcatgtcccgccgcggcgaggtccccctccgccgcgtccttcacgccgcgtcgctcggccacgtcatggcgaccgtcttcggcaagcggcacggcgacatctcgatccaggacggcgagctcctggaggagatggtcaccgaagggtacgacctcctcggcaagttcaactgggccgaccacctgccattgctcaggtggctcgacctccagggcatccgccgccggtgcaacaggctagtccagaaggtggaggtgttcgtcggaaagatcatacaggagcacaaggcgaagcgagctgccggaggcgtcgccgtcgccgacggcgtcttgggcgacttcgtcgacgtcctcctcgacctccagggagaggagaagatgtcagactccgacatgatcgctgttctttgggagatgatctttagagggacggacacggtggcgatcttgatggagtgggtgatggcgaggatggtgatgcacccggagatccaggcgaaggcgcaggcggaggtggacgccgccgtggggggacgccgcggccgcgtcgccgacggcgacgtggcgagcctcccctacatccagtccatcgtgaaggagacgctgcgcatgcacccgccgggcccgctcctgtcgtgggcgcgcctcgccgtgcacgacgcgcgcgtcggtggccacgccgtccccgccgggacgacggcgatggtgaacatgtgggcgatcgcccacgacgccgccgtctggccggagccggatgcgttccgcccggagcgcttctcggagggggaggacgtcggcgtgctcggcggcgacctccgcctcgcgccgttcggcgccggccgccgcgtctgccctggcaggatgctggcgctcgccaccgcccacctctggctcgcccagctgctgcacgccttcgactggtcccccaccgccgccggcgtcgacctgtccgagcgcctcggcatgtcgctggagatggcggcgccgctcgtgtgcaaggccgtggctagggcc

SEQ ID NO: 51208 - DNA, 630 bp, Oryza sativa
  Clone ID: PAT_MRT4530_53622C.1
atgtcgtttcctggagggttcccgacttcggcggcggtggcaaagtcgatggcgacggcagagtggctccctgatggccgagtcgttccccccgcagcgacggtgatgcggccaaggtggtgggcatcaatttcgttttccggtggcgacggagtcgttcccgacggcggaggctgcaacggtgatggtggagtcgctggcggcgcggccaaggccatccatgtcgacgccgcaagccgcatcatcgccatgcctgtccagcagcggccgcagtcagcacacacatgcagcggcatgggcgacgccccatatgtcagcatgtccctcaatcctctcttcataactaggatcgacttctccgacgtggcgtggacccggcggcaccgaggacaaggcggtgagcggaggagaagggcgacgatcggcggagaggtggtgggcggcggcaccgagctcgaatgctgtggggaggtccagggacctccgctcctatcgctcctcctccgctaccacgtctccctccgccgaccaacgctgtggcctcgacagccattcctaccccgcgtcgctcctgcgccccctgacaacgggcagtggctagcagggagaagggcggcgcagaggagctag

SEQ ID NO: 51209 - DNA, 889 bp, Oryza sativa
  Clone ID: PAT_MRT4530_53623C.1
gcacgaggttttttttttttttttttttttttttttttttttttttttttttttttttttgtctttaaaaaagcatatatagaatttactttagacttgtattgtacataccaaagggatccctaccgtatacgcgtaatatactcgtactgtatatgtctaccatgtaaaatgtaaaatactatgtaattacatctggtcgccacataccgctgcgctagctcattctacaccgccgtcgtccgagctcacggccgccgctgttacctgtctgacttgtctccggccacacaataaaactgagccggtgacctcaacgcgcgcggccgcgccactcaccacgaggctagtcagaactaccatacagctcatatgctaacacaagaacagaaagggaacaaaacaataagcaagagaagcacggacgggagcctactactactccagccgcagcatgcggcggaggtcgcgcgtcgcggcgtcatcgacggcggctgtgacggcggccttcctgaacgggaactgcggcagcggcacagagctcggctcgggggacacggagaacgccggcccggcgtacacctccaccgctacaggcctcgcggccgccttcctggcggcggaggagcccctgccctgacgtctccggcttcccgccgtcgtcggcttggtcctcgcatcgctctgatggttgttggccgtcctctggtgcgtggcggcggtggcacggatcctccgctgcgccggggaaggcaggagcacgttgtgcgggcgcagcacctcggtggccatatcaatggaggacgaggagaagaaagaagaagaggaggaaaaggttgggagtacagaactgtacagaacttggaggttgcgttcgccccgcgcgctc

SEQ ID NO: 51210 - DNA, 319 bp, Oryza sativa
  Clone ID: PAT_MRT4530_53624C.1
cctcttaagacttactctttttttgtttcatcaatgagcattaaaccactaccttgagcaatcatacggttttgtcaccaccagaacacaaggtttattcatcaaagacccacgcacaaaaacggaagctttaggacgccgggtccatgaaaaaacaagcaacaggatgaacataccatcagcttatctgacaggaaggtgttgacaaccacacccctagcatcaccccgaggccgaaacagaaaccgcgtacacaacatcaaagttctgcgcacaccgggagcggatacacaggatggccggttacttatggaaaaac

SEQ ID NO: 51211 - DNA, 320 bp, Oryza sativa
  Clone ID: PAT_MRT4530_53625C.1
aaaaccccaaaagaaaaaccaaaaggggttaagggccaagaagtttttttgggggacccaaaggggaaccccctggggaaaaaaaaaaaagggagaaaaggtccccaaaaacacaaggggccacccggagggaacaacttttttaaagcttggggggggggaaacaaatttgaaagaaaaaaaaaaaaaagggggccccccttgggagggcaaaaccttcttacaaaccttttttggccaaggttttccccccaaagtgaaaaagggaccccccgccccgggaaaggggggctttcctaagccgggggggcccttggggg

SEQ ID NO: 51212 - DNA, 789 bp, Oryza sativa
  Clone ID: PAT_MRT4530_53626C.1
ccgggccaaacgacagctcgggctaagagcgggggaggaaggtcctcggggcgctcggcggcgcggcacatcgcagcgccgcgagagatttacgtagcgcgcaggggcgtgagggggggaagggaggggcggaccgcggtggcggggagggggggggggggcagggggtggcgggcggggggggggcggggaagaagagaggggatgtgtggagagatgagtttgaattggatagatcgccctcgaacagccgcaccccccctggcactaatgctggagcggggcgtctccgctacacgccctccatccctcaccctcccctcctcactcgcccctccccacgcgcgccacacgctccggagagaggaggagaagtgggcagacggtgtacaaaagaatgggcggaggggacgaccgggaggaagagagagcggaaatcgggccgcagggcccccggtgcccgcggcaagtcccggggagcgcgacggagcctcacacaagtgggaagaccgggacggcgagcggggggacgaggcaattacgccgcgttcaccgggctcccggcaagcagactacaacggaaccgcgaggcaccgagggaacagaggcgggagggagaaagtcggaggaaagatgtggaggaagggggcaggcaaggaatggataaagtgggccagggcccgcttccctgcccgcggcacccgcccgcgaccgcctgacccaacgtcacgcccaacaagacgaagcaagaaaaaagtgacccaaccgctacctactcttacattgtga

SEQ ID NO: 51213 - DNA, 549 bp, Oryza sativa
  unsure (1)..(549): unsure at all n locations
  Clone ID: PAT_MRT4530_53627C.1
aaaggataagacatggctatcgcttcgacagcttctccggaggaaaagatgccgcccataagatgtgcctagagataacaatcatttcagaatctcgtataagtgatgtgcttctttctccgaaaaggtggacaatcaggaggaaatgcttcttttcaagagttgggattgaaggatttgctaatgcccgacccttctcgactataaactcttccgctcctccggacctatggaaaaccaagaagcagactgcagtgtcccgctcgagttttattttttttcctcacaagctgaaataatagaaagcccattccatatagagaataacacaattgggtatagacaagaattaacgaaaaaaaagttcttgggatgttacgctcaaggaaagcaggaagcacacaattattccacaattcaattttccccaaaccctaagggccatttattccagcttagagatttgggcttatgtgatttagggattctggtgggtttccaatcaaggtttgtcanatttgggaaaaatttttttccttggcncccggg

SEQ ID NO: 51214 - DNA, 558 bp, Oryza sativa
  Clone ID: PAT_MRT4530_53628C.1
atggagcaacctctcttcgagctgtctgctcctaggtgcgaattctatgagccacctccttcatcggagccaatttatacaactggctatgaaattggccctgaactaattagtatggttagggaaaactctttttctgtcattgatctagaaaatccctaccatcatctgtgggactttgagcaagtctgctcatgccttaagattcatggcatgaagcaagaaactgtatggtggaaattgttttcgttctcccttcatgagagagcgaagcaatggtacacatctaccgttggatgtgtaaacggtagttgggaaaagttgcaagacagattatgtcttgccttcttcccagttactcgtattactgcccttcaagtagaaattctcagtttctggcagattgaaaatgaacccatcggtgcagcctggtccagattcactaatttagtgcagtccggacaacccttatccttacctgactatgtgcttttgcaacattttcatatgggtctaaataaggagtctgcattctatctggacataactgccggatga

SEQ ID NO: 51215 - DNA, 230 bp, Oryza sativa
  Clone ID: PAT_MRT4530_53629C.1
cgacgtttccgagagcaaggatcacagggacttgggggaaatgtggaaccggacgacgagggtcacgcagacagacgccatgatggcgcatcacaccaggccaacggcggaggcaagccaccgcactgggaggaccaacagcggacaactgtcaagaacccaatcaactccaccattccctctattgaagagaacaacgcacgggacgtcgccgctgccctcagggacaa

SEQ ID NO: 51216 - DNA, 918 bp, Oryza sativa
  Clone ID: PAT_MRT4530_5362C.1
atggcgctgctgaggaagctcttcgctcgcaaggccatggatggattgtcatgcatctccgaacgggtctatgtgttcaactcgtgcttatcaacggagccactcgtcgtcgacgacgacgacgacgaggaggcgcgcaatgatcacctgatcagcaccgtgatccagctcaagagctgccacccgcacggcgcctccctcatgctcctcaacctgttcgccgccggcggcggcgaggaggcctcctccctcctccccgtcgacgcgctccggcggcacggcgtcgccgccgtcgccgagtacccgtgcggccaccggcatgggccgtcgctcccgctcgccacggcccgcgcgctcctcgccacctgcgtcgactggctggtcaccgacggccagcgcaacgtcctcctcatgcgctgcgaccgcggcgcgcggccggcgctcgcgctcgccatggccagcctgctggtgtacatggaggaggagcccgcgccgccggagctcgtgacgacgacgaccctggcggcggtgtacggcagggcaccggtggcgctgctgctcgccgccggctcggcactggatccacggccctctcacctgaggtacctgcagtacgtggcaaggctgagggggatgacgacgaggcatggaccaccaacaccatcgcccctcctcgtcttggactgcctcatcctcagacctgttccagattttgatggcaatgggggatgcagaccggttgtccgagttcatggtcgccgcgacgccgccgccgactacgacggcgatcgggccgatgatgcttcacccaagatcctgttcagcacaccgaggatcaagcagcacttcaggcagtacaaccaggtggaccaaatatggtcgagaattgacggaagtgctagaaatgagaacgggtga

SEQ ID NO: 51217 - DNA, 388 bp, Oryza sativa
  Clone ID: PAT_MRT4530_53630C.1
gtgcttttctttattgatatttttattattttctttggtctatccgcttgccggtggactggagtggagtggcggtggcggtggcgcacactcgcggcggctcgtgcgcccctccgcctatcgccgccggggccgtgccacccaccctcgaacgccgcggtgacgccgggatgttggcaggctgggaaacattggcttcctgtcctgcgagtgtcattcattcgttgatcaaagtgttattagtggttaccttcatgcagtggccagccactgctatcgttgttgttccgaattcaaactgttttaccttcgacaacaatagccgccttgtggactttgcagatctaatcgggaagaactttgaatataatgaaaagggctcagtacc

SEQ ID NO: 51218 - DNA, 1525 bp, Oryza sativa
  Clone ID: PAT_MRT4530_53631C.1
gttttgtttttttttttttttttgattcagtgaattgtatcacattgttaatcacatttttgagtaacaatggaaattgacgacaaattcgcaaactgcattcttaatttgttatcttttcatcgctacaggcctacagcaaaaaaacaccttcaattcaagtagcctgccatttcgtcgaacaccttgcacctcattccttctcgccaagatcgccgcggcgcaccggtggccaaaccatcatctcgacggggaagatgtcgccgagcggcctcgactcatcggtgttgcgccacatcctctcaaacctccacgtcgcgaggtcgagggatacgacccagtcggccatgacgaagaacagcgcgccggtgccctcgcagaatccaccgaagctcacgagcttgcagccgcgcagctggtccgagattttcgccgagagcttgattcgggagaggtcaccgacggtggccgggttcatcagcgcgcgcaggtccaccgccggctgctccacccatttccccggcgactcgagaacccacttcgcaagaacgagctgctcccgcagcgcgaagaagcagagacggccgtcgtgtgtcttgccgatccagtggttcccggcgtacaggagcatcccggtgttcggcaatggcaccgccgagagcgtcatcttggtcgcgtcgactgccattacgtatttgtcttcttcgctctggagcttgtagaccacgtcgccgatgacgaccgtcgggccttggtgtgggttcatggacttcttgagcgctccggtggccgcctcccatgcggaggcggcggaagagtacactagaatgtcgaagtgggcagcagcgccgaagaggacgacggcgacgcggaacgccgcgccggcgccaggtaggagcgcgcagcaggcgaccttgtgtccggcgacgaagcgggaggggagggacacggacgtcttcctcagcgggtcgcagacgaggagcttgagctctctcgccgacccggcgccgagctcgcggagcaggaggcgccggccacggcagtcgacgaggagggcgccgcacgcgggcgacaccgagagcgccccgtggtcgaggccgaggccgacgccggctgcagggacgaaagggggaagcgcggacggcgcgtagttgcggaagaacccgaagtacggaggcggcgcggggagcccgccggcgccggagacgagcagccgccaacggcggcacaccgccgcggcgcggacgatgtccgccagcggcgacagcctcttgaacacctcgagcagcatgtcgtcgggcactgccgacgcccccatcccctccacctccacccgcgccgcggaaccggacccacctggcggcgactgagaccgggcccgcgccgatgccttcccgccgcgaccgcgcatctcctcctccccctccatccgcggccgcgtgcgccgcgccgaatcgaactcccccggcggcgactgcgaccgggcgcgcacgcgcgcgcggcggacgaccacggccgacggcat

SEQ ID NO: 51219 - DNA, 675 bp, Oryza sativa
  Clone ID: PAT_MRT4530_53632C.1
atggcctcctcttccttatttctcctgggtgctcttcttgtgctggcctcatggcaggccatcgtcgcctatgatcctagcccgctccaagatttctgcgttgcagacatgaactcacctgtgcgagtgaatggatttgcttgcaagaatccaatggatgtgagctcggaagacttcttcaatgcagccaagtttgatatgccaaggaatacttttaacaagctcgggtccaacgtcaccaacctcaacgtcatggagtttccgggtctcaatacccttggcatctcactagctcgtatcgactacgcgccaatgggtgtgaacccaccacacatacatccccgtgctactgagctccttaccgtgcttgagggaacactctatgttggttttgtcacgtccaacccaaacaagctcttctctaaggtggtttgtaagggtgacgtgtttgtgttccctaaggcaatgattcacttccaaatgaacctagatcatgacaagccagcagttgcccaatcagcactcagtagccaaaaccctggagttattactattgcaagcgcggtgtttggctcacagccaccgatctccgatgatgttctgaccaaggcgtttcaggtggaaaagaagctaattgattggctccaatctcagttctgggagaacaactactga

SEQ ID NO: 51220 - DNA, 352 bp, Oryza sativa
  Clone ID: PAT_MRT4530_53633C.1
ggcgttggtcggcggcggcggaggaagcgagcaaggtgcagccagctcatgccgccggagttgccccacccctagctgctgctagggagaggccacgtgacagcacatgtcctggaccgatcttcacagttaagactagcgttggacaaggacatacaggcgtaataaaggtaggctatacctgtgacagaattacccatgggatgccattaagaccctataccaaacgcaagccaggagtaggaggcacacatatgacgtacagcatgccctttggtgcatagcctagaaatcttggcatggaaacagatacaaacttattaacaattaaccagcatggagagaccacact

SEQ ID NO: 51221 - DNA, 1078 bp, Oryza sativa
  Clone ID: PAT_MRT4530_53634C.1
cggcacgagggcgactgctcctgcagtggggcaaccggaagcggctgcgctgcgtcaaggtgcgccgccgcgacgtcgacgccgccgccaccgtggccgccgagaaggccgcggccagccagcgccgtgcggccgccgccccgccccccgccgccgcgcaccaccaccgccaccacacaaccgccggccacgcccaccaccgcgctgtcaggaggtcagaggagtctggagcaatgagatcttcagcgcagcagcatcagatgaacgggatccgggcagtcgcctcacctgaaagagaacgccctgcaaggggcagcaacatcatcaacaacaatggaggtccgccgacctccccagatgacaagaagggttcgtcgtcagggagcgaggggtcgatctggcccaaatttgcagtcgccctgacgaacaaagagaaagaagaggacttctgggtgttcaaaggatccaagcttcctcagaggcccaagaagagagccaaagtcatccagaggacagtgaatcttgtatgccctggaacatggctttgcgacttgacactggaaagatacgaagtccgagagaagaaggtttctaaaaagcgccccagggggttgaaagcaatgcacaacatggacagcgactctgaataataggatcactgaacacgaagcagctgaacattagaaaggagataattgcgcatacccatttagctgaagatttttcagctttctgatggaacaatcacgggctcgccgcttctcgcgcttaatttgaggagatcaagatgactggactgtcgtaatttggaagctgcacagaagaacacagaggctgcaggaaatatgtttgctctgaacactgtctgctgtctgcctaccagcaacgcggctctgaatgttttccaagtttctcatgtatacgtcttgctacctaaaatgtgaagcacactgctcaggccagtccagtttgatcgatgtgtagcttgccctgtgcatgacaatagcagttaacacgaatctgatagtcttcaatattttaaaaaaaaaaaaaaaaaaaaaaaaaaaaaaaaaaaaaa

SEQ ID NO: 51222 - DNA, 2836 bp, Oryza sativa
  Clone ID: PAT_MRT4530_53635C.1
atggcttcgtcgcagggcctcaagaagaactaccgctgcgaccgctcgctgcagcagttctacacgggcgggccgttcgccgtcgggagctctcccggaggcggcgaaggcgaagtcgaaggaggcgaggccgaggccgaggcgttcctcgcgtgcgcctgcggcggggaggtgcgcctggtgtccgccgccgacgcgtccgccatcggggagccgatcgagggcgaaaacgaggccgtcacggcgctcgcgctgtcccccgactcccgcctcctcttcaccgcggggcacagtaggcttattcgagtctgggacctcgcgtcccgcacttgcacacgcagctggaaggggcacgatggtcctattagggccatggcctgccatgcttctggtgggttgcttgcaactgctggagcagacaaaaaggtgtgcgtttgggatgttgatggtgggttttgcacacatttctttagaggccacgcaggtgttgtgacgactgttatgttccacaaagatccgaagcgccttctgctattttctggaagtgaagatgccactgtgagagtttggaaccttgaaagcaaaaagtgtgtcgctgtgctgaaagagcatttttcagctgtgacatcattagccttatctgaagatggacaaacattgcttagtgctgggcgggataagattgtgaatgtgtgggatgttcgtaagtacaactcaaagaagacaataccagcatttgaaatgatagaagatgtttccttcattggaccaggaagtaatttattgtcttgtttgggtgaaccggcaaatataaaacgcaaaacagatggttattttcttacggttggtgaacgtggagtagttcgcatctggtgcttggaaagtgctcagtgtatatatgagcagcaatcatccgatgtaaccgttaacacagagaatgaggagtctagaaggggttttacttctgctgttatgttgtcagatgatcaaggactgctatgtgccactgccgatcagcagtttttgttctactgtcccacgagaactgacggaggggacttccagctgaacttatataaacgcctagtaggttataatgatgagattcttgatttgaagtttgttggggaggatgaacaatatcttgctgtagctactaacttggagcaggtccgtgtttatgacgttgcatcgatgtcatgttcttatgtgctgtctggccacactgaaattgttgtttgcatcgacacttgtatttcttcttctgggaagacacttgttgtgactgggagcaaagatagcactgtgagactctgggatatggaaaggagaagctgcattggtattggtaaaggtcatctgggagctattggttccgttgcattctcaaagaaatctaagaatttttttgttagtggaagcagtgatcggaccatcaagatatggagctgggatgatacacttgatgatgttggcagtgaagttcctctcaaagcaaaagctgttgtagctgcacatgacaaagatattaattctctttctgtctcgcctaatgacggtcttgtttgcagtggttctgaggaccgtactgcatgcatatggaaacttccaaacttagtgccctctgttgtccttaaagggcataaaaggggcatttggtcagtcgagttttctcctgtggagcagtgtgtcattacatcatctggtgacagaacagtcaaaatatgggctgttgctgatggttcatgcttgaagacatttgagggccatacatctagtgttttacgagcctcattcctttcacacgggacccaatttgtttcttgtggaagcgatggccttgttaagctatggaccatcaaaacaaatgaatgcattgctactttcgataagcatgatgggaaggtttgggcactggctgttggcaagaaaactgaaatgcttgctactggcggaactgatgctgttcttaacctttggcatgactgtaccatggaagataaacaggaagattttcgtaaaaaggaggaggaactgttgagaggtcaggaattagaaaatgcagtatcagattatgactatgcaaaagcaatacaacttgcatttgagcttagaagaccccacaggcttcttgagttattcacacagctttgcagggagtctgatctggaggacccaatagaaaaagcccttattggtcttccaaaggaagggcttcgcgtacttcttgagtatatccgggaatggaacacaaaacctaagctttgtcatgttgcacagtttgtgctttttcgggtattgaggagcttgcctcccactgatatcctggagataaagggcatcagtgagctccttgagggacttattccatattcacagaggcatttcagcagagttgatagactagtacgaagcacatttttattggattacaccttgacccggatgtctgttgtagatccggacatagatgagggcacaaccagagatgacgcaaatggctcatcagtagagaattgtgaaattgcacaggcgaagcctgatgcattggtagcagaagagaacttgcaaaagtcggtaaagaaaagaaaatcaagcaaatcaagcaaaaaaggcggtaagaaggtgaagattgcgtccacggggggcagtaaggatgttcctattgaggcttaaatagttgacaaaccgcagttatatgttattcgcaccaccaattttgtagctgctgttttatctggtatgttgcagcatgaatcacatgttttaccttttgacccactgtacagaatgcattctttgcttgagttagaaagatctggtggctttcagttct

SEQ ID NO: 51223 - DNA, 481 bp, Oryza sativa
  Clone ID: PAT_MRT4530_53636C.1
gggggcggccgccgcgccgccgcggcatcctcgtcgtccgccgcggccgtcttcgagcggcgcttcgcctcggcggcggcgaagaactcgtacgatgaaatcctgacgggcctcgcgaaccgggaggcggaacggagttcgggaaatactacagcctgcccgcgctatccgatccgcggatcgagcgactcccttactcgataaggattcttctcgagtcggcaatcagaaactgtgatgagttccaggtcaccgggaaggacgttgagaaaatcctggactgggagaacagcgcaccaaagcaagtcgaaatcccatttaagccagcccgtgtcctcctccaggatttcactggtgttccagcagtggttgatcttgcgtgcatgagggatgctatgagcaaacttggcagtgacccaaacaaaaattaatcctctggtacctgtagatcttgttaattgatcattcagtacaagttgat

SEQ ID NO: 51224 - DNA, 1965 bp, Oryza sativa
  Clone ID: PAT_MRT4530_53637C.1
atggtgaaaacaaataggttcatcaacagcctgagcaagaggggatacataggaagctaccactacgagaaggatgccaagtacaggccattcagtgcactgctccctgagggttcaaaccccaagatgctctatgtcaagctcgtcctcatcatcctcatgtgtggctccttcgtcagcctcctcaactcgccatctatccatcacaacgatgatcaccacacagagtcatcagctggagtgccgagagtgagctacgagccggatgataccaggtacgtgtcggacgtgacggtggactggccaaagatctccaaggcgatgcagctggtcgccggagcggaacacggcggcggcgcgagggtggcgctgctcaacttcgacgacggcgaggtgcagcaatggaggacggcgctgccacagacggccgccgcggtggcgcgcctcgagcgcgccgggagcaacgtgacgtgggagcacctgtacccggagtggatcgacgaggaggagttgtaccacgcgccgacgtgccccgacctgccggagccggcggtggacgccgacggcgacggcgaggaggtggccgtgttcgacgtcgtcgcggtgaagctgccgtgccggcgcgggggtggctggtccaaggacgtggcccggctgcacctgcagctcgccgcggcgcgcctcgccgccacgcgcgggcgcggcggcgccgccgcgcacgtgctcgtggtgagcgcgagccggtgcttcccgatcccgaacctgttccggtgcagggacgaggtggcgccgcgcgacggcgacgtgtggctgtaccggccggacgccgacgcgctccgccgggatctcgccctccccgtcggctcctgcaggctcgccatgccgttcagcgcgctggcggcgccgcacgtcgcggcggcgtcggcgccgccgccgcggcgggaggcgtacgcgacgatcctccactcggaggagctgtacgcgtgcggcgcgctagtggcggcgcagagcatccggatggcctccgcctccggggcgccgtcggagccggagcgcgacatggtggcgctcgtggacgagacgatcagcgcgcgccaccgcggcgcgctggaggcggccgggtggaaggtgcgcgcgatccggcgcgtccgcaacccgcgcgcggcggcggacgcgtacaacgagtggaactacagcaagttctggctgtggtcgctgacggagtacgaccgcgtcgtcttcctcgacgccgacctgctggtgcagcgccccatgtcgccgctcttcgccatgcccgaggtgagcgcgacggcgaaccacggcacgctgttcaactccggcgtgatggtggtggagccgtgcggctgcacgctccgcctgctcatggaccacatcgccgacatcgactcctacaacggcggcgaccaggggtacctcaacgaggtcttctcgtggtggcaccgcctcccgtcgcacgccaacttcatgaagcacttctgggagggggactccggcgagcggctcgccgccgccaggcgcgccgtgctcgccgcggagcccgccgtggccctcgccgtccacttcgtcgggatgaagccgtggttctgcttccgcgactacgactgcaactggaactcgccgcagctcaggcagttcgccagcgacgaggcgcacgcgcggtggtggcgcgcgcacgacgccatgccggcggcgctccaggggttctgcctgctcgacgagcgccagaaggcgctgctccggtgggacgccgccgaggcgagggcggccaacttctccgacggccactggagggtccccatcgccgaccctcgccggaacatctgcgccaccgccgccggcgacggcgaggcggcggcggcgtgcgtcgagagggagatcgagaacaggcgggtggaagggaatagggtgaccacgtcgtacgccaagctcatcgacaacttctga

SEQ ID NO: 51225 - DNA, 118 bp, Oryza sativa
  Clone ID: PAT_MRT4530_53638C.1
ccaggtagaggatactcagtggactactgtcagtaatataggcaggtaatgagtccagcgcaacagccatggagccaagatccaggcgtacaggcaaacagggcacagctcacggcag

SEQ ID NO: 51226 - DNA, 527 bp, Oryza sativa
  Clone ID: PAT_MRT4530_53639C.1
gggtttgttgggggtttttttttttttttttttttttttttttttttttttttttttttttttttttttccgggaatttgggtccgccccggaaaggcggaccggctcccgcaagggggcctcttttcccaaaagggggccataatggggggggggggggggtgggttaaagcggtttccggtgaaaaatcggtacaacatacaaaaccccaaacaaaaaacgaacaggaaggaaaaagtaaaaagccagggaacccaaatgagggggctaacgcaaattaacggctttgcactcaggaacccttttccgcccggaaaaccagtgaagccacctgcataaaggaagaggccaaccgccggtaagaggccgggggggttttggtctccacgggggatactgtcttcaccagggagaccggcaacagctggtccccctagaccgcctggccccggaagagtctggttaggcgcaccacgcgaaattccccctggaggggaaataacggtgggatggaacataacggggg

SEQ ID NO: 51227 - DNA, 632 bp, Oryza sativa
  Clone ID: PAT_MRT4530_5363C.1
ctgttatttgccttcgattgaagtgtcataggtcgccgttttatttgtcttgggtagtggttcattcttgtttgtacgttcagaattttagtttcaagaacattgttcaccattctattattatgtcatttaaggtgaattttctaaagcgaacttgaagaatactaatcctttatagttcagctaaacagcaatatggtggttttatttatgcatcaaactttgtgtgcatggtttcaattttttttttaatctgaaccagtcttaatcgctccatattatctggtggttttaaatctatttttatttaatgcttaagtgcttttagttattttttttattttattgtctaaagcttgatgctctctgtgagctaaatatatcctatgtcctatatatccttaacatttcatttcttcttgctaattattaatttcagctttgcttattttccatctacattttgttacaaaggctatataatatcaatgttctaggttgctttcctaatgtttgttcgtttgatgtcaaaataggaagggattactgtgtgaaaacttgtgtttttgtatgtgttgtgtctagtaatgtatgagatactaagttcaaataaatatagtgtttttttctgg

SEQ ID NO: 51228 - DNA, 376 bp, Oryza sativa
  Clone ID: PAT_MRT4530_53640C.1
gcgactgtgatgacgctctctctcgtggcccgatcttctggtgaggggataactctcgctttgatcgagtgcaacgtttgcgacgtggctaccaaccagaacaagtccaggatgccatgcaatcgctacaccacaaacgatgttgtaccaaccgtgacacgcggttgatgatcctcggaatgaatttggatatgagactggatgcgtttgaaaggtgatgagagaagttttccatgaagtccaagatcacccaaatcggagttggcataaaggtgctaggtccgtttgaagtcagtgctatctccggaggacgaactggattgcaaaactcattggactttaatatcttgtagatcgtccattcattcgatgtatt

SEQ ID NO: 51229 - DNA, 1263 bp, Oryza sativa
  Clone ID: PAT_MRT4530_53641C.1
atgaaggttattttatgtgtctttgaacaactctcgaggttgaaaatcaattttcaaaagagtgaaaatttctacgctgagaaatccaagaaagaagaggataagtatagacaattgtttggttgtaatttaggatcttttccttttagatatcttggtatacctattcactatccaaagctccagaatattgattgtaaaaaagtggaagataggtttaagagaaagcttagcacttggaaaagaaaaaaacatctcatatggtggaagattaatccttcttaattcggttctgtcgaatcttcccatttttatgttgtcattctttgaaataccttgggggtaccgcaaagactcgacttctacagatcacactttttttttgagtagtgacaatcaaaagataagtatagattgatgaaagtggacttggtgtccagaaccttgatatcaaaaatagatgttttctagccaaatgcctattccagctagtcaacggtgaaagcctatggcaggacctcttgcaaaacaaatatttgaagggaaaacctctcacccaaatatctcataaacctgggatatcccaattttgggctggtttaaagcgaataaaagcccggttttttcgttttggttcttttagacacaacaatgggacatatgtaagattttgggaggcttcaaggttgggacatgtcctctcaaatatcaatacccttctttgcataatgttacttgaaagaaacactgctctttggcatatgttatgagcacaacaccaataaatatctcgtttaggtgggcaattattggtcccaaatcagttgagtgggatgatttggtatgccgactagctagtatagcatcgtcaaatgaaaataattgcttcatttggtcgctatataagaatggccaattttcggttcaatcaatgtatagtacgatagtgaactctaatgtgggtatcacaagaggatcttatgggaggtgaaggtgccactaaaaatcgaagtatatatgtggttctttaaaaaaaaaagtaatcctaacaaaagataaccttacaaaaaggaattgagaggcgataaggaatgttgtttttgtaacgcacaaagagacaattcaacacatttttttttgaatgtcatgaggagcatgatactatgtgtagtggtgttacactcctggaattggtagtgaaagatcttttgttccgttttgaatggcgagacgaatctaatgagcctaattaatccatgatta

SEQ ID NO: 51230 - DNA, 1275 bp, Oryza sativa
  Clone ID: PAT_MRT4530_53642C.1
atggcgtcatcagctgcctcgtcgctgcttgtggcggtggtggtgctggttcttgttgctgctgcggaggcggcggcggcgaacgagacgtcgtcgtcggcgacggcggcgctgcgggcggggcgggagctgcggaggtacaggagggtgcaggcgctgctgcggcgggtgaacaagccggcggtgcggacgatcgagagccccgacggcgacctcatcgactgcgtggcggcgcacctgcagccggcgttcgaccacccgaggctgcgcgggcagaggccgctgcggggcccgccggagaggccgagggggtggcggccgcggccggggccgaacgacacggcggcgggcgacgccggcgtccagctgtgggcgtcgtccgccggcggcgcgtcgtgcccggaggggtcggtgcccatcaggcgcaccacggaggccgacgtcctccgcgccagctccgtcaggaggttcggccgcgcgcccacggcgagggttcgccgcgactccgtctccggcggccacgagcacgcggtggggtatgtggccggggaggagtactacggggcgaaggcgagcatcaacgtgtgggcgcccaaggtgagcacgccggaggagttcagcctctcgcagatctgggtcatcgccggctctttcggcaacgacctcaacaccatcgaggccggctggcaggtgagcccccagctgtacggggacaactctcccaggttcttcacctactggacgacggacgcgtaccagacgacggggtgctacaacctgctctgctcggggttcgtccagacgaacagcaggatcgcaatgggggcggccatctcgccgacgtccggctacaagggcggccagttcgacatcagcttgctcgtctggaaggatccgaaccacgggaactggtggctggagttcgggaatggggagctggtggggtactggccgtcgttcctgttcagccacctggcgtcgcacgcgagcatggtgcagttcggcggcgaggtggtgaacacgagggccgacggcggcgcgcacacggcgacgcagatggggagcgggcacttcgccggcgaggggttcggcggcgcctcctacttccgcaacctggaggtggtggactgggacaacagccttgtccccctcgccgccggcttccacgtcaccgccgaccaccccgactgctacgacatccagggcggcgtcaacgccgtctggggcaactacttctactacggcggccccggcaagaacgtcaagtgcacctag

SEQ ID NO: 51231 - DNA, 462 bp, Oryza sativa
  Clone ID: PAT_MRT4530_53643C.1
atggggctggtggtccccaggccaccaggcggcgcgcagcgagcgagaaagcagcgccccgctcccagttttggcttacgaaacgagtcccatcaaaacactcagctggagccgcggttcaccgtccgcgcctccgtggctatcacggcatcgcgggcgcttctctccagaatccaccgcgcggcgtcgcggaaacccacccgtctcgcgcgctacggcttagccgcgacggtgaccgcggccggtttgccatccctagacggctcgcgacgctgcgtggtgggcggctggtggcacgttgcgatcacagtgggaaaggcagttgggccacttggccgtggcgatgtgctgggtgcttgctcgcctgctgttttccacatcgccgtcgccacgggtgatttccctcgtacggtgctgttccacgagcgaaaactagctgagttccaccacctctcgatgtga

SEQ ID NO: 51232 - DNA, 514 bp, Oryza sativa
  unsure (1)..(514): unsure at all n locations
  Clone ID: PAT_MRT4530_53644C.1
taccaactgatgacgctctctctcgtggcccaatcttctggtgaggggataactctcgctttaatcgagtgtgacgtttgcgacgtttgcgacgtggctaccaaccagaacaagtccaggacgtcgtgcaatcgctacaccacaaacgatgtcgtaccaaccgtgacgcgcggttgatgatcctcgagatgaatttggacatgagagtggatgcgtttgaaaggtagcgagataagctttccacgaagtccaagatcacccaaatcagagttggcatgaagacgctaggtccatttgaagtcagtattgtctccggaggccgaactggacttggacttggaattatcattggaacgtgtgtgaagttatgagcgtatccgacgaaatgatgtcctcatcaaggaggatgatggcgtggcccggaagatccagattgttgaagctgtatcaatctactgatccagggcttgatatagttaaacatgtcggtttctcaaacaaaaaannngaaaaa

SEQ ID NO: 51233 - DNA, 141 bp, Oryza sativa
  Clone ID: PAT_MRT4530_53645C.1
gtgagggagaaaccatgcataaactggggtctgtagtgcaagagtacaacataagcctcgataacgctacttgacaagatctgattttaatgcacaatataccataactacatatatgttgaacatgataatttcaaatca

SEQ ID NO: 51234 - DNA, 327 bp, Oryza sativa
  Clone ID: PAT_MRT4530_53646C.1
agttgagtgatgacgctttctctcgtggcccgatcttctggtgaggggataactctcgctttgatcgagtgtgacgtttgcgacgtggctaccaacagaacaagtctaggacgtcgtgcaatcgctacaccacaaacgatgtcataccaaccgtgacgcgcggttgatgatcctcgagatgaatttggacatgagactggatgcgtttgaaaggtagcgagataagctttccacgaagtccaagatcatccaaattcgagttggcatgaaggtgctaggtccgtttgaagtcagtgctgtctccggaggccgaattgggttccaaaa

SEQ ID NO: 51235 - DNA, 4090 bp, Oryza sativa
  Clone ID: PAT_MRT4530_53647C.1
tagagaaggtgcatcgtctgaatgctaagattaagacggaaggacagccggaatggggatatggctagtgcaacagcagggtggatgaagatatgcagggatggggacaatgcaggaggtgagggaacggtggctgctaacagcaacaccggcgtggatgaaagctcagaatttgagctgaaggatggagcgctgccattctacatattggatgcatacgaggagccttttggtgctaattcgggcacagtatatttgtttggaaaggttgaagtaggcaagcggttccacagttgttgtgtggttgtaaagaatatgcaaaggtgcatatatgctattccaagcagttcaatcttcccaagggacaccatatcaaggctagagaagaattccactacttctgattcttctccatcacttcgagcaagtctacatgagttagcatcaggattgaagagcgaaatagctgataagttgtcagacttcaacgtgtcaaattttgcaatgactccagtcaagaggaactatgcatttgagaggactgatctaccaaatggggagcagtatgtcttgaagataaattacccatataaggattcggcgctacctacagaccttcgaggtcaacatttccatgcattacttgggacgaacaatagtgctcttgaattgcttctcatcaaaaggaagatcaaggggccttcatggctttcgatctccaaatttttggcatgtccagctactcagcgggtcagctggtgtaaatttgaagttacagttgatagtcccaaagacatatctgttttgatgacaagtaccacgttagaagttcctcctgtcgtggttgcagcagttaatcttaaaactatcataaatgagaaacacaatgtgcatgaaattgtgtcagcatcagtcatatgctgtcaccgtgtgaaaatagatagtccaatgcgttctgaagattggcagaaacggggaatgctcagccattttactgttatgcgcaagcttgaaggcagtatatttcctataggcctctccaaggaatcctctgataggaaccagaaggctggtagcaatgtgctggcactcgagagcagtgaacgtgcattgttaaaccgcttgatgatcgagcttagcaaacttgattgcgatgtacttgtgggacacaatatttctggatttgacttggacgtccttttgcaccgtgcacagacttgcaaagtaccaagcaatatgtggtccaagattggtcgtcttaggcgctcagtaatgcccagactcaccaaagggaacacactttatgggtctggggcaagtccaggaattatgtcctgcattgctggtcgtctcctctgtgatacctacttatgctctcgcgatctcctgaaggaggtgagttattctttgacacaacttgcagaaacacaattgaaaaaggagaggaaagaggtctctccacatgatattcccccaatgttccaatcttcaggagcacttctcaagctggttgaatatggcgagactgatgcatgtcttgctttggagctcatgtttcatttgagtgttctcccgcttacacgccaattgacaaatatcagcggtaacctgtggggaaaaactctccagggttctagagctcaaagggtagagtatctgctgttgcatgcattccatgcaagaaaatttattgtaccggacaagtttgcacgcagtaaagagtttaactctacaaaacgaaaaatgaaccctgataccgaggctgcaagacctgatgaagctgatccttcaattgatgacgagggacatcatgttgatcaaggtaaaacgaaaaaaggtccttcatatgctggtggcttggttttggagcctaaaaagggtctatatgacaagtatgtgctacttctggactttaacagcctttacccttcgataattcaggaatacaatatctgctttactactgttgaccgttctgctgatggcaatgtccctaatttgcccgcttcaaagaccactggtgttttgcctgagttgctaaagagtttggtggagaggagaagaatggttaaatcatggcttaagactgcttctggtctcaaaaggcagcagtttgacatccaacagcaagctttgaagcttaccgcaaatagcatgtatggctgcttgggcttttccaattccaggttttatgcaaagccacttgctgagcttattacactgcaaggaagagagatattgcaaaacactgttgatctggttcagaataacttaaatttggaggttatctacggtgacacagactctataatgatacatactggtctggatgacatctccagggcaaaaggaattgcaggaaaagtcattcaggaggtgaataaaaaataccgctgtctggagattgatcttgatgggatatacaaaagaatgctgcttctcaaaaagaagaaatatgctgccattaaagttgcattagatggtagcttacgagagaacattgagcgcaagggacttgatatggtcagacgtgactggagtttgctgtcaaaagaaattggagatttttgcctgaatcaaattttgtctggagggtcatgtgatgacgttatcgagtcaatccatagttctctcgtgcaggtgcaagagcagatgagaggtggccaaacagaattagaaaaatatatcattacaaagagcttaacaaaagcaccagaagattatccagatgctaaaaaccaacctcatgttcaggttgctttaagactgaagcaaaatggttattctgggtgctctgcaggtgatacagttccctatataatttgctctcaacaggattcagagagtacacattcagagagaatagactctcaaagagctcagagagaaccagagggctggaagaacctgtacacaatggtgtgtttgagaatattagcatcatattatctgcagcagagaatcaatcctgtagtttcccgtgtgtgtgccgcagtatccaggggcacagagccagctcgcctggctgaatgccttgggcttgattcatccaagttccaatcaagattgactgagtctgataatcaagatacgtctagcatgctcttgtctgtaattgatgatgaagatgagagatatcgtggttgtgagcccctgcgattatcatgcccaagctgttctactacctttgactgcccccctgtgtctagtctgattattggttctagctctggaaatgtatcaaatccaaatgaaggaaatgatgcttccattaatttttggcgtcggatgcggtgcccaagatgtccagatgacactgatgagtccagagtttctcctgcagtacttgcaaaccagatgaaaaggcaggctgatagtttcatcaatctatattataaaggtttactgatgtgtgatgatgagggttgcaaatactcaacgcacagtgtgaaccttagagtgatgggggactctgagagaggaaccatctgccccaactacccacgctgcaatggccacctagtgagacagtatacggaggcagatctatacaggcaattgtcatacttttgctatgtagttgatgcaactcgatgtcttgagaagttggaccagaaggcgcggcttccttttgagaaagaatttgcggcattaagccaaactattaacttggcattaatggaggttcagaaaatccgagacagatgtgcatttggctgggttcagttgaaggatcttgcaatatcaatctgatgaattccttgtcctttgtaaacgtcaaccctcaaatatcggtgaatgagctaagaattcctcataggacgtgcaacgttgtgttcttgtgttgtagaagctacatcacatgctgagttgcagacatccaaattacaagatagtaggctgttccgtgagggtgtttctcaacctgtaaagtacagaattttcgtagtatatttcatttgaattcaaatgttatagctgttgcttgggagcagacccagatgagtacctttcgtagtgttatttagtgagtgaatgtaccatgctaaacttgtaaatatggtgtagcaatataagatcccaggatatc

SEQ ID NO: 51236 - DNA, 595 bp, Oryza sativa
  Clone ID: PAT_MRT4530_53648C.1
ttttctatgatgacgctctctctcgtggcccgatcttctggtgaggggataactctcgctttgatcgagtgcgacgtttgcgacgtggctaccaaccagaacaagtccaggacgccgtgcaatcgctacaccacaaacgatgtcgtaccaaccgtgacgcgcggttgatgatcctcgagatgaatttggacatgagaccggatgcgtttgaaaggtagcgagataagctttccacgaagtccaagatcacccaaatcggagttggcatgaaggcgctaggtccgtttgaagtcagtgctgtctccggaggccgaactggattccaaaacgcattcaccgcggtttcaggcggatgcttgatggtcacatcagcggtggcggagaagtcctcggcggcggcagaggggaggttgacacgggcggtggtgtagtcggcctcaggcggcggcggggacaccggcacctcgtccttcatttcctcctccccttcgtactcctcttcctcctcctcctacacctcctcgtcggcggatctgggccagcgcaggacgagagtagcggcggcggcggcggcgacgtctcgtcgaggaggagc

SEQ ID NO: 51237 - DNA, 335 bp, Oryza sativa
  Clone ID: PAT_MRT4530_53649C.1
aggacaccacgcgtacaccggctgctccaccagctgactgagcgacgcaaacaacctactttactgactgcctgaggcgcaccatcagggaatgctgctgcggaatggtgaagaaccactgaagcctgtgccaggtcacgcgtgaggcgtacgcaaaatgcatacgatggcgcacatgcaacttgcctacggcccaaacgataggcgccatggacatgccttgtatgagaaactttacgtgcatcaagcacacctgatataaccacatctgccacgctatatccaacttacttagatgactactgcctacaagttatgttactatgattgttact

SEQ ID NO: 51238 - DNA, 110 bp, Oryza sativa
  Clone ID: PAT_MRT4530_5364C.1
ggggcattaagacaaagcgggctttataaaacaccacttgctgacaggaatcacactgataataagcgctttcacctactcacacaaaaccttatttgagtaaacatata

SEQ ID NO: 51239 - DNA, 225 bp, Oryza sativa
  Clone ID: PAT_MRT4530_53650C.1
atggatatatataacgtgttaggaagggaaatgggaggcaacgcagagctcatcgagcgttctgctctgcaaactcggtccggccaatcaaaggaacttgcccgagccatcatgacggcctgcaaaaaaggaagatacaaaaacacagagaattttcgcacgggggccggctctcgagggcatcgagaattgcggggcgtccctgacgaggcgaacgccggttga

SEQ ID NO: 51240 - DNA, 644 bp, Oryza sativa
  unsure (1)..(644): unsure at all n locations
  Clone ID: PAT_MRT4530_53651C.1
aacttcgaatncatntttatgactttacagctttgnncccctgatgaancnttnccggctntgttgttgatctcctcggccgttctggtcanttggagaaggcnntgagattcntccactgngatgcccntagatcctgnccctnttgtttggnggatnctttctgggatcntgcnatncgcatggtgatntagccnttgcagagntcgtcnccaagaagctcaatgantttganccctgcnacngcggaaactntactctgttaagcnatgcatatgcgagtgctcatagatggagcgaagctntgaacgtcaggcaatgtntggctgatactgatgtgnggaantctcctggatgcagtgctgttgaagcggcttaatccggcgaacncgtaggttcgtgactagcaaagacntacattgcntcatactgtcaatctgtgtgaatatagatgttcaggcctagttgtcaacttttntgnggaaatttntcatacttctgtcatttcagcctttattactgattaaatcgaagtntagaaagatgtcttaaggtgtagatgaaaatcgaagtaaagatgtcttgggngtaaaaaaaaaaaaaaaaaaaaaaaaaaaaaaaaaaaaaaaaaaaaaaaaaaaaaa

SEQ ID NO: 51241 - DNA, 4740 bp, Oryza sativa
  Clone ID: PAT_MRT4530_53652C.1
atggatgagggatccgcggatgcgggcgcctccggccgccgctcgcgcgcccggggctccgaggcggtggcgcggtccgcggcgctcgagcgcctccgcgcgatccgcgatgggggcgcccgcgccgccgccgccgtccaggtgaggattgaggccccgatctacgacaccgtcgccgaggaggactacgccgcgctcgtcgcccgccgccggaaggacgcgggggccttcatcgtcgacgacgacggcctgggctacgccgacgacgggcgggaggaggactggacccaccgcaccatccactcctcctccgacgagggctccgacggcgaggatggcgccccccggaagcggaagcagccgcgtccgcagtcgaagcgcccgcctcagcagtccgccgccgcggcgtccctctctgccgccgccgccatgatggggaagcaacgactctcttccatgttcacctcctccgtgtttaggaagcctggcagcgaccgcggtagggactcgtcgctggcggccgacagcatcgtggatgacgtcatcgcggagttcgctcccgacgacaatgaccgcgaggagcggcgccgccgcgttggtagggtttgtgccccggcgccagcgccaacaacaactgctcacatcaaggctgaaaatgtggcagtcgatacggcaatggcgttcagatcggataatgttttcgaggcccatgaggtttcagatcatggaaatgatatggatatggaattgaagccagacgtggaaatggagcccaaattggacacacctcttggtgctagtgctgaattggcgaataatagtaacagcctggaggaaccgaaacaggaggctaatggggaggttaagatagagaaggtgcatcgtctgaatgctaagattaagacggaggacagccggaatggggatatggctagtgcaacagcagggtggatgaagatatgcggggatggggacaatgcaggaggtgagggagcggtggctgctaacagcaacaccggcgtggatgaaagctcagaatttgagctgaaggatggagcgctgccattctacatattggatgcatacgaggagccttttggtgctaattcgggcacagtatatttgtttggaaaggttgaagtaggcaagcggttccacagttgttgtgtggttgtaaagaatatgcaaaggtgcatatatgctattccaagcagttcaatcttcccaagggacaccatatcaaggctagagaagaattccactacttctgattcttctccatcacttcgagcaagtctacatgagttagcatcaggattgaagagcgaaatagctgataagttgtcagacttcaacgtgtcaaattttgcaatgactccagtcaagaggaactatgcatttgagaggactgatctaccaaatggggagcagtatgtcttgaagataaattacccatataaggatccggcgctacctacagaccttcgaggtcaacatttccatgcattacttgggacgaacaatagtgctcttgaattgcttctcatcaaaaggaagatcaaggggccttcatggctttcgatctccaaatttttggcatgtccagctactcagcgggtcagctggtgtaaatttgaagttacagttgatagtcccaaagacatatctgttttgatgacaagtaccacgttagaagttcctcctgtcgtggttgcagcagttaatcttaaaactatcataaatgagaaacacaatgtgcatgaaattgtgtcagcatcagtcatatgctgtcaccgtgtgaaaatagatagtccaatgcgttctgaagattggcagaaacggggaatgctcagccattttactgttatgcgcaagcttgaaggcagtatatttcctataggcctctccaaggaatcctctgataggaaccagaaggctggtagcaatgtgctggcactcgagagcagtgaacgtgcattgttaaaccgcttgatgatcgagcttagcaaacttgattgcgatgtacttgtgggacacaatatttctggatttgacttggacgtccttttgcaccgtgcacagacttgcaaagtaccaagcaatatgtggtccaagattggtcgtcttaggcgctcagtaatgcccagactcaccaaagggaacacactttatgggtctggggcaagtccaggaattatgtcctgcattgctggtcgtctcctctgtgatacctacttatgctctcgcgatctcctgaaggaggtgagttattctttgacacaacttgcagaaacacaattgaaaaaggagaggaaagaggtctctccacatgatattcccccaatgttccaatcttcaggagcacttctcaagctggttgaatatggcgagactgatgcatgtcttgctttggagctcatgtttcatttgagtgttctcccgcttacacgccaattgacaaatatcagcggtaacctgtggggaaaaactctccagggttctagagctcaaagggtagagtatctgctgttgcatgcattccatgcaagaaaatttattgtaccggacaagtttgcacgcagtaaagagtttaactctacaaaacgaaaaatgaaccctgataccgaggctgcaagacctgatgaagctgatccttcaattgatgacgagggacatcatgttgatcaaggtaaaacgaaaaaaggtccttcatatgctggtggcttggttttggagcctaaaaagggtctatatgacaagtatgtgctacttctggactttaacagcctttacccttcgataattcaggaatacaatatctgctttactactgttgaccgttctgctgatggcaatgtccctaatttgcccgcttcaaagaccactggtgttttgcctgagagttttaataatttggttttgcatggatttttgactgctatgagaaaccttggttttgggctagactgtggagacatgatcagtgtgggcctgctaatgagagggtttctaatgataaagttgctaaagagtttggtggagaggagaagaatggttaaatcatggcttaagactgcttctggtctcaaaaggcagcagtttgacatccaacagcaagctttgaagcttaccgcaaataggttttatgcaaagccacttgctgagcttattacactgcaaggaagagagatattgcaaaacactgttgatctggttcagaataacttaaatttggaggttatctacggtgacacagactctataatgatacatactggtctggatgacatctccagggcaaaaggaattgcaggaaaagtcattcaggagagggattctatgcacagtggagaaagaccagttaacataagtgctttgatgcaggtgaataaaaaataccgctgtctggagattgatcttgatggtatatacaaaagaatgctgcttctcaaaaagaagaaatatgctgccattaaagttgcattagatggtagcttacgagagaacattgagcgcaagggacttgatatggtcagacgtgactggagtttgctgtcaaaagaaattggagatttttgcctgaatcaaattttgtctggagggtcatgtgatgacgttatcgagtcaatccatagttctctcgtgcaggtgcaagagcagatgagaggtggccaaacagaattagaaaaatatatcattacaaagagcttaacaaaagcaccagaagattatccagatgctaaaaaccaacctcatgttgctttaagactgaagcaaaatggttattctgggtgctctgcaggtgatacagttccctatataatttgctctcaacaggattcagagagtacacattcaggaggaatagctcaaagagctagacatccagaggagctgaaaagaaaccctgacaaatggatgattgatattgactactatttatcgcagcagattcatcctgtagtttcccgtctgtgtgcttcgatccagggcaccagcccagctcgcctggctgaatgccttgggcttgattcatccaagttccaatcaagattgactgagtctgataatcaagatacgtctagcatgctcttgtctgtaattgatgatgaagatgagagatatcgtggttgtgagcccctgcgattatcatgcccaagctgttctactacctttgactgcccccctgtgtctagtctgattattggttctagctctggaaatgtatcaaatccaaatgaaggaaatgatgcttccattaatttttggcgtcggatgcggtgcccaagatgtccagatgacactgatgagtccagagtttctcctgcagtacttgcaaaccagatgaaaaggcaggctgatagtttcatcaatctatattataaaggtttactgatgtgtgatgatgagggttgcaaatactcaacgcacagtgtgaaccttagagtgatgggggactctgagagaggaaccatctgccccaactacccacgctgcaatggccacctagtgagacagtatacggaggcagatctatacaggcaattgtcatacttttgctatgtagttgatgcaactcgatgtcttgagaagttggaccagaaggcgcggcttccttttgagaaagaatttgcggcattaagccaaactattaacttggcattaatggaggttcagaaaatccgagacagatgtgcatttggctgggttcagttgaaggatcttgcaatatcaatctga

SEQ ID NO: 51242 - DNA, 387 bp, Oryza sativa
  Clone ID: PAT_MRT4530_53653C.1
atggcgcggctcggcggtggtgctagcggtggcgagcagtggccagaggagtggaaaaggcggcggcggcgggtgggctcgggaggggcggacgtggccggggaggctcccgatttcgccggcgacttgggagagaaaacgacgcaggaaggggcgaggtctgcgaccacctcgtcggggccgttgcagccgcacaagccgctccttgagcgcgcgacggcggccacggggtggcctcggccggtcaagcagaggaagatgaggatgcaaaggagcatacgaagaggaggagaggagcagacggacaagaggatgaggatgcggaggcgaggtgggaggagaggaggagagtggccatggcggcaacgaaggtggacgtggatctaa

SEQ ID NO: 51243 - DNA, 1641 bp, Oryza sativa
  Clone ID: PAT_MRT4530_53654C.1
atgggtggacgcggcgcgctaccggtggtcgcgggggtcgtgcttgtcctcctggtggtcgcggcgcggggagcctccgccgctggaggtggaggtggtggtggggcggcggcggcggctgtcaacggggaccggctcagggcggagcagatccggaagcaggcgaaggacgcggcggcctccgccgccgcgctggccgcggcgtcgcgcaggctccacctcgaccgcgcgcgccacctccggctgctctcctccctccaccgcaacctcaccgccacgctccgtgacctcagcgccgccgcgtcggcgtcggcgtccgcgtccgcgtccgaggccggactacgcgccaaggacctgatccgcgccgcgcgcgccgccatcgcggacgccaagccgctgttcgacccgcagctcaagatccagcggctcaaggacgccatcttcgcgcagaacgagttgctcgcgcgcgccaagaagcgcggcgccttcgcctccctcatcgccgccaagtccatccccaagccgctccactgcctcgccgtccgcctcaccgccgagcggatcgcacggcccgagaattacgccgacccggtgccgccgccgcacgcgctcgaggaccccgccatgttccactacgccatcttctccgacaacgtcctcgccgcctccgtcgtcgtgcgctccgccgtcgccaactcgctcgacccctccaagcacgtcttccacgtcgtcaccgaccgaatgaaccttggcgccatgcagtttcgatgcaaaaaacaattctacgttcagatctcgtctatgttctatagcaaccttagtagtttactattgaaagtgataattcgcctaatggacttaaaaggcgcgcactatgaggtcaaagcatttgaagactacaagtttcttaactcctcatatgttcctgtgcttcggcaactggagtcagcaaacctccagaagttctattttgagaacaagcttgagaatgctacaaaagatgctagtaatatgaagtttaggaaccccaagtatctctcgatgctcaatcacttgcggttctatttgccggagatgtacccaaagctgcaccggatacttttcttggatgatgatgttgtggtacagcgggatcttacaggattgtggaagattgacatggatgggaaggtgaatggagcagtggaaacatgctttggatcgtttcatcggtattggcagtatatgaacttctcgcacccacttatcaaagagaagtttaatcctaatgcatgtggatgggcatatggcatgaacttctttgatcttgattcttggaggagagaaaagagtactgagcaatatcattactggcagagtcagaatgagaacaggacattatggaagctaggaacgttgcctcctggtttgatcacattctactccaccacaaagcctctggaaaaatcttggcatgttcttggactcgggtacaatccaagcataagcatggaggagattagaaacgctgctgttgtgcatttcaacgggaacatgaagccctggctggatatcggtatgaaccagttcaggcacctatggacaaaatacgtggattacgacgactcattcattcgccaatgcaattttgcaccaccgtag

SEQ ID NO: 51244 - DNA, 160 bp, Oryza sativa
  unsure (1)..(160): unsure at all n locations
  Clone ID: PAT_MRT4530_53655C.1
tgcaattttgtcaagatctaccgttgggcgtcgtggggagaatggtgagataatgattgtgggccctctttggcgtggttnggaagggcgcactttgttgacctgctcgngcctttggctctctcttgcttcttgctcttggggcgcctgcttgggtttt

SEQ ID NO: 51245 - DNA, 1986 bp, Oryza sativa
  Clone ID: PAT_MRT4530_53656C.1
atgggtggacgcggcgcgctaccggtggtcgcgggggtcgtgcttgtcctcctggtggtcgcggcgcggggagcctccgccgctggaggtggagatccggaagcaggcgaaggacgcgggggctttctcgccgccgcgctggccgcggcgtcgcgcaggctccacctagaccgcgcgcgccacctccggctgctctcctccctccaccgcaacctcaccgccacgctccgtgacctcagcgccgccgcgtcggcgtcggcgtccgcgtccgcgtccgaggccggctacgcgtcggcgggggacgaggtgcggcggctcgaccttcaggccaaggacctgatccgcgccgcgcgcgccgccatcgcggacgccaagccgctgttcgacccgcagctcaagatccagcggctcaaggacgccatcttcgcgcagaacgagttgctcgcgcgcgccaagaagcgcggcgccttcgcctccctcatcgccgccaagtccatccccaagccgctccactgcctcgccgtccgcctcaccgccgagcggatcgcacggcccgagaattacgccgacccggtgccgccgccgcacgcgctcgaggaccccgccatgttccactacgccatcttctccgacaacgtcctcgccgcctccgtcgtcgtgcgctccgccgtcgccaactcgctcgacccctccaagcacgtcttccacgtcgtcaccgaccgaatgaaccttggcgccatgcagtttcgatgcaaaaaacaattctacgttcagatctcgtctatgttctatagcaaccttagtagtttactattgaaagtgataattcgcctaatggacttaaaaggcgcgcactatgaggtcaaagcatttgaagactacaagtttcttaactcctcatatgttcctgtgcttcggcaactggagtcagcaaacctccagaagttctattttgagaacaagcttgagaatgctacaaaagatgctagtaatatgaagtttaggaaccccaagtatctctcgatgctcaatcacttgcggttctatttgccggagatgtacccaaagctgcaccggatacttttcttggatgatgatgttgtggtacagcgggatcttacaggattgtggaagattgacatggatgggaaggtgaatggagcagtggaaacatgctttggatcgtttcatcggtattggcagtatatgaacttctcgcacccacttatcaaagagaagtttaatcctaatgcatgtggatgggcatatggcatgaacttctttgatcttgattcttggaggagagaaaagagtactgagcaatatcattactggcagagtcagaatgagaacaggacattatggaagctaggaacgttgcctcctggtttgatcacattctactccaccacaaagcctctggaaaaatcttggcatgttcttggactcgggtacaatccaagcataagcatggaggagattagaaacgctgctgttgtgcatttcaacgggaacatgaagccctggctggatatcggtatgaaccagttcaggcacctatggacaaaatacgtggattacgacgactcattcattcgccaatgcaattttgcaccaccgtagaaggaaaagcctttgccattgttctacagatatcaaggaagattggtaactagagctagagccactgtaacagttaacacatgtactatcgcatgttttgtggaaatctcaggagcctgcgaattagaactgcggaggacaagaaattctttctagatcttgttgtatgtcatcgattaagttatggtgaaaatgctgttcaaaacatgaacattattttcatcccgtttgtaataatcttatgcgtgtcagcgtgtgtatgccaaagtcatgtgctatgttcataatatgaagacaatcttactaggacaaattatcagaagatcaatgaactcctcgtagagaaatattgtgcaaaaaaaa

SEQ ID NO: 51246 - DNA, 1536 bp, Oryza sativa
  Clone ID: PAT_MRT4530_53657C.1
atggcgtcgggcaagatggagaacggccagcagcagcagcagcaggaggtgaggaggaggaggaacggcgaggtggtggtggacgggtcggagatcctgcagctggtggagaacaaggaggcgtttggtaagttcgtggagcagaagttcaggctgctcgacgccgacggcgacgggaggctgtcggtgagggagctccagccggccgtcgctgacatcggcgccgccatcgggttgccggcgagggggtcgtcggcgcaggccgaccacatctactctgaggttcttaacgagttcacaaaagggaagaaagaatcggtgagcaagtcagagttccagcgtgtcctctctgacatacttcttggcatggcggctggactaaagagggaccccattgtgatcttgaggattaacggtgaagatttgaatgaatttgttgagagcccaaggtacgaaccggagatggctgccatattttcgcaagttgaatcaggaaattcaaccttgcagcagtgcatgctagctgctattcgacaactgacggtcgaccacggcatgccaccggcttcagattcatggagcagaaaacgaaatcatttcatacagggtaacaaatataacagagtaacagttattctgttaccgagactgacaaaacagagtggagatgaggttatggagaatatcatagaacctgcattgcaagaactccatggtgataacctggagcaacctgtcactcaagaggtcttcttccaggaattcagaaagttcttggcaatcctcacgcagcgactccaagggcaccctgtgattgtagcacataccgagaacacctttgatgggaatggtatcaagaagctgctgtcaaacaagctcgaattagataagctgttggattgtgtttggagaggcgtaccgaaagaaaaagatagaacagcgaagcagtacattcgggttgcgttcgataggatggctgactccataaatctaccaccatatggagctgttgaacaggtagatgctgtggtcgatgaggcgttcaagatggcgaaagccgaggacgggaaggcggtggatgaaacggagttcaagaaattgctcactgagatccttggggcagtgatgctgcagctagatggcaatccaatatcggtttcgaccaacagtgtactccatgagccaatgtccacttcttccaccctgctttcgccatcgccgccgtcgccaatggtgtcatcaccgagtgaatagaagcagatggaaggaagctgatcatagaatggacagtggagaatataatttccactggtggtaacagtaactgcaatataatgctggttttcttctgatcaatgaaccaactgcagtaacttgatagttgccatgtaactggagacctggtgcaaatatgtttgtgttggtgtttgtaactacgttctaagtgtttagtgtcggaataataaggcttctaattaagccagcagttgaacaaaaaaaaaaaaatttatttcaaaaagaaaaaaaaaaaaaaaa

SEQ ID NO: 51247 - DNA, 380 bp, Oryza sativa
  Clone ID: PAT_MRT4530_53658C.1
cggacgcgtgggttccacgtcgtcaccgaccgaatgaaccttggcgccatgcaggtgataattcgcctaatggacttaaaaggcgcgcactatgaggtcaaagcatttgaagactacaagtttcttaactcctcatatgttcctgtgcttcggcaactggagtcagcaaacctccagaagttctattttgagaacaagcttgagaatgctacaaaagatgctagtaatatgaagtttaggaaccccaagtatctctcgatgctcaatcacttgcggttctatttgccggagatgtacccaaagctgcaccggatacttttcttggatgatgatgttgtggtacagcgggatcttacaggattgtggaagattgacatgga

SEQ ID NO: 51248 - DNA, 487 bp, Oryza sativa
  Clone ID: PAT_MRT4530_53659C.1
gtcctagtaagattgtcttcatattatgaacatagcacatgactttggcatacacacgctgacacgcataagattattacaaacgggatgaaaataatgttcatgttttgaacagcattttcaccataacttaatcgatgacatacaacaagatctagaaagaatttcttgtcctccgcagttctaattcgcaggctcctgagatttccacaaaacatgcgatagtacatgtgttaactgttacagtggctctagctctagttaccaatcttccttgatatctgtagaacaatggcaaaggcttttccttctacggtggtgcaaaattgcattggcgaatgaatgagtcgtcgtaatccacgtattttgtccataggtgcctgaactggttcataccgatatccagccagggcttcatgttcccgttgaaatgcacaacagcagcgtttctaatctcctccatgcttatgcttggattgtacccgag

SEQ ID NO: 51249 - DNA, 714 bp, Oryza sativa
  unsure (1)..(714): unsure at all n locations
  Clone ID: PAT_MRT4530_5365C.1
ccggccgggaccaaaccacagccagctacaactcgaagaagatgaaggccgccatggctacttcgacccttctcttcctcctcctcgccggcgccgcccacggcgcgccggaagacaccaccaccaagaccatacgcctcccgaccgacggaggatcagcacagcaggcgccgacgacgaagaggccgtggaagtgctgcgacaacatcgagcagctgccggagaagatctccccgccgttctggcgctgcaacgacgagctggagcccagccagtgcgtggcacagtgcgaggtgtgccaggaggcgccggggccattcccgggcccgctcatctgcagcgacgtctactggggcgccgacccgggccccttctgcacgccgcggccgtggggagattgctgcgacgacaccgtctgcaccagggagtatatcccgacctgccgctgcgtcgacaaggtggcgtcgtgcgccgccgcgtgcaaggattgccggccagtggaatcgtcggagccgcctcgctacgtctgccaggaccagttcaaaggccagccagggcccatgtgcacgcccgnnaacgggggaagtagatcgactacggatcgatcgatccatctgttcgtcaatattaataaacgctcaagagatgatcgttcgttcgatcactctttttttttaanaaaaaaaaagcaaaaaaaaaaaaaaaacccgcggc

SEQ ID NO: 51250 - DNA, 396 bp, Oryza sativa
  Clone ID: PAT_MRT4530_53660C.1
atggggggagaagagcgcgagctgtcgcgcgttccaccgttcgtggcttccacgccacctcaacggacgaccgcgagaggcccgcgggcgctttcacgggcggcgagcgagctgccaccgtgggatggcgtcgggggagctatcgctgccaccgccatcctctgtgacaacagctctaccgaccttcgcgagctctctcacaaagatgtcgaggtctacgttgacatcgtccgcagccacagcagcgccgcctcggcttgcgttgggatgggacggaggaggtcgacgaagaacccgccgccgaggccgagggcgtgccgatgttgcggcctgctcctctgcagcgatagggagcggcccctcggcgaccatgagttctccaccgtcgtgagctaa

SEQ ID NO: 51251 - DNA, 230 bp, Oryza sativa
  Clone ID: PAT_MRT4530_53661C.1
agctgggcgctgaagttccgctagcctgtcgatataagtggatactactccactacagtacagaagataggatagagattgactagcttgaacactaaaccgcttccttactactatcagaagaagctgatttacaacacatgggagtaaaagcaaaatgaggggcgtctttgggctcaatggtcgtggatggcgatggctactaacttgatggttcctgggttgaagga

SEQ ID NO: 51252 - DNA, 534 bp, Oryza sativa
  Clone ID: PAT_MRT4530_53662C.1
atggtgcatcatcggtcggagaatattcttttgtggagcacgaagctttgtgggtggtggtcgcagtcgcaggcaggtcgcgagggatgcatcggtaagcggagccccaactgtggccgagtcgtcgtctcgactcgactcgtcgtcggtgaagcgagccagctgaccaccaccggtgctgccctgcttgccttcatcggctcgccacgcggagccgccggtgcctcctgcagtcctgcctcgctacgcaggctcaaaggagtcgccgcctcccgtttccctcgcggagccacgccgctgccggcgctacctgctcgccttgcaactggttgctccggcgtgcccgcctgctcgcctcaccttgcctgcttgcgcaaccgccttttcgccctgcaggttgcagctagctgctcccattgccaccggctcgccacgaggacttgccccgccgccgcccgtttgcctcgccgcactggcttgctagagcctccgccgctgccgcctgtcatggattggggaatggggaatggatag

SEQ ID NO: 51253 - DNA, 227 bp, Oryza sativa
  Clone ID: PAT_MRT4530_53663C.1
tcggcggcggctacggcgaggtccggattccggcgcatgttctacatctcggccttcaccccgcccaagccgttgacgaagaccatgaagaatgacgcgccaccgaccccctaaaataagactaatgcggcggtgaccgacgatataagcaaaaagaaatggaggagggcgggggcaaatccataacataacataaaacatccaccaccaattggaggcatgaactg

SEQ ID NO: 51254 - DNA, 603 bp, Oryza sativa
  Clone ID: PAT_MRT4530_53664C.1
aacagatcaagttggagaagaagagagcgagagcagcagagaagatgcaaaaggcaataaaagatgcacaaaagaaagctgataagaagaaaatcaaggagcatgcagcaaccgacaatcagatagctagtgttgagagagcaatggtgaagatgtctaggacaggaaagctcccctggtcactggcttttctgtaaacgagttcttcacttgtggtagatccaagcaagccgattgttttgaaacctcttgccgagatgccagcacggagagactaaaatgagcgcacatgctgtcagtactcagaagcagtgccaactactgaaatcagaaaatttgttgtatataatagcagtggtttgtcgtccttagatgatagaagtttcaggctgtatacctgattggcatttgaacactgttcttaaacatgacacgaacagtcagggccaaattatagtactttcccttctgttgtggtttcaagtactgttctcaggcacaacattatttccccagtaggatttggatgtacatgtacagtggcaaactgacaagtttcttgttttggtatgatctgataatccctatatgctctccttttcc

SEQ ID NO: 51255 - DNA, 1035 bp, Oryza sativa
  Clone ID: PAT_MRT4530_53665C.1
atgggggtgtcggacaacacggtggggctttcgctggcggtggcgtccagcgccttcatcggcgccagcttcatcctcaagaagatcggactcatccgcgccggcaagggcggcgtccgcgcaggtggtggaggatacacttatcttttggaacctctatggtgggctggaatgatgacaatgttgcttggggagatagcaaacttcgttgcttatacctttgcaccagccgtacttgtgactccccttggggcactaagcataatcgtaagttcatttttagcacatttcgtgctgaaggaacggcttgagaagctaggtgttcttggttgtgtatcatgcattgtcggttcagttattgttgttatacatgctcctcaagaacatatgcctaattctgtagaggaaatctggaacttagccattcaaccaggatttctaacatatgcggtagcaaccttagtagtcgtggcagcactagttctcttctttgaacctcgatatggtcagacaaatatcatgatatatctgggcatctgctcttctatgggatcactaacagtcgttagcatcaaagccattggtgttgctataaagcttacgctggatggaatgaaccaggttgcttatccacacacatggctttttgttatcattgcaatcatctgtgtggtttctcagataaattacctcaataaggcactggatacctttgatttagctgttgtttctccaatttattatgtaatgtttacgactcttacaatagtggcaagtggaattatgttcaaggactgggctggtcaaagcttcagtagcattgcttctgaattttgtggtctgataacaattcttaccggaacaattatgttacacacagcaaaggaggaagaaacaggcagttctgcagctttgccatggcctttggatagagggtccatatcctggtgtatcagtttagggagcgacaatctactgaagaatgtcaatgaggactactttgcagctctgcaaagttctcctgcgccagtttaa

SEQ ID NO: 51256 - DNA, 465 bp, Oryza sativa
  Clone ID: PAT_MRT4530_53666C.1
atggccaagacccctgtcctctatggcagcgcgctctatatttatgtggtcttcgtcgaggcagcaacttctcgtgaccaacgaatccatgagaatgaggaaaacatcaatcttagcttgaggacgagaaggacatttattcaccgactgtggtcactatggctcaaggagacggtggagcttttgtgtcgtctctgtgttatcaccatcgaggggagaaggatagaagggatggaggaggaagatcaagtggggacgggggtcgaggtggccatccgcctgcgaagatcaatcttcccaggcaatgacataagaatcgaacatcgaactagttttgacgacgaagccattataaacatacaacgtgacctctgccactttatccaccacgagtgttgtcataaagatggacttttcttcgaccccgaaggcagcttagcgatgagcgacgaatacaagtccctt

SEQ ID NO: 51257 - DNA, 1629 bp, Oryza sativa
  Clone ID: PAT_MRT4530_53667C.1
gcacgagggcattttctgacatttcttcctcctctgtcctgacgttaacgactcgtacaattcgctaagatcctcctcgtctctcttccccctcgatttctccccgggggcttagatctagagagaaccccgccgatgctcccgatggtgatgctccagggcggcggcgccgccgcctcgtcgccatcgtcgaagcggcggaaccagcagcgcaggcagcggcggaagcgcgccgccgcgaggaagaagcagggaggatcccctgcctcagaaaataatggagaggagcacgctgatgctcaaggatgcttacctgacaactctactagcaagtctgaaaattacaaggaacgtgccttttcaactcaaggagatttgccccagaaagcaggttgtgatttggaagcaaatttgtgcgcagaatcagtgcaaagttcgtccagtcagttggtgcattcaaatgagaatagcaatccaaagcgtccagaagtgaagaatgctaactcagcagggaattcagaacattgcatgctcgacaccaggaaaactacagatcatgatacatcttccatgccacttcaagattctaggtttgatgcaaatgtcaggatcgacggcctacactccacaactgaagagagagtttgtcaaagcacagtcggtgatggttttaccggcatgtcaaatgctagttacaacccttacagtgtacaggagaaccagaggataggaccttttatgagagaaccttataccctgcacagccattttctgcatccatcacatgttaggggttacataggcaacaagtttatgggttttcctcctgtacacccaatgaatgcattcgatccattcaatcaaggttttaacttcttccatacaggaaatatccctccttacggtgtatcagatgttcatcgtggtctaaacatttatggattaagtaccatggggaaatgggaatatgattatggaagacatatggattataccaatgtagagagaaatgaactgcgcatgacagaagaagcttacttatcaacacacaatagtgctaacttcataaggccttcaagtttacctctgacatatcagcaaaagcctccaatcaccttgttaccaagagtatccttgacagggtttcggaagaaaaaacttcttattctagatcttaatggtttgcttgcggacatcaaccaagattaccacaattcccatatggctgatgcaaaggacatgtctaaatgcacatttactggacacaaaacattggagaacattcacaaaccattggtactgaaggaattgaggaaactgtggaacaaggaagaacctgatctaccgtgggagcaggggtactattcgccttctaatacgttacttgtggatgattctccttacaaggcactgcgtaatccgccatatactgccattttccctcaaccctacagttatcttaacagcaacgataattcattgggccctggtggagatcttcgtgtttatctggagaacctcacagttgcagaagatgtcgagtgctacgttcgcaacaatccatttggccaacctttcatcacacagagtgatccacactggagcttctatgcccaaatagctagctag

SEQ ID NO: 51258 - DNA, 290 bp, Oryza sativa
  unsure (1)..(290): unsure at all n locations
  Clone ID: PAT_MRT4530_53668C.1
gcgacactattagaagatgctatgcaccgtcgcatgccaccgccgtaccgtaagccnnttggatccctctttagtcggcccgccctttttttttttttttttttttttttttttttttttttttttttttttaacattcatccatcactcattcaatacaattaacaaaattatacataacaataatacaatcacataagtgtaaataaattgcatgcctgaacattatacaatcagtcttagttaacgaatttaaacctatcccccattacaaagcaccgcgtaccatc

SEQ ID NO: 51259 - DNA, 1344 bp, Oryza sativa
  Clone ID: PAT_MRT4530_53669C.1
ggttaggttgttgggcccatgtggtaaccccttgaggtataaaaggaggtccaggcctagtgatggaggggggaacttccgagcgaactcgcgcttggtgatggagggggggaacttccgagcgaactcgcgcttgggtctcgcaaccccaagcactggtgttctacattcaatcaatccaccacctgcggaatgatggaatggtgaagacccattgcccgcctgcgagtcactccagaacgtcagctggtttgattcacttgtcagcttgctcctcccatcctctcctggacgaacatacttctgctctaatttgtgcttgtatacatcctcccaggactggggcgtcctcctcccgggatcatcgccactgcttccactcgcgttagacccagctgcacgcgcaagctcgcggccagaattgctcgtggcgctggctgccccggccttccggaaggtgtactgcggggagcctatggccaccgcctgcgcagccgggaggaatctatccatcatgatgccgcgtacgcctgcctcggcgccggcggcggcacgggaggtgggctctggcatgccgctgaggccgctgacgctgcagttcacggtgaaggactccgtcctggagagcgtgtcgagcgcgtccgagaacctctcctcatcgtcgtcgtcgtcatctcccttccgcagtaccgccgccacggacaccacctgcttctccgtcacttccttcttcgcctgtaacaccgccgcctccgccacctgcgccctcttctcatcacgcgccggcgccggcgccggagcgccagtccgggaacaggcgggggacgcgtccacgccatggagtatccccacatagtgctccccgagggcgtcgtggtatgggctcccgtcgatctcatcctccacgccgtgctccagcggctgaggatgggacgcggtcgtgggcgacggcggcgcgcggcgggtgcggacgctctttggctgcccgggccgctgctcccagacgaagggcaccgcgccggggtggcggacggggccggagttgaggtcggccttgtggtagggcagcgcgtcggcgtggcgcaccgaccggagcggcgcccccaggtcgatccgcttgcccccctccgccatcagacgatccgctcgcatcgctcacaaactacacagcgaagaggaggcgaagcagggggggacgaattcgtccgattgcttcggccgccgcggacgggagataggatctgcggcacggcgtgtggatggcggcgggcgaacactagaaaaggagaacgcactgcggtttcggtgcggtgcgagcttacttgctctactcgcgaaggtcgt

SEQ ID NO: 51260 - DNA, 402 bp, Oryza sativa
  Clone ID: PAT_MRT4530_5366C.1
ggcaggaggtctatgagaaatgacatccaaaccaaggtaaatcttaaaccaaacataccctgtagaagctcgtaactctagaccctagctctgcccatctgggaatcacctagataacaatgtctcatggtttggacacaactacaatttttcatgtaggtctagacgacacctcatctcataggcatgaccaagtgctctattttaacaagcattgtatacatttacaattgcgattaaaaacacaaaatacaaatgagaaaatgttctcatcatcgtgttgcctattacaacaacattagccatcgctagaaccagaggaggtggtctctagaaccagctaggtttttgtatctcatggcttgagctcaccagattaaggtagatagggggaccatgaga

SEQ ID NO: 51261 - DNA, 323 bp, Oryza sativa
  Clone ID: PAT_MRT4530_53670C.1
ggaggagccgagctgctgcgtcggcgccgtcgtggtcgttgtcgcccgtcgtgttcgtcagcgccgtcgtcgtcgtcgtcgctcgtcgtggacgtgggagaggagggagctgccggcgcgcggacgtggggaggaggggagccggcggcgcgcggtcgtcgtcgtcgccgaggagggagccggccggcggcggagtcgtcgtcgtcgccggcggcggaggtggggagccgaggagggagtcggccgcggcggacgtggggagaggaggggagccggcggcgcgaaggtcgtcgtcgtggccgaggggagccgtcggcacgtag

SEQ ID NO: 51262 - DNA, 186 bp, Oryza sativa
  Clone ID: PAT_MRT4530_53671C.1
atgagcagcgatgaggagcccgatggttccaagagcattgatctatcactgcctaccccgagagcgggtggatttctggccaccgggcacgggagtgggcaactgatgatcgcattggccttgggagtgacaacgaccgctgtggcatcggtggcgtggatttgccgttgcgggccatgggagtag

SEQ ID NO: 51263 - DNA, 551 bp, Oryza sativa
  Clone ID: PAT_MRT4530_53672C.1
gcacgagaataaaccccgaatcccgatatcacacgctcaccatggcgttggcgccgccgctctgcgacctactcgccgcaccgccgccgtccacgtccgccgcagccgacgcggctcacgaccacgcgggagccctggccccacaccgccgcgcctccccgctccgccgccgcggccgcctcttcctcgcctgcagggtccccgctgctgcgccctccgcccgtggggtcgcggcggaggcggcggcgggaaggccgacggtgcttgtgacggagaagctgggcgacgcggggctggagctgctgcggaggttcgcgaacgtggactgcgcgtacgagctcacggcggaggagctccgcgccaaggtgtcgctcgtggacgcgctcgtggtgcgcagcgccacgcgggtgacgcgggaggtgttcgaggccgcgcgcggccgcctccgcgtcgtcggccgcgccggggtcggcatcgacaacgtcgacctccaggccgccaccgaggccgggtgcctcgtcgtcaacgcccccaccggcaacaccgtcgcc

SEQ ID NO: 51264 - DNA, 461 bp, Oryza sativa
  Clone ID: PAT_MRT4530_53673C.1
tgtaacccaagaggttatactgttcttcacattgctgcgaggcgaagagagcctaaaatcattgtctcccttttaaccaagggggctcggccagcagatgttacattcgatgggagaaaagcggttcaaatctcaaaaagactaacaaaacaaggggattactttggggttaccgaagaaggaaaaccttctccaaaagataggttatgtattgaaatactggagcaagctgaaagaagggacccacaactcggagaagcatcagtttctcttgcaatggcaggtgagagtctacgaggaaggttgctgtatcttgaaaaccgagttgctttggcgaggattatgtttccgatggaagcaagagtagcaatggatattgctcaagtggatggaactttggaatttaacctgggttcttgtgcaaatccaccttcttgaagacaacggacaactgttgatct

SEQ ID NO: 51265 - DNA, 138 bp, Oryza sativa
  Clone ID: PAT_MRT4530_53674C.1
atggcacggggttttggtccggcccaagcacggcacgacctctactttggcacgatggcccgacccggcatggccaggtcgggccgtgtcggcccgactgatatcggcccgagcccggtcatgctcgggccatgctag

SEQ ID NO: 51266 - DNA, 1848 bp, Oryza sativa
  Clone ID: PAT_MRT4530_53675C.1
atggagccgccgaccagccacgtcaccaacgcgttctccgactcggacagcgcgtccgtggaggaggggggcgccgacgcggacgccgacgtggaggcgctccgccgcctctccgacaacctcgccgcggcgttccgctcgcccgaggacttcgcgttcctcgccgacgcgcgcatcgccgtcccgggcggcggcggcggcggcggcgacctgctggtgcaccgctgcgtgctctccgcgcggagccccttcctgcgcggcgtcttcgcgcgccgcgccgccgccgccgcaggcggcggcggcgaggatggcggcgagaggctggagctccgggaactcctcggcggcggcggcgaggaggtggaggtcgggtacgaggcgctgcggctggtgctcgactacctctacagcggccgcgtcggcgacctgcccaaggcggcgtgcctctgcgtcgacgaggactgcgcccacgtcgggtgccaccccgccgtcgcgttcatggcgcaggtcctcttcgccgcctccaccttccaggtcgccgagctcaccaacctcttccagcggcgtctccttgatgtccttgataaggttgaggtagataaccttctattgatcttatctgttgccaacttatgcaacaaatcttgcatgaaactgcttgaaagatgccttgatatggtagtccggtcaaaccttgacatgattactcttgagaagtcattgcctccagatgttatcaagcagattattgatgcacgcctaagcctcggattaatttcaccagaaaacaagggatttcctaacaaacatgtgaggaggatacacagagcccttgactctgacgatgtagagctagtcaggatgctgctcactgaaggacagacaaatcttgatgatgcgtttgcactgcactacgccgtcgaacattgtgactccaaaattacaaccgagcttttggatctcgcacttgcagatgttaatcatagaaacccaagaggttatactgttcttcacattgctgcgaggcgaagagagcctaaaatcattgtctcccttttaaccaagggggctcggccagcagatgttacattcgatgggagaaaagcggttcaaatctcaaaaagactaacaaaacaaggggattactttggggttaccgaagaaggaaaaccttctccaaaagataggttatgtattgaaatactggagcaagctgaaagaagggacccacaactcggagaagcatcagtttctcttgcaatggcaggtgagagtctacgaggaaggttgctgtatcttgaaaaccgaggtaaccttcacatatatcataatgggttcataatgctggtttctttggaattaactgtttttggtcttggcaacaaaaggaagtttttgtacgatgtagttgctttggcgaggattatgtttccgatggaggcaagagtagcaatggatattgctcaagtggatggaactttggaatttaacctgggttctggtgcaaatccacctcctgaaagacaacggacaactgttgatctaaatgaaagtcctttcataatgaaagaagaacacttagctcggatgacggcactctccaaaacagtggagctcgggaaacgctttttcccgcgatgttcgaacgtgctcgacaagatcatggatgatgaaactgatccggtttccctcggaagagacacgtccgcggagaagaggaagaggtttcatgacctgcaggatgttcttcagaaggcattccacgaggacaaggaggagaatgacaggtcggggctctcgtcgtcgtcgtcatcgacatcgatcggggccattcgaccaaggagatga

SEQ ID NO: 51267 - DNA, 316 bp, Oryza sativa
  unsure (1)..(316): unsure at all n locations
  Clone ID: PAT_MRT4530_53676C.1
acgtcctgccgcgtactaacttggtccttanacggcgcctttttttttttttttgttaatttattttcaacgacagcaagacttcaaatttttacatgacaacagagatgtgtgacactttatttccacttntatatatgaggtcacactaccagaaccgatgacagagcaactttgcatggagtgctgcatacctaggtagactcaacatggagggcaaatgagagccactggcctgggcctgagcttggggctgcaacaagcagataaactgacttgtgatgataatgaccatgggcaatgcctgcaatgcgac

SEQ ID NO: 51268 - DNA, 764 bp, Oryza sativa
  Clone ID: PAT_MRT4530_53677C.1
ccggccgggaactccacctctccacatcttctcgccaccgccgacgccgccgcggctcgcctcctctcctcccctcgccgccgccaccgccgccgcagaagcttggctcatcgcggcgcgagtgcctgatggccgcggcctccatccccgcgagctcccagcccttcaagctgatcctggggtcatcgtcggtggccaggaagcacatcctcaccgagatggggctcgagttcgaagtcatgactgcagatatcgacgagaagagcatcaggagggagaaccctgacgagctagtgacggttcttgcggaggccaaggctgatgctatcatgtccagattgaatatttctgattaccagaaagaaggcgacaggccaacactcctgatcacttctgacatagtggtcgtccatgaagggattatcagagaaaagccaaccactaaggaagaagcacgccaattcctgaaaggttattctggcagccatgtctcaaccgtggggtctgtagtcgtaactaatctgacaactgggaagaggcttgaaagcctagacaaagctgaggtgtacttccatgatataccagatgagatcatcgaaaacctgatcgatgagagggtagtatttagggtcgctggtggcttgttgcttgaacatccattgacattaccatttgttgaagcagtggttggttctagtgacagtgtaatggggatctcgaaggatcttgcaaacaaattaattcaggatgcattgtccgcttag

SEQ ID NO: 51269 - DNA, 209 bp, Oryza sativa
  Clone ID: PAT_MRT4530_53678C.1
atcttaaccatgggagacggggtgtgtgcaactacgggggattataattatacacatacgggccgaaaatgtccaagcattccagcgaatctgtattttatgtaatagcaaatttttcggatctgtaaacttccgtgggactcgtaggggcgctttcgctaaaccaaacaacatcttacttatatagcaccaccaagaaatcacccggt

SEQ ID NO: 51270 - DNA, 380 bp, Oryza sativa
  Clone ID: PAT_MRT4530_53679C.1
ggaaaaccggggaaattgttttttttgggggggggggcggggcccaacccaaaaggaaggcgttctttttttttttttccctctctaggggggggcccgagtactctctcttttggggggggaatcccccttgcctcaagcaaacaaaaccttttcgggcccaaaagggggccccctttgggccaaaaaaccggggaaaaaccggggcaagccaacccccacccggggaaaccccccccccccaaaaacgggccattgcggggcccaaaaagggggaaccgcctaaaatggccggttttttttccccccccccccggggcggggggaaccaaaaccaacaaaaagggggggggggggattgttcccctaaaggggggggg

SEQ ID NO: 51271 - DNA, 1191 bp, Oryza sativa
  Clone ID: PAT_MRT4530_5367C.1
cttaggaaatgtctgttttattatattcagcaaacaatgacatttttcatacgatgaaatttattaaccgaagcaacaaaagtgatgtttgatcacagatgataccccgcgcgttgttgcggaattttgtaactcctcttcaattgtacttagctgcatgtgaggtaatccatttttcatgtatgagtaggaacatgagtgtcttgaagcttcggtttgctgtggtctctgccgctgcacccctgttttttccacgccggccgtgctgtgattttgggccgaactggatcgcacagtatgcaagcaaacgagggaagatggatgtgtgccgttagatgtagtggtcggcagggatgaagcgaactgcaacaccgtgactttccaagccaaagtcagaggatccgtttccaaattagggatatagagggaaacaggtcgttttttggcgtgcttagggtcgatgaggtcctctaatggtgcccattccattttaatggagtcgagggggaggccgacggcactggagacgaatgaagcggatgttttcccacaagcaggtttatggagcgatgggagaggaaggtaggcgagcagatcaggagggccacaggcaagagaggaagcgtcgtgagaagaccgaggggcagcggtggggcgagttggggcacctgcacgggaaggcctgccaccggtacatgcaatttgagccatcgatttcgtttgatccaatgggtgagaaagagttgtacctagtagtactgtccacgtgattttacagagcatagagaggtagcctactgcggcccttcccctaatctcgctgttggattcgagcacatcagcgaccgacgcaagtcctcgtcgcctccgccgccgcgttagcagcctccgacgcaggcgccgccgtccaacaccaccagcgccgagcacccctcctgctccgccagcgcccaacgcgccgccgtccaacaccccgccgacgacgcccccggcaccaccggcgccgaccacccctcgtcccgctcccaccacgcccttgctcttggtttggacttgctcagttgctcttggagtatttagtggattgaattgatcaccatcatcgtcatcatacaaccaccaaaatctcgacgcccttagcctcctcctcctgtttgcccaaggccaaggccccaaatagagttggaccat

SEQ ID NO: 51272 - DNA, 385 bp, Oryza sativa
  Clone ID: PAT_MRT4530_53680C.1
atgtcggggcgcgcggcagtggcgcgcagcggagcggcggcgtggcggcccggtggcggcgtgtcgcggcggtgtcggggcgcgcgttccggcggcgtcgggcgacccggcggcatgccgcggcggcggcgtggcgtcgcggcggtgtggcgcgacggcgtggcgagctcaaggcggcgtggcagggcgtgtcgcatcgtcgccgtggcagttgcgtggacgttatgtcgtcagcggtggcagccgcgtcgaagtcggggtcggaatcggcgggaggcggagtcgggcgcggctctcacccaagagatgcgtcggcggtggaggcgacgaggaccgcgagacgacggtgagagatgatggcggcgttggtgcggggtttccctag

SEQ ID NO: 51273 - DNA, 285 bp, Oryza sativa
  unsure (1)..(285): unsure at all n locations
  Clone ID: PAT_MRT4530_53681C.1
atccatggtagccaagcaagagttgcccaagggaggaggaacaagatgatactagagtactagagcctagagcctagcagtagaaaagttgggagagctatgtacatagggggaatttaatgctgttagtggtactagtgtgtagtgagtgcattcatgatgttcttaggtagagacagtagacaaacaatggaattccaggacggttggttattctgtactgtgctgtttttctgcccttctttggcaaaacaaaattctttgggttcgttaaaaaaaaaaaan

SEQ ID NO: 51274 - DNA, 364 bp, Oryza sativa
  Clone ID: PAT_MRT4530_53682C.1
tttggtttttcctaaaagtgggttattcacaaagactatgtttagttatggacactataagctataaatatacaggctcatacaaagagggcattgcatccatagatatgaagcttcaatacggagctgatgatataggtgcatcctctttgtttaagcaccctattacaagcatatcaaaatgtacaaggacgttacttttaccgggcaaacagggccattgctacttaggtgtttacatacgattacctgggacagaagattaatagggggctaataggacggaagtttgaaatacctaaggtccaacgaaataacaaacggatgcatgccgtggttgggagattaaggagaaatttcttac

SEQ ID NO: 51275 - DNA, 223 bp, Oryza sativa
  unsure (1)..(223): unsure at all n locations
  Clone ID: PAT_MRT4530_53683C.1
cactccgatcgcaaatactctctctcgccgatagcagcagcagcagcaatggccgccctcgccgccgcatccaccgccttcgncgccaagccgcgcctggcgncgcnccgtcgtccccggccgcgcggttntccgtntcgtgctccgngtcgggcaacaacggcggngnggtngagatggcgcagtcgctggnggcgtcggncaagncgttctccgnggcgct

SEQ ID NO: 51276 - DNA, 675 bp, Oryza sativa
  Clone ID: PAT_MRT4530_53684C.1
tcacttcttcctttcccctctctctctctccttcccgggctgccgacggcgcgggtgggcggcggagcaggcgagctccggcggcggcggcgggatgcggcggcgagcgtggtcggcgccgccccctgaccgaagcgcgttggaggcagagaaggtttcgagggaggagcagttggcgatggcgtcgggggcgggccatggctggagggggaggttgtctatgctgagatactgcagtgaggtgaggccaaggaggaagtcgggtggtagggaggtgaaggcgttgccgtcgagggcgaggcgggtgagggaggccatcccggcgagggaagggacggcgccggcgagcgcgtttccctggagctgcagcgcggtgagcgaggtgagggaggagagcgtgggcgggagcgtgccggcgagcaccctgttggcgaggttgagctccgtcaccttccccgacccgccccgttcacaggtgacagcctcgaagccgcacacgttgtcgccatcccaccctagggccgggaccgacttggctaggtcgtggatggcgtccgttctccggtcacccgccgccaacgccgcgctgtccgcggcgctccggtcgggggcggcaccgaccacgcccgccgccgccgccggagctcgcatggcaaaagcaaatatggcccacat

SEQ ID NO: 51277 - DNA, 428 bp, Oryza sativa
  Clone ID: PAT_MRT4530_53685C.1
tcatttgtttttcacaggaacttggcaaacaacaaccttgaaggacaaatccctgataatataagctcatgcataaatctcattagcttcaatgcttatggcaataaattaaatgggactgttccacgttcattgcacaaacttgagagtataacttatttgaatctgtcatcaaactatcttagtggagccattcccattgaactagcaaaaatgaaaaacttggacacatcgggcttatcctgtaacatggttggtggttcaattccctcagcaattgggagcttagagcatcttctgtgactaaattttagcaataataatttggttggatacatctctgctgagtttggaaacttgaggagtatcatggagatgtaagtaccttctcaccatttgggaggcattgtagatttcagcagtagaca

SEQ ID NO: 51278 - DNA, 975 bp, Oryza sativa
  Clone ID: PAT_MRT4530_53686C.1
gtaacttaatccacattggcatatcatatataggcagttcatgtagggtatcattcattgaaatcattgcaatttctgcaacccggtggccagagaatgcataatataagcagatcagcacaagttttaccttgttgatgacaacctctgtctgactttccggcaatcagattacaataaggcaatgtcaggacaccacctagatgtatcagacgtaaaatagacacacaatctaatctcacatttgctggaatatggaaaagatccgcggctgatacatcaacaacatgcaggctctcagaattccaggcttccagctttggttgcagacaacgcggaggaaagaggcatacaagacaacaagcgcaggggatattagctacgccaatcacccagatttgaatagcaagacggctttagaatcgatgtaaaaatacacaaagtagttcgtctcgtgtgttacgtaggacccgaagttgcggccgacgatgcagtgccaggtagggccgtggttcttgtcgaactccttcttgatgtactccgcgatgtccttctccatggtgtgcttctcgaacgcgacgcgggcgatgtcgaaggcctcctggcgcatctcctccttcatgtcggcgctcttgagctggatcttgtgccccgcggcggcggcggcgccaggaggcggggagcccgcggcggccggcttgcggtcgacgtcggaggaggccctcagcgccgcgccgcccccgccgcccccggccaagcgcctggtggcctcgtcggacattgcgggtgaatctctcctggggtagcggggggtggtggtggtcgggatgcttgttgggggtgaagtggagaaattctcctccgatcccctctctcctctttttgaaaagggtagggattgtggtggtcggggagacgagaccgtgggcgtgggcgtaccagcggagtgcaggcgcggcggggttcactgccaag

SEQ ID NO: 51279 - DNA, 258 bp, Oryza sativa
  unsure (1)..(258): unsure at all n locations
  Clone ID: PAT_MRT4530_53687C.1
agaaggcggcgccggaaggcgagaaccgcggccccggcggcggccgcgccggggccaccgacgaccgcacccgcgaggccgccngcgccacccacggcgagagccgcgacgccaagaccaatatttttttttagacggggaggacacgagggcggggctcccgcaccggcgcctacgagcagccccaccgcgacgccagcgagggcatgaacggcaaggagctcgacggccgcaacagcaccggcaatgaaggaccag

SEQ ID NO: 51280 - DNA, 3516 bp, Oryza sativa
  Clone ID: PAT_MRT4530_53688C.1
aaaccgtccccaaccaacattcacccggccgggacactactcgagctcgcgagcggcgagcccaaaacctgacaaaccacacgcccacctcgccatggcgcggcacctcgcgccaccaggaagcttccaccgcctcctcgcctcccggcactacccgccttcctccccggcaccgccgccgcgccctctccttctcctccccaaaaccctaataccgccggccgccgccgcaatggaattccctcgccgcgggcggcgcgacgtcgccgccgcctccgccccggcatcctcctcgccggagaccgaggtagcgccgggggcctgggggaaggtctccgccgtgctcttcgacatggacggcgtgctctgcaacagcgaggagctctcgcgcctcgcgggcgtcgacttatttgccgagatgggcgtcgacgtcaccggggacgactttgttccttacatgggcacaggtgaggctaatttccttggaggtgtagcgaagttgaagggagtgaaagatttcaacgctgaaagtgccaagaaacgtttttttgagatatatcttgacaagtatgcaaagccaaatgctggcattggattccctggggctctagatctcgtaacagagtgcaaaaatgcaggtttgaaggttgctgttgcatccagtgctgataggattaaggtggatgcaaatttggcagctgctggtttgcctttgtcggtattcgatgccattgtttctgctgatgcatttgaaaatttgaagcctgctccggacatttttttggcagcatctaaaaacttgctggagttcaagctgcaaaagctgccggaaatgagatgcatttgctgtgatgactactctggaggaagatgcgttacagcaagccagtccctcactcatacggaagaatattggagatatttcaattagagatattttgtatggtggttctaatgcttacctcagtatgtagttcaagcaaagtttatttcaataaaataatgcatctcttgtatttgaaactggaaagaaaaaaaaactctgcatatcttgttgtgcagaactcattatatttgctttgtttcactggtaggaacaagacggaacatattaagatatggaagtcttggaatagctgtttcttgtcttatctatacaaccaggaattggaagttagtcattttcctcaacacatataattatcacttctatactgtccatggtatgagcctggctgcatcaattactcagagctctctgtcggaacaacttacgccatgcagtttgtatctcccaaagggctgcttaattatttcacgggtggaaatagttcgatatttgctagtaatgaaggatttaaaaggaagagtggtcctgttggatttttggacctattgctgcatcaattgcatgcatgtcttgcccgacctggaatttatagagaagaagtacaaggataaacctttcactgttgtcggtgtgcactctgccaaatttgataatgaaaaagatcttgaagccatcagaaatgctgttctgcgctacaacattactcatccggttgtaaatgatggggacatgtacttgtggagagaactgggggtgaactcttggcctacatttgttgtgattgggcccaacgggaaggttttagcacaaatatcaggtgaaggtcacagaaaggaccttgatgatgtggttggtgcagctcttgaattttatgaagaaaataaattattacaaaacagttctcttcccttggcattggagaaggacaaggatagtcgtttactagcttcaccgcttaaatttcctgggaaacttgcaatagatgtactgaacaatcggttgtttatatcagacagtaatcataatcgaattgtagttaccaacctggaaggggaatttatatgtcaaattggaagttctgaagaaggactacttgatggcacatttgatactgcttcatttaatcgccctcaaggtcttgcttacaactccaaaaagaatatcctgtatgttgcagatactgagaaccatgcactgcgaaccctgacctggttcatagttctaagcctccatgtgatactgatttcagattgtcatatgtttactattgcttattacacagtctccacgtctcaaaatatcaatattggaaaactgaaggttctaaattcaccatgggatgtctgctatgatccctcaaaggagaccctatacatcgcaatggctggacaacatcagatctggaaacacaacacattggacggtgtaacagaagttctcagtggtgatggctacgagagaaatttgaatggatcgagttatccattgtgtattaatgaacatgttgtttatgtttcattctactctcatgggattgcattagaatctcatttctattgtgaatgctggaactgttcgctttaccctttgttgtgctaccttgggcccacttggttcctgcagtacctttttggagatcatgatgggactggctcggatgtgctactccagcatccattgggtgttgtctatgctagtgataatcaaatatatgttgcggactcttacaatcacaagataaaaaggttagatcctgtcacacggaaagttacgacgattgctggtacgggacgtgcaggatacaaggatggtccagccttgtcagctcaactgtctgagccagcaggacttgttgaagtgggagatggaaggcttcttgtagcagatacaaacaatagcacaatcaggtatatagttttgaatgagaaaggcgctgaggtgcgcacgctagatttgattggagttcagccaccatcaccaaaaccaaagacattgaaacgcctaagaagacgtctatcagcagacacggatgttattaacattgatggtggttcttcaattgaaggatatttgtctctagcaatctctgtccctgatggttaccatttctccaaggaagctcgaagtaaatttgatgtggacatagaaccagctgatgcaattgagatagagccagttaatggttttctaaactcaggacaggcatcactcaagtacagaaggaaatcttcatcgtcatcaacgggaaggatcaattgcaaggtttactactgcaaagaagacgaagtttgtctttaccaatctgttgccttcgatgtcaaattccgggaagaggcagtccccagtccagcgcagattactctttcctattctgtggtaccaagagatacttcaagtagcgcacaattaatagccgctggaaagaacggcaaggtatagttagatctagggtgattgttttactgttaattcctgtgctgattgtgaatttggctttagtgccagaaaggtaagctcttttttggagggtgtctaaagttccaactgcctttggatgatgtatatgttgtaatataatgctgtatgcttgacatgctacctccaccctatagaatcctagaccaattcatttttatatatattgacatcgccctgtttgcctagcc

SEQ ID NO: 51281 - DNA, 260 bp, Oryza sativa
  Clone ID: PAT_MRT4530_53689C.1
atggtgggttgtgagcacatgattttgatggtcgtgctcatgacaattaaggaccggttcacgagtttcggttgtgaaacattaaccgtgccaaacacaagccagcataggcaacggctggacactttgtatagcaaggctcattgtggtgtgccagactgagaagtggcggagataagcccacgggggtcgctggggagtctatgcctttggtttttgagggggtgactacgatccaggaaaggtgcgctgctttgagt

SEQ ID NO: 51282 - DNA, 256 bp, Oryza sativa
  unsure (1)..(256): unsure at all n locations
  Clone ID: PAT_MRT4530_5368C.1
cgagcntntgcatnaagatcacggcgctgtgcccggtcgcgttgctggagaaggcgagttanctgctgcggtggcagcngaaagcacccggcgacgaagctgccatggaaagtgcacgggtncccggtgctgtncgtgtccagcccgctgtacctgacggcggcggaccgcngacttggaggcggaggaggagagggagctcgagatggcgcacgggcggctgctggngatcggcgancngtgcgccggagtacga

SEQ ID NO: 51283 - DNA, 303 bp, Oryza sativa
  unsure (1)..(303): unsure at all n locations
  Clone ID: PAT_MRT4530_53690C.1
agaaaagccttccggacaccattacaccaagaaccctccttccaggacgtcaaccaattgaaaaacacgcgagcctccacgnaacaacaaccagtnaggggggggnantaactggccattttgcgagacccaaatgatcgcggtcaagcaagcagcctcccaattcccatcatgtgccgccatgtccctgtcatgactccaccggtgtttgcagccttctgagaatttcgccgtgtcctcgcgacctataaacaccggaacgcgccgtggcggcaacgaccggtncaccaccaaattaatctg

SEQ ID NO: 51284 - DNA, 110 bp, Oryza sativa
  Clone ID: PAT_MRT4530_53691C.1
cccacgcgtccgtgaacagttgcgggtggatgttagggcagcaggtgcggaagctgtaatgctcaggtatacaggcttgatttctagatggaaatcattccccgaagcca

SEQ ID NO: 51285 - DNA, 615 bp, Oryza sativa
  unsure (1)..(615): unsure at all n locations
  Clone ID: PAT_MRT4530_53692C.1
acaagagatgcattattttattgaaataaactttgcttgaactacatactgtggtaagcattagaaccaccatacaaaatatctctaattgaaatatctccaatattcttccgtatgagtgagggactggcttgctgtaacgcatcttcctccagagtagtcatcacagcaatgcatctcatttcggcagcttttgcagcttgaactccagcaagtgcgtcttctatcacaatgcactcatctgtgtcaacacctagggttttagatgctgccaaaaaaatgtccggagcaggcttcaaattttcaaatgcatcagcagaaacaatggcatcgaatagcgacagaggcaaaccagcagctgccaaatttgcatccaccttaatcctatcagcactggatgcaacagcaaccttcaaacctgcatttttgcactctgttacgagatctagagccccagggaatccaatgccagcatttggctttgcatacttgtcaagatatatctcaaaaaaacgtttcttggcactttcagcgttgaaatctttcactcccttcaacttcgctacacctncaaggaaattagcctcacctgtgcccatgtaaggaacaaagtcg

SEQ ID NO: 51286 - DNA, 327 bp, Oryza sativa
  unsure (1)..(327): unsure at all n locations
  Clone ID: PAT_MRT4530_53693C.1
cccacgcgtccgctcgagctcgcgagcggcgagcccaaaacctgacaaaccacacgcccacctcgccatggcgcggcacctcgcgccaccaggaagcttccaccgcctnctcgcctcccggcactacccgccttcctccccggcaccgccgccgcgccctctccttctcctccccaaaaccctaataccgccggccgccgcgcaatggaattcccttcgcgcgggcggcgcgacgtcgccgnncgctccgccccggcatcctcctcgccggagaccgaggtagcgccggnggcctgggggaaggtctccgcgtgctcttcgacatgg

SEQ ID NO: 51287 - DNA, 599 bp, Oryza sativa
  Clone ID: PAT_MRT4530_53694C.1
tgtacaagaagcatttccctcctttgctgacggacaacgtctggaggctgaggaacataggcaaagatgggccaatcgacaagagattggaggccgaggggatcaagaacgtccaggacttcttgaagcttaacaccatgaatcccaacaagcttaaaagtcttgttggcatgtcagatcggcagtggagcgcgacattgaagcaagcaaaatcatgtgacatgggagggaaatgctatgttttcaaatctgaaggttgtgagattaaattcaaccccgtaggagagatcttagcagtgagattcggcggctatatcaatcaagcagagggattgatggagaattcaggatgggagccaagtgagatgagccaggaaagcatgatcagctctgcatctcagaatgccatgtatgttgacagcttgggaactgcaacaacctcaactgctgaaatggtgaccaataacatcagcactctagaacctgcatcaactgttccagattctgctttgtacagctggaattcgggcatggctgctgatgatcacttcagctggcagaacaacacaaaccttgtaccctgggatcatgctaattga

SEQ ID NO: 51288 - DNA, 466 bp, Oryza sativa
  Clone ID: PAT_MRT4530_53695C.1
gtggggtgggggttttttttttttttttgttttttttttttttttttttttttttttaggaaagacaactttttttttatttatatcacccaaaggttcacatggcacatatgaggatatctgggcttatttttaacttccgaaccacgggggggggggggactcattacaagacaccgccaagggggggaatgggtcggggggccccatagtacctgggggggattccatatttagaggggacgttaaaaggcaacagagcttgggcttgggcccgattccggtcaagggggggatcaccaaaccggtggagttggaggtggtgggctttggcctggacaatggtaaaggcctgttagggagaatggtgggccaccagcgcgggctggtgccagacttgggtgtttttaatttgaaacgcagctgattgcaagaagggggttggcggtttggcatactgggggct

SEQ ID NO: 51289 - DNA, 1563 bp, Oryza sativa
  Clone ID: PAT_MRT4530_53696C.1
atgtcggtgcgaaggccacgggtagaggaggaggtcgacgacgatgatcaggatgggagcagcggttcggccgaggaacatcagcagcgacgccatggcgccaggcgtctccgccctgtgctctccttcagatcggtggtgagaagggcagtggcagcggaaacaattcaacaaattgttcttaacctggaaccggtcattcgtagggtggtgcgtgaggaaattcggaacatatttccccagtatggtcatgacttaccacatagatctcttccattacaaatccaagatgtaggggtctcacctccattgaagcttgtcttcaccaagcagctcaagctaccaatcttcaccaacaacaagctcgtcgacatcgacaacaatccaatagaaatccagcttgttgacacaaggaccaacctcattgtaacaccatcaaacactcacctaggatattcagcaataaaactggaagtacttgtcctagatggcgatttccgatacgatgaagacggcgctaggtggactgatgatcaattcagcaccgcgatcgtcaaggctcgggaagggaggaggccattgctagtgggtacagtcagtgtgaccatgagcaaccatggagttgcagtgattgatgatgtatcattcactgacaattcaagctggatcaggagcaggaagttcagaatcggtgtgcgcgttgtcatgctgacagacagttgcggattgaggatccaagaggcagtgagtgagagcttcacagtcaaagatcatcgaggcgaattgtacaagaagcatttccctcctttgctgacggacaacgtctggaggctgaggaacataggcaaagatgggccaatcgacaagagattggaggccgaggggatcaagaacgtccaggacttcttgaagcttaacaccatgaatcccaacaagcttaaaagtcttgttggcatgtcagatcggcagtggagcgcgacattgaagcaagcaaaatcatgtgacatgggagggaaatgctatgttttcaaatctgaaggttgtgagattaaattcaaccccgtaggagagatcttagcagtgagattcggcggtcggatgtgctctttgcatgaactgcttccacaccaaatggtccaaatcaagcaattggtcagccaagcataccaacagtgggatcagatggaggaagtgcagaatgagatggcacttgttgataaaagcttaattccatttcatgatgaaaagcccatgatttcttcaggcatgccaagctatatcaatcaagcagagggattgatggagaattcaggatgggagccaagtgagatgagccaggaaagcatgatcagctctgcatctcagaatgccatgtatgttgacagcttgggaactgcaacaacctcaactgctgaaatggtgaccaataacatcagcactctagaacctgcatcaactgttccagattctgctttgtacagctggaattcgggcatggctgctgatgatcacttcagctggcagaacaacacaaaccttgtaccctgggatcatgctaattga

SEQ ID NO: 51290 - DNA, 219 bp, Oryza sativa
  Clone ID: PAT_MRT4530_53697C.1
atggcggtggtggcgtggcgaaggggcgtcggcgagtcgctggcgggcggcggggactccagcgggcggcggcgaatcgcgtgtgctgtagaaacgaaacgacgcgggaagggcggacggacggacgctgtgatagagggggatttgcataaaaaacagattagcatagatgagtgtgggcggttgaaagagggagggtttactgttctcaagaagtag

SEQ ID NO: 51291 - DNA, 752 bp, Oryza sativa
  Clone ID: PAT_MRT4530_53698C.1
tgggcgcggcggtagagggggagagaggcgaccggtggcggagcggggacggtggtgataggagagggagagaggtggccggcggcggagcaagggtggcgagaaaggggaagagaggtcggcgcaacggcgagctcggccagctcgcggctgcggcgggagaggagacagttgggagaggagaggagaggagaggcgcatggcacggcgcggcggcgtgggagaggagcggcgtggcgcccacctcttccctcttcgagcgcacgctcaccaacctcctcgccggcatccccgccctgcttgccggcctcctcgccctgcttgccggcctccccatctccttcccctccactcctcgcgcctcttcccctaagcggcggtcgtcgacgttggagccccctctttgccggtcgccggtagcagccactgctgaccacaacgactgccttgcgcggacaagaaagagggaggggacatacaccaccggccgcatctggcgctcatctgagcccgctgccgcccccatcgacacgctgcgctccactcctctccctcgccggtgcgccgtgcgctgcttctctcctcgtctccctcgcgcgcaggttggacgagctcgaacgggcttgccggccgcgtccccctccccttccaaaccgctttgccccactacccgccaaccgttaccgcgctcgcttgccgcccaccgtctgcatccgcgcatcgccactccgcccgccgctggcctctctcac

SEQ ID NO: 51292 - DNA, 433 bp, Oryza sativa
  Clone ID: PAT_MRT4530_53699C.1
atgccatcctcaaccgccgacctcgcgctaccatatggactgcataccgtgggagagaggaggtgcatactggatttggaggtggagatcaccggagtagaggcggagaggcagcggatctagcaagactggttggtggtggtggcgggccatcggcgggaggaggagggagatggacccaccggccacctcccgtcgtccgtcccttgcgccgctcctccaccccttgcgctgcccgcgccgctcctccgaccgcgctacccctccgcccagccactcctccgactgcgccgcccctctggtcggccctcgtcctccccgtcctctcggcgccggcggtagagaagagagaaagacggggagatcggcgcatgtggcagtccagtcatcatttttttaaaaaaaataatcggggggacccacctgtcagctt

SEQ ID NO: 51293 - DNA, 553 bp, Oryza sativa
  Clone ID: PAT_MRT4530_5369C.1
agcttgaggaaacagttgcggtccagcaggtacttggtacctgcccgtacatgtaatttgaaccatcgatttcgtttgatctaacgggtgagaaagagttgtacctagtagtactgtccacgtgattttatagagcatagaaaggtagtctaccgcggcccttcccctaatctcgctgctggattcaagcacatcggcaagcgacgcaggtcctcgtcgccttcgccgccgcgtagcagccttcgacgcaggcgccgccgtccaacaccaccggtgccgaccacccctcctgctccgccggcgcccaacacgctgccgtccaacaccccgccgccgacgcccccggcaccaccggcgccgaccaccccttgtcgcgctcccaccacgtccttgctcttggtttggacttgctcagttgctcttggagtcttcgttgacacagtcactcagtcagagagaaggagcatcacgatcatgagctgtttagcgtgtgagattttcaatcttaccctccgtgaatgaacggttggatttaaattggtacctgaaggta

SEQ ID NO: 51294 - DNA, 738 bp, Oryza sativa
  Clone ID: PAT_MRT4530_536C.1
aaacaaaaaactgaagcaaaggggcaagcgccagttaatttgcatgcatatagatacaaaaaaacataatcttgatcactttaatttcacccaagcagcatagcaaacaacaccatccatccattaggaccattacacatctaatcaatcaagcatgagaggcatgcaaggacaacactgagatcttgacagctatagcatataagctcagctatgatcaaggggacactgtgcgtgtgttcttgctgcgaactacatggcattggatttaatttcattaattagctagctcggtcgatcgatcgatcgatcatcccctgcactgggtgatggcggagcagccgcgggagtaagggttggcctcggcgccgggctggcagttgtagtaggacgcgccgcgctgcgagcacggcacgctgtcgcgccgcagcgcgtcgtacccgatgtaccccgacccgccctgcagcacccgccgcttgcccgtcgccgccgccgccagctcgtcctccccctcgccgtcgacgccgaggaactccatgcactcccccaccgtgccacggcacgtcctccctccccgcctcatcaccaccgccgcgcgccccaccacgccgccctccaccagcgtcgccgccgccgccgacgccgacgacgccgctgacgccgcggcgaggaggaacgcgagcaacgctactgccgccgccgccatgccgatgatctcgtcgacgaggaagaaaggtg

SEQ ID NO: 51295 - DNA, 558 bp, Oryza sativa
  Clone ID: PAT_MRT4530_53700C.1
gggaaagagggcacattggatgcagcaagacgtgcttctgcttttgttcggggagatgatgttgttcataagctatttacagagctagcctaccgttacaagaaccgagctggtgggtacaccagactattgcgaactaggatacgagttggtgatgctgcaccgatggcatacattgagttcgttgatagggaaaatgaacttcgagaagccaaacctgcaacaccacagccacctcaacggtctcctcttgatccctgggccaagtctcgtgctagccaacagtgggcgggacctaaaatcagcgagggctctagaaaagaaggcttatgaaaataatattcatgtgttgagttccttgagactgtattcaattttctgtactaggctatgaggcaccagcttgtcattttggaggagttttgtcacgagatatattgtcaatagaataatttgaacttggctgcttacttttaacaaagcctgatgccctcatgagatgtgtatcatgtatgactgcaaatcattcattgagatatgaaatgcagaattatccaa

SEQ ID NO: 51296 - DNA, 587 bp, Oryza sativa
  Clone ID: PAT_MRT4530_53701C.1
gcacgagggatcgatcagcgctgaagtttgttttttgttcttgctatccctttttgaaaatgattgaatatgtgcctgcctggcttttgaacttttgatagataatatgttgatgctcttggagctaggcttgaagggacagaagcacttgacatcggagttgcattttgtgatgatattgctatacatatgatttttgtttctgatgttctagtttagtttcatcattgctacaggaagcaccagacctgtttagtttcatcattgctacaggtactgatatttttgatattgctatatgggtgttgctgaatcagtcttaaactcaaaataagctctatatggggattttgttgctgaacagtcataaggcatgatggataaacaattttttcctgcttagcagcttgtggtacggctatctcataagtcctatcttagctagagagttcctcatttagctgttgcgtagattctgctggttgattttaattagctgtgctttgcaagatacatgcgtatcagcaggtttgagctgatcagttgaaacaaaaggccagtttctttatgctccaatttgctccagg

SEQ ID NO: 51297 - DNA, 649 bp, Oryza sativa
  Clone ID: PAT_MRT4530_53702C.1
tcttctattgctggggcgaaagttaatattatagtaggttctcatgtttgggctgaagaccctgaacttgcctgggtcgatggagaagttgttaagatcaaaggcgaagaggccaagatccaagcaaccaatggaaagaaggtaagctgctaattcgtttttggccttcagtttgatatcattgcagctgctggtggagttgatgatatgacaaagctatcatacctccatgaaccaggagttctgcagaatttggcaaccagatatgaacttaatgaaatatatacatatacgggaaacattctcattgccgtcaatcctttccaaagattgccatatttgtatgatccacatatgatgcaacagtacaagggagcaccatttggagagttaagtccacatgtttcgctatggcagatgttgcatacagagcaatgattcatgaagggaaaagcaactctattcttgtgagtggtgagagcggcgtgggtaaaacagaaacaacaaaatgcttatgagatatcttgcctatttgggtggccgagctgctaccgagggaagaatagtagagcaacaagttctcgaatcaaatccagtccttgaagcccgatcccaccctaatacctgtagaaattaagataaaagattg

SEQ ID NO: 51298 - DNA, 207 bp, Oryza sativa
  Clone ID: PAT_MRT4530_53703C.1
gcgaagtgcgagcccgaatctctgagctggaaacatcagagcgaggtagacatggccgccgccaccatggccttttgtcccggcgcttagccgcaaggccgacggatgtgtccgggagggcgcatcatcatgcgcaaagttgacgacgaagcaccatgcccgtcgcaatcggtgagcccattggtcggccaaaaaaaaaaagatata

SEQ ID NO: 51299 - DNA, 478 bp, Oryza sativa
  Clone ID: PAT_MRT4530_53704C.1
tttttcccatgttaattcgttttagagttcaaaccgaaacatcattttagagagagggtttattttgtagtttatagaggattacaatgtttctgcatatataggtaaaacatgaatgcatttaaacaccattgtaaatttcccaatgacgaatggaatcataagaatatattcaattttttcttctattgctggggcgaaagttaatattatagtaggttctcatgtttgggctgaagaccctgaacttgcctgggtcgatggagaagttgttaggccaagatccaagcaaccaatggaaagaaggtaagctgctaattcgtttttggccttcagtttgatgtactgctacttatgtttgtgctgtcaattcttttagatcattgcagctgctggtggagttgatgatatgacaaagctatcatacctccatgaaccaggagttctgcagaatttggcaaccagatatgaacttaat

SEQ ID NO: 51300 - DNA, 327 bp, Oryza sativa
  Clone ID: PAT_MRT4530_53705C.1
atggccgattcaggtgacttcacgtggtgcgcgcggtcgctggggaagtcctgcggctgtgcggggctggacgatgctgagctcgtcccttctgatggttcagctgttgctgcagcgaagcagagcagcgcgacgaggagatgggtgattgttaaagtcacccatacccttataaacatcttcggaatactgagccggtatttcttaaaattgatgaaatcactacgagtatctcgctttcacacaccctacctctgtgcacacctctggaagactgggtcggcatttcttgagattgacgacgtcaccacaaccggtatttcttga

SEQ ID NO: 51301 - DNA, 655 bp, Oryza sativa
  Clone ID: PAT_MRT4530_53706C.1
cctcgccatataatcagccgctccgaacctgcttccgtcaacccctcctagtgcctgatccccgaaaccgaaatcatgaggcccattcttcttgccgggcacgagcgtgcgctcacccaaattaagttcaacaaagatggcgatctcatcttctccgtcgcaaaggaccagcagatctgcgcctggttctctcacaacggcgagcgtcttggaacctaccacggccacgtcggtgccatctggactgtcgatgtcaaccccacctcaaccatgatcgcctccggttctgccgacaacactatccgtctctgggaggtcaagtccggccgcctcatcaagacctgggagttccccaccgccgtcaagcgagtcgaattcaacgaagatggaaccaagctactgggagttactgagaagcgaatgggttacctttccaacattgttgtcatcgacatcaaccccgacctcaacgccgagcagaacgacgagaagagcctcaccatcgtttgcgacgagagcaaggccaccgttgccggctggagcgccctcagcaaaacatcatcgctggccacgaggatggcagcgtaagccgatatgacgccaagactggcgacttgctcgacaacgtccccgttcacgagctcaccagcctatc

SEQ ID NO: 51302 - DNA, 186 bp, Oryza sativa
  Clone ID: PAT_MRT4530_53707C.1
gccgtctcgccgcaatcgctcgctcggtcgcctcctcttccgccgcgaggacacgaacagcagcagctcacaggtaggcctgcgcgtcggtcggccatgggtagtacagtccagctacttcctgtctacccttcaccagccttgcagtcccgttcgggtgaaagctggtagcagcatcggagcacg

SEQ ID NO: 51303 - DNA, 369 bp, Oryza sativa
  unsure (1)..(369): unsure at all n locations
  Clone ID: PAT_MRT4530_53708C.1
catttccattgcatcttgatggggggatcaattatgctggtttgancgggnggnccaattcccgatcttgagatgcaatccatnccggaggcacaaaactgaagtgaatgatgggtaacatagcanctccctccaagaataacatcttaaaaccatccgcaacagtgttctgagattcagacagtgatgtttgctgnttgagcacancctggaagtttccttgtaataagacncgtgtgacttgcttttgggaacaagttttgtaccaagtgggttcaaaaaaaagtggtgatttccaatcaccgtaaaaaacgtccatcnggtgnccgttttaccaaaaaaaaaaaaaaaaaaaaaaaaaaaaaaaaa

SEQ ID NO: 51304 - DNA, 372 bp, Oryza sativa
  Clone ID: PAT_MRT4530_53709C.1
atggcagaacggatgctgctcgcgagcttaccttgcgccgtcgcgggccgggtcgacaaagaggcagtcgcgggtggggcggccggggagccgtgcccggagcacggagccgtcggggaggacgagcttcttgagcagctcgaagttgtggttacccggcttgtcactgaaatttcagcgagacgaacagatcagatgagatcggcgtcaaaattcagaagtcacacgacgcaattctggctcaagattgcctctgcttcaggcaagccggcgtatgcgcgtgtgccgatggtgatgaccagtcaggatggcggcgatgagccaatgtttgtcacatcggtgacagactgcgcgctggttggcatgccatga

SEQ ID NO: 51305 - DNA, 705 bp, Oryza sativa
  Clone ID: PAT_MRT4530_5370C.1
atggggagagggaagatagagataaagaggatcgacaacgcgacgagccgacaggtgacattctcgaagcggcggagcgggctgttcaagaaggcgagggagctctccatcctctgcgatgccgaggtcggcctcctcgtcttctccagcaccagccgtctctatgactttgccagctccagcatgaaatccataattgagagatacaatgagacgaaagaagatccccatcaaaccatgaacgcaagttctgaggcaaagctttggcaacaggaggcagcaagcttgaggcagcaactgcataacttgcaagaatatcatcgacagttgttgggacaacagctttctggtctggatgtagaagacttgcaaaatttggaaagtaagctggagatgagcttaaaaaatatccgtctgaggaaggacaatgtcatgatggatcaaattcaagaattaagcaggaagggaagcctcatacatcaggaaaacatggaactacacaagaaagtcagccttgtccatcaagaaaacatcaatttacagaaaaaggttgcggtgcctacagcctagaacaaacttgactatggagtttcaagcagttgggaagcatatgacatgaaagaagacaatataacattacatagcaatatagagcccccaaggcagggaagcaccaaattacagtggctacccagtacctagcac

SEQ ID NO: 51306 - DNA, 472 bp, Oryza sativa
  Clone ID: PAT_MRT4530_53710C.1
gtggccctcgaaccagatgttctgtctgcattgcagttgcctgaatacagataccacttggaggccttactctatgcacatgccgttccaggcaccatcttgtcaagcaacattaccgatggcgaaactgttgattccttgaatgggccattgacgtttactgtcaatgaccagggcgtctttgtcagcggtggtggcttcaacctcagtcaagtggttgaggctgatgacgaggcatccaacggtgttgtccacgttgttgatcaagtcttccttcccaccaacctcgtgcaaaccacatggcaaaaccttctagacgtgcctgaaggatttgatgttctcaaggaattattggaagcgacaaatttgaatgtggccttggaatcgtcggaacctcttaccatttttgcccccagcgatgatgtctttgctggagtcagccaagaaacccttgacgcactcaacttgactg

SEQ ID NO: 51307 - DNA, 338 bp, Oryza sativa
  unsure (1)..(338): unsure at all n locations
  Clone ID: PAT_MRT4530_53711C.1
gagtctttgagactggtggccatctctggaaaaataatggtcatgctcanctgagcacgtctaactcgagaggcttgacaaagagagatttgacctttttgctcctgactttgcaggttgcgacctactaatagttggtgccctcgctgcatcacctttcctctagaagcacagctcaaacgttcgagcgttgcagcaatatgttccacatttttttgcagtcttgcttcgaatgttgcttttcgagttttcatagtactgttctctctgtaccgtccagttcaagatcacatgttatgaagttatttggtgttgatctttcaaaataaaaanaaaan

SEQ ID NO: 51308 - DNA, 171 bp, Oryza sativa
  unsure (1)..(171): unsure at all n locations
  Clone ID: PAT_MRT4530_53712C.1
gtgggtgtttgagccctngggactgccccccatgtgtggaatgtgtgagcggaccgatgatagcactgcggatggccccgcctgtctgccctatgtctgggaatagataatgcnatgcagcgtgtgttgatcacagtggttccccgtaattaaaaaaaaaaaaaaaaaaaa

SEQ ID NO: 51309 - DNA, 396 bp, Oryza sativa
  Clone ID: PAT_MRT4530_53713C.1
atgcgggagtggcaacggcccgattccccagctgccgccgctcccgcccagatgagctcgacgtgcggcgcccacggcggccgggccaaatggatggatggatggatgggaggatggaatgcggcggcccgagcggtgacggccaacgcggtgctcggcagtggcgagggaacgacaccactgtggttggccctatgccgggggcgtaccatggatggcgacacgaatgccgcgggggccatgggcgtagaggtaaagccgttcaccatggaaggaggtgggaggcgtaaaccaggggctgaggcagatgcggacgccaaagctcataccattggcacagccgccgcgtcgtcatcgcccacggtgtctccacggtggagagggatcatgtggtga

SEQ ID NO: 51310 - DNA, 573 bp, Oryza sativa
  Clone ID: PAT_MRT4530_53714C.1
atggagtggacaaggcatgctcggaacatgaacaccaaagaaaaagaagctgataaaaacgcggatgccaccattaataggaacaacagaagaagctacaagacgagggcatggaacagcggcggagatgcgggagtggcaacggcccgattccccagctgccgccgctcccgcccagatgagctcgacgtgcggcgcccacggcggccgggccaaatggatggatggatggatggggtcatggtggagagaggggggaggccgctcctcgccgctgccttccgaagaggatggaatgcggcggcccgagcggtgacggccaacgcggtgctcggcagtggcgagggaacgacaccactgtggttggccctatgccgggggcgtaccatggatggcgacacgaatgccgcgggggccatgggcgtagaggtaaagccgttcaccatggaaggaggtgggaggcgtaaaccaggggctgaggcagatgcggacgccaaagctcataccattggcacagccgccgcgtcgtcatcgcccacggtgtctccacggtggagagggatcatgtggtga

SEQ ID NO: 51311 - DNA, 485 bp, Oryza sativa
  Clone ID: PAT_MRT4530_53715C.1
gggatctcctctcctcttctcctccacctcctcctcgtggcttcgcatcgcgtggagctcgtagtgtgctagatctaggaggaggcggcgatgagggcgcggagggttgtcgcggcggcggcggtgctgctgctgttcgccgttgtggcggtggcgcggctcgacctggacgacgacggggacgactcggaggtgctggacgagctgctcgcggtggacgaggaggaggagagaggggagctcggtggaggaggggaggcggcggcggcggaggcggtgcggcgggcgcagtcgatggtgctggtgctcgacaacgacaacgcgcggagcgccgtggaggagaacgcggaggtgctcctgctgggctacgcgccgtggtgcgagcgcagcgcgcagctcatgccgaggttcgccgaggccgccgcggcgctgcgcgccatggggagcgccgtcgcgttcgccaagctcgacggggagaggtaccc

SEQ ID NO: 51312 - DNA, 1072 bp, Oryza sativa
  Clone ID: PAT_MRT4530_53716C.1
ccggccgggccccaaccgcgcgccgctccccaaccctaatctctccctctcacgcggcgccaccgccgtcgtcgccgccctcgactgccgctgctccgccgtcgtcgcatccgtcgtctcgccgccaccgatccccgcgccaccaccatcgccgccgccctcgactgccgccactccgccgtcacccatcgtcgcatccgtcgtcgtcgtcgccgccgccctcgactgccgccgctccgccgtcgtcacatccgtcgtcgccgccaccctcgactgccgccgctccgccttcgtcgcatccgtcgtctcgccgccaccgatccccgccgccggctcgccctcaaccaatccccatcaccgtcgtcgcatccgtcgtcgtccaggatttacgtcaccgttccgtcaccgcacccacacgatgatccccggcgacggaacgggtcatggtggccagggaggatactcgggcccgacgagctcccggcgtctcaggtaatgtcgccgaagacaagaactccggtcaagctcctcggccgtgaggacgcaagcgttgatgccgccctgttttcgcggttgaccccggcaccagccccttcctctggccacgtgcgagttcgagattccaagtcccggtggtcggatttctcaaccccggcactggcctcgcacaggctgcgatccgctcgccaacaaggttcatgaaatcaggcgatgactacctgccacaatgcgaagacagacggtcagccgcctacacaataggctcctacactgccaccatcactgaatgcacatctggtcctcccttattttcgttggcttgtgtagagaagaaaaggtggaattgtggaaggtaatcgcggggagttttggttcattttttgaagatttctctaattggtacgtactaattaaaccaattggagttttggtctcgttactcactgtaaaaacatgatggtaaaaaaacagtttaatcctattggtactctcttatcccattgaacatttttgtcgtggggcattgactgttttcaaaaaggaaaaacagtggatgactctttcaggaaat

SEQ ID NO: 51313 - DNA, 282 bp, Oryza sativa
  Clone ID: PAT_MRT4530_53717C.1
atgtatgggagcatacctgtgatgaagggggaggcaaaaatcgccctcccccagggcggcaagggggccgcctgcaaaattccatgccccctcgccgcccatttgcaggcggcccacccgcacaggactagaattgccttccttgaagccgtcccactggcagccctagattaccagcacgacatcgacaaatgcttagtcataattgacaccgtgaggctaagaggtcagcccaacggaccaggtatcttcggcgctcactggcgtattaacgtctcttag

SEQ ID NO: 51314 - DNA, 447 bp, Oryza sativa
  Clone ID: PAT_MRT4530_53718C.1
ctgcaggaattcggcacgaggacggaggacgccatcacgcgaacggcgttcggccggagctacgaggacggcaatggtcgtcttcaagctccaggcgcagctcatggccttcgcctccgaggctttccgcaaggtcttcatccccgggatacagattcttgccgaccaagaagaacacgagctcgtggaagctggacaaggagatcaggaagaacctggtgacgctgattggtcggcggcaagaggcgggtgacgacgagaagctcgacggctgcgccaaggacctcctcggtctaatgatcaacgccgccgccagcagcaacggcgggaagagatcggcgctaccggtgagccccatcacagtacacgacatcgtcgaggagtgcaagacattcttcattcgccggcaaacagacgacgtcgaacctcctgacatgggccatcgtc

SEQ ID NO: 51315 - DNA, 144 bp, Oryza sativa
  Clone ID: PAT_MRT4530_53719C.1
ttaaatttttcacctggagcgagcagttatacgatgtggggtaagttttagcaggatactccatgaaacccataatccttgaggtcgactagcttattatctctctggtcttaacttcactaatctatagctgactgcttgatc

SEQ ID NO: 51316 - DNA, 612 bp, Oryza sativa
  Clone ID: PAT_MRT4530_5371C.1
atggcggcgccgttcgtctactgccgccccaccgacgacggcaccagtgagagcgctctcctgagggcggccttcgacgggaacctcggacgcctcaaaggtattttaaagagccttgggatcgagaaaggaaagacccagtatgcagtcttagctcttaacaagcatgggattgggatgctgcacgccgtggcatgccagggccatctgaatgtttgcaagttcttggtggaggaattggggggtgacgtgaatattgctggaaaagaagatataacaccgtttatggccgctgctgagtctggtgatgttcctacggtgcagtattttcttgatcatggtggtgatgtaacaaaagcagatgttagaggatgcacagttctccaccatgctgctggcacaggatgctgtaaggtaacagagttcttgctttcaaaagggatacctgttgacatagactgtggccttggaacaccactctttcatgctgctaacaatggcaaggataagacactgaagattttgttggatcacaaggcagattggcggagccaggataaaattatagtgggggctcctcagacttttgggccttctaacaatctcagataa

SEQ ID NO: 51317 - DNA, 810 bp, Oryza sativa
  unsure (1)..(810): unsure at all n locations
  Clone ID: PAT_MRT4530_53720C.1
cgccgacctgtccaagtgcgtccgcgacttccaccacggcggcaacaaggcgaggaagcaccacttccctttcctgacggccgaccacggcggcggcgccgccgcggcgtcgccgttgttcgggtgccagccgttcaccatcacgccttcctcggagagcaggagcagcagcagcagccggcacagcaacggcaagatgttcgcccacgacgggggtctggacaactgtgctctctctcttctgtcagacaaccccacacccacggcgcagatcaccatcccacagcctctcttcgccggcggcgggcagtacggcggcggcggcggcggcgacgtgtcgctcaccggcctgtcctacgtcagaatggccggcaaggacacgtccatcttggcaaaatctgccactaccactgctactactgctactactcctactaccacaagtgcacagctgcaataccatggctactaccaccaccatgtcagcgccgatcagggtagctccgatgctgcaatccaggctcttcctttctcatcgtggtagtggagattccgggttccgatttcgatctcagcgaggccctgttcttgagctgaattcctgatagatcagatgctagggagatggtaatgttgttcaacaaaatatgtcagtgataatagttgtattatcttggtgatactgaaaaatattcaccacgatatgcacattttccaactttgcctggtatttccagtttatgggaaaaaaaaaaaaaaaanaaaaaaaaaaaaaaaaaaaaaaagaaaaaaaaaaaaaaaaaaaaaagg

SEQ ID NO: 51318 - DNA, 429 bp, Oryza sativa
  Clone ID: PAT_MRT4530_53721C.1
tgtgtttttttaattttttgtttttttttttttttttttttttttttttttttttttttttttgggaagggaattcccccctcaatttaataagaaaggaatccaaactgccaatgggtatttgttttttggacaacaagaacaaacgcttccgccatttttttatatacaaaagaaaaaatgccctaccccacaaacaagacttagggggtactaaatatcccggggcaaaacgattacaagaaccccggaaaaatgggctggtttggtttaccctttgccaaaggaatagcttaaaaaaaaagggggggcaaatgaaaaaaacaagctttatgaacattcaagaccccccactaaaaagaaaggtcccggaattcttgaaaaaacccggccaaaaacctggggcttttttttttattggtaacacct

SEQ ID NO: 51319 - DNA, 954 bp, Oryza sativa
  unsure (1)..(954): unsure at all n locations
  Clone ID: PAT_MRT4530_53722C.1
cctgatccaaaggacaaaaagcctgagtcatgggatgatgatgatgatggtgtatggaagcctagaatgataccgaatccagaatacaagggacgttggaaacgcaagaaaattaagaaccctaactacaagggaaaatggaagatcccatggattgataatccagaatttgaggacgacccagacctatatgtgctgaaacctttgcagtatgtgggaattgaggtttggcaggtgaaagctggttcagtttttgacaacattttgatttgtgacgacccggagtatgcaagaagtgttgttgatgaagttagggctgcaaataaagaggctgaaaaggaggccttcgaggaggctgaaaagcggaggaaggctagagaagacgaggaggctcggcgtgcacgagaggaaggagagaaacgaagaagagacagggatcggcaccgaggcagggaccgttacagggatagatatagaggtcatcatcgtaggtatgactaccatgacgagctatgaggtctccagattatcccattctttcaaggaacttcaggaagttagtgttgcccatcgactatttcatcacccaattgatgattgtaccaataaaatagaacatgttatttcgaggacagaacaaagctttatttcaggtgtggatagcacactacaacacgaactgatgctgttcacctgaaaccaagtaacaaactgaagatgtgaaagctagaacgtacatttttgggcagtaacaatatgctagcgaagaggacgatatgtttccatcttccagtaatatttctccttattagtgccttagaacatagaaaataaatcactctaggttgtgaaatataaactgtactttcattgtacttcagttatatatatctggcagtgtgtgttactaaaaaaaaaaaaaaaaaaaaaaaaaaaaaaaaaaaaannaaaaaa

SEQ ID NO: 51320 - DNA, 192 bp, Oryza sativa
  Clone ID: PAT_MRT4530_53723C.1
atgggtggtgtctccctcccccaccgccacccagcacctcctcccttcttcgcctcactgccacccaagcaggcagccagaaaaccacgcggctgcaaggacgacggcggggccttccccctccccccctggagggagcttcgagaaaatggggagacgctggctcgtgcaacatgggatggcggtggctga

SEQ ID NO: 51321 - DNA, 292 bp, Oryza sativa
  Clone ID: PAT_MRT4530_53724C.1
cgtggcttctcctccccctctttaccttttcctcctcggttcggttccgtggttcgtctagggtttagtgggttgagatggcggcgccggatgtcgagtaccgctgcttcgtcggcaaactattctgtgacaccgactaccgcatacttgaaggcaagttctttatctactgcgatctacacagactaaggaaagcatgcatcaagaaaacattgctgatccattgtcttcaggaacttatgtaattacatcatgagagtgaggaagatgttactgatactgagcaggctta

SEQ ID NO: 51322 - DNA, 2812 bp, Oryza sativa
  Clone ID: PAT_MRT4530_53725C.1
tcgacccacgcgtccgaccaccaccaccgccaccgcccccaccactaccaccaccaccaccaccaccaccaccaccgcccgccaagcgcggcccgcccgacacagcagcagcaggatcggcggagaggaggggggatcatggcgacggcggcggggatggggatcggggcggcgtgcctggtggcgccgcaggtgaggccggggaggaggttgcggctccagcgggtgcggaggcggtgcgtggcggagctgagcagggacggtgggtcggcgcagcgcccgctggcaccggcgccgctggtgaagcagccggtcctgccgaccttcctcgtgccgacgtcgacgccacccgcgcccacgcagtcgccggcgccggcgccgaccccgccgccgttgccggactccggcgtgggggagatcgagcccgatctagaaggtctcacagaagattccatcgacaaaacaatttttgtggctagtgagcaggagtctgagatcatggatgtgaaggagcaagctcaagctaaagtaacacgcagcgttgtctttgtaaccggtgaagcttctccttatgcaaagtcaggtggactaggagatgtttgtggttcactgccaattgctcttgctcttcgtggtcatcgtgtgatggttgtaatgccgagatacatgaacggggccttgaacaaaaattttgcaaacgcattttacactgagaagcacattaagattccatgctttggcggagaacatgaagttactttttttcacgagtatagggattctgttgattgggtgtttgttgatcatccctcatatcatagacctggaaatttgtatggagataattttggtgcttttggcgataatcagttcagatacacactcctgtgctatgcggcgtgtgaagccccattaattcttgaactgggaggatatatctatggacagaaatgcatgtttgttgtgaatgattggcatgccagtcttgtgccagtccttcttgctgcaaaatatagaccatatggtgtttacagggatgcccgcagtgttcttgtcatacataatctagcacatcagggtgtggagcctgccagtacatatcctgacctgggattgccacctgaatggtatggagcattagaatgggtgtttccagagtgggcaaggcggcatgcccttgacaagggtgaggcagtcaattttttaaaaggcgcagttgtgacagcagatcgaattgtgactgtcagccaggggtattcatgggaggtcacaactgctgaaggtgggcaaggcctcaatgagctcttaagctcccggaagagtgtattgaatggaattgtaaatggaattgacattaatgattggaacccatccacagacaagtttctcccttatcattattctgttgatgacctgtccggaaaggccaagtgtaaagctgaattgcagaaggagctgggtttacctataaggcccgatgtgcctctgattggctttattggaagattggactatcaaaaaggcattgatctaattaaacttgccattccagatctcatgcgggacaatattcaattcgtcatgcttggatctggtgacccaggttttgaaggatggatgagatccacagaatcagggtacagggataaatttcgtggatgggttggatttagtgttccagtttcccaccgaataactgcaggttgcgatatattgttgatgccatccagattcgaaccttgtggcctcaatcagctatatgctatgcaatatggtacagtgcctgttgttcatggaactggaggcctcagagatacagtggagaattttaacccgtttgctgagaaaggagagcagggtacagggtgggcattctcgccactaaccattgaaaaaatgctgtgggcattgcggatggcaatttcgacatacagggaacacaagtcctcttgggagggtctaatgaagcgaggcatgtcaagcgactttacatgggaccatgccgcctcacagtatgaacagatcttcgaatgggccttcatggatcaaccatatgtcatgtaaatggatttgaaggaagcagcgaatttctccgaggaccctcaatcttcctgtctttcatgagcggaatgaaaactttgtacactacatggaaagggaaccagttatgcaaagttgcaaacgatcactcaaggttacccttgtaggcctgctacttggccaatatggttccagtgaccatatgcagagtcaggttcagatgaatggcacttgtgagtagtgaagaataagatgaggatgcttgaagcggtttcacatgtggctgataccacgcaagcaacctctcaatgcatcgaaatgtgagtcttggaatcaataggatttagctcccatcaattacagttgtacccttttttgcttaatactttgtcgcctgtgctgttcttatatttgtgtgaagataaattttagtccattaggtaactgtattgttgagtcttaaggtgaagactaaatagtgtttggaagctgtagctactgcgatgtcaagtgtcaaaagagatcttggaaatcacaaggtgaagactaaatacttccttcgtttcacaatgtaagtcattctatggaaaatgctagaatgatttatattgtgaaatggagggagtagtgtttggaagcatgcggcatcagtcaggtgtgccttgtgttagcaggcacaggcactcgcatatgcagcacatttttccaccccttgtaatcaaatcaagttgctttatccaattatccttggcgtgatgccgtgatcacctaa

SEQ ID NO: 51323 - DNA, 373 bp, Oryza sativa
  Clone ID: PAT_MRT4530_53726C.1
tatggtactctccaactgtttcacttaaagaatcaaggcaattgtagtcggcaactattaacccctgacgggaggttatctgtttcttcagcatatgagctgttcttcatggccagggagctctgtgtctccagtgagctgatctggaccaccaagacaccttccaaagtaagatttttcttgtggctggctgcaaagggtcactgttcaacagccgacaatcttgaaaagaagggatggccgcacgaggaacattgtgtgctatgtcagcgtgaagatgaaagctgctcacatctgttgctcacttgtgattacacccagagagtctggctactgatgaaaaaatggattggaatgtgcctccttgacatcg

SEQ ID NO: 51324 - DNA, 729 bp, Oryza sativa
  Clone ID: PAT_MRT4530_53727C.1
atggcggcggcggctcgcgatgatgacctcggcaacggcgacctcgacgacgacctgtcgaatccacgccgccggtctagaggtcgcacggaggcggaggctgtgcggcccccgatccacgccgccagtccagaggccgcacggctggccgaaaccggtgggggtgaacgtcgcacggccggccgaatctggcgggggcggaggtcacaccgccgccgccgccacctcgacgaagccaagacgtcgacggccttgtcctcctcaacaatcggcggcggaggagagcctccagtcgctggagcagcgggagagacgcgcgtagcgggatccgaaggaggcgcgtggcggcggcgggcagcagtggccacgttcaccaaggtggccccctccgctctgctcactgcatcggccgcccaaggtggccgctacaggtcttcgctccgctcgccgaggtggccctctccggtacctgtcccccatctcgccggcggcaacaaagccaaggcgctcctttctgacggcgacgacgacggtgagctcgggcaaaggatgcaagctagcgacgacgcgcctccttccccatggtggcagcagcacgagcggagggagctggtgcacggtggcgatatgcagaggcaggaagggcacgagcaagggtcaggggatggtgcggctggtggggagagaggagggaaaagatggtggggcccacagatggccagtggctga

SEQ ID NO: 51325 - DNA, 443 bp, Oryza sativa
  Clone ID: PAT_MRT4530_53728C.1
tgtggtgcgctcgctcacactgccttaaatgcggttaggtgggccgctgggggtgcccacctaaccgagcacacgcgacaccgcgcccgggggtttcagggtgttaacggtgaaatttgcttgtttcttgattgctaataagggtttcatcggggtttcagctgatgagttatctggacattgcatcggcttacaacgattgcatccgattggtttctactggattatattattgttatgttgttacatcatcattagccgattgcctttatattgttatctacatcaaacatataaccgatagctcaaaactctatcgctatcagctggatcaaactgactggcacgcctgcatcttatcaagatttggacctgcactggaactaagcagatctcctaggccagtgtgtgtttttcgcgtaaacaggggggtcgggccacat

SEQ ID NO: 51326 - DNA, 447 bp, Oryza sativa
  Clone ID: PAT_MRT4530_53729C.1
atgaatgagtctgctctgactgcagtggctcgtatggcgatgtccatgggcaacggtgacatggcctttgatgttgtgaagcaaatgaaggatcaaggtattgcgccaaagttgcggtcatatggtcctgctttgacggcattctgcaatagcggcaatgttgagaaagcatttgaggtggaagcacatatgttggagtctggtgtcagacctgaagagcctgagttggagacacttctcaaggctagtgtggccgcacaacaaggagacaagagcccaacagcatctaaagtggggaagagaaaatgggattcaggtgctataacaaaagctattgagaacaatggtgggggttggcatggtcgggaaacctgtcgtgccagctgcattaatgaatcggccaacgcgaaccccttgcggccgcccgggccgtcgaccaattctcat

SEQ ID NO: 51327 - DNA, 118 bp, Oryza sativa
  Clone ID: PAT_MRT4530_5372C.1
atttctagtttttacagatgagcgggcgtgtgccaatatgaaagagataacccagtaccagcactcccctcatgagagcacaggacgaaacgatgccaaccagtcgtttgtcaacaag

SEQ ID NO: 51328 - DNA, 2557 bp, Oryza sativa
  Clone ID: PAT_MRT4530_53730C.1
atggccatggcgcccctcttcgttcctcctcctcatctcctcttcctcctcccagccaccacctcatcatcccccgctgcttccctcaggcgactcctcctcccgccgctctcgtgccacgcgcgccaggtgctcgacgtaatgccccagggagaccgcgtcgccggcccgagagccgccgagggagctggcgctaaaggcgcgacggcgcaggtcggcgtggccacacgggaggccggcacggcggggcggcatgggcggggccgtcatggcggcggcgcgaggccgtggaggagaggggaggacaggcccgcgcgcggaggacaacatgccgccgacgacggggaggttcagggaacgaggaggggtggggatctcaaacaacgcagggagggcaggcgctggacgagaggcgaaacgcaagcgcgggaatctggaaaggctggaaattcggggagatgccagagtaacggtagtggtggcaatgccagcaggaaggggaagaagaaagccaagggtggtgagaacgaagtcaagctgagagtcgagctggacatgtgctcgaagaggggagacgtgattggagccatcaacctgtatgattctgcggtgaaggaagggatcaaaatggggcagcatcactacagcgtgctcctttacctgtgttcttctgcggcgcttgggtttgtgcaaccggcgaaaagtggcaatgccggtagtgggattgctagtattgggcagttacattcatcgtctactcaaagcgtgggaaatttggagggagacgatgtacaatctgaaggccactctgaagatcaggagggaaacaagaccgatttgtttgcttcggatgatgggacggagaaaccgagtcgaattccagtgagtgatgagctgagggagtatgcaagaactcgagggtttgagatatttgagaagatgcgctcggaggaagagaaagttcccatgaatgagtctgctctgactgcagtggctcgtatggcgatgtccatgggcaacggtgacatggcctttgatgttgtgaagcaaatgaaggatcaaggtattgcgccaaagttgcggtcatatggtcctgctttgacggcattctgcaatagcggcaatgttgagaaagcatttgaggtggaagcacatatgttggagtctggtgtcagacctgaagagcctgagttggagacacttctcaaggctagtgtggccgcacaacaaggagacaaggtttattatttgttgcataagttcaggactactgtcagacaagcatcttcaaccacagctaaactacttgaggattggtttcagagcccaacagcatctaaagtggggaagagaaaatgggattcaggtgctataacaaaagctattgagaacaatggtgggggttggcatgggttaggatggttaggaagggggaaatggaccatatcacactcgcacatcgacaggaatggtgcatgccttgcttgtggagaaaaattgactattatagatcttgatccaaaagaaacagaagattttgccacattggtggcaaaattagctatcaaaagagagaggagatcaaactttgataactttcagattaatattgttgctgatgttatacggcaaagatttcaatcaagaaagctccctttgatagttgtgcataaccgacatctcactggagagcgcatgcaaaagccttctaatcgtaagttggtggaaaagtggaagctttctaatgctatttatgcaacccctactggctcaaatgatgattggtactggttgtatgctgctatcagatgcaaatgcttgatggttaccaatgatgaaatgagagaccacacatttcagctcttggaaagagatttcttccccaaatggaaggaaaggcatcaggtacgcttcaattttgaggacagttgtgttacacttcaaatgcctcctccttgctcagttgtaattcaggaatctgagaatggtcagtggcatatccctgttgtctctgaggaaggttcactagagaaggaccggacctggttatgtgtcacgcggcgcaactgagagccagattacaatgaagctcaagttgatctagaaacacaatgtgaataaatcactacaacatggtttgacattactgtagggacaaagttgaccattcttttctgctcaggatcaagaactgaccgtaccttgtcaaggtgccgttacataccaacaattctttcatgcttggagttccttcttctgttaaactggcctgtttcaggtgttcagtagccagaataggtgaataacacgtgcagaaaaataggcctgactgctcaacattcagctactatatatggctatacaaatatgcatttggtcttccggtcctttgcgttatatccaatttaatcattcaataaaacaccggggggcctgttatgtgcatgaagttagaactctgaacttgtaccttttttacactctaccctgaacaagtgaacattgaacaccgggttttgaaaacctccagaggcattggcggctctgggttgttctc

SEQ ID NO: 51329 - DNA, 242 bp, Oryza sativa
  Clone ID: PAT_MRT4530_53731C.1
aagtctctaatggagatgatgatcttccaaggacagttgaggtaactgctgaagaagacgatctactaactcaagacctaggaagtcttccctacacagctaaagtaactgctggagatgatctacaaactcaagacctaggaagtctttcctatacagtggaagtaactgctgaagatgacgatcttctaaatgaagacctagaaagcctccccttgtcagtggaagtatcacaggaatga

SEQ ID NO: 51330 - DNA, 270 bp, Oryza sativa
  Clone ID: PAT_MRT4530_53732C.1
atggcaaagccacaagttgaatatctgttcatcgatacccccaagaactatagtgtggcttggttttatactcctccttgctgtttggttgggcctagagccagcccagcccatgtacatgacacttcgctgacatcaaacacgagccgaaccgacatcgatgcccaatcagaggacgagaccggcgccgtcatcctcctcctcacgccaccgtcgccgtgccttcctcgtcctcctccgatgaaccgacttcccgactcctataaatag

SEQ ID NO: 51331 - DNA, 220 bp, Oryza sativa
  Clone ID: PAT_MRT4530_53733C.1
ggcatgaaatattagttcattttgtacttctgtgtatgtcgagccatagtggaacaagactacaagagagtacaaatgtggcacgattagacattacttgcacgatggggtcaaaagtttgtatgattagatttagacaactcttgtaatgtagggttcaaggttgattttgagctaggtccataaacaaaaacagctttaagaactaccagatagttca

SEQ ID NO: 51332 - DNA, 350 bp, Oryza sativa
  Clone ID: PAT_MRT4530_53734C.1
taatttattatttacttggaagaggggatagaagagatagaagcatactgaagttacatacatataagagagcaattacatatgaaaacaataactgaaattaagtgaaaaatgtgatatcatatttttagaaagcccaaaaatatttatcattacttgactttccatgctaaatccacatttgcgggccaaactaaggtggtgttgggccagacgtaccgtccatgaacaccatcacccaactagttcagtgacttgtagtcatgcgtgtagatatcgatcgggccgcggtcgtgcgtacgtattgcaggcatgtagaacttgagaaaatcttctcgcctgacttatct

SEQ ID NO: 51333 - DNA, 192 bp, Oryza sativa
  Clone ID: PAT_MRT4530_53735C.1
atgcacaatgccgcaagagcgggaaggttcaaagcgctggaaatggggtatgatggtgaagccgcgaagatcgcagacgagaaggcgtccacgttcaacgaaccgagccgggcacgccgcgaggtgtcggtgtacgggtccgtcgggctggtctgctcgtgtggcaggtccgtgaggctgatcagctcatga

SEQ ID NO: 51334 - DNA, 2673 bp, Oryza sativa
  Clone ID: PAT_MRT4530_53736C.1
atgagctcagctcagtctcagaggttgtcggcgcagccaaagctgcacatagctgatcttattgcttcatttggaatcccgtgcgagccgaagcgcgtcgcgcagaccaagctaggagtagagacgaggcctacctgctctccacggaggcccggcggcaagggcgccgttgatctggccggagctgaagcttcgcgccgcaaggccgccgccgtcgccgatgccgcggagaccacggccgatggatgcgggtcctccaggagcagagatggcgcatccgcagctggctgcttgccgccggacgtcgggaagcgccgccatcggggaggagagggacggcaggacgggaagcgagatcgagccttccatataaggtgggccatgtggtccaaaggttatatgcggcgtgccagtcagtttgatcctacaattgacaagacatccgcctggctcgaggcggcgagggtggagatggatctcagcggcgcaaatcgagtcgatgagttctccggcggtggcgcaaatcgagtccacaagctcccgacggtggcgcaaattgagtcgacgagctccccgatgatgttgcggagtgggaggttgcagccgccgtcgagctcatccgacggcgaggaactcgcctcttcgttgaggaatgaaaagctctgcgaagagcccaaaggaagaacctcctctggccaaacaatgtccccttatattatccctctgtgcctgattctcttcatcatcaaagctagtcattccatgggagctcagatcaatgagacaaccattcctcaaggttctgaaatcaacacagctggcccccaaagttgggtctccccctcagggcgctttgcgtttggcttctatcccgaaggggagggattctccattggtgtgtggcttgtcactgatccatccaggttcatcttgtggacagccttcagaaatgatcccccggtttctggtggttcaattctgttaaccgctggtggttcacttcaatggattccacctaatcaaggattccaagggaaggtcatatggtctacctttggtactccgacggacaccctgttaccagggcagaacttgcctcctggcaatcagctgttctcaagtgtctctaacaccaaccatgccacaggaaagtatcgcctttccaaccagccagatggcaaccttgtgatgtatccgataggcgcgatagatcctgatagtgcatactggaatactgggtttgaattcttaagtgctaaccaaagcactcaaggttgctggagggcacagactggtggttgcaccgggaatagccctaatggtgacatcggactggtagccacaatggtcacggtgaagaacactagttggtcagataggtcatacaacgtcccacctcaatcaccaaccattgaagagtgtaaagcaatttgcatgtctgactgcgcctgcgagattgccatgtttgactcctactgctcaaaacagatgcttcctataaggtatggcaagagggttcctggtagcaacaccacgctatttgtgaaggtctactcctatgaaccaaaaaggactgcaagtgcaacttcaattgccatgttgacatctggcgctgccctcggcatgctctcacttgtactgctctcggtgtctgtaatgctatgcaagcgccggccatttttgaggtacacacgtgctccacaacatcatgaaactgaatttgatgaggagagcattggaatccgaccatactctttccatgatctagagctgtcaacagatggctttgctgaagagctaggaaggggtgcatatggcacagtgttcaaaggtgttctaacaaatagtgggaacaagggcattgcagtgaagaggcttgagaggatggcagaagatggggagcgagagttccaacgggaagtgcgtgcgatcgcacgaacacaccataggaacctggtgcgtttgttcgggttctgcaacgaaggtgcgcatcgccttcttgtctatgagtacatgccaaatggctcccttgccaatcttctcttcaagcgcgatgcaacactacctaactggagcaacagaattgcgattgcgctggatgtggctagggggttacaatacctgcatgaggagatagaggtgcctataattcactgcgacatcaagccagagaacatactgattgacagctcaggaatggcaaagatcgcagattttggcctggcaaagctgctgatagggaaccaaaccaagaccttcaccggtgtccggggcacgcgtggctatctcgcaccagagtggagcaagaacacagcgatcactgtgaaggtagacatctacagctttggcgtgatgcttctggagatcataagctgcaggaagagcatggcacttaagttggccggcgaggagtgcaacatctctgagtgggcctacgagtacatgttctcaggtgaaatgaaagaagtggcagccggcaaaggtgtcgacgaggttgagctggagcggatggtgaagatcggcatttggtgcactcaaaatgagccagtgacacggcctgtgatgaagagtgtcgttcagatgatggaaggaactgaaatggtagggcggatacacgccctaccgctgcccattgcagtcggggtgggtgtccctggggtggcgatggagtag

SEQ ID NO: 51335 - DNA, 583 bp, Oryza sativa
  Clone ID: PAT_MRT4530_53737C.1
ttcaaagaaaggcaagctaagccgtggagccatgcaaaaagagcatgcattaagctgatgaaagttcttattatattacaagacaagtatccttattcatttgctcatgaaactgtgcttccagcagcagttgacttctgtttgactatgatcacaaatcctgaacaggcagatacatcttttgaggaatttcttgtccagtgcatggttttggtgaaattagtattggagtgtcaggaatacaaaccaggtcaaataggctttgaagcagttggaagttcagaacatgcaatttttgatcaaaggaagaacaacctttcagctactgccagcagcatggtgatgtctgttcttcctgctgaccgtattatgctgctatgcgatatattaataaggaggcacttcatttatacagcaacagatatgaatgaatggcattccaatcctgaatcctttcatcacgagcagaatctgctacaatgtacagagaaacgccgaccatgtgctgaagcacttttcattattttgtttgacaactacggagtggtatatgggcatttcatggtaattccaagtttaataa

SEQ ID NO: 51336 - DNA, 153 bp, Oryza sativa
  Clone ID: PAT_MRT4530_53738C.1
atggtgatcggagatggcaagggcacgacgaatcaggcgctcccagaggtgaatgcgacgttccccaaggtggagcggcgctgcgttgacggcatggggcttctaacaccgggaggaaggtggagatgggaggaagcggacgacgccggctag

SEQ ID NO: 51337 - DNA, 724 bp, Oryza sativa
  Clone ID: PAT_MRT4530_53739C.1
gtcttcaaggcatttattgatttagtgaattccttgtaagattttctggtaggcatcataaatgtttgttcgccaattatcgcttgattctacaataagactttttacaagggtttcaatttttgctttgttatcttctaaatgaaatcttttacgcaaattctttaggagagaatcaccatttaaacagggcaaaaattggccacccattataggtaacgtcagggtcatttgtactaatgttaatatctttcggtaatgttttctaattgcgaaaaaaccttgaacacataattcttcatattttgcaaataacttggacttttctcctcctaatacatcaataatttcttctgtgagtttgaaaggagccttttcaaactcaacagttcttgacaataaatatccaaaatctatatgtaacaaattgccataagaatctatcattatattaccattgtgtctaaataagtcaatagggttaataattaaaaatacatacctgtcttttatctgtaaaaaataacatactaatgagtaagcggctaaagactgaacgaaatttgtcattgctttgttaaaatctgctttatctggccattgctgaaaggaacattaaaagtaattaatacaaagtagaatacctgtttaaaaaattttctcagagaagtaccttcttcgagtttctgctttaatttgtctataaacaatgtgttgggaacaa

SEQ ID NO: 51338 - DNA, 1305 bp, Oryza sativa
  Clone ID: PAT_MRT4530_5373C.1
cccgcgtccgttctcagaggaaaggaaggaggaaagaaggagacgatctccctgcgtgattggatccaaccaaaaacataagacataatatacgtcctagatgagtacatcaggatccgagagcgattcggtggccgcaaagcgatccatgaagcccaagtattctaagttcacgcagcaggagcttccggcatggaaaccactatatactcctggaattgtcatcggggccttctcgctcatcggcatcatcttcataccgatagggctcgtttcaattgcagcatcacaggaggttgttgaattggtggataaatatgatggggagtgtgtgacggctaacgacaaggtcgggttcattcaggacaccaagactgacaaagcgtgcaccagaacgattactgtgccaaaacctatgaaaggccccatacaagtttactaccagctggaaaacttctaccaaaaccatcggcgatatgtcaagagccggagcgataaacagctgcggtccaaggagttctcaagtgtgataaaaacttgtgatcctgaagccatcagtgaaggcggagcccctattgttccgtgtggcctcatagcatggagcctgttcaatgacaccttcacattttctgtcaacaagaagactgtccaagtgaacaagaagaacatagcttggagcagtgacaggaccattaagtttggcagtgatgttttccccgaaaatttccagaagggtgggctcataggtggtggtcagctaaatgagaaattaccattgagtgagcaagaggatctcattgtctggatgagaacagctgcactcccaacattcagaaagctctacggcagaatcgagacggatataatggcgagcgatgaaatcacagtggtgattcagaacaactacaacacgtacagctttggaggcaccaaggcgctggttctttctaccacttcttggatcggcggcaagaacaatttcatcggtttcgcgtatgtggcgatcggtaccatctccttcctcatcgccttggccttcgttggtctcaacatggttaagccaaggacacttggagacccgtcttacttgtcttggaacaaggagaacccagattatgtccaatgatcatgcgagcggggatgttcatgtgttcatgtcccattgggttcgtctgcagcgttggattaaaattgtgtggtttgtagagagcaggatgaggagggggtaaatgaaggggaatataataaacgtttggcccggccaaaaaaaaaaaaaaaaaaaaaaaaaaaaaaaaaaaaaaaaaa

SEQ ID NO: 51339 - DNA, 2423 bp, Oryza sativa
  Clone ID: PAT_MRT4530_53740C.1
ttacgtggcaattcgatccaaaaataataataatacccatgggacccacatgtcaatttcacacacaaaataataaaaaatggtgggacccacccagaccccacatgtcatcctcaatccccttcttttctctctatcccctctctctccccctgcactgataggttgttcccagcggcgatggggagcagcggcacgggaaggggtcgctgcctcgccggagtagcggcgacgacgcccggcgagggagccgcggcaacgaggaggcacagcggcggggaggcaaccatgctgcatggcgctagcgccgctctcctcctcctcctcggcggccccggggccgggagctcccgcggggccctcgctgacggtggccgcggccggggagatggcggcggcggcggcggatggctccttcgatgactccatggaagggctcatcgcttcctccgcctcggcgtcggggcctcctcctcctcctccagctcctcgctcatgctgggtgcagacgccggtgacgtggcggtctgagtcttcatcttcttcttcttcctccacaggggcggtggctgccagctgcacctcctccgccttgccaaccgccttctgccatagccgccacctcctccaccgccgaggaatgccgcggctccctcctcgatcgccggccacctcccgccgctcctccctttcttgccgggtgccgtcggttgtcgccaacagcttaagtgtgtcaacaagaagtaacaacaagaagaaggcatacagaacaagccgcgcacaattttcctggattacccgggagccgttgtcgtttgagtggttcaatggagtgatgaatgaggttgctcctcttcctcctccagctgcgccggtgccgccgcggatgctgtcgccgctccgctccactcccctggccgctcgctcgccgccgctccgctccgctggccgtacgcttgcctgccgccgccgctctgctccgccgtccgcccgctcgctgcaacgttcgcccgccttccgcgactccttccgcagcgcctccatgctcaacatgctcaggcgcgcccgctcccgccccccaaaaccatcagatccgcctccgcctcctcctcctccacctcctcccaccccctcgccgatccagatccatcgccggggaggcgccagccatggccggcggcgggggcgccggcggcatgtcggagtcggtgctccgcaaggtgctcctctcctactgctacgtcggcgtctggatcttcctctccttcgccgtcatcgtctacaacaagtacatcctcgaccccaagatgtacaactggcccttcccgatctccctcaccatggtccacatggccttctgctcctccctcgccgtcgccctcgtccgcctcctccgcgtcgtcgagccgccctcgtcgcccgccatgaccccgcagctctacacctcctccgttgttcccatcggcgcgctctacgccatgtcgctgtggttctccaactcggcctacatctacctctccgtgtccttcatccagatgctcaaggcgctcatgcccgtcgccgtgtactccatcggggtgctcttcaagaaggagaccttcaggtcgtcctccatgctcaacatgctctccatctcgttcggcgtcgccatcgccgcatacggcgaggcgcgcttcgatgttcggggtgtcgcgctgcagctcgccgcggtggcgttcgaggccacgcggctcgtgctcatccagatcctgctcacctccaagggcatctcgctcaacccaatcacctctctgtactacgtcgcgccgtgctgcctcggcttcctgctcatgccgtgggacttcgttgcgtcccaggtagcgccgtcggtccatacgcccggactcttcgtgctcgggtccaactcgctctcgcctcgcgctgaatctgcggaggtcttgctcgtcgacaaaccccgcgctcaccatggtcgccgcgtgatggttaccgacgcgctcttcccgcttctcctggcccgtgctccgggacacggtcacgtgcagggtcccttcagctacggatcaccttcttggggccggcatactacaaccacgtaagctgcggccactcagcctgacaggacccccaagcccatgtgcttccctgatccctctccattactgtaagcctgcttcggtatgcacccaacatgtacgggagagaactattcagacacccaaattatggagtctgggagccacaatgcccatcagcaaagctgctttgatgtgtaagcattaagccaagtagtgttgtttagatgggacaagcaactgatctgatccctgtatatattgatcagattcattcaatccatattcagtggttcaatcaaaaaaaaaaaaaaatcgcgccgtgctgcctcgtgttcttgacgccgccat

SEQ ID NO: 51340 - DNA, 2533 bp, Oryza sativa
  Clone ID: PAT_MRT4530_53741C.1
gcgatccaggaggcgatcgcgatcccactctcgatttaggccgccatcgccggcgatcttgattagcaacaccggcgacaactccgatcacatgccgaaagtgcacgttgcagatcagcttcagaacctcaacctgactacagaagaagaaaacgttgcggaattcagcgatgatgatgagactggagacccccaggaggttgaatggatgcttgttggcaaggtcctctcgccagcaatagtgcatgccaccacagtattccgggcgatgaaaccggcacgggggaatccctacggattgaagatcagatccatcgacgagaaggcggataacatttttgtcacgaaatttaaagttgagcgggacttgcaacgtgctttgggtggctcgccgtggatgaatcttgaacctcccactcggctggatgacaagcaccgtggcgaactcgctatgggattggttggcgtagtgaggaagttggaggtggactctgacggcaaagcgagtggcccttacctacgtggacgtgtggcgattgtggtggccaaatcactaagaagaggtatgcttttgaagacaaaaaaggatgcagcaccagaatggttttatctgcagtatgagaagctgccttattattgtcttgcgtgcggtatagtaggccatttagagctggagtatgagaaaccggtggtccgatatgggtcgggtaagctaccctacgacataagacttagagcaccagagattcggaagaagaaattgctgagcttccaagccgcagtggcagaatcctttggcagtggctcttcgggtggttcgaagcagccgaagggatcatcgttgagatccaaggacgggcgcccgaagaatcctacctatgcgatgaagatgatgagaccttgtcacctccgggaaaccaggcctctacttgagagaaggcttctaatcagggggtggttgcaaatcgtcacttatcctagaataacaatgaagatcctcagattgtgctgcgaaaaaggaaagcgaatgggcctagggcagctcgaggcagttcaagaagtacatgtggtggtctttctctcagaaactcgatgcttctccaacaaggtgcaaggattgcggagtagcctcagtttcccgaatggcattggggtgggaacctatggttgcggtgggggtctcgccctactgtggaacaacgagatcaaggtagttcataagctaacaacagaatctgaccactgttgcctggtgatcgagtgcaaccgatccaagaggcgaagagaggtagatcgggctctatctatgatgggtgcccacaaggcgcctgggccagacagcttcacagttggtttctaccaagcgcactgggagacgattggcccgagtgttaccagagctgttctgaattttctgaatggaggcgagctaccggaggcaatcaatcagacaacactcgtgctaaccccgaaggtaagagaagttttacatattgatatggaagcattagcggagaagtacctaggcctccctactgccttggggcgggcaacaaaggacacctttgaatttatgccaaccaaaatcagaaatctagttggaacatggagtggccgtgaagcaagttgtgcagtgttgaaaggcagatactatcatgagtcagagttcttacaagccactcggaagaaacattcaagccatacttggagagctatattagcgagaagagatattctgttcaaggggcttgtgcgccgaattggtgatggcaattcaacgaggatctggcaagatcgttggttgcctggacatttcagggggaagccgattactgaaccagttcggcagcatgtgcatgtggtgtcagaccttttaatcccaagtggaagttggaacactgaattaatcaaacaactcttccttgatgtggatgcccaggctatcctgagtttgccgaggcagttagatgctacatctcatgcaagtccctcaggagacacgacttggtcccgaatttggaaactatgtgtgcccccaaaagttcgcgtcttctggtggagggtgacgaaaaccttatctggaatcaaggtcctgcacctacacccgcttacttgggcgtgtgatctggtcgacccaagcaggtggcatggtgaggagccgcgaccggtgagagctgccacacaatgggctattgataccgccttcgatctctggcaactgattcatccggaaaaggaaagaacaatgattgttcttagagatgaaaatggaagaacttgtggaggcactgctcggtggtacgagtactgcctaaatgctcttgctgctgaagcattggcgtgctgcgatggcatgatgctagctcgggaaaaaggtgttcaacgactgatcttggagactgactgccaagtccttactggtttatgggagatgagagcacagcaatgttcagaaatctcagctctgcttacacatatggagatcctcagccggaggctggagcttcatagacttcaatttacgttttattag

SEQ ID NO: 51341 - DNA, 918 bp, Oryza sativa
  Clone ID: PAT_MRT4530_53742C.1
atgagggatcttctgcaggtggccggcgccagcggcttcctgtccctgctgcttctgcctcgggcgaccgacgagacccagaccaagttccactccctggaggacacactggccagggctgagtcctggctcatgtcctcccagatgtcaggtgtcccaattgtccccatgaatgtgcagacagaagcacttctcaccaagatatgtggggacgtggcatcgtcaacggtgaacatgaactccctaggtgaccttgcaaacatggcaacggtgagcctctacgggtttgaggactaccatggcgtcgacattggcgtcgtcagggcgatccggctatggtatgctccttttgcaggggagatggcactggagatcaaactgcaaccgggcgacaccaggctgggttttgccatcagccgcactgaagaggggttcatctacgtgtcgtcggtggcggaggagagcacgccgggggtggcgtcgacgcggtcggggcttctggagctgtaccggcgcgcgcggcgggcgtcgaagctcctcgtcgtctcccgcgtcggcgacgacaaggtgctcccctgggccacctccaccgccggcgacatccgctgcttcgacaccgtctcgctcagccagcggctgtcgctgcaccgccacgcgctccgccccgtcaccctccacttcctcatgtgggagcgcctcccgcccgccgccgtcatcaggggcggcgccgccgccaggccgaccgtgcagatgatcgtgcagggcgacgaggagggaggaggggacgcggccgacgagtccaccgacgaggtcgccttcgacggcgacgggccggagatcgtgctcagcggcaaggacgactccgacgaccgctcattcaggttccagaacatcggcctcccggatagctggctgtga

SEQ ID NO: 51342 - DNA, 321 bp, Oryza sativa
  Clone ID: PAT_MRT4530_53743C.1
tagtggatccccgggctgcaggcaaccgctgcggctgccaccgatcgatcgattcggccgagagagatcgccggactccgccgtgaaatcgcagccccttgccgcgtttcggtagccgtcggcgacgatgtcaggagccggagaggaggacaagaagccggcagagggcggcggcgcccacatcaaccttaaggttaagggacaggatggcaacgaggtgttcttccgcatcaagaggtccgcccagctgaagaagctgatgaatgcctactgcgaccgccagtccgcggacatgaatgccattgcattcctttttgatgg

SEQ ID NO: 51343 - DNA, 2111 bp, Oryza sativa
  Clone ID: PAT_MRT4530_53744C.1
caaaaatcttcagaaaccatcaattatatgtacaataatcttcagaattactccaatggagtaattaaacagtaagtatctctagaggaagaacaagttcaccaagactgaagaatactagcactgtatcagaaaatggacaataacaaggttatggcttgactgaatctgaatatatcaacttgactgaatccgcttatatcggaggaggcggggcagcggtagcatgggggagatgacgatcgagtcggcatcgaggaagacagcagcgccgcgctgggcagcacaaggaagaagtgcaccgcgccacgggttcctacagctggtggttgtttttttttttctcaaattatctcttggtctataatgatccgaaccctagttgacactggagctgaacttgtaatggttatatctattgtctggcttgattgatccatacatgtagatgtctcgtcaccacctttttcgacttcattacttagctcagaaggcttcttaggatcatctaataagatcacgcttccagaactcagcattgcggcgacatccggcatggtgggccgaactgttggatcttcctgggtgcagagcaatgccacttgggtgcaccgaattatctgatcaagttcatacacattccctaatgatggatctacaagctcatgcaaccttccgtccctccacatatgccaagctttagttcttatgtttttcaaatttatagaatagtccaatattacactaaataccctttgtttttctcttccattagacagagtaattaacacatcccgtacaagatcacctatagcatccctctgcttataaagtatggaattctttcgtccactaatgatcactagaaccaagacaccgaagctaaacacatccgtcttcactgaataaactcctcgagatgcatactccggagctttgaaaccactagtgcccacaacccttcttgtatgttcttctgcaacttctgaactcagtgaactggatgatccaaaatcggaaatctttgggttcatgttataatctaagaggatgttatctggtttcaaatccctatggacaatccataacatggaaagcttgtgtagataaacaagaccctctgcaacacctttgattatattcactcgctgaggccagtctaacaatgattttctcattttgtcaaagatgtaatgttgcaagctacccctgtccgcaaactcatacaccagaatcctttctttcccatggatgcaccaacccagtaacttaaccagattattgtgctgaacccttgcaagcttgtaaactgtagcaaatccaccccgtccaatattgctattctctgagaaattatctgtagcatgcacaatctgagagaagtcgaactttgagaatcctgggcagctctcttctgtacgagtacaaagctccaccagttcttcgatgtcaaggattttctgttcttgcaggtacaatgttgtgccatgccgcaggctgaagtcctgacagtgcaagttaggatgacggaccaagcttcctaggttgatcttccacgtcttaaatttcagaggacatgtgaggacatcacaggtcagtccaaatggcccaccatatagttttgtccatgatttggtcatagcagaataactgatgtgacgatttgaactgtatttgattgcagtagccgccccatccatagccttgtctcgatgattgctgctgctgtcgacgagggcgatgagagggatgaggcggatgtacatgtcgatctcgtgctgcgcggcgcggagctcgtcggccatccgggcgccgaggagcaggcggtggaggtagccgccgtcctcctggcacgccgtggcgagcgcgtagcaccgccgcagcgcgccctggagctgctcgaggggccgcctggtggcctcccgccgcatcagctcggcgagctccagctcccgtagcaggccgccgacgagctccgcgtgctgcccccagtcgccggcacgcgtccccggaggcggctcgccatcagcgccttcctggccacctttgaacaccattcccgagctcttttcgccgtaccagctgcgcccattttgggacccctcccccat

SEQ ID NO: 51344 - DNA, 638 bp, Oryza sativa
  unsure (1)..(638): unsure at all n locations
  Clone ID: PAT_MRT4530_53745C.1
gnaattgtaatacgactcactatagggcgaattgggtaccgggccccccctcgagtttttttttttttttttttaagatcaganatcgcatccatagnatctancttgaactntactgtgtttatcaatnaaaaaacttcatgtaaaagtatacaantaggtcnaaattgngtgtcaacaaacatgtgaagaaactangaaattaaggtgggnaacatctccattttctcntctatcntcngcnaacntnacntgtnaagggcnacccactnctgtctcattctatatnctgaanatnannanctacagtncannggnnnccnatctatttctacnctcntgcccaantccngnnnnccgggggatccnctacttcaacancggncgcnaccacngtgagaactccagcttatgttccctttactganggttgattccnatcttggcgttaancaatgtcanatctntttcctgtgtttaaantggganccgctcncaatccccacagcattcaagccgnaagcataaatgtcaatccngggtgcggataatnaaccacgcctttaattgcttgcgacctgccgctttcttcggaaatctcatgccgttgaatatnatcgcaatccnggaaggggttt

SEQ ID NO: 51345 - DNA, 286 bp, Oryza sativa
  Clone ID: PAT_MRT4530_53746C.1
gttgtctcctccgctccttgcgccgccgccaagaggagtcgcggctgaacaggggaggggcggcgatcgagcagagcaggggagggaatcctggtgagcatccacatcctctttctgattcatctctatctcccatcccaccgggacgtggaatttgcttgcgttcgttaacttctcttctagatctggaagaagctcttctccttaatttgagagccttaaacctcttttaatacaagtagtaacagtttgtttgttctcccaaaagtttttttttttttttggg

SEQ ID NO: 51346 - DNA, 648 bp, Oryza sativa
  Clone ID: PAT_MRT4530_53747C.1
atggcgtcggatgacgatcgccaccatgatcgtggcggctggatcaggccggaggagaagcaccggagctccggcgtggcgtgggcgctggtgatcctgtgcacgctgctggcggtcggcgtgatcgtcgccggcgcgacggtgttcgccgtgtacctcatctacaagccccggatgccgtacctggtggtgtccgacgcgcagctggtgcggctggactacgaccagggcggcaccatcgactacctggaggcgctcgtcaccgtcatggcgaggaacaccaactccagggcggacgcctccttcgcccgcgtcgacctcgcgctccgcttccacggcgccgacgtcgcgcgcctccgcgccgcgccgttcgtggtggcgagcgcctccgcggcgccgctccggtacgacgtcgtgtcgaaggggcgcgcgctggacgccggcgggatgcgcgccatggacgcgtcgctcaagtccggcgtcgtgccgctcgacctcctcggccgcgcgcgcacgcggtggaaggtcgggatcttcgcgtcgctcaagttctggacgcgcatctcctgccgcctccacttcttctaccccggcaatggcaccgtcatggcctccgatcgcaacacctgcacctccaggtcgccatag

SEQ ID NO: 51347 - DNA, 228 bp, Oryza sativa
  Clone ID: PAT_MRT4530_53748C.1
atgttgattctcctccactttagtgtcattccctgcaagagtgaacagggtacccacatagtgctcggcgggaggcagagcggccttctgatcatcttgaaaaaggcgtcgcaccttcaaaagaccgagctctcccgttgtcggctgccgcgcaggcgaatccccccggattttggtctttgtgacgaggggagagggatcgcgctgccgaacgggggtccgaactag

SEQ ID NO: 51348 - DNA, 1310 bp, Oryza sativa
  Clone ID: PAT_MRT4530_53749C.1
caacaacaactcattcctcgcttgctggctgctgctccgtcgcctttcccatctccaaccaccactccactccacctcctcctcctccgccgctgccgccgcgcagatccgcgggcaaggggctacggtgcggcggcgccgccctgcacccccacgccgccctccgcaccgcgcgcgcatccagcagtcggaagagttggaggaggaggggatgaaggatgtggtggggagcccggggacatggagcgggatgtcgctgcgggtgtcgcaatgcgtcttcgccggcgcctccgtcgtcgccatggcctccgcctacggcttctccaactacaccgccttctgctacttgattgcttccatgggtctacagcttctttggagttttggacttgcttgtctggatatctattcattacaaactaaaagagatcttcataacccagtgcttgtaagcctgtttgttgttggtgattgggttacagcgattctttcgtttgcagcagcttctgcttctgctggtgtcactattctttttgagagagacgtgcacttctgtaggatgtacccgcagctttcgtgtggtcgttacgagctttcagttatcttggcattcatcacatggtcgttcatagctacatcagctgtttccatgttttggttactagcttcgctttgaatcgtatcattatcgctgtcatgttgtgctaaccatcaggattccatcaaatgtactctgcttgagacatttagattttagatttctgttaatgaggaagcatccaaatcattctgagtaggtattatctgcttggctcaccaatctttggtttggaaagagtttatttgacaaaagtcgggcagatcatgagaacagtaatggagccaagtaatgttgtcacctagaaatcttctgtattaaggtcaagggtatgtatatagcatcgaaaatgaagggccgtgttgcaccttcatgtttggtgaagttcactctgacgaaatttgaaagaggtattggccatatctcttcctgagccacaccataccgtatgagatggagaaaaatggtgatcacgtgatgcaggcttggatatggattgtgcaaactgttcaagtgtcaactactgaaaaattttgggttttggagaattagatgcggtttcaaatgaattgcgttcagcactcagcagattggaattggactctgattacttggtaacttttgcggtgtaattttagtatgaattttttgcggctcatttttcgtccttgataaattcagtttgaatacacaaaatgttgacacttcattc

SEQ ID NO: 51349 - DNA, 1056 bp, Oryza sativa
  Clone ID: PAT_MRT4530_5374C.1
atggtgagctcaccctcgctctggcgccctcctgttcccatcaaagacgcgatcgagcaagatgccatcaccccgttccccaagcctgaggctccagaggaggaggaggaggagtcacaaggcgactgctaccgccgcctcatgtcatccctaccggtgaaggtctacggcgagcgccgttacctcgagtaccaggcgacgtggtggcctgagtccgccgtccaagccgtgatcgccatccaacgccggttccggccgaggccatcggatgtgctcctggcctcctaccccaagtcgggtaccacatggatgaaagcactcgtgttcgcgatcatgtcgcgcaaggtttaccccctgcgggatcacccgctgctgcgtctcaacccgcacgactgcgtggtgcacctgtctggcgcctacgcaacgggcaaggaggcggtggtggaggcgctcccttctccgcggataatggccgtccacatgccattctccaccctcccggcctccgtcgtcgtcgactccagctctggctgcaagatcgtctacgtgtggcgcgaccccaaggacgtgctcgtctccctgtggcactactaccgcaagctacgccccgaggaagcccatgtgtccgagttccacgacctctacgagtcgttctgccagggggacaccgtgtttggcccttggtgggacaatgttcttggctacttcagggccagtgtggagatgcccaccagagtgctcttcttgaggtacgaggacatgctggaggatactgccagcgccgtcgtcgccattgccaacttcgtgggatgcccattctcggcagaagaggagagagccggggttgtcgatgccatcgtcaagctttgcagcttcgaggagctcaagaatctggacaccaatatgtccgggagcaatgggcatctcatcaagctcccaagctcctcctacttcaggaaaggagtcgctggagactgggtgggtcacatgacccgggagatggccgaccgtattgattcaattattcaaggcaagttccaaggacgaacgcagtaa

SEQ ID NO: 51350 - DNA, 1762 bp, Oryza sativa
  Clone ID: PAT_MRT4530_53750C.1
cccggctccacatccacggagatgcggcggatggagcgcgacgcgtggctgctatgtgcagcgctcgccgcggcgacggtcgtctactaccccccgccccgcctgcacgacgcaccgcgcgcagcggcgtctgcctcgtggcccgacgccgctgccggcgatcggcaatgtgctcagcctgcgcggcgacatgcaccacgcgctggcgcgcctcgcgcgcgagcggtatggccccgtgatgccgctgaggctgggcctcgtcaccgccgtggtcgtctcctcgcccgacgcggcgagggaggcgttcaccaagcacgaccggcgcctcgcggcgcgcgccgtccgggacaccagccgcgtgcgcgggttcgccgaccggtccatgatatggctgccgagctccgacacgcgctggaagacgctgcgcggggtggtggccacgcacgtcttctcgccacggagcatcgccgctgcgcgcggcgtccgcgagcgcaaggtgcgcgacatcgtcggctacttcgccgcgcacgtcggggaggtggtcgacgtcggcgaggccgtgtacagcggggtggtcaacctcgtgtcgaacgccttcttctccggtgacgtggtcgacgtcggcgaggagtcggcgcacgggctacgggaagccgtggaggacatcatcttggcgatcgcgaagcccaacgtctccgacctttttcccttcctccgcccgctcgacctgcagggatggcgtcgctgggcggagaaacgctacgacacggtgttcgacatcttggacaacataaccaacagccgtttggccgacgcctcggcaggaaaccacgccggcgacttcctggactccctcctcggcctcatgtcctacggcaagatcgctcgcgacgacgtgacaaccataatgttcgacgtgttcggcgccgggacagacacgatcgccatcacggtgcagtgggcgatggcggagctgctccgcaacccgagcataatggccaaggcgcgcacagagatggaggacgtcctcgccggcaagaaaaccatcgaggagaacgacacggagaagttgccgtacctccgggccgtgataaaggaggcaatgcggcttcacccggtggcaccgatactactgccgcaccaggcggcggaggacggcgtggagatcggcggctacgccgtgccgaaggggtcgacggtgatcttcaacgtgtgggcgatcatgcgtgacccgacggcgtgggagaggccggacgagttcatgccagagagattcctgcaaagagcagaggtagatttccgaggaaaagacttcgagttcatgccgttcggggccggaaggaggctgtgcccggggttgccgatggcagagcgcgtcgtgccattcatactggcgtcgctgctgcacgcgttcgagtggaggctccccgacggcatgtcggctgaggagttggatgtcagtgagaagttcaccacagccaatgttcttactgtcccactgaaggccgtccccatacttgcctctagtgctagtgaactacaagcaagctaggagaatagcctactgtctccatgtttgcggggatacgtttaactcccagtttaaatatcaaataaaactatcagatcataaaaaaagcacagctcggtgcatatttatacttttgtttcctttgtaatcctacttgtttttatattaatgaaatcagtgtttaatatatatcataagtaagataaaaaaaaaaaaaaaaaaaaaaaaaaa

SEQ ID NO: 51351 - DNA, 609 bp, Oryza sativa
  unsure (1)..(609): unsure at all n locations
  Clone ID: PAT_MRT4530_53751C.1
catcccctcgcgatccacggccgatctgatcttcntgctctttggccaagacggcgttgtcggtgtcggcctctggatcgcccatacattccagcaccttgtcaagcgacagacctagggccttgacgacgtcctcggcgcagcccttgctgtacttcttctccttcatggagcacctgatcttgtagtccatgacgtagtcccaccacgcccatggccgcccggtctcgttggccacccggtgcacgcacagctgcctcaggttctccaccaccacgtccttcccctcgtacccctccccgaaatcctgctccgggtccggcgcacaatacctgccatggttgatgcactgggacttgcactgctgggtgagcttgaaggcctcggggcagtaccaggtgatgtagtgcggggtgaagagggcgtagccacctctctccatgatctgggcgtggccgcggaagccgcggacgaactccatctgctcgtcgcaccgggcgccgcactcgtcgttgctgttggtccacagctcgtactccacccgctcgtcggggtggggcatcgactcgcgccagtccagcttcaccaccacctccacggacgcgtggg

SEQ ID NO: 51352 - DNA, 611 bp, Oryza sativa
  Clone ID: PAT_MRT4530_53752C.1
ggccccccctcggagttcttttattgaaaggaactttttgatccattactctcattattgattatatattgtcacaaatccaagcagcttgctcaacacacgatacatcgatcaatatatggccaacccatgccaaacaagggttattacaaattcaaatctcacctctcatcaatagctaagaaaggaaatcaagcatatgcttcaaaggttaactactacaaacagttcatgagaagaaatcaagtaaatatatgaaacacacgcgaattatggatcatcgagatatggctagctagcgaagctagcattatggcgcaggccggcagccgagctaggcgacatagtacatggggttggggtacttaaacgtacggcagccctccggcgagccgaggatgtcggtccactggtcgccgatgttgccgacgatgacatagccggcgtccacaagcttctgccgctcatcagtcttgaacgcctgtgttgtggtctgaagcccaaccggctggaacaaccgtttctcccagctgcagtaaccctgagagaggaggttgtcggtggtgaccctcccttggtcctcggtgcggtcagtcaggaatactggctta

SEQ ID NO: 51353 - DNA, 365 bp, Oryza sativa
  Clone ID: PAT_MRT4530_53753C.1
atgtccgagagaaggcgccgggagaagctgaatgagatgttcctcattctcaagtcactggtcccgtccatcgacaaggtggacaaagcatccatccttgcagagccgataccctacctcaaggacctggagaggaggttccaagagctcgagtccgggaagaagatgtctagcccgcccaagaggaacccgtgctcagagacgatcatcggcggtgccgcccgcgccggtcccggagctgttaaagggcaccaccactgggtgctctccgagtcccaggagggcaccccaagcgacgtgcgtgtgatcatcatggacaaggatgagctgcacctggaggtgcactgccggtggaaggagctgat

SEQ ID NO: 51354 - DNA, 492 bp, Oryza sativa
  Clone ID: PAT_MRT4530_53754C.1
atgagtagtagtggcaaggagaagaagcagatggaccgcggcaagagcggcaagaagccccaaggcggcggcagtggcgagggcggcggcgcggcggagaacaaacccaagggggagtcgctggtggcgaggcttctccaccactgccagcacatggcgcacatcggctgggacggcagcaccagcaccaccaccagcctccgctcctggaaccacgccgcgccgccgtacgtcgtcgtcctcctcctccaccaccgcgtccacctcgttagccttggcggcgccggcgacatcaagaaggagtcggcaccgacggggcctgggttgtgcagctcctgtcctgccgtctgtcgtagccagggccaactccggccgtcccttcctcttccgcccacagctgccggagccgtgcctccgccgccgcgccgctccctcctctcccgtcggccgccgtgcgccgctgcctctccgtcgcgcctggagaggggatag

SEQ ID NO: 51355 - DNA, 112 bp, Oryza sativa
  Clone ID: PAT_MRT4530_53755C.1
atgggcggtcttgatcatctcgtgatggggaagtgctacatcgatctgggtcaagaggaggacccttatgactactactatgatgacttcgataatttagaaaaccctcaga

SEQ ID NO: 51356 - DNA, 306 bp, Oryza sativa
  Clone ID: PAT_MRT4530_53756C.1
aaaccccccaagggtccccagggcacatagggggatttcggggcttatttttatcttccgaccccctttccgggtaaaactcattccaggaccccgccagggggggaaaggggccggggggccccatagcccctgggggggaccccatatctagggggcgcgttaaaagccaacagggctggggctgggcccaaattccggccaagggggggacccccaaccggggggggttgaagctgctgccctatggcccgaacaatgttaaggccctgatggggaagagggggccccaccagcccgagctgg

SEQ ID NO: 51357 - DNA, 147 bp, Oryza sativa
  Clone ID: PAT_MRT4530_53757C.1
agcgatgaagatctatcctcttatctcttgagatgggctcgcgagaggcccactccggacagctatcgatccattcctgcttataccggactccctagaacgagagagagagagagcgcgctctcttcgactgctgacggatgccag

SEQ ID NO: 51358 - DNA, 189 bp, Oryza sativa
  Clone ID: PAT_MRT4530_53758C.1
atgtgcatgatggacagtgcacagtacttcagtggagaactcataaaagaggagttcccaaccccttctcccaaatacaaccttattgtactgaataacattctgttaaaggccatccgatgggagcctccacttgttttgaaaatgctttctaaggcaccgtttggcattactatggttctggtatag

SEQ ID NO: 51359 - DNA, 549 bp, Oryza sativa
  Clone ID: PAT_MRT4530_53759C.1
atgaacaagggcaagattttcaagttggcaaagggatttagaggcagggcgaaaaattgcataaggatagcaagggagagggttgagaaagccttgcaatattcctacagggatagacataacaagaagagggatatgcgatccctttggatagagcgtatcaatgctggtacacgattgcatggggtatgtatccattgcactcaagctgtcaaaaaggaaatatcattggtagttgctaggaaagatctaatcatacgccgttccatcctgtgcttgagcctttcaaaacaaacaattcaagataacactactagacttacatcttggagtttaagtagctcttttcttgcatttgactaccaggtgaactatggaaatttcatgcatggattgatgaaggagaacatccagctcaaccggaaggtgctctcagagctttctatgcatgagccctacagcttcaaggcacttgttgatgtatcccgcagtgcatttccagggaacaggccgcctgttaaaaaggagggtctagcagccatcctgtga

SEQ ID NO: 51360 - DNA, 299 bp, Oryza sativa
  Clone ID: PAT_MRT4530_5375C.1
aaaattaaacttatgggagttgtaaaacttgcattaaaggtaccacacaaggtggacaagctactccaaggaaatagcattcaaaacttaaacaatcatgtctgttagattttacatctaaaacaccttaggaaacggtatttccctcaaatcctaagaaaaattgcttagattgttctaaaactaattctgctaattttaaagatccggggcctgtgcctatgttgcaatcattaaggtgactagcctttggtgtacgggatctgtaaaccttgttgacaattttttgctcatcaacc

SEQ ID NO: 51361 - DNA, 720 bp, Oryza sativa
  Clone ID: PAT_MRT4530_53760C.1
atggtggcgacaggtgatggtggcggcaacggtacctctcgccaccacctcgtccccatcccccgccactgccaccttcctaccaacaccttcaaccaccgccaccgccattactgtccctgttggctgcttggctctgtcgatctagagaagggaaggggtgaggtgaggagagggagcggcagcatggtggagatgaagagtacgacgccggccagcgtcctcatagatggtgtggaagatacgaggctcggggatctctccgacgaaggaatccactccaccggcagccgcgccgatgaaatcgccatccgaccaaatcgcctcctctctcgtgcatcagtggaaatcacatgtatgaccgaggagcgcgcgcaacctgagcctagcgccgggatagccggaacgatgaccacagacagatggagctcgtcgccggcgagctcctccttcacgcgcagcgcgctggtgaacgccacaatcaagagggtggtcgtcgtggtgccgtacaacatctctgtgctccagatcagcaactttgtcgtgccatcgggcgtccttacgaggccacaaccgctgctcccgaccgccgtcgctgccgctccccaaccgccaccgccgccaccgttcccctccgcctcgtccccaccgccaccgccaccgttcctgagagagagagataagggagagagggggaggaagaagggagagggaggatga

SEQ ID NO: 51362 - DNA, 1026 bp, Oryza sativa
  Clone ID: PAT_MRT4530_53761C.1
atgggggagggtgatgcagggcaggaatcctaccatgctatgagcaaatcacggccaccggatcagtactggatggacggacaggatctgtgcaggaagcccgcgtggaaatcggctacgcgggccaaatcgccccccatcgattttgaagcccacgagacagaagaggaggaccggattataatcgccgctcatgctatccatgggaacaagcgggcatgtattgcaaagcttttggatgggagaaccgacaatgctataaagaaccacttggaattctactctgaggcgtcgatccttcaacgatggtcgatgcaaacatggttgttacaagggatcttgaatccgggagtgcaatctgcaagcgttcccccagagttcaagatcttccgaatcccccttactcggaacggtggcggtggcggtggggacgaggcggaggggaacggtggcggcggtggcggttggggagcggcagcgacggcggtcgggagcagcggttgtggcctcgtaaggacgcccgatggcacgacaaagttgctgatctggagcacagagatgttgtacggcaccacgacgaccaccctcttgattgtggcgttcaccagcgcgctgcgcgtgaaggaggagctcgccggcgacgagctccatctgtctgtggtcatcgttccggctatcccggcgctaggctcaggttgcgcgcgctcctcggtcatacatgtgatttccactgatgcacgagagaggaggcgatttggtcggatggcgatttcatcggcgcggctgccggtggagtggattccttcgtcggagagatccccgagcctcgtatcttccactgctctatcctcttccgccttcgcctttgctgctgctcttcatgtgctgccaccacctcttcgtccttccctagccgtcattgccattggccgcaccaccatctatgaggacgctggccggcgtcgtactcttcatctccaccatgctgccgctccctctcctcacctcaccccttcccttctctag

SEQ ID NO: 51363 - DNA, 395 bp, Oryza sativa
  unsure (1)..(395): unsure at all n locations
  Clone ID: PAT_MRT4530_53762C.1
gaaagcagggacaagtggatgcagcaacagcaaattgaatgtgagttagctcactcagttaggcaccccaggctttacactgttanngctgtaccggctcgtatgttgtgtggaattgtgagcggataacaagttgtcacaccggaaacagctagtgaccntgattacgcccagctctaatacgactcactatagggtaaagctggtacgcctgcaggtaccggtccggaattcccgggtgcgaccacacgcgtccgtttcataccccgatgaatctggtaaanatctctatccggatttggtaatgctataaatgtctaatccacgtactagattcttaccttttaagatgaagggagtatctattttctgctggttgccaaaaaaaaaaaaaa

SEQ ID NO: 51364 - DNA, 786 bp, Oryza sativa
  Clone ID: PAT_MRT4530_53763C.1
ccccccggccggactcgtcgtcatcgtcatccattctcgcatcaaccaagagacgccacgagcgcgaagcgaacacacgaagcgttcgtcaagcaagaacagagtttgtttgtgccgcgatggcgcaggagagcctgaggctggtgtcgcacccgatcgcggcgcacgaggggcggctgccgcggcactacacgctggaggggcagggcgcgaagaaggacatctcgccgccggtggagtggtacggggtgcccgacgggacgcggtcgctggcgctggtggtgcacgacgtcgacgccccggacccggacggccccatcgtgccgtggacgcactgggtcgtcgccaacatcccgccctccgtcaagggcctccccgagggcttctccggcaaggagggcgccgccgcccgcgagtacggcggcatccaggagggcgtcaacgactggaagcagcccggctggcgcggccccatccctccctcccgcggccaccgcatccagttcaagctctacgccctcgacgacgaggtgcacctcggcaacaaggtgaccaaggacaagctgatggacgccatcgaggggcatgtgctgggagaagccgagctcatggccgtcttctaggacgcgagctctctgcattttgacacccctgtgagactgttctttgcagagcttgtaccatatcacaaacttgttgaacttttatccaataaaaaacaagtcacttgggtggtggtgttattgaatacaaaaaaaatataaaaaaaaaccccccccccccccc

SEQ ID NO: 51365 - DNA, 2496 bp, Oryza sativa
  Clone ID: PAT_MRT4530_53764C.1
ttagtagtttgaaaagcgtgcgtgtaaaaaataagagatataagttgtgtaagaagggggtagttggatatgctgatgataccttttgagtgtttttggtattctttgaaatttcccctcttgatgaaaaggagtttgaaaggcagaattgccaaaatttacaacattgctggctgacagtagtaagatttttttagcagaagaggagctaaccgctgcgcctatgatacaactacatctttctgaaagtgagaagatgaacttaagaagaattggaaggattacagatacaacactacaaggaagggcgagcctgccctatggggctttgctacaactgcaaggcttgtaacctcggtaccagattggatggggctgcttgctgaacccgctcgtcgtggaggagaaggatgttgaaggtgcccgattctctcaaccaggctgccaccacagcgctgggtgacacgaaccttccgatgttgaaccgatccacctggaacggggctccgattgaattgagcagcgtctcaatgacacaaataacgatggagcttgtgaccaaacttctcgagaaccgaccagaagaccataagcaacaccatagacaaagttatcaaataagcgaagttgttccagtaacagggctgcatcctcgaaactattacagcgactgcaagcatttaagattgcagaaaaagttacaacatttggccttacaccctgctggaccatcttctgaaacaattctagaatgaagaacagttcctgtgacctcctcatccggacatcagttgcagaacgccctcctctagacactggattagcaaccctaacaatttggccaccataaaccccaacaatacccatgtcaccaacttcagaatcatcctccatcataacctttgacttgccaaatgcatcgattattgcattataggtaaccacatttggcttgatacccatctccgtcatatcattaagcagagataaagcccactctatcaagccgttcttggccaatgtatcaatgaaagagctgaatagaacaacatctggctttaggcctgactccttaaaatccaagtagacattgaatgcatctccatgcatccctgcctttgaatatatatctatcaaagttgaataagttaatacactaggagctaccccccgtttcctcatatcttgaacaaggatagaaacgatatccaagcgtccctgctttccatacccattaatcaaagagttgtaggtgacagtgtccttctcaatccccagctcttccatctcgtcacagacattagcaatttcagcatactttcctgccttcacataaatagccagcaaggtgttgtagcaaactcggtccagttgaattctcatagacttcatcttttcacacaacttgagtgcctcctcgtacttctctaacttggaatatccatcaatcagtgtactgtatgtaacaacatttggcttaacgcctttcgcttccatatccaacagaacctgcatagcaagctccatgtttccacacttgcaaatggcatcaataaacgtgttgtacgtgtatatgtcacgcccaatgccaagatggatcatttcatcaaagacagcacgggcatcttccaaatgccccacgcggctacatgcagcgagaagcgaattgaaagtcttccggtccggacaaagcccatccttcagcatctgccggaaataaccaagtgtgaacctaaggtcgacgccgcctttaccacacgcatcaatcaccgcattgtaagacaccgtggtaggccgcagtcctgcacctttcatcgactcgagcacccccatggcctcattcgcaagaccgctccttgcatacgctgaaattagagccgaatgcgcaaacaccgtgttgccgtaaccccccgcaacgccatcatcgaaggctctccttgcaaggtctggtctccccatcttgccgagcgcaccaatggaagcagtcaggagcttgcctttgtcgacggcgccattgccgacatgcggcagcgcggcgtggaacacctcgaacgcacggagcgcggatttgtcccggtcgccgagctctcgcaggacatggcagtagtcatcgggagccaccagctcgccgcgggaggaggcgagggccgcgccgagcgcgcggcggtcgtcgggcgccacgcggagagcttctccacgcttgcgccccgcggcggcggagaagggcccgccgcgcgcgccgccccccccggtcggcttcgccccgggccccccgccgaagatggggccctgcgctggcgggcacgccgcccccgccgcggggaacggcgggcacagcgccgccgccgcggccgacgccgacgccgccgccgacgccggctgcgccgacgcgtggagccgcgcggacgccgcgctcgccgccgccgccgcggacgggtggtggtgcgaagccgcggcgtgcgtctgcgacggcgtgaagtgcgtcggcgtcgccat

SEQ ID NO: 51366 - DNA, 478 bp, Oryza sativa
  Clone ID: PAT_MRT4530_53765C.1
atgagcaagagcggcggcgcggcggcggggccgacggcggcggccgcggcagccgcggtgcagaagcagaagacgcttctccagaaggctgacgccgacgtctccagcctcgttgacaacttcgccgccctcatcaacatcgcgcgcgtcaacgacccgccggtgcgcaacacgcaggaggccttccagatggacatgcgcggctcccgcatggtacattcagctgattctctgttgaaactagtgtcagagcttaagagaacagctatcttttctgggcttgcttctttaactgaaaatgtggataggcggattgaaatctttagtcaacaagttgaaggaacagagagaatgctggagaggattgggcaggaagcagcaggaagcctcaaagagttggaggcacattactactcatctgttgtgcgaacaccaccggatgaatgaggctttgggaggaagtctgacaggatggtgg

SEQ ID NO: 51367 - DNA, 2773 bp, Oryza sativa
  Clone ID: PAT_MRT4530_53766C.1
tcatagacgatcatttttgccaagtttcgtgaagaacaaccaagaacccataagacctctttggcacatctccgaattcaaaatttgttggacctgtatgacccaatttagtatcttggcccagagatctaagcattctgcttgtaggaatggaaagagaaccctagtggccatccttgcatcattgacaaatagcaatcccacaacattaataatgttatttactcttccatggtgccagggaagcttcttcatggccatgatggtgcaagtatgtgacaaaatccaaccacatgacaatatcatgtaaggaacagcatagagctttaacatcacatccttcttctcatttggttggaacagcccactgcttgggttcaagtgtgaaccttccctggactccttgcaaacttcaatacacttgtcaatgaatgtcaagaagctcttgtcctgcttggacttcgattcagcttgcaggatcgctagtacctccttatcagggttgacccaacacctccctgtggccagacttatgtacttgatcgcttcatggcaatcctcacaaacacgcagattcttgaagatcctaagtggagtcccacttggagtgctgatgatcccaaatgcaatggccagcttctcactgtggaacttaagagctgtttccctttgttcatcctctacatcatgaacaacaagatcagttctacttgtgtacccaatctccttcagtctctccaccagcttctccaagtaagcataaatttcagctgattgtgggtgtgacgcatcccctgcaacaaatgtatgcacagtattcttcaggtggatccaagatcgaccaggctgcttcctgaccttcctttcctgcattgaaactctaagctcaaaagtgtcgtgccatttgttgttggttgcatatatgtttgacagcataacatatgatccagcatcgcattgctccagttgaaccaatttttcagaagccaattttgcatattcgttgtgctggtgaagtcgacaagctgacagtagcgtcttccaaacaatagcctcatggttgatgttgttttcctcaatgaagttctttgctttgtcaagcagtccagatcgcccgtaaagatcaacaatgcaattgtagtgctcaatgcttggaacaattccatactcctcttgcatctgcttaaagtaaagctctccttcactgaccaatccaacgtggctacaggcagatagaacaccgacaagggtaatctcgttaggagtcattttttctgctgtcattctttcgaagagctcaatagctatcctgccttggccatgagatgcataggagcacagcattgaagtccagacagcaatgtttttggtgcaagctctgtcgaatatgctacgagcatcttcaagggtgccacacttagcatacatgtccacaatggcagatgccaatggtgcatccaatttgtaccatagcttctccacgcagccatgcacttgccttccttgctcaaccatcccaacatttgcacaagctgcggctacactagtgagggtaaaccgatcagcagcaaccccttcgcgcagcatccttcgaaagagatcaagagcttcttcctccctgccattctggacatacccagcaaccattgtgctccaggcaaagttcatgtctctagtgagtggtgaccaatgatcaaagactgacgcagctgcctccaataagccgcatttgcagtacatgtccatgagagagctccgaacaaatgcatcaccctccagtgcagcaatcaaaacacggccatggagctgccggcctaggtctggcaagagaagcatgccggccaagacaaacgctgtggagtaagtgtagtgattgaacaccactccagcttgcgccattcgacgcaggtggctcagggcgtccgcagcatgcccactccgcatcaggccgctgatgattgtgttccagcttgtagtgtcacgcagcggcgattcatcaaaaagctgcatcgacccaaggatatcaccggactgtatgcatgcaccgatggcaatgttccaggagacggcgtctctctcggccattgctccgaacacccgcctggcacgctcgaactggccacacttggcgtacatgtcaagaacagcattgcacagcaccacgtccagatgcaccccgttcctcagcatccacccgtggacgcgcttgccggactccacatcgcccataccggcgcagcacctgacgacggcagcaaggacgaacgcgttcggcgtggcttcaccttcggccagcatctccgcgaacgcgcgcattccgtccgcataccggccgcgccgtgcgcagcccgagatcgtcaacgtccacacgggcgcggtcctcgtgggcctttcgtcgaacaccccgcgggcgtcgtggaatctgcggcgtctgacccagaaccgcaaaaccgaggcacgctcgtggggcaccgtagccaagcgtgcctcgagggatcccccgcgggcggctcgtccccgcaggaggagggccgcagagaagggatgcgtggaagcccgcggcgagaggctggccgccggtggagccgtggaggcgagggaacgatgcgatcaaggccgcgcgcatggaggcgatgatggcggcgctggagcgcgcgcgacgaggcggatgcgagcggccgccgccgcggcggctatcgcgaggaggaagaggagcgaagcgaagaagctggcgagaggggcgcgacgtgggccgggaaaaaaaagcaattcc

SEQ ID NO: 51368 - DNA, 279 bp, Oryza sativa
  Clone ID: PAT_MRT4530_53767C.1
atgaattttctacaaattttacaaattaagctccactcgattctgttcgttgtccttcaacttagcagcattgtcctcaatcagaacatggcacttctcaatgtcgtcttgaagacgatgaacctggtttctcttctcttccaactcatacttcaaagtactaatgatttcttcgccggattgtctggcgccattgattcagtatgcaaccatatcatcgacatactgaaaaaggatgtcctcccaaatccaaaccttgcaatgatacttcgaaatgtc

SEQ ID NO: 51369 - DNA, 111 bp, Oryza sativa
  Clone ID: PAT_MRT4530_53768C.1
cagacgcgtgggttatcatatgatgccgagcccagagtgccatttctatcgaaatcagagttagtggcaaggagaattaccatctgtcattgatggctggttagcgacctt

SEQ ID NO: 51370 - DNA, 281 bp, Oryza sativa
  Clone ID: PAT_MRT4530_53769C.1
atgacggttatgacggttggaatggtcggaattaccctccaaccatataggggcttcatctcagccgtccagccaaaacctggatccagcggcggccaggtgggttcggccgaaccaggggccggcccaacctggcctaaattcggcaggtggcctcctctattactcccatgcgcagacttgtgaattttggcccagttcatcgtgtcaattttgagttcttggcccattcatacataagtctgattctcgacatagtccgattgatcgatcatttgatt

SEQ ID NO: 51371 - DNA, 2835 bp, Oryza sativa
  Clone ID: PAT_MRT4530_5376C.1
atggcctgtcagaccgtgtactacgccggtcagaccgtgcctaccatagccggtcagaccgtgccctatcctgaccagatcggacctcctgtggccggtctgacctcactactgaccaccggtcagaccgggccatgggccggtcagaccggttccctgggagtttctccaggttttcataccacgactagcagtactgattttaattattattcatcacctgttaatactgttagtaatgctactccacatatccctaatgcttacaatgatcctaatagaggatattctcatgacactaggtatggccaatataatcatattgcgccgcaacaaccaccccttaggccaccaaatacaccaccagatccacataggcctaaaaatatggaggagttgattagtgccattatcagggctacatttagggttgaagcgaaggatcgtgctagggagaaccaaaagccgtatcctgatttttatgatgctgtcccatatcctcctgattataaaattcctgaatttactaagtttagtggtgaggatagtaggactacatacgagcatgtagatcaattcttagcgcaatgtggtaaggctagtagtatgaatacatatttggccaacattgcatatgatggattgcttgattctattaaagagagattgaatggccagatatttcttgatgttgatcatgtgttgaatgaagctctggctcaggaaagccgagtggatgacaatagcttacatgctagtttagatgatagtgcaatatcatgtatagccgaaccaagcggtggttcggattgtcttaataatttgtgcagtgatgccataacgattatagccgaaccaaatgttggttcggattgtcttgctagcttggataatgatgcaacaaccattatagccgaaccaagtgttggtctggattgtgttattaatttagacaataatggaatagccaaaccaagtgatggttcggattgtgttgctagcttagagaatagcatcattgaaaatatagccgaactaagtgacggatcaggatatatcacaagcgaaagtgaaatagcattatcacctaagaccgagtcacaaatcggtcatgtggatgttggaaaagatgatgacaatgtcttgcgggatagtagtgagatagaatccaaagtagctatgcatacatatcaaagaccgtatcctgaacacgtagattcggtcccatacccgcaaggatttgaggtgcccaagttcacgaaattcacaggtgagaatgctatgactacaatggagcatatcggtcgctttattgatcaatgtggtaaggccggtagtgatgatttgcttaagttgaagttgtttcctctttctttgtcaaactttgcatctacgtggtatagtttacttgctcctaattcaatttctacatggtcacaaatgaagcatgagtttcatggttatttcaaagatgcaagcttgatggagcaaagaccgattgatacttcatcggtcacttgtgaaactatttcggttacatctatgcctaagaccgaaattgttagtgatcctctccctgttagttctattattgatgttggcaaaaagaaaggcaaaagtgttattattggggatcctcggcccaagaataggatcaaaaatgcgaaggctaaagatcataaagttacaaaggatgagtcatctagttcccaaaagactaaaaagccgaagctcacttttgagatgcttatggataagtacaagaaaggattagccggtcaacgatttgataaccaaactagtgattcaaaaagaccaagatcatctcgtcggaagagatttggtcaaacaccaaagcaatcagagccatcaactataccaactccatacaaacctccggttgtgatgccatggtatccatatccaatgtcactatatggttatccttttatgtattacatgccgtggatgcatcaaccacctgtgccgtgtcatcaagaatggaagcaatcacctaggacagtgccaaatcattcatctaactcaagacaagaccgtttcccacaaaagaatcggtccggtagatcaaaggtgaaaaaggtgaagaaggtgtgggtgaggaaagaagccaaagctccagaggtcgttgctatcaatgaggattctcaagatgttcatgtacctactggagatgcggcgaaaactgtacaagcggagaagaccgaaggtgacatcacgactgtcaacaatggcggtctgacggagatagttggccggtctaaccgccagactacggccggtctgaccgaccctcctggccggtctgaccgatggcttgttgccggtctgaccgggcctagaggccggtctgaccggggggcattagagaagagtgggaaaattgagagcaatacaggagcttccacttcgaccaaaaatatgaagaatcattgcttagctcctggaaaacaactacagccgaagtggataccttctggcttatctcgctatcaaaagaggaggctacaacgtcttcgggccataggtcaaaaagaaaaggaggccgaagatgtggagaacaagacatgcaataatttagagcctcgaacagcgcctaggcaagtgtggagacccaaagaggtaaaagttaagagaccagtgatttcccatagtagagataaatccaatttgatgagagaagaatcatcggtcattagagataagtctccttcgcatgatgctatggatgttggtgcggtgttcgtcttgccttcgaaatcgtgcagtcgagaaagccgatttttctcggggggcaagacattaatatgctcatga

SEQ ID NO: 51372 - DNA, 458 bp, Oryza sativa
  unsure (1)..(458): unsure at all n locations
  Clone ID: PAT_MRT4530_53770C.1
aaggggcaccncagatcaaatggtcgatctgctagcccagatgagctcgagcgtcatgtatctccatccaataatggacatggtcctccagttgatgggaaaagctgataaagatctcgctccaaggcgaggcaagcgtttgaagtttggagttcttggatcaagagttggaagttggaactagggagcatgcaaattacaccnccatgaaatgtaccgtggtagtgccttttatgctattttgtagaatagataagcaaagcctggtagcgaagtaagtttgtacactccatatgcagtttgcctatcgatacttaggttagcgcctgctgcttttgcttttgttgatctgttttaaatgattttctatctgatctttcttagtttgtttgctgccatgccgacatgcatcttgtgcccacttatctatttgattatgttccaaaaaaaaaaaaaaa

SEQ ID NO: 51373 - DNA, 127 bp, Oryza sativa
  Clone ID: PAT_MRT4530_53771C.1
tctgatttcagcagtggaggaaggattcttcgagacacaagaagttcattcagagatgctcgaggcacttgtttatgcgaaagattagctatataggtgctcgaaagcttgtttatccgaagagtcg

SEQ ID NO: 51374 - DNA, 203 bp, Oryza sativa
  unsure (1)..(203): unsure at all n locations
  Clone ID: PAT_MRT4530_53772C.1
aatgcaactgtgcaagtaagtttcaacaattttgtcacaacattataagttacatctcgtagctctaattcacttcccagtactagctaggcctttcctaactggatgtctttgacgcctttgcatggcaccccagngcttggcgtcttgttgaaactggtctcccttgctttttgtatagatggcggtgcggtcatttattt

SEQ ID NO: 51375 - DNA, 312 bp, Oryza sativa
  Clone ID: PAT_MRT4530_53773C.1
atggcgaggcggcgagagcgcatcatgggagccacctcggcaacgccatgggtacgtggggcgggggagccgcggcccggggggcgggggaatccaagaaaggccacgggggaacagctggaatccgagaagaagcggatggagcgaatgcgaatcagatcaccagagacggcaaggatagcaatttgtggtgaggatgcaatgctcaacaaggcgtgttttgtcagtggcaccaagcatgacctcgacggtggccaggggcaatatgcggccaaggacaacgaatgtgtcagaaacttgaaggatatgtag

SEQ ID NO: 51376 - DNA, 1003 bp, Oryza sativa
  Clone ID: PAT_MRT4530_53774C.1
gagattggctctccagctgagcggtctcgccgaagtcgtgcgcgaggtcggcgtcgccccgggcccccgccgcgtcgtcatcatctccgacatccaggcaggcgacgctgctgtcatcgacgagttaatggcgatccagctcggtgtcgatgcgtcctgggaattcgtcaacagggagcggctcaggaggatggggcgcacctacaacctgctcaagatggtggaagcggttctcccaggcctcatcgacgacccctaccacgcctccgacttcctccgcgacatggagcataaaatcaggacccgcgctactttctccggtgtctccttccgcgtcctcgccgtcgagttctgcaacctcctgcgcgactacaacgaccgcatcatcgctgatcctcccgtctctacccgcgaggagctccaggaccacatcaacgagctcatcgcccaactcgatgaccttctgcaccagacctgcacgctgcgccaagatgacccggtgggaggtggcatgaatatcaaatctgattgtgacgaaccatccccgcattgttcttgcgtaggacaaacggacatatcttgggttacctatttttggaattctgttgagtttgaactaacatattgccttgctgtgggaggtggcatgaagatcaaagctgattgtgatgagtcatccccatatgcagctatgcttgtttctcaagatgttgcactgtgttgcaagtataggacaaatggacagatcttgggtgactgttttctggaattctgtctcattatgctctgtgcggctggaggcaacaagacaaacacacctggacctgatgctcaatctgctctcagggctcttgctcttgctcggtctgggatgaatattggtcgcattgggtccagatcacaacttttgctggtgtgctgtcctgatctggtttcatgtgatttgttgaatgatgatggacctggctacgagcaggcttccctgaaagaccagagaatttga

SEQ ID NO: 51377 - DNA, 305 bp, Oryza sativa
  unsure (1)..(305): unsure at all n locations
  Clone ID: PAT_MRT4530_53775C.1
actggccggttcgcagnntaccattttcatctcatcanaaattggtgtgttcncnatngagctcaaatcaagccaantgaaaaactgtgtnangaaggctactataccgtcctccccnacatgaacttttacacttcacatattgctatatggnangccggaagaaccnnctgaanactgaagtgcagtgacccatccattaagcttctggtatcttacaaaactangtcctctnattatcttttaanatggggagttgaanttngaanaaaatactatgtnanggggggngggngaaaangttt

SEQ ID NO: 51378 - DNA, 1775 bp, Oryza sativa
  Clone ID: PAT_MRT4530_53776C.1
atgtcgtcgccgtcgccgtcatcggaggcggcggcggcgcaccaccaccaccaccaacggcgccagcatgcgggcgccgcgggggggagcgggctcgtgccgctcgccgcgctcatcaaggaggaggcccgcgcggagcggccgatgggcagcgggagcaggatctgcgcgcgcgacgaggaggacggcggcggcggcggcggcgccgagggggggcggcggtggcggaggccgctgctgcggtacgggtgcgcggcgcagtcgaagaagggggaagacttcttcctccatatgctcgactgcgtccggccagccatctcgaggtcgtcctccttgtccttggcgccccggcctcccgacaccttcgccgtctacaccgtcaatgatggccaaaatggtaatgcagcagctgtaaacaccagcgactatctgctcaatcatgtccttagcgtaatccctagtggactctctaggtaggagtgttttcatgctctcccacgtgcgcttgtcgcagggtttgttaagactgacaaagaattccaacataaggaccaaacagctggcataactgccacattcgtgatcattgacggatggactatcaccgttgcttccgttggtgattcccggtgtattttggatgctcagggtggcgctgtttctttgcttactgtggatcacagactagaagaaaatgtggaggagagggaacgtgtcactgcgagtggaggtgaagttggaaggcttagtgttgttggtggggcagagattggtccactgagatgctggccaggaggtttatgtctatcaagatccattggagatatcgatgttggagaatttatattgtcgaatgctggagggaggcttattattgcatcagatggcatttgggatgccttgtcatcagaggcagctgcaaagtgttgcagaggtttgcctgctgagcttgctgctaagcaagttgttaaggaggcgctcaggacaagagggctaaaagatgatacgacctgcatcgttgttgacatgatcccacctgatcaaacaatacgtcatccatctccaccaaaaaagataaacaagttgaagtctttaatctttagaaaaaagacaaaagaccatcctaataaactgactaagcagctgtcagcagcgggtatggtggaagagttattcgaagaaggttcagcaatgctatcagagaggttaggcaatgactcaagtggtcggagaacatcatcaagcttgtttacatgtgccatctgccaggtggaccttgaaccaagtgaaggtatatcagtccatgctggttcaatcttctcttccagctcctctaagccatgggaaggccctttcctttgttccgattgccgcgacaagaaggatgccatggaaggtaaacgaccaagtggcgtcaaggttctatgatatcacttgcaatcagccaccattgtagctcccgcaaactcaccttctttttcaattgtgagcgctctttgtgttacaatttttctctctctcgattttaggcgattcggataattttaggttgcattttaatttattatgtgaggaactagccgccgtgttgtaagtagtattggggaaaggaaaatgtgaagcgagtgaatagagtatgtctccatttttctcttgtaggtgcatgaactaactgcagcttgcctctcgcgagttgagtatgatagtccgattattctttatttgtaacttatcggtgcctttattgctaatggaatatcctattcttgcgttct

SEQ ID NO: 51379 - DNA, 1243 bp, Oryza sativa
  unsure (1)..(1243): unsure at all n locations
  Clone ID: PAT_MRT4530_53777C.1
cgccgtntcttgaggccataatggtgatgccgccgcaatatacaccaggnacaatctgctcaatcatgtccttagcgcaatgccaagaggactctccagggaggagtggttgcatgcgctcccacgtgcgcttgtcgcagggtttgttaagactgacaaagaattccaacacaaaggccaaacatctggcacaactgccacattcgtgatcattgacggatggactatcaccgttgcttccgttggtgattcccggtgtattttggatgctcagggtggcgctgtttctttgcttactgtgtcccacagactagaagaaaatgtggaggagagggaacgtgtcactgcgagtggaggtgaagttggaaggcttagtgttgttggtggggcagagattggtccactgagatgctggccaggaggtttatgtctatcaagatccattggagatatcgatgttggagaatttatagttcctgttccctatgtcaagcaagtgaagttgtcgaatgctggagggaggcttattattgcatcagatggcatttgggatgccttgtcatcagaggcagctgcaaagtgttgcagaggtttgcctgctgagcttgctgctaagcaagttgttaaggaggcgctcaagacaagagggctaaaagatgatacgacctgcatcgttgttgacatgatcccacctgatcaaacaatacgtcatccatctccaccaaaaaagataaacagttgaagtctttaatctttagaaaaaagacaaaagaccatgctaataaactgactaagcagctgtcagcagcgggtatggtgcgaagaagttttcggaagaatggtcagcagtgctttcacaagaagtttggcaatgactcaagtggtcggagaacatcatcaagcttgtttacatgtgccatctgccaggtggaccttgaaccaagtgaaggtatatcagtccatgctggttcaatcttctcttccagctcctctaagccatgggaaggccctttcctttgttccgattgccgcgacaagaaggatgccatggaaggtattaggacactttgatcacgcgcactttggcctaacaaaaatgcctaagtccctaaaagaacgtgacaggccacacctgaaaatatgggctgcagacatattaggcctaggccaaaaaatatgccttcgacaccctttaaaggatgacgcatataacatgctcccgagtaatacatcttccgggtga

SEQ ID NO: 51380 - DNA, 430 bp, Oryza sativa
  Clone ID: PAT_MRT4530_53778C.1
tggaactgctattctgcggccaaaacagcctttgttttggcttattttttgtctgaatacaatgctcagatttccttcgaagtgttcctggatatgtatgacaggaactttcatatgtgtagaatgctttgtgttaaattaagtaagacactggacatgatgaatcatttggcccatggcatctcagatctgtgtgactcaggtctcaaatataacgcttctaaggttgaaatgctttgttcctgaagtttatgaatttgtgattatgcatatattatcttgcccttctttttctagtttaaaacttcatgtttacagtccatttgcagctgcaatagatttgctggaaaactaatagagcaacttgttttcccagattagccaagtttgatcagattgttcacgtgttatggctggacatcagtataat

SEQ ID NO: 51381 - DNA, 432 bp, Oryza sativa
  Clone ID: PAT_MRT4530_53779C.1
tcgttcaattaggaacgaagaaacccagggagagtgaggatggcaaggacacgcgttctacttctcgatgtcctcatcgatgacgaggtggtgctttggggggcggtcgggcgcgcgctggccaagacggacaataagagcaacgacatcgttaatggtccactgctgacctgcaagaacaaagacgagcgcacgctgatagtgggaccgaggacgaggtcaagaccgtgcagtgcgacatcgacgacgagcccggcggaaacaccgggcgggtcatggtgcacctacgctccggcatgtacagggagaaagttatgattacggaaaccaagaagggcatcttaccgaggggaaacagcatgggccggacctcaatcaaccacgagggcgcttgatcctacaacgcctagtctgccgccttcaccgtgcacg

SEQ ID NO: 51382 - DNA, 481 bp, Oryza sativa
  Clone ID: PAT_MRT4530_5377C.1
aaaaaaaaaaaaaaaaaaatcatagtataaaaaaagaaataaaaaaaaaaaaaaaagaaagaggatataaataataaatgaatctagtgcttccactgtttccgtgcgtttcgtatgcgatctggtgtgctcttttgattgaggggcttgtggcttttttttttggcctgcttttctgccccttcggggggggggggccccttttttttccccatctcattttttttgcgccccggccgcctttccccgccgggggtcttggcaatgcggttgtgtggccccttcttttgcttctgttgcgcggcgtcttctgcggtggggctgttgttttgtccgggcttgtgtttgtcttccttttgccgtgtttttgtcctctttgccgtgcttgttctctggcttctttggccttttcctttggttttttttgtctgtttttgccccggcccccccccttttttcgttgggggttctcttttggggg

SEQ ID NO: 51383 - DNA, 1545 bp, Oryza sativa
  Clone ID: PAT_MRT4530_53780C.1
atggccgccgccgccgccgccgcgagctactcatctacttcttggagagtccgacccggcctaaccccatttcgctcccctctccagccacacccgcagggacgactccagcggatagccatcttcgccacccgcatccgcatcgcaacaccctcggcggcgatgcagtcgtcctcaacgcggcacaggttgcgccccctccccccatttcgttactctgataggcttgaggcagtgaatcatgaccatgaaacaatacctgaaaggcttgcagtagtcactggtggaaacagagggattggcctagaagtgtgccgccagcttgccctccaaggtgtgacagtcattctgacagcaagagacgagaaaagggggaaagatgctgttgagtccctttgccatgaatctaacctctccaacataatcttccatcaacttgatatcctagatggtaacagtcgtgcctcattggcccgatacatcaacagtagatttggaaagcttgacatcttggtgaacaatgcaggtgttggaggggttgcagtagaccaggatggcctgagagctctcaacattgatcccagggtttggctatccggcaaagcagtcaatctgatccaatcagtaattgtacaaacatacgacgaggcagtaaaatgcctcaacaccaactattatggattgaaatggataacagaagctctcctgccgctactgaaacaatcgccgtcaggagcaagaattgttaacaccacctctcttcggtcagagttgaagagaattcccaatgagaagctccgcgacgagctgcgcaacatcgacatctgggacgaagcacggatagaagcgatgctgaacgagttcttgcttgacctgaagaacgaacggcttgaggaggcaggatggccaacaatgctgccggcttacagcatgtccaagaccgtcgtcaacctctacaccaggatcctggccaagaggcacccggagatgcgcatcaactgcgttcaccctggatttgtcaacacggagatcaactggaatacagggatcatccctcctgaagaaggcgcgagagaggcgctaccctacgacgaacaggaaaccaccaatttagcagtgcagtgcgcgatcatgtcgtcgacgcaggagaagcgaggcgagcagatggcgcgcgcgcgggaggcggcgcgcgagatcacgcccgaaggcaccgagcgcgcgcgcgtggtcggcgaggaggaggccggccccgagcaccaccgcgccggcatcctggaggcggcgcagcggggcgcctggtccctcgtgagcgccgtcggccgcacgctcggcgtcgtgagggacaccgccgcccagaccaagcccagcgagtacggcgacgcggcggaagcgaaggacaccaccgtggagaaggcaagggagacgaaggacgcatccaagcagcagaacgaggagctgaaggcgacggacagcgttgcaggcgagcgtggaggcgacgcggcaacaagcggacgcgggcaggtggcagggaaggaggaagactag

SEQ ID NO: 51384 - DNA, 447 bp, Oryza sativa
  unsure (1)..(447): unsure at all n locations
  Clone ID: PAT_MRT4530_53781C.1
agcagctataagcaaaattagatagtcccatcgatacactctttattgcattgcaaacagctactagtacaaatttagactgacgacaacagcagcaaattgctgcatccatcagatcaacacacttgttcacagcaaagcctagcacggttgtgaactcaagtagtactactagctaggggagtagtaattattgttgggtttgcaagcgaggcggcacgaacacacgatcgaacacgatctcatcgattcctgattcatgattgataaattgctgttgcagctggtgtaatctggatcaggcgagcgagggggcgatccaaacagggttcccggtgagcgaatggccgccagagatggccaacccatccgcctccccgtcggccagggagtagacgccgatggcgtgcggngcgatcaacttcaccttccttcgggccatgtaca

SEQ ID NO: 51385 - DNA, 1590 bp, Oryza sativa
  Clone ID: PAT_MRT4530_53782C.1
tattagctagcgagggatcgatcgagagcttctccttccgggcttccggccagccggcggggaatagctagaatcagaatggcggcggaggcggatgcacggaaggtgtgcgggttgccggagcgggtgcagctccatggggcgatgctggcgctgcagttcggctacgcggggttccatgtggtgtctcggtttgccctcaacatgggcatcagcaagctcgtcttccccgtctaccgcaacatcatcgccctcatcctcctcgtccccttcgcctatttcctcgagaagaaggatcggccgcagctgacgctgagcttcgtggtgcagttcttcctgctggcgctgtgcggcatcaccgccaaccagggcttctacctcctcggactcgacaacacctccccgaccttcgcctccgccatccagaactccgtcccggccatcaccttcgccatggccgccgcgctccgcatcgagcgcgtccgcctcgaccgccgcgacggcgtcgccaaggtgctcggcacgctggcctgcgtcgccggcgcctccgtcatcacgctctacaagggccctaccatcttcggtcccaagctgcagctgcaggcggtggcggaggtgccgttgagggcggcgatcgccggagaggggaagaactggacgctgggctgcgtgtacttgatcgggcactgcctgtcgtggtcgggatggctggtgctgcaggcgccggtgctgaagaagtacccggcgaggctgtcggtgacgtcatacacctgcttcttcggcgtcatccagttcctcatcatcgccgccttcatggagagggacgccgacgcctgggccttccactccggctccgagctcttcaccatcctttacgccggattcatcgcgtcgggggtggcgttcgcggtgcagatatggtgcatcgacagggggggcccggtgttcgtggcggtgtatcagcccgtccagaccctggtggtggccatcatggcctccctcaccctcggcgagagcttctacctcggcggcatcatcggcgccgtcttcatcatcgccggcctctacctcgtcctctggggcaagagccacgagcgtgctcgcctcgccaaggacgccgccgccattgccaccgaccgcgacgccgccccttgccggatcatcgccgccggcaagcagtcctcctccgtcacccagcccctcctgctgcctacctcctcctcctccgacaacgccgtctgaccgatcgatcggtctctttattaattacatgcgtgcatgcttcgagccatttgatcgatcgattagctgctagtactacagacttagcttgttgagaaccaaatgatgttgatgatttgcctttgcctatgatatcgatcgacattaaactagctagtagcttgcttgttttgctaggatttgttttgtttggatcatgcttgtgctttcttaatttgtaacgtcgcgagagattaattgctcaatgatgcttgtgctacattttgtataattaatgtacctacatgtgtgcttcattgtacctaaaaaaaaaaaaataaaaaaaaaaaaaaaaaaaacctcgtgccg

SEQ ID NO: 51386 - DNA, 2044 bp, Oryza sativa
  unsure (1)..(2044): unsure at all n locations
  Clone ID: PAT_MRT4530_53783C.1
gtgaagcgcaatgacgagctggcaacgatgcccacgttgggctgagcgcactgtcctcagggggttggcgcgcttccacccccacccgccgggcgtcttcccccgtccgctcccgacccggatcagcccataaccccccgaaacctcgaaaccctagatcgccatatggcctcctccgccgccgccgccttctaccgcgacagggaggacgcggcgccgccgtcgtccggccccgggggaggcggcgccatggcggcgtacgacccgagctacgtgccggactcggtgaagacgttcgtgtcgcacctctaccgccacatccgcgaccgcaacgtgtacgagacgcaccagatgtacgagggcgggttcacccgcctctccgaccgccacttccgcgacacgccgtggccgccggcggaggccgtggcggcgcactgcgacggcgaccacgtcttcctcctcctctaccgggagctctggttccgccacgcccacgcccgcgtccagggcctcaccccggcgcagcgcgccgagtcgtgggacaactactgctccctcttcagcgtcgtcctccagggcgtcgtcaacatgcagctccccaaccagtggctctgggacatggtcgacgagttcgtctaccagttccagagcttctgccagtaccgcgccaagctcaagaacaagacccacgaggagatcgccctcctcaagcagtacgaccaggcatggagtgtttatggggttcttaattacctgaaagcactggtggagaagtcaatgattggagagatcctggagagggagaaggtagggcttgagcagttcacggcaactgatgggtatgactatgagggcgggagcaatgtgttgaagatgctggggtactacagcatgattgggctgctcagggtgcattgccttcttggggattaccatactgggctcaagtgcttggcaccaatcgacataagccagcagggggtctacaccactgtgattgggagccacatttccgctatttatcactatgggtttgccagcctcatgatgcgcaggtatgctgatgctatacgtgaattcaacaaaattctgttgtatattctgaagtgtaagcagtaccaccagaagtccccccagtatgaccagctcctgaagaaaaatgagcagatgtatgcgctcttggcaatctgcctctcattgtgtccacagcacaagctcattgatgagaatgttggcacccagctgaaagaaaagtataatgacaaaatgacaaagatgcataggtatgatgatgaggcatatgctatttatgatgaactcttttcctatgcctgccccaagttcattactgcgtcgcctccagttctacgagagccatacacaaactacaaccaggatgcttatcgtcttcagttgaaactatttctttatgaagtgaaacaacaacagttgctctctggtattcgaagctatctcaagttgtattcaacgataacaattggtaaacttgccaaatacatggatgtggatgaggttacactaaggacaattcttatgacatacaagcacaaaatgcattcaatcgacagtgacggaaaggtcatatccagtgcagactttgacttctatattgatgaggacattattcatgttgttgaatccaagttaaccaagaaccatggtgattactttttgagacagattttgaagtttgaggagatgattacgcagctggataaagtacaatttgactgaacctgctatcatcagggctgaagctctcctttgagttacagtgggacgcgctgttggtgatggatagtaatgataaatttttgtgccatccttttttgatacattgttgacatgagttaaatcctcgctaaaaagtactctaggtgctaactatcgcatccacttgtcatggcatgttctggtttgaagaatgccaactttaaattgttcttgtctaaaaaaaaaaaaaaaaaaaaaaaaaaaaaaagttgcaaagttgtagctgtattcctaaaaaaanaaaaaaaaa

SEQ ID NO: 51387 - DNA, 3183 bp, Oryza sativa
  Clone ID: PAT_MRT4530_53784C.1
atggaggcggccgccgccttctcccctccccgcgtctcccccgacgcccgcgccatgttcgctaccctccccgcctcgccctccccccacctccgcctcgccgcccgcccccgcgctctctccgcttccgcccccaccaccgcggcggtggcggccaccaagcagcggttcttggcgccgccccgcccggaccccgcggcgccaggaggctgcggcggcggcggcgccagggacgtcgtcgcgatggtggtgccgttcctgagggggaccgcgtggcagcagccgccgccggacctggcctcgttcctgtacaagaacaggatcgtctacctcgggatgtgcctcgtgccgtcggtgacggagctcatgctcgccgagttcctctacctccagtacgacgacgccgagaagcccatctacctctacatcaactccaccggcacaaccaagaatggcgagaaattgggctatgagacagaagcttttgcaatatatgatgctatgaggtatgtcaaagttccaattttcaccttgtgtgttggcaatgcatggggagaagctgctttactcttggctgctggtgctaaagccgcgctctgctcttccctccccctcccccgagaggccgagagacccgcctgcctgcctccccctcgccggcggcgcgcccgccccgtcgccctcgcccgccgcgccggcatccactgtgtttccctcaccctcgatccgaagctcgcctcgggttcagcacccacacttcaccttggttctggggattttatccacggtgttaacacaattcttcgttacattgctcgtgttgcatctgttaccagtttctatggtcaggatgctattcaggcagcatatgttgatcaatggctcgactacgccccagtcattctttcaggatctgaatttgaagctgcttgctcatttctagatggatacctagcatcacgaacctttttggttagttatggcttgtcaattgctgacattgtagtatggtcaaatcttgcaggccaacgatgggaaagtctaaggaggtccaagaaatatcaaaaccttgttcgctggttcaacagcatagcagactattcagacacactagatgaagttgtctctgcttatgttggaaaaagggggataggaaagtctcctgcaccaagcctgaaagagaaattacctgattcaaagcagaatatctcaatccctgaagtagatctcccaggtgcaaaagttggggaggtctgcgttcgctttgcccccgagcctagtgggtatcttcacattggtcatgcaaaggctggacttttgaacaagtactttgctgagagatataaagggcgcctgatagttcgatttgatgacacaaacccttcgaaagaaagcaatgaatttgttgagaacgtcctgaaggatgtagaaacactgggaataaaatatgatatagttacttacacatcagattattttccgcagttaatggaaatggctgaaaatttgattaagcaagggaaggcttatgttgatgatacaccaaaggagcaaatgaggagtgagagaatggatggtgtggaatctaaatgtagaaataatactgttcaggataatttgtcattgtggaaagagatgatcaatggaactgaaaggggtatgcagtgttgtgtacggggtaaacttgacatgcaggaccctaacaaatcacttcgagatcctgtatactaccgttgcaacactgatccccatcatcgtattggctcaaaatacaaggtctatccaacttatgactttgcttgtccatttgtcgacgcattggaaggagtgactcatgctctccgctcaagtgaataccatgatcggaatgcacagtactatcgtatccttcaagaaatggggttaaggagggtagaaatctatgagttcagcaggttgaatatggtttacacggttcttagcaaacgcaagcttctctggtttgtacaaaacaaaaaggtggaggactggactgatccacgcttccccactgtacaaggcatagtacgtcgtggcttgaaggttgaagctttggtacaatttatacttgagcagggtgcctctaaaaatctaaatcttatggagtgggataaactctggacaatcaacaagaagataattgatccagtgtgtggaaggcatactgccgttctgaaagaccagcgtgtgcttttcactcttactaatggtccagaggaaccattcatccgagtcttacccaggcacaagaaatacgaaggtgctggaaagaaggctacaaccttcacaaacaaaatttggttggagagtgctgatgcatcagttattagcatcggtgaggaagttactctgatggactggggaaatgctatcatcaaagaaatcaagacacagaatggaattataactgaactgcttggggaactccatcttgagggcttccggacatagatgatctggttcctctctcattggtggaatttgattacctgattagcaagaagaagcttgaggaggatgagaacttccttgacaacctgaacccatgcactcggaaagaaaccctggccctaggagacgcaaatatgaggaacctcctgcgtggggaggtcatacagcttgagaggaaaggctattacaggtgcgatgccccttttgtcagatcctcgaagccggtggttttgttcgctatccctgatggtcgacagcaggccagtttgaactaggcggcatgattctgatgagcttctcaagtcgttgagttgtcagagattcctgaatgctctactgaaacactcccatctcatactgtaatgtcgcttatgtgtcatgggtgatttgcgctaagttttggtgcacagtttaatgtttctcatgctccatgctccagttattaagaagacacaacatttcttagatggcaacgtgttagcttggcgatatcatactgccagatacaagcatctgaattttttgaagactaatatctgatattgcttggcatctgaattttttgaagactaataccgctctgggaaactgagttgaggacatttctggtccatattgcttgacatgcccttttatgtttccagttgttgattataactggtgaatctaaaaaaaaaaaaaaaaaaaaaaaaaaaaaagggggccctcgtgccg

SEQ ID NO: 51388 - DNA, 321 bp, Oryza sativa
  Clone ID: PAT_MRT4530_53785C.1
atggagatcgtcagccgtggcgatgagattgatggcgacaacgaggacattgcggaggtgacgacctcgctcgcgattagaccggtgatggtggaacgtgaccggaagacatggccgggggtggccgaaggcgttcgaagagattggaggggtagcgtcatggacgcccaacgcacgcggtggtcgtggatctgcggcggcagggaggctagcggcggaaggacgaaaccgcgagcgtggcgcggcgcggcggacgtggagggccgagacgacgggatcgtggacggtgaacatgagggctgcgactgtgatgcgtgctaa

SEQ ID NO: 51389 - DNA, 519 bp, Oryza sativa
  Clone ID: PAT_MRT4530_53786C.1
atggcgtgcgacgtcgacggatttggagcggtggcggggagcgccgaagctgcagttggggcggaagtggagcgggcgggaaatgggcctcgacttttatggcgcgctgctctggcaccgcttgttggccccgtggtcctcaaggtggcgaccatcgccaacggtggcgtcggctgcgaaagctcatcgtacctccggtcgtacgcacactacttcagcgccccccgctgccgccgcaacagctcccgtcctctgactgctgtcgctgctccggccctcactagccacagcgagggagtcccgccactcgtcgtggtcatctcgtgccccatcgccgctgctctcgtcgtcgtcccgccgcaccgctatggtgaagccggccgggaacgaagggccgaagccattcgaatggggaagaggagggcggtggttcagacaagcgaagcacgacgacttagagaccaagacctcaacggcgcgtggcctagctcggaggcagcgggcaaagctggagtttag

SEQ ID NO: 51390 - DNA, 339 bp, Oryza sativa
  Clone ID: PAT_MRT4530_53787C.1
cccacgcgtccgcccacgcgtccgcccacgcgttcgcggacgcgtgggcgcgatcgcacagccggagaccgaatcggataagctcgccggagtaatcgccgtcgatgccaccgccggcggcggcgattcttttggccgcggccgttctcgcttcggcggcggcggcacttgctgacccttcttccccttcgttcccgacgccgtggccagggcggtttcacgcggggctttttcgaacctgacccatactaggtgcggccggaagcttctgatgaccgacctttactactactggtctggggggcgcgacctttaacctcttgtcggtcaatttttcgg

SEQ ID NO: 51391 - DNA, 233 bp, Oryza sativa
  Clone ID: PAT_MRT4530_53788C.1
gccgcgtactgtctcgccctggtcagcctcatagctagtttgatctcaccgttgctgtgtcgcatgcaacgagatagtgatcaaaacaaatgatgaataatgaaatgttttggatgcatacagaaagatagggagaaaagtgctagacactaagaactctactagaatgggaaatgagacaatgctagtagtacaacaaaggtaggactctatgctgtgtaaagaagaaatgg

SEQ ID NO: 51392 - DNA, 495 bp, Oryza sativa
  Clone ID: PAT_MRT4530_53789C.1
atggaccccgacgcggcgcttcgcgtggagctcgtcggggtggtggccgtgggggcggtcgtcgtcgtgctcgccgccggcgcgttccccggcggccggtggaggaagagggcagcggcgcgggtggacgacgtggagcgcgcgctcggggccgccacgctcatgacgtacgagcaggcggcggcggcggcggccaagaaggcgtcgtcgtcgtcgcgggcggcggcggcggctgaggagcaaggggaggacaggtgcgcgtactgccagtcggagtacgccggcgccgacgaggtgcgggtggtgcagtgcggccacttcttccacgcgggatgcatcgaccgctggctccgcaagcaccggcggtgcccgctgtgccgcggcgggctgtcgccgttgccgccgcttcccaagcctggctgccgcccaatgccgccgcggacgagccgccccgccgcttcctccgccaccgccaccgcctccgccgccggttaa

SEQ ID NO: 51393 - DNA, 2175 bp, Oryza sativa
  Clone ID: PAT_MRT4530_5378C.1
atggctagcttagagaataatgccattgaagatatagccaaactaaatgacggttcggattgtatcacaagcgaaagtgaaatagcattatcacctaagaccgaatcacaaatcggtcatgtggatgttgggaaagatgatgacaatgtcttgcgggatagtagtgaaatagaatcgaaagtagctatgcatacataccaaaggccgtatcctgaacacgtagattcagtcccatacccgcaaggatttgaggtgcccaacttcacaaaattcacaggtgaggatgctagaacaacaatggagcatatcggccaatttgttgatcaatgtggtaaggtcggtagtaatgatttgcttaagttaaagttgtttcctctttctttgtcaaactttgcatctacatggtatagtttacttgctcctaattcaatttctacatggtcacaaatggagcatgagtttcatggttatttcaaatatgcaagcttgatggagcaaagaccgattgatacttcatcggtcacttgtgaaactatttcggttacatctatgcctaagaccggaattgttagtgatcctctccctgttagttctattgatgttggcaaaaagaaagggaaaagtgttattattggggatcctcggcccaagaataggatcaaaaatgcgaaggccgaagatcataaagttgcaaaggatgagtcatctagtttccaaaagaccaaaaaaccgaagctcacttttgacatgcttatggctaagtacaagaaaggattagccggtcaacgatttcataatcaaactagtgattcaaaaagaccaagatcatctcgtaggaagagatttggtcaaacaccaaagcaatcggagccatcaactaaaccaactccatacaaacctccgattgtgatgccatggtatccatatccaatgtcaccgtttggttatccttttatgtattacatgccgtggatgcatcaaccgcctatgctgtatcatcaaggatggaagcaatcacctaggacagtaccaagtcattctaactcaagacaagaccgtttcccacaaaggaatcggtccggtggatcaaaggtgaaaaaggtgaagaaggtgtgggtgagaaaagaagccaaagctccggaagtcgtcactattaaggaggaatctcaagatgttcaagtacctactggagatgcggcgaaaaatatacaagcggagaagactgaagccgacgccgttgctgtcgacatcggcagtctgaccgagacagttggccggtctaactgccagactacggccgttctgaccgaccctcctgatcagtctgaccgacggcttgtgaccggtctaaccgggcccagaggccggtctgatcagggggcattggagaagagtgggaaaattgagagcaacattggagcttccatttcgaccaaaaatatgaagaatcattgcttagctcctggaaaacaaccacagccgaagtggataccttctggcttatctcgctctcaaaagaggaggctacagcgtcttcgggccataggtcaaaaagaaaaggaggccgaagatgtggagaacaagatatgcaataatttaaagcctcgaatagcacctaggcaagtgtggagacctaaagaagtaaaagttaagagaccgtcaagaaagccgattttgcttggggggcaagacattaatatgctcatgaaggaatcaagagagatgaacagcgatggatacgacatcacatctttgagccgccgtttgtcagatgctaaggcaagatatttgaatgatcctacacttaaggttgatcgaaagattcggcggcaagcgctcaaatattatatcgccgaaaaacagatggagtattacttagataatgatcaatctaaagttgctaggagagtagtacatgaagggatttgtaaaattcatcaatcggcccggcattggttcgtgctagttgcaatggattacttcactaagtgggccaaagccgtgccgctcaagaatattacttgtatggagcaagacgacttgtcggttgaagattacaagaccttgatgggaaacaattttgaagacgtcattgacaagcgtttgaagactttgaaggagatgaagacacttcaagatggtgttttcggagagcgattaatgggaaatacatga

SEQ ID NO: 51394 - DNA, 465 bp, Oryza sativa
  Clone ID: PAT_MRT4530_53790C.1
atggcgcctgctttctgctctgtgtactgcatagcacccatgatagcgtactggatgaacacatccaggagtaatctgggagataggccacagctggatttccgcaagattgccacgaggattcagaaccaggaggtggtgacgaggagcgacgaagccggtgcacatctggagggagcacgaggagatcagagcacgtggactcgcagatacgtcgtcgatgacctcgactcgacctcccctttggtcgccctcatggtagaactgtccgcacggtccgccacctgctgcacgccgggatctgctctccctgtcgctggcgagaccgcgtcgtcgcgcgctctcgatgcagagctggagctcgtcgtcacccgcgccgccaccccggaggctggccaggattgcgccctcgacgagagagaggaagacgacatacgcgttgtcgccgccgccgccatcaactag

SEQ ID NO: 51395 - DNA, 274 bp, Oryza sativa
  unsure (1)..(274): unsure at all n locations
  Clone ID: PAT_MRT4530_53791C.1
ctctcctcctcggccgcgcctcctgccaacgtccccacctcgcgcagattgggggaagtggattcggcagggaggcatgcccacatggaggtcgtcgacgcggaggagctcgcggccctcgacggcgaggccggaggtagtgctatcgagcgggtggacggtcgccgcggctaccgcagctcgcgtcatcggcggatccggtgccgttgaccaccctccccccagnctcgctccacctgtcngcgtcgttactnccggcgctcttcctccgtcc

SEQ ID NO: 51396 - DNA, 364 bp, Oryza sativa
  Clone ID: PAT_MRT4530_53792C.1
aatgagaactgaaccaaatctatttccgagttttatattcgcaagtacgaggtctatgaacagagcattcatgccctcgccgaaaccaacgaacactgtctacttccgtaacacggtctacagaaaagcatgccatgacgaacccaaaatcaataactatccaatgattcatacaatgggataccactgattcggaatattggaatgatgctacgctcttaccattgaatgtccaacctgcctatggaaaatgcctacctggggccactccttaagaagatctataagaccgtgttgggagaaattagctcaaattcaaccgagaacaagaatgttgagggagcacccagaaattatctaaaaa

SEQ ID NO: 51397 - DNA, 915 bp, Oryza sativa
  Clone ID: PAT_MRT4530_53793C.1
ttttttttttttttttttgcaaaactaagattaacaggtagtatgttcagttcagcccatcttcaacctcccgaagatgactaccatcttcaacctctcgaagatagtcccgtgcctaggaggttgactatcatccgggagcgacccaacctcgaagaactggaacccgaagacgacagcaatggcagcggcagctagatacgacacgccctctgcggcgccgaggagtccgaacggcccggccgggaggcccgaccctgtgcgcaccttcgtcgtcagcgaccacccaatcagcgccgccaccacaaggtagctaacaccctccgctgcgccgagagcgccaccggggcccggtgggaggccgcagcccgttgtcttgagcgtgtagagggaccaggcaacgaccgagctagacgccagcccggccgcaccggcggcgagctcgagggtgctgttgccaccgctaggctcggccttgcacgtggtcgtgagccgtctggtgccgcgtcggagaatatcgcggctaggagttgatgtcgtggagacgccggcggtgtataatcggtcagaccagcagagttctagtctgtgacgaatttcatcgggtcttgggtttcctagcatgggaaggtataatcggagttctaatatgatatctaccccaaatttgacgtggaagaccaacccctggcagtggcggtaggctcccgaggccggcggctccccgacggaggtggtagcggtggtggcggcggctaccatgcactccccttcgcctctcctcccgtgggcggcggtgctccctttcgccagatccatccccgacgtcttcacctgcgagtcctccaccacagccatcccgacgacgctcaaggggaaggaggaggtgacccaagggccctgtcgccgccgcat

SEQ ID NO: 51398 - DNA, 234 bp, Oryza sativa
  Clone ID: PAT_MRT4530_53794C.1
gggaaaaaaatcaaaagagtattccacttttttcacagttcttcaataattaaattcatcaccattaaaaaacccaagaacacgaacaagaagaagaataataagaagaaggaagtgttcacttcagcaaagcaatcgcctcccacctgacctcacgtgctcgacagtagggacctcctcccaggcgtcattgatcacggggtcatctgccaccctcccgaaccttggcaccct

SEQ ID NO: 51399 - DNA, 345 bp, Oryza sativa
  Clone ID: PAT_MRT4530_53795C.1
atgaccaacgacaaaggggcaggagcagcagaggggagccctagtaccccgccaccaacacgctggccagcgcgccacaggagtagcctcctgcgcgccagtgagatccaccgtcgacactacccggcccctgtcagaacaaggcaagagcccgctatcgtcaccggggaaccttgtcgctggaccaccgcggtcaccaccagccaatcttctccctacacgaaaaggcaagccaccatggcaatatttcctcgttgctgccatcctagctcgctgcggtggacaccgacggtcactctggcggtggtgaggcaggtggagggggattgggagtggcggcggtaa

SEQ ID NO: 51400 - DNA, 350 bp, Oryza sativa
  Clone ID: PAT_MRT4530_53796C.1
attggcccccctttactggggtcccctttcttccctaaaaattcaaattttttcccccaatttaatttttttcttcaaagggaaattcgaacctaaacccttaaccttcttttaagggccctttaccaactcgggaccggggggtgcccccggaatttccggcccggtccttgggggggacccatttttcctttttgggggggtttttaaaactgggggaaattatgggaaaaggttttccctggggaaaatttttttcccgctaaaattccacaaaaaattcaacccggaaacttaaaggttaaacccgggggggccttttgggggggcctccccccttttatttgggg

SEQ ID NO: 51401 - DNA, 258 bp, Oryza sativa
  Clone ID: PAT_MRT4530_53797C.1
atggcagcaacgaggaaatattgccatggtggcttgccttttcgtgtagggagaagattggctggtggtgaccgcggtggtccagcgacaaggttccccggtgacgatagcgggctcttgcctggcaaaatggtggcagcgacagagttggtggagtcctggggatcggggccgggtagtgtcgacggtggatctcactggcgcgcaggaggctactcctgtggcgcgctggccagcgtgttggtggcggggtactag

SEQ ID NO: 51402 - DNA, 198 bp, Oryza sativa
  Clone ID: PAT_MRT4530_53798C.1
atgcggcaacagggcacgggcggcgtctggacggacgcggcgacaactgagcgcggcgaccgaccgagcgtggctctgatggttgtgcgggagacatttcccgtattgctagctatgattgtcgctttgcaagcactgattgttcttctgcatccttttcagtcggaggtgatgcaacaggaggctctgatcctggag

SEQ ID NO: 51403 - DNA, 1171 bp, Oryza sativa
  Clone ID: PAT_MRT4530_53799C.1
atggtggagctagtcatggtggtgacaacccccatagttgaggaagagaggcaagatgagagggaatggacgaaggaagaagattgggagaaaaaaaataaggacaattatattgaatcatggacaatgtggcaagcgagtggaaatcgtctagtcgccaccgcccatagtgcgtcgttgctacaaacctccgctggtgccattttcatccgcttcaaattaagcagcggttgttaccatatcaaattgtttgaagacatgcagatcaaaaggccaactgaatgtagatatattcagattgggctcacaaacatgaaatttcagcagcaaatccgaaagataaccgaggttctagcgagcatagttgccaaaaatcacacggatcaaaatgaaagctactccgtagctagccaggaggtatcttggcaaaagccatacatggatttattgaagcatcaaacatgcagacagagagttggtgagaaggcaaaacaccagataatattgtgtctgattgagtttgcagattgcagctgtccttcttgctaccggcgaggtgttaaggtaaggagcttgtggtacttcctccactggcttcttggcatcgcaatttgcgcaactggcattacaaatgtctacattggccttcacacataccatgagagaaccacaaagagtgtgaagctttggaccggcctccttactttcgagctctccttactgcttttcttctacctcttgatagacagatggagctacatgatgaagcaaggaaatgcccctatcgagcagctaagacctaccgacaatcgcaaaacctatccgacaactcttcggaaggaattgggtatggtgcaagagtgagatgcccaaatgaaaagacaacttaggagggcaggtgctgtaaagtttgctgagaaagatggtaatgctgctcaatggtttggtaatttgttggtttgagaggtgtgccttgaacactgtacagttctatactttattgagattgaagaggattatggagccctctggtgctgtatcttgtgctgtgcatttaagattttgttacaaaccaccggtttgtactgtttgtgaaaaagtacagatatgcaacatttatatttctcaggcaagaaattattgtctactactatttaaaaaaaaaaaaaaa

SEQ ID NO: 51404 - DNA, 336 bp, Oryza sativa
  unsure (1)..(336): unsure at all n locations
  Clone ID: PAT_MRT4530_5379C.1
ggaagccagtcctgtggacacaagcaaaagcccaatatacttaccccgtagaaaatgttaggcgattttcttagggcttctataagaatttgtgggacacacatatttcccgaaacactttttaccatgcaccctacggcggcatcagcatccgcggcantatagctatgtgatccgtgcaccatttgatctcccgtggcttgagagatggcacttcagtttcttcattcgatagacaaggcgtggatcggcttnttctttttttgcacggacccaggatgaggatgaagctatttggaaatgattttataattccgatcttnccaaatggtcttg

SEQ ID NO: 51405 - DNA, 396 bp, Oryza sativa
  Clone ID: PAT_MRT4530_537C.1
atgggcagcacgaccgccgggaatcagccgatacgtggggcacgggcatggtacgcgcgaccgcggcaaggcaagcgactagtggacaaggacaccccgcaaccccgcgtcgctggagtggacgtcggattcgacagcgctactcgcgtccggcgtgtggagcgccgcgccgcgtcttctggctgctcgtcgtcgcgcgccggggagaaacaaagcatggcggtgcccgtcattcccgtgaccatgacgactacatatttgggccaaaattttgctagaagcatttcctgggttatgtatggctatgaacgctaccggatgaatgtattccgcagtgagttcccatcagcgaagatctcacgcaaaatcttcttgtccatcctgtctaggcactga

SEQ ID NO: 51406 - DNA, 535 bp, Oryza sativa
  Clone ID: PAT_MRT4530_53800C.1
ggtttggccggtcaccgaactaactataaccttgcaagttcggcaagcatgttaactctggtgataatctgaatttgatctccatcataagatactgctgtgtgaatcttggagaatctgtggatgcacttttgggatcaggtcattttttatcttcgctaaagctgtatatgcaccactgtgttattattatatggtcgattcaaccaaatcccagactccagacttattattccaaaaagaatggcaaagaaaggttagggattatattatctaaggtctggttatttcggatattatctgacattcattacaagtcattatcagggacccacatttctttttcgtggaatctattttcctatactgttggataagagttgtactgaacggagaattactactggctgtgagcaacctgaaggttccggtctccttgctttatgacagtgagaattaacttttgcccaatacttgttggttgttaccgtggcgacgtccatttcgttggatgaagatgcaaactgatggagct

SEQ ID NO: 51407 - DNA, 313 bp, Oryza sativa
  unsure (1)..(313): unsure at all n locations
  Clone ID: PAT_MRT4530_53801C.1
agaaagaccatcttgagggatgtccttagcattgagaactgatattataagaaacttttacagtacattaggaggaacgcaattagcttgcaatgttatttatttattaatttagagtattctttatccagcattgccaacttatagaggattccgccacattataaacgtctnaggtagctcttgtattggaggggagtgaatgcaccgaactcatgtgcctttgttatgctggggcctgtgagccctcttttcttaggatggcatttgcattgagctagaaccttaatttgggagacccccggaaatggga

SEQ ID NO: 51408 - DNA, 882 bp, Oryza sativa
  Clone ID: PAT_MRT4530_53802C.1
atggcggcgactcatccaggcagcagcagggagcatgcttcagcggcggcaatgactctctgcttggcaaggtggcagggaggaggcaacgatcacagtggttcgacgtggagaggaggcaatggcgaggaggagacatcagcagcggctcgatgtggggcggaggcggtagcggtggctactatgctaggcggtggggatgaagccatgacggtggcggctcagcgccaagaggaggtgacggcgttagcggcggtggcgagctggaggtcgcagcgccacgaggtgaaggccgatggtgagcaggcggcaggggaggagaaccaagctgcgggggtcctggagcacatcccgggaccgggggagcctggaaactctatagttcaggaacgtgtcatcatttctaacccaatgaacaccctattgtttttacatatctacaccggtggcaaggcgtcatcagccggcggtgatgtctccgccgccgtggtctcttccatggccacgtcccggggcggcgagaggtcgcaccggcacatcgggcaagtccggtgcgagtgcagccacatgtcgatgcactccacatggaacaggtgcttgcacgacggcatctcccgcaccatctcgccggcgtgcagctcctccaggcacatcgagcatggctcgccgttcccggcctcaaggtcgccgccgccgctgtcgccctacgccaccagacgcgccatgggagcctacatggtgacccatggtaagaacctgtggtcacaacatgctttccaggttactgcggatctggagtctgggctatatgaatgcgagtgcaaaacatggatcacacaagccgcccacatgttgcgagggtgctctgccatctccaggtag

SEQ ID NO: 51409 - DNA, 561 bp, Oryza sativa
  unsure (1)..(561): unsure at all n locations
  Clone ID: PAT_MRT4530_53803C.1
ttnttttttttttttttttttttttttttttttttgtttttttttcttttttttttttctttttttttttttttttttttttttttggggggattaaaaaaggcaggagggggataaaaacccccggccattaattaaggtacacaaaagcggggcccatttggggtttttttaatttatcggattacaaaatttcgggagcccggggggggaccactggggaatcagggcccaggaattaaaaaaggggggcctacaaaaaaaggcccccccccaacaaaaaaggggggcctcggaaattggggggccctattgggggggggggcccccaattttttaacaagaaagggggccttctggggccctagtttcttcccaggccggggttcccggggggccttttcggaattttcacccccaagggcttattacccggggggagggggtggccccaaagggggcggggcccaggggaaaccttggggggcccgggccccccggcgaagggggggatgaacccccccggggtaacgggggcccccggcctggacccttcccccc

SEQ ID NO: 51410 - DNA, 762 bp, Oryza sativa
  Clone ID: PAT_MRT4530_53804C.1
gcctgacagtgcagcatctaaaaagctaacttaaacagtgtgctttatctctggcattgatggaaagtttcaagatttgtgcagtcaatgatggcatcataaattgcgtggatatgttctttgacatgaaaaaagcttgatgttaagtacagaagaaccagggcaagtcactaactttatggtattggagttggagtagaagatcagcagctccatcatcgacgatggcctgatccacaaagatggattttggtggtgatacttccagggaggtaaaatattgtgctatttgacacatgctgatggggtgcaatgtcgtctgtgccaaatggacctaaaaatattgttagctagcctgacttaactgcaggcaagaccaagaggaaatctggttactacttggtccagatacgacctgatttgattaatcttatgagttgccgacttggaatttcactttgaggagattttagttcagaatctaatcatgcaattggcttaggcgacatgaacattttttatctgtttatcttttatttgtagctgaactgtcgtggtgcacacttcctaaagtttgaaacttactatctttgttaccaaactaatctatgtttatatgattatgtcctacaaattgctgagtctgttacatcattgttacatctgttttcaaactatttgctaatatgaatactatgacaggatagtgcctttgcttaactatttgtttgggtaaatctgaaaatactaaaccggttctca

SEQ ID NO: 51411 - DNA, 1695 bp, Oryza sativa
  Clone ID: PAT_MRT4530_53805C.1
atgactaaggtcttcaccaggtctctcctaatgtacttcaacaagatcgtcaggagcctcagacccctcgtccattcgccgccgccgcagccggcggcggcagacaacatcgtccggtggccgtcggacgacgagctgctgccggcgccggacaccaccacgacgagcgtcgtcaccaccgtgtgcaaggtggagggcggcctgctgatgtcgccgtccactttcccgtacttcatgctcgtcgccctggaggcaggaggtggcggcggcggcctcctccgcggcctcctgctcctgctgctctacccggcgctgcgcctgctcggccatgaccgggcgatcagggtcatggccatggtgagcttcgccggcgtgaggaaggacgggttccggctgggcagctcgacgttgcccaggctgctcctggaggacgtgagcgccgaggtgttcgaggctgcggtgcggcggcggcggtgcgtgtgcgtgagcggcatgccgagggagatggtggagccgttcctgagggagtacctcggcgtcgacgccgtcgtcgcgccggaggtgagggcgttcggcgggtactacctcggtctcatggagtccgacggcgaggtgctccggaggctggacatggaggaggtgatcggaggtggggagaaggaggagacgtgcggcgacggcgatggccgcgtcgtcgtcggcattggtggacgtgggagatcgttcagtcggatctttcaaaagtattgcaaggggtacagaagggatcgggaggtgtacgtggcaaccaagtcggcgcggcggcggtggcgccccctccatccccggcgctacgcgaagcctctcatcttccacgacggccgcactgcattccggccgacggcggccgcgacgctcgccatgttcatgtggctgccgctgggcgcacccctcgccatcctccgcaccgccgtcttcctcctcctccccttctccatctccgtgccactcctcgccgccctaggcatgcacagccgccgcatctcctcctcctcgttgccgccggcggcggcggcggcgcacaaccttttcgtctgcaaccaccgctccctggtcgacccgctctacgtctccgccgccaccggccgcaccgacctctccgccgccacctacagcatcagccgcctctccgagatcctggcgcccatccgcaccttccgcctcacccgcgaccgcgccaccgaccgtgccgccatgcaggcccacctgtccctccccggcggcggcggcggcgggctggtggtgtgccccgagggcaccacctgccgggagccgttcctgctgcggttcagcccgctgttcacggagctcggcgccgacgtgcagcccgtggcgctgcactcggcggtgtccatgttccacggcacgacggcgggggggtggaagctgctcgacccgctctacctgctcatgaaccccacgccggcctacgtcgtgcagctcctggatcccgtcgccgtcggaggcgagggcggcggcggcggaccggagttggcgaacgaggtgcagcggcggatcgcggaggcgctggggtacacgcgcacggcgctgacgaggagggacaagtacctcgccctcaccggcaacgatggcggcgtcgatcggcgccgcgtcgccggcagccaccaccatcaagagggagtacttaatggttaa

SEQ ID NO: 51412 - DNA, 471 bp, Oryza sativa
  Clone ID: PAT_MRT4530_53806C.1
cgagccggccgggaaccggtacaacctctctcccttaatctaatatctgtgtcgtagtccccgcatctacactcgccatgggcaagattaagatcggaatcaacggttctctcaaggatcgggaggctcgtggccagtgtggccctccagagcgaggatgtagagctcgtcaccggcaacgaccccttcatcaccaccgactacatgacctacatggtcaagtacaataccgtgcacggctcaatggaagcacagggacgtcaagatcaaggactccaagactctgatattgggcgagaagccggtcagcggtttcggtatcaggaaccctgacgagattccgcgcactgaggctcgggctgagaactggcgaggaggcaccggatgtattcactgacaaggagaaggctgctgctcacttgaagggtggtgccaagtaagatgtcatcttagacccgagcaaagatgctc

SEQ ID NO: 51413 - DNA, 223 bp, Oryza sativa
  Clone ID: PAT_MRT4530_53807C.1
catcgccgtcctcagtagcaaagagggtcctcccaaatctaggatccctaagcttggtgggtctgaagttaatgagagcaatatcgtgcccatcactttggacaagttgacacccgaacagaagaaggatcttgaggtgataaaggtgctgcagatggttctcaaggagttcaaggtgatggttctcaaagagctcaaggtgatggttcttagggatttcaag

SEQ ID NO: 51414 - DNA, 507 bp, Oryza sativa
  Clone ID: PAT_MRT4530_53808C.1
ccgggctgcaggaattcggcacgaggccatctcccaatcttcgtcctcttcctctccgtctcgccacctcgccggtgtccgccggtgccggtggtggtgcggcatggaggaggggagctcgtctgcggcggaggagctggcgcgggggtgggtcatactcgatcgcgtcgcgtgcgtggacgacgaggaagatccgcgggaggtcgccctcaacgtcgccgagccgccgcgtctgtcgacgctcaccgtgccggccaagttccacgctctcccgagcaacccggacgagctaccgtacgtcgccgccgccgaccccttcggcctcctcgtccacaccgcggcgagcccctcctgccgcctcaacctcgacgacgacccacccggtagcttcgccgtgcttcgcgaattcctccccgtcggggccagcaacccccacgaggccaccggaatcgccgagcgtgtcccggagcgagtcggcggatccgtgccccacatctccaacctcaa

SEQ ID NO: 51415 - DNA, 351 bp, Oryza sativa
  Clone ID: PAT_MRT4530_53809C.1
atggctgagaaactaccagcatcgccgtcctcagctagcaaagagggtcctcccaaatctaggatccctaagcttggtgggtctgaagttaatgagagcaatatcgtgcccatcactttggacaagttgacacccgaacagaagaaggatcttgagactcgccaaggaacaatcgttcagaggtacaagatgaaactagttgctgatgttgctgggacaagttcttccaaggatggagaaatacaacaggtctcagatagtacgactcaatcaggtgataaaggtgctgcagatggttctcaaggagttcaaggtgatggttctcaaagagctcaaggtgatggttcttag

SEQ ID NO: 51416 - DNA, 720 bp, Oryza sativa
  Clone ID: PAT_MRT4530_5380C.1
atggcatcagagtatactactggtgatcaccgggctcatttcaaccgctgcataccttggctacctaccattagtgctcagatcttcttgctcagacaccaggttggatatcgtcatattgactgttctccacagtatggtaatcagaaagaggtccacggtccagttcgtgccaagaaaggtactaaattgagtgtggaaaattacctcaagcctgatatcccagctacatggcaagcaatggagaagttgtatgattcaggcaaagctcgtgccattggcgtgagcaatttttcatgcaagaagctggaggacttgctcaatgttgctcgcgtgcctccagcggtcaaccaggtggagtgccatccggtttggcagcaaggcaagctccggaagctctgccaatccaagggcgttcatctttctgcatatgcaccattaggttcacccggatcaccagggaacgatggaccaaacgttctgagccatcctactgtgatttccattgccaagaagctgcagaaaagtcctgctcaggttgctcttcgctggggtattcagatgggacagagcgtgctcccaaagagcgacaatgaggtgtggacaagggagaacattgacatatttgactggtgcatccctgaagaactgatggcaaagttctacgagattcaacaggcatggctccatattttgacaaattacttgctgaaagcctga

SEQ ID NO: 51417 - DNA, 405 bp, Oryza sativa
  Clone ID: PAT_MRT4530_53810C.1
atgggagaaaacctcgatgaagacttatataaagagcccttccccgcaaaattaaaaacggacgtggcgattagccgatcattagcgatgaaacagaagcggaggccggagggaactgaggagaggagacgaagcggctgcggcatcgggacttcggtgatacgtaacgacgcggacgcctggacgggagggcccttaaaatttgagggcctgttcggtcgcacgggccacacgggcccccgggacgcccctgctttgctggcagtagtagtcgcggagcttccaacgttgcgtgcgtttcaactgggttttggggatgtgatgaatcgggagctagagaaaccccaacgatgtgctatgagcctagcacgcgactgtcatgctcgaagtaaccgagatgtgcac

SEQ ID NO: 51418 - DNA, 289 bp, Oryza sativa
  Clone ID: PAT_MRT4530_53811C.1
tggctgtgccggtgccggcgttggtggtggagcgggagcgggaggcggtgctggtggaggcggtggcctagcatgcagagcaacaggaggtggatgcgcatatcttgaaggaggttcacaatgaagagatgctctctgaagttgtgctggtggcagataaagaaaacagcaatggctgacatctggggtactcggatgtccttccttgctgtaagaaatacttgttaataaccaagataataattaaagctctgccagaattacaatgcaacatacagaagctgcataa

SEQ ID NO: 51419 - DNA, 882 bp, Oryza sativa
  Clone ID: PAT_MRT4530_53812C.1
atgtcctcgagctccaccttccccgacgctagatccctctctacatctccctctcatgtcaatacggcaaaggccttagggaggaactccctcgagcttgttgacagtgtcctcggtgcttcggtagaaagagagacgagaggacagattaggagaggatccagccgaggcacttggcagcagcggtgcggggagggggcagcggctgcgtcggtgctcgtgcatgggaggggcagcggaggtgccgggagccctaccttgggagcacggaggggcagcaacagtggcgctcgtgcaggggagggggcggcgcttggcgctagtggcgcagggagtgggcggcagggagcagatccggtcagcggtagcagcgcgggggagcaggacctcgggagcagtggttctgccgctggccggccacacccttccatgggagaacgaaggggtggtggcggcactcgtgtgtgggagggggcggcgctcggcagtaacagtgcaggggagtgggcagcggggagcaaatccggctcggcggcagcggcacggggagccggacctcgggagcaaggcggttctactgccagctggccgcgcccttccttgggaacacggatccgaaggtggctatctacccactacttccaaagcgactcgatcgtccctcccttgtcgacctccgcatgcccttccatcgttaggcttccattgattgcaggtgacaagtcacgtcgtaatggatttggcgccggcgagtcgcacgggcgtgcaagctcgtccacggcgggtggtgggcgcgttcatggtgggttggcgggcaggtctggcgtgggcgcattcatggagatgacgacagaggcaagaatttggatttggatttggtaa

SEQ ID NO: 51420 - DNA, 232 bp, Oryza sativa
  Clone ID: PAT_MRT4530_53813C.1
gggggccagtccctttcaaaattttaacttaaaaatgggcccctgtttccccgtttgttccatttgataaagtttcccaaagggaaatagacatcctgaacaaaagcccgggggttaaatttaaatggcccagggacctaactttttaaatcatcatcgccagctgggggggcagcggttgcaaaggggtcagggggggggccggggccagaccctgggtggtcagggaacc

SEQ ID NO: 51421 - DNA, 586 bp, Oryza sativa
  Clone ID: PAT_MRT4530_53814C.1
gcacgcgtcccctaaactccccttctcgtcctctactcggtctcgatggataagaggcagatgcgtccgttctctctctctctctatctctttctcctcctcttctcccctcctccccttggctctctctctccaccccctccgcgcaggagagcgcaaccctagctacagcgcatgcaggggcttgtcgtctcctctctttcttcttctcttctcccctcggctctctcgcaccctcccctcgcctttctcgcgcgtcggcggcggcaccctccataggaagggaggcgggggcggcagcggcggcgtctgcgcctcccctccgccagatttggccgggagcggcggcccggcaggaggggaggcggggacggagggaaggcgacggcccggcggcggcgaacgggagcagaagcaaaaatcttgtgttcatgttgggttcttgaagtgaaagtgaaattgctcgatgcatcggctcgatgcgtaatggatttgtgtgaattttattccttttctttttctggggttatcagtcggtgtagttcttatatttgaaagtgatgattgctcgattgggcttttaatc

SEQ ID NO: 51422 - DNA, 2445 bp, Oryza sativa
  Clone ID: PAT_MRT4530_53815C.1
ttcccaccctgcctctctccgcaccggtctcgcacccacctgagaccggccgccgtttctcggtgtctctctctctctctctctgcccgctccggcgagagggggtgtcacacacacgtacgtacgggaggatcagggcaacaagtgaccgcgcgcgtgcgtgctctccccccgaccgatgacaacgatgcgcgcctccgccgcgctgctgctggtggcggcggcggtcctcgccgccgtgcgcgccgaggacccgtaccacttcttcgattggaaggtgacgtacgggaccaggacgattatggacgtggcccagaaggtgatgctcatcaacgacatgttccccggcccaaccatcaactgcagctccaacaacaacatcgtcgtcaacgtcttcaaccagctcgaccatcccctcctcttcaactggcacgggatccaacagaggaagaactcgtggatggacggaatgccggggacgaattgcccgatccagccgggcacaaactggacgtacaaatggcagcccaaggaccagatcgggaccttcttctacttccccagcatgggcatgcagcgcgcggccggcggctacgggatcatcaccgtgcacagccggctgctcatcccggtgcccttcgacgagccggccggcgactacccggtcctcgtcggcgactggtacaccaaggaccacaccgtgctggcgaagaacctcgacgccggcaagagcatcggccggccggcgggtctcgtcatcaacggcaagaacgagaaggacgcgtccaacccgcccatgtacaccatggaggccggcaaggtgtaccggttccgcgtctgcaacgtggggatcaagacgtcgctcaacgtgcgcatccagggccacagcctcaagctcgtggagatggagggctcgcacaccgtgcagaacagctacgactcgctggacgtgcatgtcgcccagtgcgtctccttcctcgtcaccgccgaccagaagcccggcgactacctcctcgtggcctccacccgcttcttgaaggagtacagcgccatcaccgccatcgtccggtacaacgggtcgaacacgccggcgtcgcccaagctgccggaggggccgagcgggtgggcgtggtccatcaaccagtggaggtcgttccgctggaacctgacggcgagcgcggcgcggcccaacccgcaggggtcctaccactacgggcagatcaacatcacgcgcaccatcaagccctgcaccagcaaggggaaggtggacggcaaggagcggttcgccctcaacggcgtgtcgcacgtcgacgacgcccagacgccgctcaagctcgccgagtacttcaacgcctcctccggggtgttcgagtacaacctcatcggcgacgtgccgccggccaccaccgtcccgcagaagctcgcgcccaacgtcatctccgccgagttccgcaccttcatcgaggtcgtcttcgagaaccccgagaagagcatcgactccttccacatcaacggctacgccttcttcgccgccggcatggggccggggatatggacgccggagtgcaggaagacgtacaacctgctggacacggtgagccggcacacgatccaggtgtacccgaggtcgtggacggcggtgatgctgacgttcgacaacgcggggatgtggaacatcaggtccaacatgtgggagaggtactacctcggggcgcagttgtacgtcagcgtggtatcgccggcgaggtcgctccgggacgagtacaacatgccggagatagccctccgctgcggcaaggtcgtcggcctgccgatgccgccgtcctacctccccgcataataaagcagaacccccaaccaagctcaggaacccatccatggtgctagctgctgctgtacacacaaacaacgcaggcgacagggagagcacgagtttttccgtttccttttttcgtacgtccccccgtttattcttcttgctcggtttactttctctttcgaggaataaaattgggcttcaagatcgacggcttcaattacctgatgtcgtcacaccggaacgaggatgaaaacacagcaaggagaaagattggccagcgagatgcatggaatgcatacaaaagctcgagatgccctctcgaatcgtcgttgcatgtagtaggagtattgattctacctgatcgtcaattaatttatcccccagttaataagtccttcaaaccaattgattgttctgtgtctataatatatatgtacatgagtatctcctctcgattgttttgatgtaatttttggttatttctatcctcgattttgttcggtacttcacctttgtaagctgttgttccgatagatgaaaatcacagtagtatatgagacatatggatgtgcaattcagtgtaccttttgaattcgatcagatttgcattttcagtgccatgcagc

SEQ ID NO: 51423 - DNA, 6588 bp, Oryza sativa
  Clone ID: PAT_MRT4530_53816C.1
atggcggcgtcgacgtccacggaggtggtagtgccggcgggtgcgggtgcgggggcgggggcggggaggtggaggcgggatgcgctggcgcacacgctggggtcgcggaggctgcccgagggcgtggcggacgccggggagagggtgcccgacgccgtcgcgccgggggtcatgcccttcatccgcgccgccgacaaggtcgagcaggatagcccgcgcgtcgccttcctctgtcgccgatatgcgtacaacaaagtccaaagaatggatccatcatcagtccaacgtggagttcgacagttcaaaacatacatgtcagttaagctagatcagatattagataagtcttctataaagaacaattacgatgtagataatcttgctagtcatttacaaccttacaaatgggagcaggacgacacccaagttatgggcaatgatgcaaaggaaattcaacgattttataagagttattgtgctgagctgagtaggatatcagaaaagagaaactttgaggaagtggctagacgttaccaagtggcatctgctctttatgaagtgttaagagatgtgacaaacaacaaagttgattctgaggtgatgaagattgcgaaagtgattgaggagaagagtgttcatttcaagaactacaagtacaacattattcccctgaactttccaggttcatctgaggcaattgtggaactccatgagataaaaggtgctattgatgcgctaaatagcatcgatggccttccaatgccacacatgtctactatgcacacggatgggaataaatccatacgagatttacttgactggctttcactagcatttggatttcagaaatcaaatgtggaaaatcaaagagaaaacttggttttgctgctcgcaaatattggcacaaggactgctgggcaagaccatcctctggttgacactgtgaataaattatggaaaaagatacttcagaactaccaatcatggtgtagctatttgcatgttagttcaagtatcatgaacgttgagacagtcacacaaaataaacaacaattaatgctccttcacattgggttgtatcttcttatctggggtgaggcctcgaatgttcgttttatgcctgagtgcctgtgctacatatttcaccatatggcaagacagttgcacaaaatgatcgaagaaaataattttcaatcaccaccaggatttgaagaagagggatcatttctgaaaactgccattgaacctatctacaaggttttgcagaaagagaagctcttgtgcttacaaactgttattcttattttaaccaaaaaaaggaagcacataagagtaaaggtgtctgtgagttttcgttttcttccacgcaggtcagagaaatgttttgcaaggcttaactggccatgggaccttacagcggacttcttttatcaagggcgcactacatcaacaaagcccaaaacgaattttgttgaagtccgcacatttctacacatatttagaagttttaatcgaatgtggatgtttttcatactagcttttcaggcaatgctaatagtatcatggagttcgtctggatctctttctgcgcttgctgatgcaactgttttcagaagtgttttaagtgtctttataacagctgctctactcaacttcattaaagtaactctggacatagtgcttactttccaagcatgggggaatatggactggatacaaatagtcagatatctattaaaattcttcgtggccattgcttggataataattcttccattagcatattctagttccatcagatacccatctggtgctggaaaactcctgaatagttggaatatcatggaacgctcaaactggcgtgtaattggtcttattatgtggtggattcagccaagattatatgttgcacgtggtatgcatgaagatatattgtccattattaagtatgtcttcttttgggtcgttttgctcacctgcaagcttgcatttagtttttatgttgagatatccccaattattggtccgacaaagttccttcttaaccaaggagttgggaactatgagtggcatgaaatcttccctttcctgccacacaaccttggtgtcgtcattactatatgggccccaatcgtcatggtgtacttcatggatatacaaatatggtatgctattttttcaactgcatttgggggtgtttcaggtgcccttagtcatgttggtgagatacgtacccttggcatgttaagagccagattcaaatcaatgccagaagctttcaataaaagccatgcaacagcgcatagagagtatatgttccatttaaaatgcagcagccttcatggtaggatggagaaggcacactgctttgaatctctcaaccagggatcggatcccattgacacaccctttactggttttttgacaaaagaatgctgtggtgggcctcgagggaaaggattaggattttgtttgggccaccacagacactcttccttccccagccaggccaacctgtcccagtttaatgcacattggttctttcggcacaaccaaactgtgttttttgccaaagaaattaagctgtgtgagaatgaaagtgtaggtggctacaatgcatacaggggccatcttttagggggaaaatctcctctgacgtactgccctctgatgtgggtcgctgacatatgggcccgcgagctaggggcccacatgtcagccactcaaagtcagagggcatattccactatgccattcactgtagggttaaccctcaacttttattttgatagagaaagggacatactgatggctccgtcattttcaagtagtttttctgttactccatggcctcctttccttgttgccaagatgctcatggtctcaggaatataccaggtacccacagctcttcacatggccatgacttctaaagaaggggattaccatgagttgattgaaaaaatcagactagaccaagctagattcaatgctgtcatagaatgctacgagtccttggttcttattcttaagaatcttctgctagacaataatgatcagaaaatcgtcgatgccattgataaaacagtgcttgatagtgtggaaaataatacacttttggaagattttcatatggcagagattggcaaagtcagcaacacgctggcaaaattattgcatctactgagcaatgaatctactgatggtactgctgagagaaaaatcattaatgctctgcaagattttatggaaattactacacgggatttcatgaaagatggacagggtattttgaaagatgagaatgagagaaagcagaggttcacacatttagacatggatatgataaaggaatcgttttggaaggagaagtttgtccggttgcacttattgttgactatgaaggattccgcaatggatgtaccaacaaatttggatgctcggcgtaggatcaccttctttgcaaactcactgttcatgaaaatgccaaaagcacctcaagttcatgatatgatttcatttagtgttttgactccatattataatgaggaagtgctctattcttctcatgaactgaataagaagaatgaagatggcatttcaattttgttctatctacaaaagatttatccagatgaatggaagaactttctagaacgcattggagttgacccagaaaatgaagaggcagtaaaagggtacatggatgatgtccgtatctgggcatcttaccgtggtcaaacacttgccagaactgtgagaggaatgatgtactacagacgagctcttgaactacaatgctatgaggatatgacaaatgctcaagctgatttagacggagaggaatctgcaaggtccaaggccattgctgatataaaattcacttatgttgtttcctgccaactctatggcatgcataaggcatcaaaggattcccgtgaaaaaggtctttatgaaaacatcttaaatctcatgttaacgtatccagcattgcgtattgcttacattgatgagaaagaagtgccattaccaaatggtaaaatggagaaacaatattactcagttcttgtgaaaggcaatgatgaggaaatttaccggataaggctcccaggtaaaccaacagatattggcgagggaaagcctaataatcaaaatcacgctataatcttcactagaggagaagcgcttcaagcaattgacatgaaccaggataattaccttgaggaagcatttaaaatgagaaatctactggaagagttccttattaaacacggaaagtctgaaccaacaatattgggtgttcgcgaacatatctttactgggagtgtttcatcccttgcgtggtttatgtcaaaccaagagactagtttcgttaccattggacaacgtgttcttgcgaacactctcaaggtacgattccattatggtcaccctgatgttttcgatagaatctttcacctcacaaggggtggcataagcaaggcatcaaaggttatcaaccttagcgaggatatctttgcaggattcaattcaaccctgcggcaaggaaatgttactcatcatgaatatatacagctgggtaaaggacgtgatgttggaatgaatcaaatatccaactttgaggccaaggtggcaaacggaaatggtgaacaaacactctgtcgagatatttatcgactagggcacagatttgatttctacaggatgttgtctctatacttcactacagttggtttctacttcaatagtatggtggctgttcttacagtgtatgtatttttatacgggaggttatatcttgttttgagtggcctagagaagtcaattctccaggatccacaaattaagaacatcaagccctttgaaaatgcacttgcaactcaatctattttccaacttggaatgttgctcgtcctccctatgatgatagaggttggcttggagaaaggatttggcagagccttgggagagtttgtaataatgcaacttcaattagcttctgttttcttcactttccatcttggaacgaagactcactactatggaagaacaatacttcatggtggtgcaaaatatagaggtacaggccgggggtttgttgtgcgccatgcaaagtttgctgagaattaccggatgtattcccggagccactttgtgaaagcactggagctactcattcttttggttgtctatctagcttatggcatttcgtacaggagctcaagtttgtatctatatgtcacaatttcaatatggttccttgttttctgttggctgtttgcaccttttgtcttcaatccatcatgctttgagtggcacaagactgttgatgactggactgactggtggcattggatgagcaatagaggaggtattggcctggcaccagagcaaagttgggaggcttggtggataagtgaacatgaccacctgaggaatggtacaatacgtagcctgctgttggagttcgtcctctcccttcgcttcttgatataccaatatggtattgtttatcatttacacatagtgcatgggaacagaagcttcatggtgtatgcactatcatggctggttatagctatagttcttgtatcacttaaggtcgtctcaatggggagagagaagtttattaccaattttcaacttgtattccgtatcctcaagggcattgtctttattgtcctcatcagcttggtggtcatattatttgttgttttcaatctgactgtctctgatgttggtgccagtattttggcattcatccctactggctggtttattcttcagattgcacagctctgtggaccattgttccggagattggtgacggagccgctctgcgccctgttctgttcatgttgcaccgggggcaccgcatgcaaggggcgttgctgcgccaggtttaggctgaggagccgggatgtgctccgcaagatcgggccatgggactccatccaggagatggcgaggatgtacgagtacaccatggggatcctcatcttcttccccatcgccgtcctgtcgtggttccccttcgtctccgagtttcagactcggctgctcttcaaccaggccttcagccgggggctgcagatctccaggatcctcaccggccagaatggtttgactagtacaatccgatgtaacttttcctggcaccgatatggcggttctgggatttatttgtttctggccttagtttccctagttaccctggtgttcctgttgggtattatgatcccacaggtgccgtataataatgctgtgaattatggacctaatgggtatggaggaagggaccaaaacaacaaacccagtacacctatgagatctcacctgctaacaatgacgcccaagattctcactattggtattgctgatgaacattttggtgctgtcgtacgacgtgccggaaggaacattacagagatcattcaggctagtggtgccaggatcaagatatctgatagggataactggaacatcagaagctattcaggcagcagagtctatgataatgcacagggtgtcagccagttccgagaggtgataaaatctcgtgaagagacgaggggcattatcatctga

SEQ ID NO: 51424 - DNA, 1089 bp, Oryza sativa
  Clone ID: PAT_MRT4530_53817C.1
tccacaacaatctttctaaactacagccaaagactttcaatggtcaactcagttctctcctccttacctacttactatatgagctctctcaagctgccaaagaaagtaattttgcacattgaccgtgccagaagacactgcctgtggaggaaaaatactgatttggaaactaaaactcactccttagctgcatgggatctagtgtgcaagccaaagaaaaaaggaggattgggtataatcaacctggagattcaaaacacagatctacttatcaaacatttggacaagtttttcaacaagaaagaaatgccttgggttcaactcatctggaacaggcattataatgagtcagacaagccaccacacgctcataaagaaaagggctatgaggatatttcagtatagagcttcatgatggcatctgactttcatcagaattttcatctccctctctccaaccaagcaatgcaagaatggggaattttaagtgaaagattgcaaaacctatagatcaccaacgagcctgacatctggtcatatttatggaactcagatcattaccatcccaacaaagtctactcaatgttttttgaacaccatcaagttgccagacccctctcaattatctggaaaagcaaatgcacaatgaagctaaaagtgtttctttggctcatgctaatgaatcgactcaacacaaaagaaatgctacataaaaagaatttcaacattcaaggtggaataaactgcttgatgtgcaactccctgaccgaagagagcatggctcacttgttcttctcctgcccatttgcgcaacaatgctggcagcacattggcatcaactggaattcagccttggaatttatgaacatgatcacctcaacctagaactcctttcatcactttttcttctttgaagttttatcaattggttgctggaacatctggtgcagatggaatgatctcatttttaacaatatcgctctcagctttaccaaatggaaggttgactttctgagggattttgccttgcatatgcacagagcaaaagagatggacaaacccaagtggcaatcatggctaaacactttt

SEQ ID NO: 51425 - DNA, 282 bp, Oryza sativa
  Clone ID: PAT_MRT4530_53818C.1
ccccccccaaaagaaaaactaattcatttattttttccccaaattttagggggagcgagcccgaaacaggtaaaactaatatcgataaggacccaaagcttgggcaaaagaccaattatttgggggaaatttgcactggaaaaccccccgaccatagtattttagctttgcttcaataaaataggggcccctacttggattcaaaaaaaaaaaaaaatgttaataaaggggggggcccccacattgcaaaaccaaaaacgggggggggcccccgtttgcccc

SEQ ID NO: 51426 - DNA, 180 bp, Oryza sativa
  Clone ID: PAT_MRT4530_53819C.1
atgaagaaacaaacgactaacactgtcatcgtcttccctagccgaaacaagaaacaaaagagaaaggaagatgggcgccgattctctggtgaccaaacagcggcaagagttcggttaaagtttgcacttaacgactgtcaacaacaccgcaacacttatcctttacttgtccctgagtaa

SEQ ID NO: 51427 - DNA, 1053 bp, Oryza sativa
  Clone ID: PAT_MRT4530_5381C.1
atgggccggtcagaccggttcctgggagtttctccaggttttcataccacgactagcaatattgattttaattattattcatcacctgttaatactgttagtcatgctacttcacatatccctgatgcctataatgatgttgctagagggtatcctcccgatactagacaaggccaatataatcatattgcgctgcaacaaccaccccttaggccaccgaatacaccaccagatccacataggcctaaaaatatggaggagttgcttagtgacattatcagggctacatttggggttgaagcgaaggatcgtgctagggagaaccaaaagccatatcctgatttttatgacgctgtcccatatcctcctaattataaaattcctgaatttaccaagtttagtggtgaggataataggaccacatatgagcatgtagatcaattcttagcgcaatgtggtagggctagtagtatggatacatataatgatggaatagccgaaccaagtggtggttcggattgtgttgatagcttagagaatagcatcattgaagatatagccgaactagatgatggttcggattgcatcacaagtgaaagtgaaatagcattatcacctaagaccgaatcacaaatcggtcatgtggatgttggaaaagataataacaatgtcttgcgggatagtactgaaataggatccaaagtagctatgcatacatatcaaaggccgtatcctgaacacgtagattcggtcccatacccgcaaggatttgaggtgcccaacttcacaaaattcacaggtgaggatgctagaataacaatggagcatatcggccaatttattgatcaatgtggtaaggccggtagtaatgatttgcttaagttaaaattgtttcccctttctttgtcaaactttgcatctacatggtatagtttacttgctcctaattcaatttctacatggttacaaatggagcatgagtttcatggttatttcaaagatacaagcttgatggaacaaagaccgattgatacttcatcggtcacttgttaa

SEQ ID NO: 51428 - DNA, 416 bp, Oryza sativa
  Clone ID: PAT_MRT4530_53820C.1
cacccgcagaaggacgccgtcgccgggaggatgcgcgagccgttgctgtcaccaagaccccggaaaacatcaacctaacccgcggtgagtaccctagagcctggaagaccacatgcatgcatccctttgagtacatccagtctatagcacgacatgcaccaccacccgaaaacttcctctgctcggactcgccgctggcgctactccgatgtctgctgtctgagaaattgtacaaactctgcagagtttaaactaatcgattagccgtgctcgcggtcatgagcggcgtgtggatatctattgagtgtagagttgtgtttattcttctaaatgctgaaatttaccttcaaattgtgatgagatttgagaatgatctccttgctgccatggaaggcaatgaggtgcatatttataca

SEQ ID NO: 51429 - DNA, 1336 bp, Oryza sativa
  Clone ID: PAT_MRT4530_53821C.1
atgtgcattaaacccctgtccaggaccagccagggcatccttgacggcagcgacgaaaccaacttcttcgagacatcttcaactgaaatgaacttcaactctggtgtgggggaaaagagagcaagactgagtactacccactgtactcagcaagtcataccggaagaggagggttcgccctcgtccccagcaagcaacgggcagcccccctttcgtgccgcggtgaatccggaagccgatcaaccggacacctcggccgacccaactccatcacgcccaccctcgcctggggctgacgtcatcagggggggcgccgacaagcgggccccactcggcagcggctcaagggaccggtccaccgcaagggaccggtccaccgccggtccacgggaccgacggcccagatcggccccgagccgattgggcggtggcgatagaagcggccgccgggcgcggctcggctccaaagccggccggccggccatagctagcggcggctgcatgcggtcgccggcgacggcaaccggcggcgcgggaggctgcagcggcggccgaaggcgacggcgcacggccgaagcggtggggaacaagatgggagggattagagggagaggggtggtccatggcgggcggaaaccatggccgaaggcggcggtagtggtgctcaccggcgcgaggtggacagtgatctccggcgatggattgcgatgggcgaggggttgacgaggcggacctcggccgcgcgaacccgatgacgacggcggcgtggtgcggcggtggccctagcgactgctagaggcggccggaacggtggagatggcgatggcgagtgggcgcacggtgcgggcgcggtggagagctcgggagcggtcgatggaaaaaggaaaaaggaggagaatacggggatagtttatatgggctcgggaggggtggacgaggccgggaggcggtcggatttctcgccgacgtgggggaggtgggagagagtgtggggagaggattcgaatcgaatcctaccccttctctggtgcgcgcgacggcgggaaacggcgggacgtgggcggcgacgtggggaaaggcgtgcggcgcggagtgggcgcgggaggagcggggaaagcggcggcggcgcggcggtttcggcggcggttgccaccgccggctggaggtggaagaaggggccgataggtgggccccacctgtcggtgacccggagaaaggagggagggagtgggccggcccagcaaggaggaagggcgcgggaagaagtgggccgacggcccaacaagaggaaaaagggaggaaaaaggaagaaaaacaagcctgctgtatgccggaa

SEQ ID NO: 51430 - DNA, 751 bp, Oryza sativa
  Clone ID: PAT_MRT4530_53822C.1
gcacgaggggtccaccctctacaaggcgcctctagctaattaagcatgccaccgtcacgtcgccggaataactcctcactcttggagtcatcgaccatcatcacggccaacttgatcatggcctcctcctcctacctcctatccaagatcactccgcgtgccgcaccgtcgtccatgcagtctgcagctccggcgccggccagaccaccacagccgccgccagccgctgtgacggcccgggcatggcctacggcggtgtccgcacgctccgtcgagcctgcggtcacccgcaggaaggtgctcgtggcgcctgacgatggggaggacggcaaggtggacgaacgcgccgacacgttcatcaggaagttcaaggagaggacgcagtcggacatagcgcgtatggaagccgaggcggccgcagcagtcgccgctgctcggccgccgccggcactcggtgccgccaacttggctggaactgcgtacggatactatgggacgggatactattgttaagtaagactctgcgctgcttggatacgtcgttagtttgctactacaagtaagattgaaagtaccgccaactatgtatatatactgaacgcatgcttgctttgacctgtaaattaatttgaatttcaataattctggcagctgtcgatgggtagctagtttcagggtttaacattgtaaatactacttatgcatgatgattgtaagataactaatgtgctaatgcattttagttttggat

SEQ ID NO: 51431 - DNA, 652 bp, Oryza sativa
  Clone ID: PAT_MRT4530_53823C.1
atggcatttaaggaccggttcgcgggatgccctggaagaacttatcgtacttaccacaagcccgacgtacccaggcgagggtgggcgtgatggagttgggtcggccggggtgtccggttgatcggcttccggattcaccgcacgggaacgtgtcgtggggctgtgtcttgtgggtacagttgtacacctctgatcagagtaaaactattcgaatagccgtgcccgcggttatgggcggtcaaccagattcaccgtgattagtttcaccctagttagcttttggaactggttagttcaggtggtggtttgggcctgttgcaacgtggtgtaacgttggacagtgattggttaatatggattaaatactacaactgttttactgctttcaactactgctttgaaatgccggctttatgcaaaagaacctttagcctcccttggatatatcttgcatcatacctcctcttccggtatgacttgctgagtaccgtgggtagtactcagtcttgctcttttccccctcaccagaattgaagtccttctcagttgaagatgtctcgaagaggttggtttcgtcgctgccgtcaagcttagaaattctggttcgtgaatttctgggcgtgacaagttggtatcagagccgaccttgacc

SEQ ID NO: 51432 - DNA, 610 bp, Oryza sativa
  Clone ID: PAT_MRT4530_53824C.1
tctctagccgacgtacccaggcgagggtgggcgtgatggagttgggtcggccagggtgtccggttgatcggcttccggattcactgcggcactaaaggggggttgcctgttgcctgctggggacgggggcgaaccctaaggtgtggtgcgatcggttagagggagttatgcgaagggtcctgtcacggcctctttccggtatgtcgtgttcaggtggttggttgggcctgttgcaacgtggtgtagcgttggacagtgactggttaatattgcttaattactacaactgtttttactgttttcaactactggttttaaatgcctgctttatgcaaatgaaccccgtagcctcctttggttatgttctgcatcatacctcctccggtatgacttgctgagtacagtgggtagtactcagtcttgctctcttttcccccacactagagttgaagttcttctcagttggagccgtctcagagaggttggttccgtcgttgccgtcaagcttagaaattctggttcgtgaatttctggtcgtgacattctctccttccacccgcgccgtcgagctccactctgcgcgcgacgacgtgggagcagagccggccca

SEQ ID NO: 51433 - DNA, 478 bp, Oryza sativa
  Clone ID: PAT_MRT4530_53825C.1
ccacgcgtccgcggctgttctcctgccacgtcaccggaatcggatcgctagtggctagtgcacctggatgttgacgaccttgccgccggaggccaccttggggatggtgaggtagagcacgccgtccctcacctccgccgcgatccgctccacctccacgttctccggcagctccacccgcgtcctgtacctcccgaagctcgccgccggccacgcctccccctcgtcctcaccgtcagccgcctccacggcctccccatccttggccgccttctcggcgaccaccaccagcttccggtcctgcacgctcaccgtcacgtcctccctcgtcatgcccggcatgtcgtaccgcaccaggtacgccccggcgcgctccttgatctcccacggcgtccgcccacgcctgtaggcggctgtggcggcgccgtgtcgacggcgcgggcagctgccggcgccgccgtcacgcggggccggacga

SEQ ID NO: 51434 - DNA, 1920 bp, Oryza sativa
  Clone ID: PAT_MRT4530_53826C.1
attccagggaaaatcctttttcctttttctttttctttttccctctttttcctcattttggttaaaatgggccgtcggcccatttcccctatgtttcctccccctcctccttgatgggcgggcgcaagcccgaggcccagccagacagccggccgcccgcctccctcatccaggggtcgcagaaaggtggggcccacgtgtcggtccagtctccctcctcccgcagatcccgctcgagcagccgccaccgcaactgacgccacgcccacgtctccgccttcctcggcccacgtcgtccacgcccgtgcgtgcgccgtgtctcccgcgccctttcccctctctctcccacttgcgcccgcgcccgagatggccgggattcgaaattcgaatcccgcctctctctcctccccactcccccgcgtcggccggcgaatcccgccgttcccggccacgtccggtacctcggccgccccttccccgtcgaggttcgccgccggaacacccgtctcctcgcgctccggtgggtttaacctctaccgccgccttcggccatggattccggtcgccgtggtctatctccctctctctaacccctctcttctccttccttagggcacgccggagctcgtccgccggtcgccgtcgcctcccgtggcttgccgtcgccgttcgccatcatcttcctccgcgccggccaccctcggtgaggcacctcctctcccctccttccccgcttccccgtgcgtcgccgccgcccgcgctcgccgtcgctttgggtcgttgccgccgtccgctgccgccgctttcgcgtcgcctccgccgccggatgccgtcgccggcgacgtgacgcgcacgcgccgccgccgctagcccgggtcggccgatcggctttgatgccgatccgagcccgggggctgccgccgccgccgccgtccgatctacccttgggtagatcggggccgtcgatccggcccagccgcctctctctctctttgagtcactgacccgtgggtcccgcatgtcggcgccgccccaccccttgctgacgtcagcccacaagccagcgtgggcaacggctgggcttgtagtgtagcttttctctagccgacgtacccaggcgagggtgggcgtgatggagttgggtcggccggggtgttcggttgatcggcttccggattcaccgcggcacgaaaggggggctgcccgttgcttgctggggacgggggcgaaccctaaggtgtggtgcgatcggttagagggggttatgcgaagggtcctgtcacggcctctttccggtatgtcgtgttcaggtggtggtttgggcctgttgcaacgtggtgtaacgttggacagtgattggttaatatggattaattactacaactgttttactgctttcaactactgctttgaaatgccggctttatgcaaaagaacctttaacctcccttggatatatcctgcatcatacctcctcttccggtatgacttgctgagtacagtgggtagtactcagtcttgctctcttttcccccacaccagagttgaagtccttctcagttgaagatgtctcgaagaggttggtttggtcgctgccgtcaagcttagaaattctggttcgtgaatttctgggcgtgacagccttctgctacggcaccgccgccctcccccctccagtcgaatggagggagagggaggggagggaagggccacgccgtcgccccccccccccccaccagtgggatttgggaggcaagggggttaaatttccccaagcagaggtgggctacggcaaatcgttaatgacatccttgcattgggaacgtccacgacagtctaagattggatggtatgatggcaccgtctcagaaataaggggggcaacattaatactagggacttcgattaggtaatgctcct

SEQ ID NO: 51435 - DNA, 762 bp, Oryza sativa
  Clone ID: PAT_MRT4530_53827C.1
atggcgattaaggaccggttcgcgggatgccctggaagaacttatcgtacttaccacaagcccgacgtacccaggcgagggtgggcgtgatggagttgggtcggccggggtgtccggttgatcggcttccggattcaccgcggcacgagaggggggctgcccgttgcctgctggggacgggggcgaaccctaaggtgtggtgcgatcggttagagggggttatgcgaagggtcctgtcacggcctctttccggtatgtcgtgttcaggtggttggttgggcctgttgcaacgtggtgtagcgttggacagtgattggttaatattgattaattactacaactgttttactgctttcaactactgcttttaaatgctagctttatgcaaaagaacctttagcctcccttggatatatcctgcatcataccttctcttccggtatgacttgctgagtacagtgggtagtactcagtcttgctctcttttcccccaccccagagttgaagttcttctcagttggagatgtctcgaagaagttggtttcgtcgctgccgtcaagcttagaaattctggttcgtgaatttctgggcgtgacacgacgtcaccatctccgcgccgcccgctcgatcgatcgccatggaggagaaggggatggggaagcagcggtgggagaagatgctcctccaggccgccttcgcccgtacagcccatgagggagatcaagatcgcacatgtgtggcctagcttgcccacaggcccat

SEQ ID NO: 51436 - DNA, 372 bp, Oryza sativa
  Clone ID: PAT_MRT4530_53828C.1
gagacaaccccccgggaaggttggaattaattttttgaggggaaatttacattaacaggtggtcccagcccaaccaaaaatacataattggttggtccataaggatgggctggatgacatgcattattttatttaagaaaaaccatttgctaaaagggagcccacttggctttatctactatatacgggaccaggtccctggctgcattggagggtggggggggttcatccttgggcacatttttggggaatcccaagacgcttttttggggggccaaacaaaaaccggggggcccggctgggttttggattggcacgaattttggtcacttcctcggagaatttttgaagggtggggccgcccttggggaa

SEQ ID NO: 51437 - DNA, 457 bp, Oryza sativa
  unsure (1)..(457): unsure at all n locations
  Clone ID: PAT_MRT4530_53829C.1
cggaacgngtcngnctcgccctctctgctgcctctgcncggtgaagggcggcgcgatgaagcgcacgatggacgcgcggtgggcgcacatcgtgtacgcgttgttggtgccggaggcgttcttccgcgaccccgacggccgcgacggcgtcgcctctcgctctctccgccgccctctcgctatctccgcggccacgctgctttctctgcccggcgaggggcggcgctatgaagcacacgacgaacgcgcgcgtcgccgccacgtcatcttcaccgttgtcgccacctccctctattccgccggctctccctatttcacctccgttgccgtctcctctggtgtcaccgtcgccgccgccgccgcttgcctcatccgccacatctcccagcgaggagcccgggaccaccaggtccggcgaccccgtcctccttacaggcggatccagaaacccggatga

SEQ ID NO: 51438 - DNA, 606 bp, Oryza sativa
  Clone ID: PAT_MRT4530_5382C.1
atgggtgattatacagccgattacacaggaatcggctatatgcaaaacctagctaacggtatgaccggtcatgacactggtctaaccgcatcctatgccgttcagaccgtacctaccatagccggtcagaccgtccatagccggtcagaccgtgccctatttagccagatcggacctcctgtggccggtctgaccgcaccactgatcaccggtcagacagggccatgggccggtcagaccggtttcctgggagtttctccaggtttttataccacgactagcagtactgattttaattattattcatcacctgttaatactgttagtcatactattccacgtatccctaatgcctacaatgatattaataggggatatcctcccgatactaggtatggccaatataacaatattgtgccgcaacaaccaccttttaggccaccaagtccaccaccagatccaccaaagcctgaaactgcggaggattggtttagaaatactatcagagagaatttcgcaaagctaaggaatcgtgctagggagtaccaaaagccgtatcctgatttttatgatattaggcagcatatcctgtgcacacgggagtaa

SEQ ID NO: 51439 - DNA, 1061 bp, Oryza sativa
  Clone ID: PAT_MRT4530_53830C.1
cccgcgtccggttcgacgagtgggacgcgcaccggcagcagtcggccgccaaggtgcggaggagcaccgtcagggtggtcgtccgcggcgccgacggcgcgcccatggcgaacgccacggtgatcgtcgagctcctccgggccggcttcccgttcggcaacgcgctgaccaaggagatcctggacctgccggcgtacgagaagtggttcacgtcgcgcttcacggtggccacgttcgagaacgagatgaagtggtacagcaacgagtgggcccagaacaacgaggactaccgcgtcgccgacgccatgctcaagctcgcccaaaagtacaacatcaagattaggggacacaacgtattctgggacgaccagaactcgcagatgaagtgggtgacgccgctgaacctggaccagctgaaggcggcgatgcagaagcggctcaagtcggtggtgacgcggtacgccgggaaggtgatccactgggacgtggtgaacgagaacctgcacttcaacttcttcgagaccaagctggggccgaacgcgtcgccgatgatctacaaccaggtgggcgcgctggacaagaacgccatcctcttcatgaacgagttcaacacgctggagcagcccggtgaccccaacccggtgcccagcaagtacgtcgccaagatgaagcagatccagagctaccccggcaacagcgccctcaagctcggcgtcggcctcgagagccacttctccaccccaaacatcccttacatgaggagcgccctcgacacgttggcgcagctcaagcttcccatgtggctcaccgaggtcgatgtcgtcaaaggacccaaccaggtgaagttcttggagcaggtgctgagggaagggtacgcgcacccgtcggtgaacgggatgataatgtgggcggcgtggcacgccaagggttgctacgtgatgtgcctgacggacaacagcttcaagaacctgcccgttgggaccctcgtcgacaagctgatcgtcgagtggaagacgcacaagacggcggcgacgaccggcgccgacggcgccgtcgagctc

SEQ ID NO: 51440 - DNA, 1271 bp, Oryza sativa
  Clone ID: PAT_MRT4530_53831C.1
agcagttaatccacttttttaacagattaacagtatcagactattcagacaaatgatagcgtccacaatacacgagatgaatcgatgtagaaacatcaatgcctgatccaaaccgaacattctatatttctatcagaatttcagaatcatatctttctgtcatttctgtcaaatagcaacctgtaggcccaatgctctcttcacttcatttcattctcaccgccagtggtcacagggatggattccttgccctgattttcatcttcagacagatcagccgcctctttcgctttgccccacagcaccatgtacaagccacccacaatcaggacagaaccaagcacacttccgaggtgcaacgcctcattgagaatgatcgagctcatcagcgcgacgaagatgagcatcagcgggctgaacacggagatgaacagggggcctttcttccgcaggcaccacgacagcagagggaacgcggagcctgatgctatgagtcccgcgtaagccgatgagtagagcctgatgttaagtcctaacctccaatgctccatgtccctgtgaacacaaagtgccattaccgtggactgaagtgcgccgaagaggcacaccattgcagcgatcgagtagtggcacgggtaaaccttgctcactttcgcctggatgactagccatgtcgcgtaggtgaaacagctgattataccaaggaacgatcctataatttgattgcccgtcgatattgggtgcgactggggattttcagtgaggtgggcaaatttgggatggggaagttggtcgagtaccatgatctttggtcccttgtagaatgtaagcaacattgcaccacccatgcctacaagtgttcctagaagttttgcttgtccagcaggtttcttaagttttaaggtctcgagcctggtcaatatagcaagaaggaaggtggttgctggtgtcaggttgctgatagcagtaataaatgttgctgaagtcaactttatagcaagcacatagagattctggtttatagaaaatccaaacaacccgcacaagaatagttgcagcaccaccttcatggttagaggcggtcgtttcttcctctctcggaggaaggcgatggggcagaggaaggtggcggcgaacatgaagcggtaggcgacgaggacgcgggcgtccatgccgtcgttgagcgccagcttgatgaagacctgcagcgccgagaagagcagctgcagcgacaccatcgccgccaccgccctccccgactcgctccccat

SEQ ID NO: 51441 - DNA, 3893 bp, Oryza sativa
  Clone ID: PAT_MRT4530_53832C.1
acttcccgggtcgacccacgcgtccggtgagagtgacagacgacacatagaaggttttcatggagaaagtactggtgctctccttgatatgtatttcactctgccaaggatgggtggtgcaatctttagaatatgatcatacagcaagtattgagtgccttcgcgatccgatgaagccgctgtacaacggcggcatcatccagaacggcgagttcaacagcggcctcatgggctggtccacgcaccgcgacatcaaggccggcctgagcagctcgccgtccggcaacaagttcgccgtggtgcagcgcgccgactccctctccggcgccgccgtgccgtcgcgcagcgtctaccagaagatccagctgcagggcgacacccactactcgctgtccgcgtggttgcaggtgtcggccggcgccgcgcacgtgaaggcgttcgtcaagacgcccaacggcgagcgcgtcgtcgccggcagcgtctccgcccagtccggctgctggagcatgctcaagggcggcatgaccgcctactcctccggcccagggcagatcttcttcgagagcgacgcgccggtggacatctggatggacagcgtgtcgctgcagccgttcacgttcgacgagtgggacgcgcaccggcagcagtcggccgccaaggtgcggaggagcaccgtcagggtggtcgtccgcggcgccgacggcgcgcccatggcgaacgccacggtgatcgtcgagctcctccgggccggcttcccgttcggcaacgcgctgaccaaggagatcctggacctgccggcgtacgagaagtggttcacgtcgcgcttcacggtggccacgttcgagaacgagatgaagtggtacagcaacgagtgggcccagaacaacgaggactaccgcgtcgccgacgccatgctcaagctcgcccaaaagtacaacatcaagattaggggacacaacgtattctgggacgaccagaactcgcagatgaagtgggtgacgccgctgaacctggaccagctgaaggcggcgatgcagaagcggctcaagtcggtggtgacgcggtacgccgggaaggtgatccactgggacgtggtgaacgagaacctgcacttcaacttcttcgagaccaagctggggccgaacgcgtcgccgatgatctacaaccaggtgggcgcgctggacaagaacgccatcctcttcatgaacgagttcaacacgctggagcagcccggtgaccccaacccggtgcccagcaaggacgtcgccaagatgaagcagatccagagctaccccggcaacagcgccctcaagctcggcgtcggcctcgagagccacttctccacccaaaacatcccttacatgaggagcgccctcgacacgttggcgcagctcaagcttcccatgtggctcaccgagcatgaacgagtcaaaggcgccgacccagcccggtgaccccaacccggtgcccagcaagtacgtcgccaagatgaagcagatccagagctaccccggcaacagcgccctcaagctcggcgtcggcctcgagagccacttctccaccccaaacatcccttacatgaggagcgccctcgacacgttggcgcagctcaagcttcccatgtggctcaccgaggtcgatgtcgtcaaaggacccaaccaggtgaagttcttggagcaggtgctgagggaagggtacgcgcacccgtcggtgaacgggatgataatgtgggcggcgtggcacgccaagggttgctacgtgatgtgcctgacggacaacagcttcaagaacctgcccgttgggaccctcgtcgacaagctgatcgccgagtggaagacgcacaagacggcggcgacgaccggcgccgacggcgccgtcgagctcgacctcccacacggcgactacaacctgacagtgagccacccgtccctgggaacgaacgccaccgtccgcgccatgacggtggacgccgcgtcgttggcgtcggagcgcctggtcaacattaaggtctaggagagtgtgacacgtacattgtcctcgtgctagcgtgctcgattttttttttgtcaaacaattttgtacttgtttttatttccttttttgcttaattagtgaataataattggatcacttggttcagcttaaaaaatgtcaggtcagttatacgcctacaacaacctaatgcagctcctgttaacaccaggccatataggtactctctgttaacaaccaaatttagtaaatttacatcgaatttggagttatggccgaagcggatttgggaggaaatcgataatggaaacaggcagttggagtatttgggacatattatttctaaaactagagtagctactgaccctgctaaaactttggtgatgcaaaattggcctgtccctagtttagtggatgatttgagaggattccttggcctcactgggtattatagaaaatttgtcaagtattatggtttgttggctaagcccttgattgaattgttgaagaagaatttaccattccagtggagttctgtcactcaacaggcttttgagactttgaaacaagctatgatcactaccccagttttgtcactgcctgattttagtaaaccttttgtcattgagactgatacatttgacactggcattggggatgttttgtctcaggaggggcatcccattgcatattatagcaaggctttgggtactgctaatcaaaaactttctatttatgaaaaggagtttatggctattatgatggcagtagacaggtggcgaccttatttactgcgaggcccatttgttattaagacagatcacaaatttctgtgtcatcttgatactcatgtcctggattcagagatgcagaagaaagcaatgactaagttaattggactccagtatcactttcagtataagaagggtgtggacaataaatcagcagatgcactttcaagagttggtcaattctttgcttgttcaagtgtatctttggttcagccaccgtggatacaggagatagtcaattcttatgccgttgatatgcaggctcagaagttgctgcaggagctggctgttatttctcctaatgatcaaggtgtgtggcaggatatctctttagatttcattgacggcttaccattatctgacagtaagaatgtgattttggtggtggttgaccgttttaccaagtttgcacactttattcccttaaaacacccttatactgctcaacatgtggcctcagtttttctggacagagtagcttctatctatgaacttcctaagacaatggtttctgaccgcgttgccatttttacaagccagttttggaaagtgttgttcgccaaaatgaagaaatcagtggcatcgcgtccatatcctaaattggcattcaagtattttggcccttttgaaattctaagtaaagtgggttctgtggcttatcgcctcaaactgcctgtggatagtcaggttcaccctgtctttcatgtctcccaactgaagcattttgttccttcacatgttccagttttctctgagttgccgacaactgtccagttggatatttctgctctagaacccactgagatattggatcgtcgtttggtcaagaaagggaatgcggctctaacacaagttcttgttcgtttgggtgttttgccaccagagtgtgctacttgggaggactattctgtgctgcgagctcattttccgttagcaacagtttggggacatcctgtttctcatgggggcggcagtgtcacaccggtgggtgtggcacctgaagatgcaggcattacacagcaacgatacagggaagacggattgaggaaaaggcgtcttcctgtgaagaaagcgtatttatgtaataagtgtgtgtgcgcgcgcgcttag

SEQ ID NO: 51442 - DNA, 213 bp, Oryza sativa
  Clone ID: PAT_MRT4530_53833C.1
atgccaccgccggagcaggacaaggacaaggcgctgccgaagccgaagctacccaagcccaagcccaagcccaagccggagccggagatgagcacgtggtcagcgtcggcgtcggcgccagagcacgaccagacagccggcccctacggcacggtcgcgccgcacgccacccctgccgtcgcaacagggaaaccccgtggtgggctgggctaa

SEQ ID NO: 51443 - DNA, 198 bp, Oryza sativa
  Clone ID: PAT_MRT4530_53834C.1
atgagtggaaccagaaggcggggtgttactggagtaggcgcattttgtggtcgagtgggaacagctgggctgacagcgcccttcgccacaggagggcttgctgatggaccaaagggtgctgagccaaagcaattaaattcagagcaacctgttggaagagttactggaccgagggcgattgtaggtcaggagggctag

SEQ ID NO: 51444 - DNA, 2376 bp, Oryza sativa
  Clone ID: PAT_MRT4530_53835C.1
gtcgacctacgcgtacgcccacgcgttcgcccacgcgtgcgcccacgcgttcggtcaactttcaaacctgcttactggttctagggggtaatggaaaaattactcccttaacatgcaagttggacagatcaacatgttgtcagaaatatttggtagcaggcatcagttagctggtgatggcaccattgtgctctccgagtgtcttccccttccctttgtggcgtaaaccacgcgtccgcccacagaaagaaaacctctcgtctcctcctccttgcgccgccaagacgagtcgcggctgaacaggggagtggcggcgatctccatctggcgagcagagcaggggagaggatcatgactacctcaaggcgtctctcagataggaaagtggcacggtttgagaagaacgtcaccaagaggggttctgttcctgagacagtcaagaaaggaaatgattatcctgttggacccattgtgcttggatttttcgtctttgtggttgttggttcatctctctttcagatcatcaggacagcccaaaatgctggatacttctgagaactgtagtggccgcttatatatatagtctcggttaccttcaggaacatggttgatatatgtagctgttcgtcactccaaaaggagaaacttatggcatagctagttcgctatgatgttaccttgtcgttgtaccgtgccttaagtcatacagataacagatcgatatatacccagttatacttggtgcttaaacaaaaaaaaaaaaaacaaacatctgcatcagtattctttttatcagatttgcagagaatttcatcagcattcaccactcgaaatttgttggtaggattagtgaatagagacggtgttcttttcttgccggagatgaggcgtcctaagaacaaatatggctttgtcaccgccgtgctctcgtcggcgacgcctctcctcctgggctacgacctcgtcatggtgtgcggctcggccacgctgccggagccgcccggcgtgaagctcctggcgtgcgtcgccgtcgcgtcctgcgtcctcggcgcgctcgccgccgtgggagcccagtgcgtcgtcggcgaccgctgcaccgtgctgctctcggcggcggtgctctgcgcgggcgcgcttgcccgcgggctcgccaccagcttcgcggcgttcgaggccggcgtcttcgtcaacggcgtcggcatgggcctggcgctcatgagcgtcccggcctacgccggcgagctcagcccgtcgtcgctgcaccgcggcctcacctcgcaccctgacggcttcgtgtgcctcggttgcatcctcggcggcctctgcttctccccgagattcttgaacctccccgtgcgcgtcgcctggcggctgaccgtagccaccggcacggccatcccggcgttgctcggcttcgccgtcctcctcatgccggagttgccacagtggctcttgaccaaggaccacgcacgtcgcgtcctctccaggacgttgtcactggaggatgccgagctccgtctgctcgagacaaaaacggagctcggcgagccgcacgacgtcggctgcgacgacacggtggcaacgccggcgtggcgaacccggtggagggaggagcgcgcgctctggctggagctgctggcgaggccgacggagccggtccggcgcaacatcgtcagcgcgctggtcgccaaggcattccagcaggcgtcgggcatcgggtccatgtttgtacgtgcagcgcgcgttccgcgacgccggcgtcccgtccgacacgcgcatgacgagggcgctcgtggcgttcggcctcgtcgtgttcgccttcttcgccgtctccacggtgctgctcgagctcgcctggctgctggtgaaagcgctcgccggcggctgctgcccgaggcgcgcgccggcgccggccgaccacccgtcgtcgcctcacgcccaccgtggcggcgttgccatgggcatgaagcggcggcgggagcagctgaagtgggcgaggagcctgtccgcgaccatgctgatgtcgctgatggcgctggtgtggctcttgctcggccccgtgcagatggcggacgcgtcgtcgtccagtggctggccgcggtggctgcggaccgcggtggccgccgtgaaccgggccgtcagggcggcgatcctgtggagcttcgcgtgggtttacgaggttacagccgtgtacggcaacttgctcgcgtgctccgcgatcatcgtgttcgcgtggttcctcgtgtatttcggcgtccttggcgccaaggagaggtgaattttttaaccatttttcttgatacccctgggacgacccctgggcaaaacacattgacaaacgggcgggccttttaaaggaattaaggttacgtacct

SEQ ID NO: 51445 - DNA, 978 bp, Oryza sativa
  Clone ID: PAT_MRT4530_53836C.1
atggaggatgaagtcgtgggcggtggtgggggtagccatggtgtcaagctggagtggaggaggccgacggctgctataggtcgggctagcgaccgagctcttggaggtggcaacaacaggaattcttccttgtcgtgccaacaggggagtagctgggcgcaggcggcggagcggcgcccgggcgagcgcaggcggtgggggaagcagcggcacgggcagtgcccggcgagggagctgttgcctgcagccgtggccgtggagctggaggtggggccaggcgtcatggaggtggacacggtggactcggagccccggcctactcccgcgccgcatcctccctctctccgcgtgctcgctgtcaacccccgccccatatcctccctcttcgctcgtgggctcgctgctggtgccagtgttgagagggggtcgccgcccgctggatgccggatgccacggctgctgctctggaccgccgccgtcgttggggagctggcgcgagcggccctcgagcggcgagacgcggaagtcggaggacggcatcggaggaaaaagagagagatgctatgggtgttggaggacgctgggtggcggaggcgggaggcacaaacggtggggtgcgaggagcttggccgcgccctgcttgaactgcagggcgccaccgaccaggactttgacgctgtcacggtacagcccagacatggcactgccgtgcctgggccaggccgtcgggcctcgggccatatggcctcgattccacgcggcgcgtggaaccgcacacgcttttggctcggctcctttggcagaactaactatgtggcgctcgcctattaccaggccgcgtaccggttccgcggcaacacggcgtggctcaacttgcccgacaacgccgcatcccgtgggttgcttcacgcctccgtggacgccaagctctaggctgtgccagaacatcatggccgccaagaacgccaagtcctccat

SEQ ID NO: 51446 - DNA, 478 bp, Oryza sativa
  Clone ID: PAT_MRT4530_53837C.1
acaacaaagacagaactacccggtggacataatcgggtgggttggttcaatgcctttcaagggagcatgggtcccaaaacctaatttagagcatttgatgggtttaacatttcaacattaatagcatttaacgggagccaatacacccttaacatgttggtaattattcaacttaacaaggtgggccctttttttgggaggtttctttctgaccaaaattccccattttatggggggctttattttgagccacccaacaacagcttttccaaatgaacgggtgcgcttacctttcaacccaagggttggtaatggagatggcatgtaccttgggaagcccaaagggtttttcttcaaactggtagacgcttcacccatgcttaagaccctgagcagctgctgcatggttttgtttttgagcatttggtggcttttcatgccaatattttcggtgaagttattaacgaactggccgttt

SEQ ID NO: 51447 - DNA, 447 bp, Oryza sativa
  Clone ID: PAT_MRT4530_53838C.1
atgcggccgcaacgaccgaccgcgctcgtgtggacgggtccggtcgcaaagatcgccggcgccgacgccgacgagattgagcgggggcacggtggtctacaggccggctacggcttcggatccatccgcatcgccgggatcagagctcctcgtcgccgtcctccaccacctccccgcatccatcctcgcatcgcgcgggacgtcgacggcggcggtgggcacgggacgtcgacgacggaggcatcgagtggcggctccggcggcgtgcgggcgagcacgagtgcgggaggaggcaccggcggcgacagcacgagctcagcggctccggcggcgtgcgggcgagcacgagtgcgggaggaggcaccggcggcgacagcacgagctcagcggctccgcttctcccctctcccttcctgccctcacgcgccgccgccgcctctcgtgtaa

SEQ ID NO: 51448 - DNA, 249 bp, Oryza sativa
  Clone ID: PAT_MRT4530_53839C.1
atgggccagcgcgacgagaagggcggctcgaagatcctcgcgctcaccgtcgacgccaagggcagtgtcaccttcaacgccgtcgtcggggtccgggaggcggacgccgccggggatgagatcctccatctggaacacgagttccaccaactccacgcgaccaagatggaggagctgctccgtcaggtggccacggcagtggcgtcctcgctgcaagggataggcgggaagaagactgaaatgccctga

SEQ ID NO: 51449 - DNA, 353 bp, Oryza sativa
  Clone ID: PAT_MRT4530_5383C.1
tttggttttttttttttttggggtttttttttttttttttttttttttttttttttttttttttggggccgagaaatttttgccaagctaaaaaaaacgggccccatttcaggccttggaaaacaaaaacatgttatggagcatgcatatatccccccatcgccggaaaaaaaccctagttaaaagctacgggctttttttttggggggatgcgtccccctcgttattgggaacgggccaccaccccgtttagggcgactttcggaagccaacccttattttgccggaagcacacacgggatggggggcacccatgaaaacgtcccccaggatccaaaggggaccccgggggg

SEQ ID NO: 51450 - DNA, 535 bp, Oryza sativa
  Clone ID: PAT_MRT4530_53840C.1
tcgcttcctcctcccgcagctcacctcaactccggaagcgagagctcactccccccatcccatggcttccaccgcgctctcctccgccttctccctcctctccctcccctcctcctcctcccccgccgccgccgccgccgccgccccaaggtccttcgccgtccccagccgcgcccgcccacgccgcgccgtcgccgtggtggcgtccaccgccaccgattcccccaaggtcctggagctcggggacgccatcgcggggctcaccctcgaggaggcgcggggcctcgtggaccacctccaggagcgcctcggcgtctccgccgccgccgccgacgaggcccccgccgagaagacggagttcgacgtggtcatcgaggaggttcccagcagcgcgcgcatcgccagcatcaaggtggtgcgcgcgctcaccaacctggccctcaaggaggccaaggacctcatcgagggcctccccaagaaggtcaaggagggtgtcagcaaggacgaggccgaggatgccaagaagcagctcgag

SEQ ID NO: 51451 - DNA, 883 bp, Oryza sativa
  Clone ID: PAT_MRT4530_53841C.1
ccggccgggcacttatccccccgtctcctcgcttcctcctcccgcagctcacctcaactccggaagcgagagctcactccccccatccccatggcttccaccgcgctctcctccgccttctccctcctctccctcccctcctcctcctcccccgccgccgccgccgccgccgccccaaggtccttcgccgtccccagccgcgcccgcccacgccgcgccgtcgccgtggtggcgtccaccgccaccgagtcccccaaggtcctggagctcggggacgccatcgcggggctcaccctcgaggaggcgcggggcctcgtggaccacctccaggagcgcctcggcgtctccgccgccgccttcgcgcccgccgccgtcgtcgccgcgcccggcgcgggcggcgcgggcgccgccgccgacgaggcccccgccgagaagacggagttcgacgtggtcatcgaggaggttcccagcagcgcgcgcatcgccagcatcaaggtggtgcgcgcgctcaccaacctggccctcaaggaggccaaggacctcatcgagggcctccccaagaaggtcaaggagggtgtcagcaaggacgaggccgaggatgccaagaagcagctcgaggaggtcggcgccaaggtgtccattgcgtgacactaggtaattttaggactcccctttttttctcaccctaatcttgtgtaccacctttgatatttacaatggtttgttgtttcatactatgagatttctgtatgtggatctgttagttcacattccatcttgtattgatatcgatgttccacgcgctaaattgccaatgtagattttgtatattggcgcaatcataatggtgagaattgtgcaataaaggtgtagtgttgaacac

SEQ ID NO: 51452 - DNA, 976 bp, Oryza sativa
  Clone ID: PAT_MRT4530_53842C.1
ccagggcggcgcggcggctggaccaggcgacgctgggcgccgtgatagataccggcgttagggcacgggtacacgtgcgggacgctgctcgacatgccgctggtgctgagcctggtgcgcggcttactcaaggacggccggtgaccagaaccggccacttgtggatgctactgacatggtcaggtgccagagtaagttgaagaggctttccctgaccgatatcaagattagaatcaaacgagtaaccgaacaatacaactttagataaggctatggaaaagcgcttatgataaaaaacaagtactacacacgcacatgaatcgcaaaccgaattggtcacatggagacgcacaccattatatgtaatagtagagcgctaggagataagaggtaaagaaaaactatttacatgtaccaacatcaacaagaacccgacataacatattcttacaaaagagaaaagaagcatgggggggtggaaaaggattacgcacgacaacatcgaaactacaaacaaaacacaaaacaaataaataacgataaaagtagagtacgactgtagaattaaagaacagaggtaagcaggagtagcaggtgaatacgcgtgaaggagggaaaaaaaattgttaagaaatacaatagatggttgccggtgaaattataagcgacaaagttgaagacccaccaatggtccacgtcacgactcaagtaactctataacttagcctaacataaaagtgacaagtcaaatagctcgtatcctagactgtgctcacatgcataatcatcaccgtcgacgaacatgaacaacaaaattaaagatccaatctaatcaaatactacataaacacagatgaagacataaaattaataaacagattaccgggtcagcgccgcacgagaacttatactgcgtacaacgaataaaaatacacgaaatgaaaaatcaagcactaaggtctacacactgtacata

SEQ ID NO: 51453 - DNA, 392 bp, Oryza sativa
  Clone ID: PAT_MRT4530_53843C.1
taccggacctgaattcccgacccaacccacccgtcttgtttttacaccaccacccttccaaaaccgagctgggttgacatcaaaccccggggcagggaaaccacccccctatgaccggtgacacaccgcccttcgaacattacccccctaatactcggactcgacgttgtgatggcgcatgctcccattgctaactaagattctaacttagatgctatattcataaaacgcgacacgctacatctagaccactgtctattctacaaagcgcaataaacaaatgattcaatcaacgccaactatcttactactgtgaattaccattatggaaatgatactattaggactaaactcacatctcatactacaacttaaagacaaccacatttcct

SEQ ID NO: 51454 - DNA, 1038 bp, Oryza sativa
  Clone ID: PAT_MRT4530_53844C.1
atggctgacggtgaagcagtggcaatatatatcgacgtcccagccagccacggcgccgccattgcgcagggaaagatccaccggttccctcgaggcctgcgagggatcggcggctccgacgagcggtacatcgcgccgaccgtcgtggccattggcccctaccgccacggcgagccgcctcacctgcaggacatggagaaggccaagctcgcggcggcgaaccacttcttcgcggcctctgtggaagatgtctacggcaagctcctctccgtcgtgggcaaggcgcgtgactgctacgacgacgacgacaagatcccatggctggtgctcgacaccctcatggagatggagttcctcaatgtggacgtgcgcaatttcgtcgccggattgggagacaaattcttccccaagaacggagacaaagctggcaggtggtggtccgtcgtctgggcgacaggccagcgtggaaacatcacgaagcttaaaagagacatcaatggcgggcagagttatgaaagctaccggccagctcatctcctcgttctcctccggttcagccagatatggcggatgcccgaacgagagatcaactacgtggcggccaacacatcgttgctgtccagcagcgccgtcgagctggcccagatcggcgtcaacctgacggccagcacggcggcgacgagcagcggagcagcggcgtcgtacgtctacggcgactttgtggtgagctcgtacctgtcggcgctggcgatgctgatggacagggaggaggacgtgcagcagctgcgggggcatcgcgtggtgctcagcaccttcagcaacacgcagacgctggacttgttcaagcgcatcggccagcatctcagcttgggcagccgctacttcgtcgtcttggagcagatcgaggcgtaccggcggaaccggccggcaaggaccatggtctacaagttcctctacaagcacatcaaggccatcagcgtcatcttgtccatcgtcagcgtgttcgtcggcatcttcaaggcacttaggggacgctag

SEQ ID NO: 51455 - DNA, 196 bp, Oryza sativa
  unsure (1)..(196): unsure at all n locations
  Clone ID: PAT_MRT4530_53845C.1
cccacgcgtncgnccacgcgtncgcccacacgtnacgccacgcgtncggtctcgtcgatcgatcgatcgatcttcgcgggggttggagcgcatgcatacccgaaattttggtgagtctctgattggacatcaaacgattcttttcttgggcgatttctttgtttgggcgtgcgcacgaatcattatggtatgatta

SEQ ID NO: 51456 - DNA, 1222 bp, Oryza sativa
  Clone ID: PAT_MRT4530_53846C.1
ttttttttgaatttaggcaagaggcaaagctataaaccgaagtgaaagtaacaatgggaaatggtaaaagtgattattctaaggatgttacaatatctaacaaagccggttacaacagattcttagtgttcatatcctgatactctactgtacaaatatccctgcggacaaaaaagttgcactttatcttagctcatttgtagagtttgtccttccaatagtgcttggttctccgattgagacggatgctaatgacttggaagcccaagcagtggcattcctggccccttcctgtaaattccctcgcttcgaagggtataacctaaagaatttgtgtcttgcttgttcaaggtaggtgaagaaatattcatgcacacccaccaagtttggaaaaagagtatgcctcctccacgcccgtttggcgaaggaacctatctttggaaagagaagatacagtaacctcaagattacaaatgcagttgccagtgctagataagtatcctgctgaagtattttctccggtgagcgtgcccaccagaatggacaattttcctgttcagcatccttcttaagctcaataccatctactgaatgtagcacggcctctgacgtcattgaaacatcgaaacctgaaacatcacggtagaaagcagccagggacttaacagtccgtggtccatgataccgcactcgcatagttgaattcaagagaaatagtgttggaaaaccatgaatcccatatcttgatattatacttggcctgattgaggattcttcaaacgcaaaatgccgaatagatgggaacaaagatgctaatatctcaaaatttggcttgcattcttgtgagaatgggcaccaggaagcatagaagagtacagcaatgtaatcatctttgttcatgtgaagaagagtaatggccttcgccaatgttacctcatccccctcgatgacgccgacagggtcgccgcggcgatccagcgtcgtgcatgtgccgccaggcccaaggatttcctccgccgcagtaggcaccgggcacgcctcgggaagcggcgaggcggcggcggtggcggcgatgatggggaggaggagcgccgtccaacacagcagccgcgtcgccatgggggaccgcggggaaaaggaggggatcgctcaatcctagatctggggggggggggggcctggagcgcggccgctgctgcggcgcgtacgatgccttcagcgc

SEQ ID NO: 51457 - DNA, 416 bp, Oryza sativa
  Clone ID: PAT_MRT4530_53847C.1
aagaaatgatatttctgtctcttgccattaaattgttagctagctagctgtttggtttcctgtcagcttctagctgttaattcccaagattagcattgtggtgtttttagtgtttaccaaatctgttgtggtattatgcttcacaactttatatgatattacaaatgaatgcgtgtatttgtaatgtagtaagttacaactcacgccattattggacaaccataccatatttagcgggattgtcgaggatctccttgaaagcttgataggcatccaagtagacaattttgcttccatggagtgagccttgcaatgcttggaagagcttttcaagtttagagttgtaggcctgggcattcctgttctgctcatccacacatgctctgtcaggatctccacttaacgtaatctgaaat

SEQ ID NO: 51458 - DNA, 254 bp, Oryza sativa
  unsure (1)..(254): unsure at all n locations
  Clone ID: PAT_MRT4530_53848C.1
ttctaatttncccatagacgcgcagtccaattcgactcgtgctgtggtgcgactccggccggggtgggggacgccatgagccgcacgctcctctcccacatcctccaccgaccgccgacgctcctcgcgtataggggtggttggcgaggaggatcgctcccgatccgcctacgcactcttcgactcaactgcaccgtggctgaagctactgtactcggacactaggcgcttgctcctcagtctaggaagaaaag

SEQ ID NO: 51459 - DNA, 330 bp, Oryza sativa
  unsure (1)..(330): unsure at all n locations
  Clone ID: PAT_MRT4530_53849C.1
cccttcatgaagagccccatggaggaagctcatgcaatgccagtgacatcattcttcccagtagcaggaatccacaagctcatagctatcttccttgttgtcctctcatggatcttggtccacaagtggagcctgaggaaccagaaagggccaagatcatggccaatcatcggcgcgacagtggagcaactgaagaactaccacaggatgcatgactggcttgtcgagtacttgtcgaaggacaggacggtgaccgtcgacatgcctttcacctcctacaactacaattgccgacccggtgaacgtcgngcatgtcctgaaggccaattt

SEQ ID NO: 51460 - DNA, 2264 bp, Oryza sativa
  Clone ID: PAT_MRT4530_5384C.1
acgggtgtttatacaggcgattacacaggaatcggctatatgcaaaacctagctaacggtatgactggtcgtgacactagtctaaccgcaccctaggccggtcaaaccgtgcctactattttggccagatcgggcctcttgtggccggtctgaccgcaccacttaccaccggtcagaccgggtcatcggccggtcagaccggttccctgagaatttctctaggtttccataccacgactagcagtactgattttaaatattattcatcacctgttaatactgttagtcatgctattccacatgtccctaatgcctacaatagggatatcctcccgatactaggtatggctaatataattatattgcgccgcaacaaccacctcttaggccaccaaatacaccaccagatccacatagacctaaaaatatggaggagttaattagtaccattattaggaatacatttgggattgaagcggaggatcgtgctagggagtaccaaaagccgtatccagatttttatgacatgatcccacatcctcgtggttatagaattcctgaatttaccaagtttagtggtgtggatagtaggaccacatgggagcatgtagatcaattcttagcgcaatgtgccgaactaagtgacggtttggattatatcacaagtgaaagtgaaatagcattgtcacctaagaccgaatcaaaaatcggtcatgtggatgttggaaaaaataatgataatgtcttgcgggatagtatgtgagatagaatctaaaatagttatgcatacatatcaaaggctgtatcctgaacatgtagattcggtcccatacccgcaaggttttgaggtgcccaacttcacaaaattcacaggtgaggatgctagaacaacaatggagcatatcggccaatttattgatcaatgagaaagaccgattgatacttcatcggtcacttgtgaaactatttcggttacatctatccctaagaccggaattgttagtgatcttgtccctgttagttctattgatgttggcaaaaagaaagggaaaagtgttattattggggatcctccgcccaagaataggatcaaaaatgcgaaggccgaagatcataaagttgcaaagaatgagtcatctagttcccaaaagaccaaaaagccgaagctcacttttgagatgcttatggctaagtacaagaaaggattagccggtcaacgatttgataatcaaactagtgattcaaaaagaccaagatcatctcgtagggagagatttgatcaaacaccaaagaaatcggagccatcaactataccaactccatacaaacctccggttgtgatgccatggtattcacatccaatgtcgccatttggttatccttttatgtattacatgccatggatgcctcaaccacctatgccgtgtcatcaagcatggaagcaatcacctaggatagtaccaagtcattctaacttaagacaagaccgtttcccacaaaagaatcggtctggtggatcaaaggtgaaaaaggtgaagaaggtgtgggtgaggaaagaagccaaagctccggaggtcgttactatcaatgaggaatctcaagatgttcatgtacctactggagatgtgttgaaaactatacaagcggagaagactgaggccgatgctgttgctgtcgacatcggctgtctgaccgagatagctgtccggtctaaccgccagactacggccggtctgaccgaccctcctggccggtctgaccgacggcttgcggccggtcagaccaggtctagagaccggtcggaccggggggcattagagaagagtgggaaaattgagaacaacataggagcttccacttcgaccaaaaatatcaagaatcattgcttagctcctggaaaacaaccatagccgaagtggataccttctggcttatctcgctctcaaaataggaggctacaacatcttcgggccataggtaaaaaagaaaagaaggccgaagatgtggagaacaaaacatctaataatttagagcctcaaacaacacctaagcgagtgtggagacctaaagtagtaaaagttaagagatcggtgatttcccatagaagtaacaaatccaatttgatgagagaagaatcatcggtcattagagataagtctcctccacatgatgctatggggattagtgcggtatccatcttgccttcgaaatcatgcaatctagaaagccgattttgcttggggggcaagacattaatatgctca

SEQ ID NO: 51461 - DNA, 941 bp, Oryza sativa
  Clone ID: PAT_MRT4530_53850C.1
atggaggaggcgcaggccgccgtgatggcgcacctggaccaggtctcgggcctcgtccaggcgctctccgccgagctccgccgcgggatcggccccgccgccgacagccttctcgccttcgtccgcgccgtcgactggacggctatttcaggaaccatggctgatttgcttgatggtattccatgcgactctgttgctcacggccgtcgggttgaggaggaatgccaatttccagctcttcatgctgtttcttgcctcacatacagcgctcacctagatgctgctttgagcacaaagaagttaaagcagaattggccactaaacctttctaaagatgtgatgccttggcagttggcacaagacaaatattcaggatatcgcaatgcgaactatgataaggattcaggagtttatcttgctgaaaagataaatagctatatggcagagcactggaagagcattgccacacgaaattacttcgaccgcgctggagtttttgtttctgtcgtctggtcgggtccccttatcttcatatctatggtcattgtggttagctcccttattacattatgtcggttgatggtgaaatggaagagagcagaactaaggcatcgggctcagcttgctcgtgacaaacaggattgactgaaaggttccttagtctggtagaagaaatgattagagacatgcgtcttctagaattgtaactgttggtgtttaatcacctgatgtttttcagttgcttgctgctagtaacttactgcgtcggttatattctggtgttcatgaactctagtaacagctaaaaacagaaatactagacccagtatctgatttcatcatgttttggttcagtagccacgaacatggatgtgtaattttatttaaaatcgattgtgataaattgcaaactgcatccttgtgctaaaaaaaaaaaaaaa

SEQ ID NO: 51462 - DNA, 324 bp, Oryza sativa
  Clone ID: PAT_MRT4530_53851C.1
tgctgaggtcatgtcagagcttgcaccggtatgttttactgacagagaaactggacacgcatcttttatgtccaactgaagtgtagagcagatgatataagggtctttaaggtattttatctttctgtttcttattatctttgatttttttatattactttttatataatctattatttattccatttttttttatttttctatttatttattattttattattttttatttttttatttctataatatttctttatcttcttcattttctttttttatttctttttctttatttttttattgcttaattttttaattttcttt

SEQ ID NO: 51463 - DNA, 210 bp, Oryza sativa
  Clone ID: PAT_MRT4530_53852C.1
ccgtcggcgcctcccgaggccgtcaccggcggtgggtcccagcgcgatgcatcgccggacccgtgcagcgacctcgacctcatgtctttctcccgccgccgccgccgccactgctactccgtcgccgctagcttctcctccttcgtcggcgcagtggcgccctcgccggcgacttccctcttcgaccaggaatttcgaggggcttgctga

SEQ ID NO: 51464 - DNA, 459 bp, Oryza sativa
  Clone ID: PAT_MRT4530_53853C.1
cccacgcgtccgccagcatggataatgagatctacggtgtttctcatgttgtgctgttgaagtagaactaaatgcatgaaacttgacatgctatcaaagccaagtgttctcgctatcaccctggatggcacacttttaagaagatccttgtcatgtggtgaacatattggtactttcaatttagtatgtgcaatcttcagagaccagtagttgcattgttatgtcttccattggttcacttcaattcatatcctatggcctcattgtttgtcgttttattaggtagagttttagccttttagggtccggtactatggtttgctggtgtgggtggtttgataatctactgtagcttgtaacagttattgatgccatgtggtcaaatagaatcggcctttttctggctttctgtaacagttgtagctgcagcaaatgaatagatgccctgagttatccttc

SEQ ID NO: 51465 - DNA, 902 bp, Oryza sativa
  Clone ID: PAT_MRT4530_53854C.1
atgcggacgggacgcagtgacgatgggccgacggcacgggagcgatctctccggcctcgggccggggaagaggaaggagagggtgcgtccggagtccccttccgcgtcctaacgcgcaccgactccttcggcacacgtgacggcgacggtcggcgatcggcgagacagaggggacggcaatggtgcgggcgaaaaaggggaagattgggaggggaaaaggaagggagggcgcctgggtttatagggcggcgatgtcggtttggaaaccgaccttgggcggtcaagggagggagctcgcgctcggcggtcgcggccaaaacggcgacaggggggggaaggatgacgccggcgggagggaaaagggaaaaagggggagagaaagggggcttgcctccttgccactttggcgaaaaggaggaggcagagggagcgatgcggcagaggggggggcggggctcagcctccgtcccttgaataaggttgatatgcactgttgtcgctgcccccaagtctctgttgtgacctacgaaaacggaatcggctcgttgccacggttctatttttgtagttttcagaagtttctgtcgcctacccaaagctccacggatttgattgcagccgtacagcaagtgtttgccaagggagctcagaacattcaccgtgaggagaagagaaatatgatcgagatgccatctccatcgctcacgaaggaagaagagaagactgatgcacctacatcatccgaagagagaaccacagaaacatgttgttttaaatggactatgcgaagagcaccatatggaaaaaccgagacggttttccctgaagaaggggaggatgatgtgaccaaggctaccattgatacaaccattgctcacatcaagatcaagatgcccaagtga

SEQ ID NO: 51466 - DNA, 222 bp, Oryza sativa
  Clone ID: PAT_MRT4530_53855C.1
atggcggcgctgaatcctcgccgggaagctgagctgtcggtggtggtcaccattccaagcctggaggtggagatcgagatgctccaccaccactcaacctctgccgacatgtgggaccactgcaccggcgcccccgccggccagccttcatgcgccgaagaccgcgccacatccaccggcagctcctcctcgcaccaagccgtctgccacaccctcgactag

SEQ ID NO: 51467 - DNA, 197 bp, Oryza sativa
  Clone ID: PAT_MRT4530_53856C.1
agcatgacgccccatgcacgcgtcgcaaagctggaatctctagagagcggcgcgcctttttttttttttttgacaagaaaaggttacactcttaatatacaagagacaaattggagaaacagaggaaagaacatgaacagtgatcagattgagtagattcttttagaaccacctctctctgtaaagtgaaaaaatat

SEQ ID NO: 51468 - DNA, 430 bp, Oryza sativa
  unsure (1)..(430): unsure at all n locations
  Clone ID: PAT_MRT4530_53857C.1
acctcagttgatacactcgctaaatcagacctggtcttgaacagtcgttaactcttcattccgatattctcttcattctgtcgctcccatttccattgagctcccaatttgctttccttaagcaaaccatctttcgtcaatcttcaccgtttacgaacctttgtacatcggatataaaccggtatacacacgtaccagtataaaacacaatcaatttcgcttccaagcaccgatacgacatcataatgccttctcttcgcacaattgtcctcgccactgcggcttcagctgtcactcttgtcaatgccgactacgtgatcgaccccgatagcgttcctctgtctctacgtaaggtgtggtgccagaacgaggtagagacgtgtcccatgatctgtggacaaactagtaagggagataccaaggtnaacga

SEQ ID NO: 51469 - DNA, 329 bp, Oryza sativa
  Clone ID: PAT_MRT4530_53858C.1
accagacgctcagagacagagaaccttagccttgtaggttgatgctacggcagctgacaagcagctacaccttgacgctcttaggaaagtccacctcttctgttcttgaaggctgtgatccagactgcaaggtgcctgttctatggtgggtaacagctgatggatcatgcgccttctctaaccacagctaccggcttaaaggatcatgtggcaagtcactagcaccttcaccacatggttgcttatattccaatgctctcgaaggctgatagtgctatgagaacccaaagaacaaggtgactgctgttcctgcaaatgaaggagagatc

SEQ ID NO: 51470 - DNA, 660 bp, Oryza sativa
  Clone ID: PAT_MRT4530_53859C.1
ggccgcccctttttttttttttttttttgcataaaaaaaatgaaggcattttattcgattgagttcataacccagcgccttccgtctttacacaacgaaaatgagtaaaatgccttttcttttttccttttttctatctcaaaccaaacaatcacttgggctccaacggcggcgacgagcggtggacacgggcctcacgcaacggcggctcatcgccgccgccgcctcctcctcctccgccgccaccgccgccgccgccacaccgcttggtgcacatgcacttggagaagacgcccttggagcagtagccgccggtgtactcctcgtggacgcagatcatggcgcagtttctgttgcccctgcacttcccgcggtacatcttgctccttgctttgcagatgatagcttctgtgccggagagtgaggcgaagaggatggccatgagtaaggcaatggcaagcatggtggtcatcttcctcccggccgtcgacatggctggggatcaagtaatctgaatgggagaacttatttttttttttgggttgagggaactgaatggaagaacttgatgagaattgagaagggattgcatgaacagggggatgatatatgcatcctgaaacttgcatgtagttaatgtgattacttggccccggccgg

SEQ ID NO: 51471 - DNA, 437 bp, Oryza sativa
  Clone ID: PAT_MRT4530_5385C.1
tccgtgtcgactcaggaagactgaggcagcgagggatcctgagccgcgcgcttgcgcacagcatttacctaactctgctggactcttgacttacaagactagcttctcatggactgcgtgtgctgcactgccggaagcggcagaggcactcgcatcagtacgttcaggtcaaccggcagagaaacagtaacacatcgatacaagtacacacgtgcgacagcagggtccatgaattacatatactgtggtgcgagcgatctatatcaccagctggctctcactgtgacacatactgttgcatactgcacctatcatcgggagccggagatcgcacacactatatcatgtcatagcactactaccgttataataataataaccagcatgtgctatctactactcacagttgtattccgagaaaaagaaatacggtaaat

SEQ ID NO: 51472 - DNA, 446 bp, Oryza sativa
  Clone ID: PAT_MRT4530_53860C.1
aaaaggaaaacaaacgggggttaaaaaccgaaccgaaaccgggttaaacagggggccccaaccccaaaccaaaccccctaagggggggaacccaagggccaaaaggttggccccccgaaaaaaagaaccaatcccccccccggggaagccagccaggacccttcccagggcagggggggggcccaaaaaggggcccaactggacattggccccccgaaacaaaaacctggggcaaaggggccccccggccccccagaggggcaccagggcccgaaaaaacgaccccacccccccccccaaaaaaaccccccccccccgccccgggaaaagcaccccccccgggccgggggccattttttcccacagggacccccccaggggggcgaggcacatgccgacgggcacccccggggggataaaaaaaggggaaggccctccccaggggg

SEQ ID NO: 51473 - DNA, 541 bp, Oryza sativa
  unsure (1)..(541): unsure at all n locations
  Clone ID: PAT_MRT4530_53861C.1
aaaacaaaaaacananaaaaccncaaccaagttnaaaacaaaannncagnaattcccacacantaaagggncacaaccctggnancncaccagaggtggcaggccagatcatagaacatagtggaacccccgggcatgcaaggnntttggcacgnggtcgtggacgtggtggcngagggcgagggcgtggctaccatcngcntaacaacaaccatttcaacaaccaggaactaccaacanacggtcagcaccacaatcaccacgnccaacaaaccaccaccaccaaggtggacaaaccgtggtggacgactcatcatgttgggnacttccgcccaattcanacagacaanaccaaagncctgnagcaggcacccgacagntgccaattggacgaccaacnaaggcagnccttccccggaacnttcgncatgnccagaatggaaacgaggggttttcaccttggggcagaanggnaagncganaaaangttgacttancgggttctgatgntgacagnagnncgaggccttgnaancccctt

SEQ ID NO: 51474 - DNA, 187 bp, Oryza sativa
  Clone ID: PAT_MRT4530_53862C.1
ccccgggctgaggcaagatatgtgggatgttctggctttatgagcatggcctactcggttcaagcagtgaacccacggtatggggctaacaacccggagtggactaaactcttccgtgaggcggaggagaacggcattgaacttccagatgattcctactagtgctcttgctgatccgaggacagat

SEQ ID NO: 51475 - DNA, 2274 bp, Oryza sativa
  Clone ID: PAT_MRT4530_53863C.1
atgggcgcgcttcgccggaaggcctcttcctcgctcgccggcccgctcgccgcccagcggcgtgagcgcaccggagaacccggcgccgccgccgccgctgcggccaagaactcggcggtcaccctcgcctccgccgtcgacgactctcatcacgtccccgctacgagacatggcgacgtcgccgggctgatcggggtggtggtgccgttcgggagcatggaatcctacgaccgcctgaggctcatcggcgagggcgcgtgcggcgccgtcttcagggcgcgccacgtcgcgaccggcgaaacggtcgttgtcaagatcgcccacaagaacggcggcggcggcggcggcggcgacgaggcgctgctgcgggaggccgagatgctcgcggcgtgcgtggggaaccccgccgtcgtgaggctccgcgaggtggcgcgccacccggagaccagcaagctccacctcgtcatggactacgtcggccccagcctcgccgacctcctcacccaccgcctcgacggcgcgctgacggaggcggaggcgcggggcgtgatgcggcagctgctcgccggcgtggggcagatgcatgcgcgcggggtcatccaccgcgacatcaagccgggcaacgtcctcgtcggcgccgccgacggccgcgtcaggatctgcgacctgggcctcggcgggccagcgtcggcggcgccgccgcggacgcagctggtcggcacgctctggtacatgtcgccggagcagtacctcggcggcggggagtacggcccggcggtggacatgtgggcgctggggtgcgtgatggcggagctcctcaccggcgagacgctgttccccgcggacacggagtaccaccaggtggtcctcgtcgccggcgtcctcggcgtggccgacgagaagatggatggcttgcccctgggcgtcactaccaggccgagtcagctgcggcgcaaggtgcccgaggagaagctctcgccggcgggcttcgatcgtgctcaacggcttgttgcacgcgacatgacggccgtggctgcctggcaacggcgaggccgccacggcggcgatagtgccggcgagctggcggctggtggcggggttgagttgggcggcggtggttatcgtggtggtggtgacagcgtcacggtggttcaaggcgtcggggatggcgatggcggcggggatggcatcggccgagggcgcaaaggcagcggctttggtccctacgcggcgacgacgcggtgctcggcggcgacggcggcggtgtccccagatccgcgcctctcggccggatctggagggtggccggctgtggtggtcggcgacggcgaccaacttgcgatggctagcgacgacagttggcgacggcggcgacggtggtggccgcggcagttggcagcgacggcgtcggctgacgacgcgagcgaaggacttggcggcagcatggcggaggacgacaacgaagcagccgctggcagaggcagtgattcatggaggcggtggctggtggccgcgacaacggtcaccggaggcatggcggccctggacggctagccgagggtgtgggagacggctgcatttggccggcgcggcatcgtttggtggagggatcggagaccggctttggcgcagagaggcgtagccgatggcagcggaggccggctcggcgcgagaggcgcgggcggcagagatggaggccggcttggcgcgagaggcgtggccaatggtggaggaggcgaccgacagacggaagttaccgacagatggtcctttaccgacagttaacggattactgacagatacgcagtttgcatatatcagtttttctgacagatattctgttagtgtgcccctaaactcttttgcaccagtattaagcatggttgcaatgcaagtttccatcccatggctatgaatgacagccccagctctcatcaaataagccttgggtgcccagaggcggtcgtcggcggcgacccagcgccaggtgctgcgtgcgtccaggagctccatcacccgccccatcacctcctccccgagcacatccacggggtcctctcgtctcttgctcgccgccgccgccgtcgcccgcaccttgctcgccgccgccgcccgcgccttggccgccgatgccgtcgccttgccgccgccggaggaagcgtgagtgcgtgacggccatgaaccatgccggcgaccgccggtggtgcaacggacgtacctgacggacaaccggcagcggtgaccacgaacctcatggacggcggatgatgacat

SEQ ID NO: 51476 - DNA, 174 bp, Oryza sativa
  Clone ID: PAT_MRT4530_53864C.1
cggacgcgtgggtgataaaaccaacaaaaagatggctttaggttttgaatagaatgcccattgcatttattgaaaaaaaaaaaacggcagcgacatgggtagcacctgctaaccacacttcctttggagcaaaccgttgaatcaaacgacggaagaaagctcgactctgtttca

SEQ ID NO: 51477 - DNA, 2095 bp, Oryza sativa
  Clone ID: PAT_MRT4530_53865C.1
atgagcggcgtcgcgtcgctggggctcaggtcgtccgggagctatggatccttgcagcagtccaacggccagtcgccggcgccggcgccgtctccgccgctcgccgcgaggaaggccgggaagatgtccttcggaggggcgggcgctggaggccgaggcctcctcttcgcccggatctgcaagctcaccagccgccgccggcggatgctcctcctcctcctcgtcgccgctgccgtgctcttctgcttcctcttctcatcactcgtcagtaaagatgaagatgcaccacctggtattgaaaccatgcttggaatttctgatcaagtccggagctttgtgaatcctgtttggacatcttcgggtagaccaataacccagggagattctttgaatgggaatggtttgaatacagcatcacggccggaaaaacagtctgactctgacagtagtcataaaaaacttcagggtctctcatggagcttcccgccatctattgtactggagcaccacccttgtgaaaatttctcattttttcctccacctattgacaggaaacgcactggaccacggccatgtcctgtttgttatgtgcctgttgagcaggccctggcattgatgccaggtgcaccatcagcatcaccagtccttcgaagcttaaattatttgtctggtgataatttgatttcaaaagagtcaaaccacggttctttgtttggaggttatccatcattggaagagcgagacaagtcttatgacataaaagactcaatgacggttcattgtggatttgcgagagggaagatacccggtgtcaatactgggttcgatatagatagagctgatctttctgagatgtggcagtgccaggggatagttgttgcttctgctatttttggaaattatgatataatgcaacaaccaaaaaacatcagtgttttttcaaaggatacagtttgcttcttcatgtttctggatgaagaaacagaagcagcaataaagaacactacaacaattgataattctaaaagaattgggctatggcgggtggttgttgtccgcaatcttccatattcagatgcaaggcgcaatggaaagtgtttacctgatttgaaagctatagttatgctacttgtaaaggcaaatgatgctatgcttaatgttccaaaattactacttcatcgtctatttcctaatgtgcggtattcaatttggattgatgggaaacttaaactagtgagggatccttatcagctattagagagattcttgtggagaaagaatgttagcttcgctatttccaggcattacagacgctttgatgtctttgaggaagcagaggccaacaaggttggtggaaagtatgacaatgcttcaatcgattaccaaatagaattctacaagagagagggtttaacccattattcttcagctaagcttcctatcacgagtgacgtccctgagggctgtgtaattatacgggagcacatccctatcaccaacctcttcacgtgcctttggtttaatgaagttgatcgcttcacctccagagatcagctgagctttagcacagtgagagataaaataaggaaacgagttaactggactgcagatatgttcctggattgcgaaaggcgtgacttcgttgtccaggcatatcacagagaactatgggaacaaatactacgaagtccgcctccaccccagcctcgtttggtgcgccagcaacccagaaagatgcttccggataatacagcaaaggaacctggaaaagcctccgggtccaagagggtatcagcgaagcggacacgggataagaaatcaggctcgaaacgagctcatagaagtaaggtcactggtgggaaggaattcatccaactgtaaatctcgtggcaaattttgctccatacgattgcggtcaaattccggcgttgggttcattatttaacctcaattcattctccccctctccaaaggctcgaaaattttgtcaggaattgttgatagaggatcatttttttgtgttgtaaataaacattttagaataaagacggattcgactagcggctgcttcagtaaattcaatatatgttgagtt

SEQ ID NO: 51478 - DNA, 798 bp, Oryza sativa
  Clone ID: PAT_MRT4530_53866C.1
tcagcatcctaactcgtcaagacttgtcctctttccccttgatctcaggtcaatcttgatggagcacttctgtgaaacgtgaggcagttcagatacgaggagagccttgcgtgtaattacagactcgatcccttcccggtgcactatgtcggtgtagttagttcctatcctgcaatcaatcgaaaactgaatcttgggcagagcgaagttcatgatgtgcgtgcgcgcatcgatgctcccggcgatccgtatctccaagtacttgcgctgcgccgagagctcgccgacgacgagccgggtcacgtcgggctgcgagaacacggcgtgcacgggcaccgtcacgttggcgctccgcggcggctggtagaactccggcacgcccacggcgccgaccgactcgttcgcgtacgcgacgccgagcgccgccgcgccgtacctgatcccgatgccgttggcgttctgcgccgcgaacaccagcgttgccaccgagcacgccgtcccgttcgcgttcgcgccgccgccgccggtgccgttcgccgacgccgacgacgacagcgacgactggatcaggctgaacgacctgtccatctgcacggactgcagcaagaacgtcggcttcttgagcctcgcgacgaacacgacgagcagcacggcggcgacgagcgcgaagaagacgaccgagagggcgaggtagaggcagagacatctcgccgactgaggcggcggccagtgagcgccattgttgcagctctcctcgcaactctgacgacctctcctgccgctgctggtagaatccat

SEQ ID NO: 51479 - DNA, 306 bp, Oryza sativa
  Clone ID: PAT_MRT4530_53867C.1
gccgaggaccgtgggtggcgagcttccgaggtgcctcgcggttggtattcccacagcgccggttctcgtcgttcgagtgccactggagtttaggcccgtagttctgaagttggtacaaatgaacgcgtcgtgattcgccgcggatttcgccgggttgtatgaccgtatcggaccggtccagatgttgggcaccgtggagccatcagttcatctcgttgatgagctgctaaagtatggattgcacttgttctgatatatataaacgaaataccaccattattagtttaaaaaaaaaaaaaaaaaaaa

SEQ ID NO: 51480 - DNA, 207 bp, Oryza sativa
  Clone ID: PAT_MRT4530_53868C.1
ttgatttgcaccaaaattgctctctactcccagaagtgcccccacccctccgggagaattccccccctccgccggtcgattcggggctagaatccggcgtctccgccgccaatgaggtcggtccggcggttcgttgatccactctctcgattgtatgaaattggactaccttcttgacgcggcgactcggggagtatgagctcggtt

SEQ ID NO: 51481 - DNA, 707 bp, Oryza sativa
  Clone ID: PAT_MRT4530_53869C.1
ggaggaaatgctgctggctcatgaggtaagtgataaccaacaagcatctgcagaacacgagcatttcagggaccaaattaacagccacagtgaaagcttgccacaatgccttcctgagctaaaccgccagcataatgattccatctctcaaactgcctctggcgcgaggtatcaactgggatcaacagcatattcaagtcctaaggtagaaaacactgatgccactgggatatcggtactcttactccagaagtcaagtagcaataaatggcctgttgtggaaggaaggactctgtctgcaacaaatattctttgttcagaaccctattatacaagggatagtatcagtgctatgaggcgtagctttggacgggatagctcttcagcaacttcttccattgatctagggtcatcaaggcaatcagatgtacgttttgagcgtctcaggagtggcaagaggggtgatttcgagaaggctcgaatgagcagtaccatgagccatcaaagtgttgcttcagtgtcagatatgtcaattagtggttcatcagcttcactttgccctcagagtgatgttattggtgacacttgtttcccaattgacacgctggaaaggagtgcatcgagaacaacagtctctattgaagaacatgacagctcttgtatggatgctttatcaagtggtatggagtgttcatctgctgtgcagc

SEQ ID NO: 51482 - DNA, 3561 bp, Oryza sativa
  Clone ID: PAT_MRT4530_5386C.1
atgggtgattatacagccgattacacaggaatcggctatatgcaaaacctagctaacggtatgactggtcatgacaccggtctaaccgcatcctatgccggtccagaccgtgccctattttggccagatcggacctcctatggccggtctgaccgcaccactaaccagggagtttctccaagttttcataccataactagcagtactgattttaattattattcatcacctgttaatactgttagtcatgctattccacatatccctaatgcctacaatgatattaataggggatatcctcccgatactaggtatggccaatataacaatattgtgccacaacaaccaccttttaggccaccaagtccaccaccagatccaccaaagcctgaaactgtggaggattggtttagaaatactatcagggagaatttcacaaaactaaggaatcgtgctagggagtaccaaaagccgtatcctgatttttatgacgctgtcccatatcctcctgattataaaattcctaaatttaccaagtttagtggtgagaatagtaggactacatacgagcatatagatcaattcttagcgcaatgtggtagggctagtagtatgaatacatgtaaattgcgcttattttctttatctttgtccggtactgcttttgcatggtctacttctttaccggaaaattctattttttcatgggctcaattagaacaaaaatttcatgattatttccacactagtgagactgagcttaggttgtctgatttaacatcggttaggcaaaaatacaatgaatctgtcgttgattatattgaaaggtttcgagatattaaaagccgatgttttagtttgaaaataactgacaaagatttggccaacattgcatatgatggattgcttgattctattaaagagaaattgaatggccagatatttcttgatattgatcatgtgttgcatgaagctctggctcaggaaagccgagtggatgacaatagcttacaagctagtttagatgaaaatgcaatatcatgtatagccgaaccaagcgatggttcggattgtggtaataatttgtgcaatgatgccgtaacgagtatagccgaaccaaatgttgattcggattgtcttattagtttggatgataacgcaataaccaatatagccgaaccaagtattggttcggattgtgttactagtttagacaatgatggaatagtcgaaccaagtaatggttcggattgtgttgctagcttagagaatagcatcattgaaaatatagccgaactaaatgacggttcggattgtatcacaaacaaaagtgaaatagcattgtcacctaagaccgaatcacaaatcggtcatgtggatgttggaaaagataatgaaaatgtcttgcgggatagtagtgagatagaatctaaaatatttatgcatacatatcaaaggctgtatcctgaatacgtagattcggtcccgtacccgcaaggatttgaggagcccaatttcacaaaattcacaggtgaggatgctagaacaacaatggagcatatcggccaatttattgatcaatgtggtaaggccggtaatgatgatttgcttaagttaaaattgtttcctctttctttgtcaaactttgcatctacatggtatagtttacttgctcctaattcaatttctacatggtcacaaatggagcatgagtttcatggttatttcaaagatgcaaacttgatggagcaaagaccgattgatacttcatcggtcacttgtgaaactatttcggttacctctatgcctaagaccggaattgttagtgatcctctccttgttagttctattgatgttggcaaaaagaaagggaaaagtgttattattggggatcctcggcccaagaataggatcaaaaatgcgaaggccgaagatcataaagttacaaaagatgagtcatctagttcccaaaagactaaaaagccgaagctcacttttgagatgcttatggctaagtacaagaaaggattagctggtcaacgatttgataaccaaactagtgattcgaaaagaccaagatcatctcgtaggaagagatttggtcaaacatcaaagcaatcgaagccatcaactataccaactccatataaacctccggttgtgatgccatggtatccacatccaatgtcactatttggttatacttttatgtattacatgccatggatacctcaaccacatatgccgtatcatcgaggatggaagcaaccacctaggacaataccaagtcaatataattcaagacaagactgtttcccacaaaagaatcggtccggtagatcaaaggtgaaaagtgtgaagaaggtgtgggtgaggaaagaagccaaagctccggaggtcgttgctatcaaggagaaatctcaagatgttcaagtacctactgaagatgcggcgaaaactatacaagcggagaagactgaaaccaacgccgttgctgtcgacatcggcggtctgaccgagccagctagccagtctaaccgccagactacggccggtctgaccaaccctcctagccgagttttgaaagatcctacacttaaggttgatcggaagattcggcgagggagtgaagcttgtcaatggatcggcaatgttcaattagcgtctaccgctgtgttgaatcctatcattaaactatggccgttccgaggttgggtttgggatttcattggtcaaatttattcttcgtcatcaaaagggtattggttcgtgctaattgcaatggattacttcactaagtgggccgaagccgtgccgctcgagaatattacttgtacggagcaagacgacttgtcggttgaagattacaagaccttgatgaggagcaattttgaagacgtcatcgacaagcgtttgaagattttgaaggacatgaagacacttcaagacggtgtttccagagagcaactaatgggagatagcttgaagaaatacttcttgagcatttggttcacgtatgttcaccaaaaaggcagggggagcatgtgtttacacctaaatttggcacctatggacgaaatagggaaaaattgccaaagtttggaaagtgtcgggtttccttcacaagggccggtcagaccacagcgtttaggtgttgcgatcgtgcttgtcgacttatcacgaaaagttaccaacaacttattgttgctggatcaaacgaaaacttcaactgagccggaggccgaggccccagcattgtctttcacgcctgcactgacttcagctgatggagctcatcaggagccgctcgtcgttgctacgaagaactcaattccgcggattgcacatatgccaatggtgccaacgaggaggctgtcctgtccagagcattttgtcaccacttccgaaggagttcatcagctcagtcgctatagcttggcagactggttcagaaatgagcttgggaatgggatttgggggagctggatatttctggcccttagtttcgtcattcttgggctgaaccgcgagatttggaggcagccgcagatactcaattga

SEQ ID NO: 51483 - DNA, 611 bp, Oryza sativa
  Clone ID: PAT_MRT4530_53870C.1
atgactgacaaacccaagggaatctgcaagcagatcggttttcagacccactcctgcgatgatggcggcggcggcctcggcccgcacgcccgggcctacaatgcctccaagcataccatcgtgatgccgcctgcgagctcggcgcccatagcatccgcggccgtctcctccgccggtgagccatcgatggtgaaggagcggctccgcgtgctgggccacctcgttcccggatgccggaagctccccgcgccgatgctgcttgggccaactatgtggccgcgctggagatgcagtcaaggccatgttctcatagacctcttggccgccacccccggtgacgcgtgcgacaggggacgccgcgtcaacgggcagcgagcggcacatgacgtcggagatcgagcagtaccgccgcagcgacggcggtggggcggcgcgaccatgcgcttgcggcttgtcactgtatatgggccaaattctcaatggccctggttcgagcaggcctagttttgatttctttcagcttggttactggcaccaatcgatttggttggttcccttgttgatcaatcggaaaaggaggtgaaggtccccggggtatcgctttctttcct

SEQ ID NO: 51484 - DNA, 627 bp, Oryza sativa
  unsure (1)..(627): unsure at all n locations
  Clone ID: PAT_MRT4530_53871C.1
ttatcgctcacgctcntgtcatgagctgggccaccccatcatcctccggcatcctgcgtcgctctacgtcggtcggtgctcgtcgtctttgctatggtgtccagtgggccctgatccgagcatcacgtcggagatattcggctgaacctttcggcaccatcttcaacgtggtgcgtgcgagccccgtgggatcttacatcctctcggtgaggtgtgggttacatctacgacatggagtcgccgccgggagctctgtgcacggctccggtaacccttgcttcgctttgtcgttcgtcatcatggcgtgtgtctgcgtggttggctctgctgtcgccttcatgctcttcgtcaggacgaggaggttttagtaaaccgggttgtgtacgcccacggttgcaatcttttctatagagagagaaacgaaccgagttcttttctagcatatgcttacctatcttttacaagccacaggatttgatctgtacctgtacgtcagagaatggtagaaagcagaggcacactactttctgctgccatttttttcttgttgaaaagacatcattggactggtcactggtgttatatactactagtacttgtatgtatgaaaaaaaaaaaaaaaaaaaa

SEQ ID NO: 51485 - DNA, 222 bp, Oryza sativa
  Clone ID: PAT_MRT4530_53872C.1
atgggggtgatcgcccagagcggtcacccgccattagccaccccccagccgcgagcccatgaaacagtactcggcattcaaaagaaaggaaaaggtgaacagccaggcttacgcacatgcatccatacagagagtagcacacaaaagcttttactgttaactttccaagccgtacacatgcttggcctcgcctgggggaggatttgcatcctccgacgttag

SEQ ID NO: 51486 - DNA, 303 bp, Oryza sativa
  Clone ID: PAT_MRT4530_53873C.1
atggtgttgtcgatggccggcagctcggcacggcacatccagagccacggtaccagtgcgtgcaggggagacgcaccacgggtgtccgctaccgcgatttcctccgtgcacaccgtcccagccacgcccaccgtcgcgcacaccaccggtggctttgacaccacagcttacctcccgccgcacgaagggggagggtcctcgacggggaaggactgctcgttgcagctgccctgtgcccgccaggccggagcagctccctcgcagtcgccctggcccgtaaattatccgcaagagttagtatag

SEQ ID NO: 51487 - DNA, 333 bp, Oryza sativa
  Clone ID: PAT_MRT4530_53874C.1
aattcggcacgaggtttgtccgtactatgaatattgcagcaccctatagagaatgtgttgtkatacacacgattcattctctccggtgactgtggttttgtgctgcagctgcatgaagtacctatggatgctgagatggagcgtcacagatattagacagcamgtactgagatgagctgctgtacatagcacatcatacatcaatacagagatgagacccggcagcgaattatattacgcattgagaatatgtgaccgcctcacgcttacagbatcgctctygcttccttgacaggagggactattgacggagaacgtactttagatacgcta

SEQ ID NO: 51488 - DNA, 270 bp, Oryza sativa
  Clone ID: PAT_MRT4530_53875C.1
atgggcgagttcgacgactactgggcgcgggcgtacaggggcgactccggggtgccgcactccgacccgcagcggctggtcaccacctggaccggcgccttcgccctcggcgccgccgcctgcgtccaccaccacgcctccgccctcgcctccaacatcaagtccctcccccactatgcaatggacctaggaaatctgtcattactagatgaaacattgtggcagcacatatgcaactatttagttgacttcaaccaaaaggaattttaa

SEQ ID NO: 51489 - DNA, 738 bp, Oryza sativa
  Clone ID: PAT_MRT4530_53876C.1
agttgagcgccacgaggagccatcgcgccgccctgccgcgccccggcgccgccgcctgctcgtggaccacgtccttggtcgcctccacgtccatgcccacgctttattcgttttatattatataagatgctctaacttttttccaaatgaattcttgtaagcttgatcacctaaaatttcggtcatgatcgtgaccagtgttactcagcgccttcggggtactagatgtgcttttatggccagcacttctttgcttgtgctgatcttctctggcacacgaaaggtcctgctaaatgtaagttcttcctctggtttgcatttcagcgacactgctggacggccgatctcctctagaagcgtggcattgatagtcactcggtctacctttgttgcgctcaagagcttgagacggtgaaccacatcctcctcgatcgcgtgtttgcttggcaggtctggctccgtgtgttgtcgcctcttggttgggctaccctctctccctcccgtggtagctgcctccaggattggtggccttcgtctagggcatgcttgcctgagcatctccgtcccggcttcgaatctctgatcgtcctagtctcctagcaactgtgggaggaacggaactccagggttttcgactctgcgttatctttggtctcggaggtcctacagttcatcctctcagagggccatctttggtcgttagctgacattgctaattttggggttttattgggagag

SEQ ID NO: 51490 - DNA, 438 bp, Oryza sativa
  Clone ID: PAT_MRT4530_53877C.1
gcggccgggactctattctatcgtccggtatgctcttgtcgacgtaccgtcgctgtcatttgactactcgtccgcactacgatatcttcgtctatagacgcgcagactgcgaccgaggggctcattgacaacctcagcgaccaagtccagatgctgtgctagatggctgcctcgttgattgcccatgacaacagggccgcttgagacacctgcaccaggacaaacatggacatgctcgttggacacaactacaccaaggataactcccactattatcagattgtcatggagagatgtccgaacatcgttcttgagtcagacgccgccagtctcgctgttgacgactgcaaagagcttgtcaacatcaagtagaagacccctgacattgcacacggtgtgccctatctcttcaacaagaatcctgagaagatcgatgct

SEQ ID NO: 51491 - DNA, 433 bp, Oryza sativa
  Clone ID: PAT_MRT4530_53878C.1
ccgacgccgaccccagactccactgccccgtgccgcctcacgggtcgcctcgccgacgactccgccgtccccggcacccccgcctagcgccgcctcgcggatcgcctcgccgacgactggctcgccctcctcctcttcaaggccgccgagctcctccccgccgtcgcgatggcggccggtggagcggatcgatgagcaggcggtgctgtgggagagaggcgagggtaggaggcggatatgacggagcgatgaggctacggtagtcttgaattgacagaacgccagtgcctaggctccaaacgttgaacaaggctattctagtcctaacagagaacgtattatatgatacggactacttgctgagtgaagatgtctacaacatactggaccctggtacaaatgacttcgatatgctccacaatactttggatca

SEQ ID NO: 51492 - DNA, 373 bp, Oryza sativa
  Clone ID: PAT_MRT4530_53879C.1
gggaaaaaggggggggttttttggaaaattcccccaaaaaaaaaaatcccgcccctttttgaaaaaaattttggtccaaaaaaaaccccctattaaaatgggttttttaagaaaaaaattaaaacccttttttaaaatttgaacgcttgttttttttgaaaaaggaatccccggggggaatttaagccttttaaacaaaaatttttttaacaagttgaatgtctttagggttgaggggaaaccccttggaataaatggcccaaaggttggggtccttaaaaaaaccaaaagggtttgcctccccaacctcctggagggaaaggaaaaattggttttgaaaaccaaaaaggggtttaaaaccctgggaaatttc

SEQ ID NO: 51493 - DNA, 2508 bp, Oryza sativa
  Clone ID: PAT_MRT4530_5387C.1
atggccggtcagaccgtgtgctacgccggtcagaccgtgcctaccatagccggtcagaccgtgctctatcctggccagatcgcgcctcctgtggccggtctgaccgcaccactgactaccggtcagaccgggctatctatagccggtcagaccggttccctgggaatttctctaggttttcataccacgactagcagtactgattttaattattattcatcacctgttaatactgctagtcatgctattccacatatccctaatgcctacaatgatattaataggggatatcctcccgatactaggtatggccaatataacaatattgtgccgcaacaaccaccttctaggccaccaagtccaccaccagatccaccaaggcctaaaactgtggaggattggtttagaaatactatcagggagaatttcgcaaagctaaggaatcttgctagggagtaccaaaaggcgtatcctgattattatgacattatcccatatcctcgtggttataaaattcctgaatttaccaagtttagtggtgaggatagtaggaccacatgggagcatgtagatcaatttttagcgcaatgtggtgaggctaattgggatacatgtaaattgcgcttgttttctttatctttgtccggtactgcttttacatggtttacttctttaccggtaaattctatttctacttgggctcaattagaacaaaaaattcatgattattttcacactaatgaaactgagcttaggttgtctgatttaacatcggttaggcataaatacaatgaatctgttgctgattatatcaagagatttagggatgttaaaaaccgatgttttagtttgaaaataactgacaaagatttggccgacattgcatatgatggattgcttgattctattaaagagaaattgaatggccagatatttcttgatgttgatcatgtgttgcatgaagctctggctcaggaaagccgagtggatgacaatagcttacgtgctagtatagatgaaagtgcaatatcatgtatagccgaaccaagcaatggttcggattgtgttaataatttgtgcaatgatgccataacaattatagccgaaccaaatgttggttcaaattgtcttgctagcttggataataatgcaacaaccattatagccaaaccaagcgatggttcggattgtgttactagtttagacaaatatggaatagccgaaacaagtgatgattcggattgtgttgctagcttagagaatagcatcattgaaaatatagctgaactaagtgacggttcggattgtatcacaagcgaaagtgaaatagtgttgtcacctaaaaccgaatcacaaatcggtcatgtggatgttggaaaagatgatgataatgtcttgcgggatagtagtgaaatagaatccaaagtagcaatgcatacatatcaaaggccgtatcctgaacacgtagattcggtcccatacccgcaaggatttgaagtgcccaatttcacaaaattcacaagtgaggatactagaacaacaaaggagcatatcggccaattcatcgatcaatgtggtaaggccggtaatgatgatttgcttaagttaaaattgcttcctctttctttgtcaaacttttcatctacatgtcctattgatgttgacaaaaagaaagggaaaagtgttattattggggatcctcggcccaagaataggatcaaaaatgcgaaggccgaagatcataaagttgcaaaggatgagtcatctagtttccaaatgaccaaaaagccgaagctcacttttgagatgtttatggctaagtacaagaaaggattagccggtcaacgatttgataatcaaactagtgattcaaaaagaccaagattatctcgtaggaagagatttggtcaaacatcaaaccaatcggagccatcaactataccaactccatacaaacctccagttgtgatgccatggtatccatattcaatgtcactatatggttatccttttatgtattatatgccatggatgcctcaaccacctatgccgtattatcaaggatggaaggaatcacctaagtcagtaccaagtcattcatctaatccaagacaagaccgtttcccacaaaagaatcggtccggtggatcaaaggtggaaaaagtgaaaaaggtgaagaaggtgtgggtgaggaaagaagccaaagctccagaggtcgttgatgtcaaagaggagtctcaagatgctcaagtacctactggagatgcggtggaaaccatacaagcaaaggagatcgaagccgacaccgtgattgtcaaaagtggaggtttgatcgaggcatctagccggtctgatcgccaacctgtggccggtctgaccgaccctattggctggtctgaccgacggcttgtggccggtctgaccgaggggcattggagaagaatgggaaaattgagagcaatacgggagcttctacttcgaccaaaaatatcaagagtcattgcttag

SEQ ID NO: 51494 - DNA, 384 bp, Oryza sativa
  Clone ID: PAT_MRT4530_53880C.1
atgtcgctctgccgcgctgtggtgatgcagtcgcgggggcttcttctccgcacccgccgtcggaccttctccaccaccggcgccacggatcaagagcaggtcagaaggaccaacatcgtcagagaaattgatgaattgaaggcgaaggtgaagagggaaatgattgaagatgtcgagaaggtaaaaagggtggagaatgaagatagaaatgtgctcagccggttgttgactttctgcgggatgcccaggggtgtatttcgagataatctagtgtttggatgtaacgtagttgcggtgtttgttgcatccggtgtagttggggcatgcagtgctggctggagagatgcgcggcgtaagcgtgcaaagtttggtactaatgcttga

SEQ ID NO: 51495 - DNA, 271 bp, Oryza sativa
  Clone ID: PAT_MRT4530_53881C.1
tgcaaggtctccccacgcgtccgcccacgcgtccgctctcatacaaattcagactaaagattttctgcaaacaaaaagccatggcttccaacaaggtggtgttctcggcgttgctcctcatcatcgtctccgtgctcgcccggacggcaaccattgcggaccaccacaaagaccaggtggtgtacagcctctgcgaggcgttgtcagccagaattggccaccccgaggacttcgctgcccctttcccggccggggtgaaacccccatgcct

SEQ ID NO: 51496 - DNA, 1005 bp, Oryza sativa
  Clone ID: PAT_MRT4530_53882C.1
ccggccggggccgccgtcgcccggcgccgccggtgatcccgctcatgtgctagtagaaggcgttcggagctctttgggagtgtcgcacgcatggagatgaccagaagccttacgctcgtgccgctcccggcgacgctccggccggcatccgcggcctgtcgccggcggcggaggcggcgagggcttcccttcggtgcactcttctcaccatcgcctccttcgaaccagcagcagcaggaaatgcacatcagggcgctgcagccgcggcaggattgggtgggggagtgggtccggagcaacgacacgctagtccgcggcctgcccatcctcggcggcggcgcctccctgctcgccgtcctcctcaaccgtgcggtttccggcattgcagctgtcgccgacgcctccagttcgcagtcaagggctgacatactgactcttgctctctccgtaactgatattcttgctggccttgtttggttgtccatccggccgaaatccatttctcctgttgttcctcgaggtgtcgagtgcaaacgggtaggaacgggtgtattggactcggctcttcgtgaactactttggacatgggattcccttacaactgcaacttgttgcaaatccttggttgttgtgtatggagaggatggtaatgcagttatggtggatgcacagaagttcatgcaaggttccctttatagaagtgccatggaatccaagaagcaatcttacctagcaaatcttgccttatatcctggaaggactgaactaccattcttgccagctaacacgcaggccctaatattgcaaccaattggtgataaaggaattgcagttattggtggtgacactataagggggttcactaatcttgatcaggtgctatttctaatctacagcctcctaacatatatagtaccacgttttgttttgggtgattcgcacagataatacagagaaaaacaatctatatgtgtaagctaaagatcacagtttttaaaaacaaac

SEQ ID NO: 51497 - DNA, 383 bp, Oryza sativa
  Clone ID: PAT_MRT4530_53883C.1
cccacgcgtccgcccacgcgtccgatttgaagatcaaggcctagtttgatatataggagagatggagtttcaggctgtctaatcttgctctccttttgttttgagcagatagcatctatgaactttcacgagtccttttgttttctctacattagatttactagtttactccatgcagtaccaagagagggagagagttgttgctcactgtcgagtaaagctgctcatgttggaccaaaaagtattgtgcagccttgaataaatgttggctgtttcatgttggaaaagctagtactgcaataatgctgttttttgggttctggcccttttatacagtgtaaggggaaaataagacttaaatgggggagccatcctatttcaga

SEQ ID NO: 51498 - DNA, 207 bp, Oryza sativa
  Clone ID: PAT_MRT4530_53884C.1
atgttggatccacgccaagattcgcgcgtcaacttcttctcctctaattccggtaggcttcccttcttctccggcgccaacgacaccccaaactttggcaaggagcatacggggccattaacccggcagggtagcagcgactatgcaggaggtggagcactgctcgtcgcgtgcgtgagcgtgaagcggcagcggttggcggactaa

SEQ ID NO: 51499 - DNA, 306 bp, Oryza sativa
  Clone ID: PAT_MRT4530_53885C.1
atgttgggccggaacgggattgcggggtacctgcagcccatatacgttgggctggaacgggattccaagggcggccggcagtggggaggaggtcaccgggacgaggaggtcggacgggcgatcggcgatgcggcggcggcgacacggagagaatgggagggaggcggcgatgggggcacgagggagatcaagcactgcggcgagcggagtggggcgacagcgaggcggagcggccccacgcaaagctggggggaagccggcgctccgggtgaaggtttagggcaggagagtggtggccgggggtag

SEQ ID NO: 51500 - DNA, 453 bp, Oryza sativa
  Clone ID: PAT_MRT4530_53886C.1
atggcggtggcggcggctcgccggggaagaggcagtgcaagcggcggcggcggcgtggtgctcctgtgccttgtggcggcggcgctgctgatggaggccgtccccgccgccgaggccggcggcaagacgtactacgtgggcgacgccgccgggtggggccgcaacctcgactggtggctcgccggcaagaccttctacgccggcgacgtgctcgtgttcaagtacaacaaggagtaccacgacgtggcggtggtcggcggcaaggggtaccggcggtgcaaggtgccgaggaacaaggacacggcggtgctgcggaccgggtacgaccaggtgacgctccggcgagggaacaactacttcatctgcggcatgccgggccactgcgacgccggcatgaagctcgccgtcaaggctctctgcttcttgtactgtactggctctctgatgatctga

SEQ ID NO: 51501 - DNA, 570 bp, Oryza sativa
  Clone ID: PAT_MRT4530_53887C.1
atggggtgttttgaccccggatatctcacctcaggacacgggcggatggagaagtttggggggggggtcggggtgagcccgttccacctccacctcgacacctgtcaccctcacctgccgccgtcctactactccatggaccacaaggagtacgcgtacaggcacgccaccaaggagttcaagcagctcggcatggagcccaagcagagcaccacgccgctcttcccgggcgccggttatggcaacaccgctgcgtcgccgtacgccactgatctttccaaagaagatgacgatgagaaagagaggcggcagcagcagcacagcttcctcctgggcgccggcctccggctagagaagccggcgggctacaaccatgcggcggcggcgcagaaacctctccgccacatctttgacgagtggccgcatgagaagagcagcaagggctcctggatggggctcgaacgtgagacacagctgttcatgtccatcaccatggccgccaacgacctcccgatcaccaccaccttcgctactacaatgggaggtgctggtctgctggcccacaactag

SEQ ID NO: 51502 - DNA, 229 bp, Oryza sativa
  Clone ID: PAT_MRT4530_53888C.1
atattctcccttgtgtatattcactatttccatttccattcctgcatcagcatcagccacaccacagccagttccaccacccccatcacacccacaagcgcacactcccattccatggttcacaccatccacgggcactgcacagcacaccaccctcacaccactgggcatggcatgtgcatcacgcaaggtgcgttctctctcgcacctctcgcacacacgcacgccc

SEQ ID NO: 51503 - DNA, 924 bp, Oryza sativa
  Clone ID: PAT_MRT4530_53889C.1
atgatgatgatgagcggtcgcccgagcggcggcgccggcggaggtcggtacccgttcacggcgtcgcagtggcaggagctggagcaccaggcgctcatctacaagtacatggcgtccgggactcccatcccctccgacctcatcctccccctccgccgcagcttcctcctcgactccgccctcgccacctccccttccctcgccttccctccccaaccttcactggggtggggttgctttggcatggggtttgggcggaaggcggaggacccggagccagggcgatgccggcgtacggacggcaagaagtggcggtgctccaaggaggcggtacccggacttcccaaggtgagcccgttccacctccagctcgacaccacccacccgcacccgccgccgtcctactactccatggaccacaaggagtacgcgtacgggcacgccaccaaggaggtgcacggcgagcacgccttcttctccgatggcaccgagagggagcaccaccacgccgccgccgggcacggccagtggcagttcaagcagctcggcatggagcccaagcagagcaccacgcctctcttcccgggcgccggctacggccacaccgcggcgtcgccgtacgccattgatctttcaaaagaggacgacgatgagaaagagaggcggcaacagcagcagcagcagcagcagcagcactgcttcctcctgggcgccgacctccgtctggagaagccggcgggccacgaccacgcggcggcggcgcagaaacctctccgccacttcttcgacgagtggccgcatgagaagaacagcaagggctcctggatggggctcgaaggcgagacgcagctgtccatgtccatccccatggccgccaacgacctcccgatcaccaccacctcccgctaccacaatgatgattaa

SEQ ID NO: 51504 - DNA, 1147 bp, Oryza sativa
  Clone ID: PAT_MRT4530_5388C.1
ccatagaaccgccaaggtatacaaacttttccatacttgtcacaaaaagttgccaacacgattttgagatgcttatggctaagtacaagaaaggattagccggtcaacgatttgataatcaaactagtgattcaaaaataccaagatcatctcgttggaagagatttggtcaaacaccaaagcaatcggagccatcaactataccaactccatataaacctccagttgtgatgccatggttgggcgaatcgaaggtgaaaaaggtaaagaaggtgtgggtgaggaaagaagctaaagctccggaggttgttactatcaaggaaaagtctcaagatgttcaagtacctaccggagatgcggcaaaaattatacaagtggagaagactgaggccggcaccgttactgtcaacattggcggtctaaccgagacagctggccggtctaaccgccagtctacggccggtctgaccgatcctcctggccggtatgaccgacggcttgcagccggtctgaccgggcccagaggccgatcagaccgaggggcattaaaggtgagcgggaaaattgagagcaacacaggagcttctacatcgaccaaaaatattaagaatcattgtttagctcctggaaaacaaccatagccgaagtggataccttccggcttatctcgctctcaaaagaggaggctacagcgtcttcgagccataggtcaaaagaaaaaagaggccgaagatgtaaagaacaaaacatgcaataatttagagcctcgaatgacacctaagcgagtgtggagacctaaagaaccgatgcttgattttaaaagtttggacgaaattggcaaagtcatagaccaggggcggtctgaccggcattgcacggccggtctgaccggtggtaccggcggtctgaccggctctgcatggccggtctgtccgggcagacagggaggtctaaccggcattgcgtgtccgttgaggtaaatcttgtctctcttcggtatttcaagcaagacgacttgtctgttgaaaattacaagaccttgatgggaagcaattttgaagacgtcatcgacaagcgtttgaagactttgaaggagatgaagacacttcaagatggtattttcagagagcaattaatgagagatagc

SEQ ID NO: 51505 - DNA, 336 bp, Oryza sativa
  Clone ID: PAT_MRT4530_53890C.1
atggggatggacatgaacagctgtgtctcacgtccgagccccatccaggagcccttgctgctccttctcatgcggccactcgtcgaagaagtggccgagaggtttgagatcaatggcgtacggcgacacagcggtgttgccataaccggcgcccgggaagagcggcgtggtgctctgcttgggctccatgccgagctgcttgaactgccactggccgtgtccggcggcggcgtggtggtgctccctctcggtgccgtcggagaagaaggcgtgctcaccgtgtgcacctccttggtggcgtgcccgtacgcgtactccttgtggtccatggagtag

SEQ ID NO: 51506 - DNA, 600 bp, Oryza sativa
  Clone ID: PAT_MRT4530_53891C.1
atggagagccagcggcggcgctggttttcctgtgtggcggcgtcggccgcgatcccgacgagtagccggaccccggcgctctacggcgggccctacgccgtggccaccgcgcacacccccgccgccgccgcggcataccacgcgcaggtgagcccgttccacctccacctcgacaccacccaccctcacccgccggctgccgccgtcctactactccatggaccacaaggagtacgcgtacgggcacgccaccaaggaggtgcacacggtgagcacgccttcttctccgacggcaccgagagggagcaccaccacgccgccgccggacacggccagtggcagttcaagcagctcggcatggagcccaagcagagcaccacgccgctcttcccgggcgccggttatggcaacaccgctgtgtcgccgtacgccattgatctttccaaagaaaatgacgatgagaaagagaggcggcagcagcagcactgcttcctcctgggcgccgacctccggctggagaattcggcgggccacgaccatgcggcggcgacgcagaaacctcaaacctctcggccacttcttcgacgagtggccgcatga

SEQ ID NO: 51507 - DNA, 269 bp, Oryza sativa
  Clone ID: PAT_MRT4530_53893C.1
atataaaaggggctagataatacacaggacctggggtacaaacactgtcacaacagcagaatggagcggtcatatgtgaacaggaacgcagcatacggagcagcacactccaagaagagaaagcgagatcacggcctggtaacaatgcgcacaccaagtcgacgatgaacttgacgttcatgactgtgcggtgtcaacgaagcctagcatcaggcgctctaggccactactgttgccggagcagctggagccacagcactgcttgcgag

SEQ ID NO: 51508 - DNA, 524 bp, Oryza sativa
  Clone ID: PAT_MRT4530_53894C.1
gttggtaaatgccatctagttgtaactaatatgttggacaggggaaagttacattgctaaggtctaaagtggaagaattaagggtttttcaactttttagtcatggtgaatcatcactgacttgataattgacttagttgtcttatgttgaaaccacaagttccagattgatggaattactcagtcccactgcaaaaatcaccaagttggaaaaaatagaatttgttttttgcggaattttctctgattgaaatgattgcttaggtgttatcatccattcatcctaatagtagactaggatagtacgacataactgttctctctacatgctttgttttgtcatcattttgttgtgctactgtgaccataattgttgttatatgtgaatgtttggtggcatgatcatcctgaaattataacttgtcaattgtatgcttgtggtgtccatatgctgttgaagttggtagataaatcagttattgattttgatggctcattttgtacgggtgccttgggaacttcat

SEQ ID NO: 51509 - DNA, 770 bp, Oryza sativa
  Clone ID: PAT_MRT4530_53895C.1
ggcacgaggcagcccagggaactcttcttcagagctctcccttccctccacaaagggggtctagggttagagtgtgtgtgtctgtgacaagttccaagctagcaacaacaagctcaattccttgcttgtttgcttccatattacactacatctcttcccttcaattaccccccttttagcacacaaaaatggctggcctgtccctgcagcatccctgggcttttgccttcggcctccttggcaacctcatatccttcacgacctatctggcaccaatcccgacgttctaccggatctacaagagcaagtcgacggaggggttccagtcggtgccgtacgtggtggcgctcttcagcgccatgctgtggatcttctacgcgctgatcaagtccaacgaggccctcctcatcaccatcaacgccgccggttgcgtcatcgagaccatctacatcgtcatgtacctcgcctacgcccccaagaaggccaaggtgttcacgacgaagatcctgctgctgctgaacgtgggggtgttcggggtgatcctgctgctgacgctgctgctctcccatggcgagcagcgcgtcgtctccctcggctgggtctgcgtcgccttctccgtcagcgtctttgtcgcgccgctcagcatcatcaagcgagtgatccagtcgaggagcgtggagtacatgcccttctccctctccctcacgctcaccctcagcgccgtcgtctggttcctctacggccttctcatcaaggacaaatacgtcgcg

SEQ ID NO: 51510 - DNA, 1275 bp, Oryza sativa
  Clone ID: PAT_MRT4530_53896C.1
ggagagagagagggacctgggctcgcggggtttttttctttttttttttaccactgcactatcaagtgcatctcattccattccaatgcgaaaacactactctgctaagttgcaagttgcaaggaagatacactggcctctgtaatcgaggccatcaaaattcaaaagggtcgtatgatgtcaaaattcagagagatctggttattgctaatagagctgtttcatcacagcaaagagatgccgacaatagagtggtactctttggacatgtgaatagtgttacatgtacgacgctactgaagctgggtttatgcagagttcttatcgccaccaaaggcgttttccagaacaccggtttccttaaggtggctgatgtccccgcacgccttgacaatgcaacgcccagtggcaccagacacaaggattacgcttacggatgtgttgtgtatcttaccgtgaagaggcttcattggactggcatgcctgtagagttctctgatggttccaccgtgcgagaccaagattattcgctccccttgatgtttctcgactatgttgtacaagcaagagacacatcgctctgatagttgatcaagactttctccaccaccaggaatttgtcggttcctcttgtgcgacaaaaatgctctgtaagcctctggcttttctttgccagcatcttcatactttaagccctgcagatctccgatgtgtctctctcttaagccctgcagatctccgatgtgtctctctctcagtgctggatcaaacacaacatttggcaaactgcaagcttttgctattatttctgcagtctctgccgctcgcttcagatcagatgaatatatcgcagctggcttggcttcattagaaagacgccgtgcaaccgcaacagcttgttgtatggggctcggggcgggaggaacagagcacggaacctggatgatgcgcgaggcgttccaggcggtctccccgtgccgcaccaccacgacctcggtgaactccccagcctcgctctccctctccctctccgccacggacgcggacgacatccctaccgctgcccccgggtggtgcccgtcgttccggcggatctgccgggcgacggcggcggcggggccggcgggagcgagggacgcggaggcgcccggtggcggtggtagtagcgaggtgaggacggcggcgatggcggcgcgcggcggaggaggcaggcacgtgggcatgccaaggaggagcggaggcggcggaggcggcggggagaggccggcctgttag

SEQ ID NO: 51511 - DNA, 364 bp, Oryza sativa
  unsure (1)..(364): unsure at all n locations
  Clone ID: PAT_MRT4530_53897C.1
tttaaanataanttnaataaatttttattttacgntataaaaataagaaaatgcaaaaatnaggatgagggctnaattatatattatggagagataaattgatcaggggagagatatatatgtatgagaaaacatagtataagtacttgcgaaagggtttatatatatatggatattgatgcatggcgtaatgatctggtacttaacggatcggaggagctattaatttaaagagggcaagctaaacctgaggggcacgacttgtgtcaggagattacaaggacagagaaatcgacagtgatgttgagattgatgccgatgatgttaaccttgatcgatgatcatatgcatacggatgggttga

SEQ ID NO: 51512 - DNA, 260 bp, Oryza sativa
  Clone ID: PAT_MRT4530_53898C.1
aaagactcggcacacgttggcaggtctgcgggccattgtatgatagccgcctggaatgcgctatggtacatttcactacaaagctgacgacaaggaggtatgatgcttgcgaccaggtcaggaggcgctcatatagtgctacgccagcaacgtcttattcaccggtcatgtacatgctcacgaacgtttgagccgggctgatatctacacactggactcgatcggccaagctcgcatctgctacggcgactgctgtgacc

SEQ ID NO: 51513 - DNA, 330 bp, Oryza sativa
  Clone ID: PAT_MRT4530_53899C.1
atgccgatggtggcgacggcgctgcgcggcagcgacgggagcggcggcgggatcgaggccggacgtggcggaatcggccggcgaagtggggaggtgaagtggagctcgtggggaggtcaaaccggcgccgtttcttgcggggtgagtgggggaaatggtggaggacgtggagggggtcgtgtccacgtcgttggatgcgagctcgggtgcgggagagcgccggattttgcggcgacgtggggaggctcgggcggccatggcggcggttggagccggaggaaggggatgacaggtggggtccacgggtcccacctgtcggagggagagtga

SEQ ID NO: 51514 - DNA, 855 bp, Oryza sativa
  Clone ID: PAT_MRT4530_5389C.1
cttcattgttctctttaacccttcaattctaccttcatgaaatactccagaatttaaaatggaatttttcgaaactagattcttatggcaagaggatcaaggtgttaggaagtaacatctagtaaattggcccactgtatgtacacctaaagaggttgggagttttagagctagggaaaatgaatacaaccctgcttgggaaatagctatggaaactagaaaaatgaacatggtatttggcaggacttgcttagatcaaaatacctctatcaaaaaaccctaactcaaaagaagcccaaccctagtgattatcaattctggaaaggattgattaatgtgaaggaaacttttcttcagttatgagagaagaagatagagaatgggaggaataccttgttttgggaggatagctggatgggaggtacgccgtcctctggctgaccaattccctggactatataatataactttaacaaagaaggtgttggttgcccaagtagtggaaaaaggctttggtggatcaaattcagaagaaccctatatgacagaaaactagaggaatggaacaagttacagaacatatggcaatcaattgcattgtctgatgttgaagataagactgtttggaaactgacaaaagatggtgttttcactatcgaatccttttatacagccttcatattgcaaaacacttggtgaaggtttttctttggcttttattgaaaaacatcatcttaataatggagaatttgttgaagagaggctggaagggcaaagaatccaaatgccaattttgtgcaaataaagaaactatggaacacttattcataaagtgtcctatggctacattcctat

SEQ ID NO: 51515 - DNA, 2559 bp, Oryza sativa
  Clone ID: PAT_MRT4530_538C.1
atgtccccagccagcttgctgctgctgttctcatccctcaccctggtagcagcagctatttcagcagacgagcaaggcggcggatcatgctcgccgaggacatgcggcaacgtgacaatctcacacccgttcgggttcgtcccggagcaggagacggacacgaaatgcggccggctgggcttcgaggttcactgcagcaacaacaccccatacctcggctactaccggcggaagtaccggttccaggtgctcgacatcttctacggcaacagctccctgctcgtcgccgacgtccacaagctcgacgacttccggaactccagctccaagggctgccatgtcatgacagccaacacctcctccaaggtcgggcaacctttctcggtcagctccgccaacctgaacctcatcttctacaactgcacggcggagacggcggcggcggcggtgcggcgagacggcgggcttgtggagacgaaatgcagcggcggtggcacgcttgttcgcgtcggagggcattacagcgattctggcagctatgaggagtactcggtggagggatgcggcgccaccctcgtgccggtgctggggacatcatctggtgaggcgaatgcgagcagctatgaggaactgatcagtgatggattcctcttgacatggcagccgccgtccgtcaagagtcaagacgtgccctttggggcactgcagaatgacgggcagctcaagtacttcggcctggggttcatgatggttcaccccatctctgcatcctcgacaattcgtcgcgacttcccgaatgcaaatccagaagaaggctgcgcggccagtactgtatgtggcaaggtgaccatctcgtcgccgttcgccgtcgtgccggagcaggcaacggagagcaaatgcggctggcttgggttccaggttatctgccgcaacgacactccttacctcggctactacaagctcggttaccggatccaggtcctcgacatcttctacggcaacaattcattgctcgtctctgacgtccacaagctcggtggcttcgatgtcttctccggcgccagcaaagaatactcctgccatgttccgaggaccaacacctcctccaaggtcgccctcccgttctccatcagcaccaccaatctcaacctcttcctgtacagttgcagtaaggcgcttgtgccgcgggacggagacggcgacctcgtggagacgaggtgcggcaacaagacgtttgctcgcgtaggagggaattacagtgattcgggcgactacccggcgttttacatggaaggctgcaatgctaccgtcgtgccggtgctgggcacggacgcgaggagctatgagcagctcatccgcgacggcttcctcttgacatggcaagggccgccatcatctggccgctcaaggatcggcacaactgtcaagttgcagcccggcgggcgcaactgcctattcaagtatgtggccaatgaatcaaaaatagaggaagcacttaaagaatatgattctctcgctccaaagaggtgtaatacacgtataatccattttgatatcaagccccagaacatccttctagatgaggacttctgccctaaagttgcggattttggattggcaaaactgtgtcgcctcaaggatagtgccctctcaatggctgaagcaagaggtacagttggatttattgccccagaagtattttctagaggttttggagttgtgtccactaaatcagatgtatacagctatgaatttcgtcagctaatctgcagattgatcatgcatcaaacctcatcgcagctagtcttggcctcgtttctgctccttctctgccaccacgcgcacgccgactgcgagccggcgacatgcggcaacctcaccatcaatcccccgttctggctggacgagccaggccggccgccgtgcgggccgccgacgttccagctccagtgcaggggcagcgaagcgttcgtggcgcacagcttcttccagacctaccaggtggtccgcatcttcaccggcaactcctccgtcgtcgtcgtcgacaggagcctcccgctggagagcggctgcccggtgccgtggttcaacatctccatcggcttcgtcatggggccattcctcatcagcagggccaacaaggagctcgtcttcgtccacaactgcaccaccacgaagcggcggccgccgcaggggttccgccgtatgccctgcagccccgacgagtcgttcgtcttcctcggcgacggccgccctcgtctcttgctgccgggatgctccatgtccgtcgtgccggtccttgggttgcaggacggggactacgtcgcgagcatgaggcgagggcttctgctcgagtggatgctggtgccgggtgattgccagaagtgctcggcgagtggcgggcaatgcgagtacagcagcgacggcatggggttctcgtgcaaatgtcccagcggcgtccacaaccccaccagctgcgttgcaggcggtgagttcttcgcatctcgcatgcctctggccctcggccacgaaaacactttaatggagagagacgagtag

SEQ ID NO: 51516 - DNA, 409 bp, Oryza sativa
  unsure (1)..(409): unsure at all n locations
  Clone ID: PAT_MRT4530_53900C.1
ttcgccaggttntaccggtccctgggcgagaggaacaatnaatccagaagggacatcttaagtcaagatcttcagcccttctttgcaagaagtatgtggactgtagccatttgaatctngcattcggatgtttcagtattgcagagaaatagcaggaatttttgggagataatgggtgctggcatctgatggaaactgcccccttgcaactgtgtgtgcatcaagcttctgcaacnaaaagnccctaatgtacattgcacgttgtaaagctgctgatcatgtaattctagtttgtacatncatncacntgtacaagnataaagagaaccacttgtcctttggaatatgngtntaccatttnttctaaaannnaataaataaaaanaatnntaaaaataataaataaaaa

SEQ ID NO: 51517 - DNA, 665 bp, Oryza sativa
  Clone ID: PAT_MRT4530_53901C.1
atgaagtttgttccagtcatcttctctttctcaagaatagaccgcaagttaaaattggatgggagtacattaacacatgatggctactccttcctctaccctaatagctggatccaggtccgaggagccggtgccgacctcttcagagacccttttgtcctcgacgagaatatgtccgtcgagatatcgtctccttcatcgtcgaagaccccctcgtcgtcctctacctatccccgcaagtcccatcttccgccgtcgccggaatcgctctccccgcgctctccttctctctccaagcgccggccgccgctccagccgcgccgttcgtcgtcgtccatcgtcgcatttggtcgccactgccgccgtttggttcgcaagaaggagaagaagcccggcagccatctccccgaagccgaagaccccgggaagcccgtcgtcgccttgaaggccgagttcgccgcctcggtttgatctccagccgagcctcctcgttgttgcggtcgtcgccggttcaccccgaggccgtcgtcggcatcgcaacaccaagccgaagcccgtacactattcctttgagcatgttgatccttttgtatagcatggttcattgcggggcaaccactgcgaagtggcggaaataagcccacggaggtcgctggggagtccat

SEQ ID NO: 51518 - DNA, 1848 bp, Oryza sativa
  Clone ID: PAT_MRT4530_53902C.1
atgccgctggccttgatgttcgccttcgccttggcattgcggagctcttcttcctccttcctcctctctgtcggagcaccgccggcctgctcgtcctacattggaaagtctgtggatgaccaacggatgggggagaggtggccagcagtggagcaggggcagcggagagacggacggcgcaacagtgagctcagcggcgaaggagaggagcagcgcgtggcgtggcggcaggagagacgagaggactggcacgcagaggccgagctgctgcgccatagcgacggcctcagcctcggctttgccgtgatggacgatagcgccacgatgctcggaggcgaacgggagcatgtatcattatcagcagcagcagcggcagctgggcattgtgccctcgtcgcagccactgtcagggactcgagtgggctgcacatgggccgctggctgcaccacgggctgaagaaagctgaagaccttcagtttttggttgaggatgagcagtccaaggtgacgcccaccacctgttcaatggagtgccccaatggcagcagcccgagcacaacagcgagatccatctacgacgacgagggggctactccgacgatcatcctggagcttggggatggtgaggggaaggatcgcatgcccttcatcattagcaaggacctttccgagttgacgcctatcatgtgtttgacaatatgctcaagcctcgacgtcgagcctgatttcaccgtggctgcggtggttacatgctccaacactgccatggactccaaggagttggtagccaccgatggtgcaaccggcaccaccaacattgacccccgtgtttgttccaaggagacgcacaccaagtgtttgttgtttggccccgatgtcaacggtgtcactgatagaggtgtgattgtgttccaaagtaggatgggtgtgttcaaggtcgttccgatatcaagtcagtccatggagttgatggttgacgagaaagcaacctgcactgacaccactcaccttcccaaggtgatgcacccaagccatttgatgttgggccccaacgtcaacaccggtactatccaggctggggttgcgtactcactattgcttggcgcgccagaaggaatagcatcctcgggaaaggccacactagtcatggcacaaaagcttaactccaatttctgcctaaaatgggtggcgctcaacaggtgttcgaccaaatgctccaagggctacaagaagctgttgatgagtcatcccaagagaaacccatggccacctccttgctcagtgggggtacattttggggtcagaaggatttctgagattattgctagaggtgctggtgagaatcagaataggaaggttaagacatgtagttatgattccatttttgatttctgtgagaataatcctagtgatggtagtgctgcagcaaggttttccattgatgggattgataccaggacagattcagagatgatatatgcatcaattgcaaacagggattattggtctgttaaattattcgaggtcataaaagaggggtgcccaatacgccacttgttactaggtgatgtcaagatagaacaattgctgcaatgtgagacattcagtacaagacagacaaatatagagcaagttatcaagctacagctgagcaattccaaggaaatacaagagctacaggtaccatgggatccaggaggttttcttcatcggcttggggacaagccaaatttcaagaagaggggattgtcaaggactcgggtgggctgcacatgggccgctggctgcaccacgggctggtcagcccatcgccaagaagcccaagcaaggcagctgaaaattatatga

SEQ ID NO: 51519 - DNA, 111 bp, Oryza sativa
  Clone ID: PAT_MRT4530_53903C.1
atggatttggagcgcaccggattgcgagctcctagcgatgaggcactagcatggtggccgcacaccgaaggggaaaaccacgtcctggcacctcaaggcgagtggcggtag

SEQ ID NO: 51520 - DNA, 2070 bp, Oryza sativa
  Clone ID: PAT_MRT4530_53904C.1
tcatccatctccttcctttttcgtcttcttctttatctcttcatctttttcctccttgtgggaaaaatggtgacggagctcgccattgtctgataatctcgccaccgtggtgtagccagcggcccatgtgcagcccacccgagtccctgacaatcccctcttcttgaaatttggcttgtccccaagccgatgaagaaaacctcctggatcccatggtacctgtagctcttgtatttccttggaattgctcacctgtagcttgataacttgctctgtatttgtctgtcttgtactgaatgtctcacattgcagcaattgttctttcttgatatcacctagtaacaagtggcgtattgggcacccctcttttatgaccaccaataatttaacagaccaataatccctgtttgcaattgatgcatatatcatctctgaatctgtcccgatatcaatggaaaaccttgctgcagcactaccatcactaggattgttctcacagaaatcaaaaatggaatcataaccacatgtcttgaccttcctgttctgattctcagcagcacctctagcaataatcccagaaatccttctgaccccaaaatgtatccccgctggacagttaaacaactgaccattgtataatatgtttgttgggttctgtagccagctctcaacatgattaagtgtcatgcgcatggacttacaaattttgtaagttcttcccttagctatatcatttaacccttcttgagcctccaaccaacaagctccatatatattttgagtagaagatggaactgacagaaatgttgttgtcattgtagcagcaggaatgatcaagtagttgcagcttattgtacttaggccatataacattccctctgtaactttttcctcaccacccacataatggaactgttccaagttaaatattgccaccaatgtatccttatgagctcgattagatttttcatgatttaaatctcctttaggtgcacaatatagtgcaacagaaggtgtttggtctcttatgcaatttgcactgcaaaaatcatatcccatcaaatgtgcaaaaactggtgcaggccatgggacttgctcaccccacatcacgcctccgttatattgacttggttgtgggtcaggccacggtttcagctctacttccgtcaaccatgtgtttaccaacagccaaagtattatggttccaatttgatttggtggtggccatggtggcatgaaataaaatattatccccaaataattgcccgcagcccagggcacataccactccttccatcttctaaccactccacctgagcaaggaggtggccatgggtttctcttgggatgactcatcaacagcttcttgtagcccttggagcatttggtcgaacacctgttgagcgccacccattttaggcagaaattggagtttagcttttgtgccatgactagtgtggcctttcccgaggatgctattccttctggcgcgccaagcaatagtgagtacgcaaccccagcctggacagtaccggtgttgacgttggggcccaacatcaaatggcttgggtgcatcaccttgggaaggtgagtggtgtcagtgcaagttgctttctcgtcaaccatcaactccatggactgacttgatatcggaacgaccttgaacacacccatcctactttggaacgcaatcacacctctatcagtgacaccgttgacatcggggccgaacaacaaacacttggtgtgcgtctccttggaacaaacacgggggtcaatgatggtggtgccggttgcgccatcggtggctaccaactctttggagtccacggcagtgttggaacatgtaaccaccgcagccacggtgaaatcaggctcgacgtcgaggcttgagcattttgtcaaacacatgataggcgtcaactcgggaaggtccttgctaatgatgaagggcatgcgatccttcccctcaccatccccaacctccaggatgatcgtcggagtagccccctcgtcgtcgtagatggatctcgctattgtgctcgggctgctgccattggagcactccat

SEQ ID NO: 51521 - DNA, 556 bp, Oryza sativa
  unsure (1)..(556): unsure at all n locations
  Clone ID: PAT_MRT4530_53905C.1
ccggccgggaaccctaatccccctagccgccgcctcgatcaaccgctcctacgctgcctccatctccctcgccggnancagggntgntcctggtgncggngaggncctttgtggttggcacctcttgtgcaagtgataaatttgattccaccacctcatactttctcctgcgccaacccaccaccgatatgactgccatctttaatatttccatctcatattgccgccagatctgctacttatcaccacccaccctactccctaccttctggagtatgaagctctggtaaagagccaactcttacctggtaaacttgagcactgatccatcagtgttggtggggatgcagcaggtgaaagggagtgtatcaaagcggaacaatcaatagataggagtccttgatgtgaaactgacacagctgatagaagtggacagtgccgctcaagagcacaaatcagcaagaaaaattcaaaggtgtgaaattcgactaatcccctttccctaataatacccccgctctggagaataccagactgagatttagatctttatatg

SEQ ID NO: 51522 - DNA, 672 bp, Oryza sativa
  Clone ID: PAT_MRT4530_53906C.1
atggaggagcgcaccgagcatcgtggcgctatcgtccatcacggcaaagccgaggctgaggccgtcgctatggcgcagcagctcggcctctgcgtgccagacgaggaggccggcggtgctccgacagagaggaggaaggaggaagaagagctccgcaatgccaaggcgaaggcgaacctcaaggccagcggcatcgccgtcgtcttcggcttcaccgtgctgaccgcctcgctctgcctccccaccgaggcgaagcacgcgagcaacacgcgcttcattgtctcactcctgttggcattcgccacgttcacggccatctacgtctccatcttcttcatgttctccaccgccatcgtcggcatgtcggcgatgacgttgtcgaagagggccgtgaacgtcgccgccacagccaaccggtggttcttcctagtcgccgcgatcaggataaccagcgccctctcgctctgcttgcttgcctgcgcggtgctcgcggcgtcctacgtcgtcctcgggtacttcctcatgctcgccgccttcgtgctgctagccattacatccctcgtcttcctcctcctccgtcactgtgttcccagcggccggtccgacctgctggatggtcaaccggagccagaggaggcgcggctgaaggcgatggaggacaggcgacagtga

SEQ ID NO: 51523 - DNA, 625 bp, Oryza sativa
  Clone ID: PAT_MRT4530_53907C.1
gcacgaggcctgagccgtcgccggagctccggcgaacccacggcggcgggcgggcgggcccgagcttcgcagatgagtggcgtgaggagggcagcggggcggcccaagatcggcgacctcgcgaccagcgacgtggtggtgcggctgcggacgccggagggccgcgacgagtggctctactgccactccggcgtgctcgccgccgggagcaggtacttcgccgaccgcctctccgacgactggcccacgtgccagatcctcggctcccgctactgcgtcgaggtccactgccaggagctggacctcagcccccacgtcaccgcgctccgcctcctctacgccgccgagccgtgctcccgcttcggcgtccgcggcgcgctcggcgtcctccaggccgccgcccacctcgcctgcccgcgcgtcgccgccgcctgcgtcgactacctggagtccgcgccgtgggacgaggccgacgaggaggagatcctcaggaccatcccttgcctcggcccccagtacgagtgcgtcctcgcgcggctccgcccgatcgatcccgcgccggtggccggcatcctcctctcggcgttccggcacgcgacgtcgacgcgctcgccgccgcaggagc

SEQ ID NO: 51524 - DNA, 752 bp, Oryza sativa
  Clone ID: PAT_MRT4530_53908C.1
ccggccgggaaccctaatccccctagccgccgcctcgatcaaccgctcctacgctgccggcgaggccctttgtggctgccacctcttgtgcaagtgagaaatttgattccaccacctcatactttctcctgcgccacccctccaccgctatgactgccatctttgatctttccatctcaagttgccgccagatctgctacttatcaccacccaccctactccctaccttctggggtagggagctctggtaaaggccaactcttacctggtaaacttgagcactgacccatcagtgttggtggggatgcagcaggtgaaggggagtgtatcaaagtggaacaatcaagagataggagtccttgatgtgaaactgacacagctgatagaagtggacaacgccgctcaagagcacaaatcagcaagaaaaattcaaaggtgtgaaattcgactaatccccttcccctaatcatacccccgttcaagagaataccagactgagatttagatctttatatgaagaaaatcagatatgcaacagtatgaagtgatattagacatgaaatgcacattaccctctggactactcgacacccgtatagttgacagcttaagctcgaaacacttccaaaaaggcaagctgtaatttcccttctttgaaatggggctccatgctcgatcatctggtggaaaaggaaataaatataagtgtgtgaattttctagtgccaaaaaaaaaaaaaaaaacccgcggcc

SEQ ID NO: 51525 - DNA, 305 bp, Oryza sativa
  unsure (1)..(305): unsure at all n locations
  Clone ID: PAT_MRT4530_53909C.1
gacgggncncncgggaagaagacagcagcggcatccatggcgcccaaggcagagaagaagccggccgcgaagaagcccgcggaggaggagcccgcggcgnagaaggccgagaaggccccgcggggaagaagcccaaggcggagaagcgtctccccgccggcaagccgagaagggcagcggcgaggggaggaaggcgnggcggaagaaggcgaagaagagcgtngagacctacaagatcttacatctttcaaggtgttcaagcaggtccaccccgatatcggcatctccttcaaggccttnttcat

SEQ ID NO: 51526 - DNA, 335 bp, Oryza sativa
  Clone ID: PAT_MRT4530_5390C.1
caacaactggaatgcatctatatattatggacagtgatgatgggaagcctacattagagctacacatggtgtgtgatgtggggcgcaaacagtctatgtgtgatctccaagactgcaaacaacaagatgcattctctactgtcgacattgaccatgtgcacgatggatgaccatagtcattaaatgaaacttatgatctacagaggtggcttgatagacaaggcaatagtaacccacatagtcgctattacaacatctccgatgcaagcacatacaatgaatgatctgttgttgccaatgtggacagttgcatgttataaaaacgatttttaaaa

SEQ ID NO: 51527 - DNA, 408 bp, Oryza sativa
  Clone ID: PAT_MRT4530_53910C.1
aaaacccaaaaaaaactttcattccgaggggttggtatggttttaaacggattccaaagcgccccatcacatggttacaggaaaggtttgggccatgcctctaaaaattcacaaatcatgttcgagaaaaagaatcgggggctaactctaaaaaacggaaatgggggtttaacattgtttattgggccgaaaaaaaggacaagactttagagcttaaaaaagggtctactttcacgtaaagcaagcaaaaagaagagggcggggctttaattgttttactgggccggcctttgccccaaaactgaaaaatcttcgcaccttttcccgaggttgttaatctcccaaaccttgggcaccccgaagcccaccgcccgctcgccggaaaaggctccggaaacaacaaagggg

SEQ ID NO: 51528 - DNA, 288 bp, Oryza sativa
  Clone ID: PAT_MRT4530_53911C.1
atgtcgaccaccatgccgatcccgtcctccagccacccttcccccttcatcgtcctcgccgagacggccatggcgcccaagatctgcaccagcagcagcaccgccaccaccgccctcgccatcgccatcgccctcgctgctatcatgatgagcgtcctcggcggcggcggcgcggcggcgaggccgctgctggaggtagcagcagacggcggcgccgtcggcatggtgacggagatgatgctcggcggcgtgaaatcgaacggcaacccaggcacgcacttcccctag

SEQ ID NO: 51529 - DNA, 391 bp, Oryza sativa
  Clone ID: PAT_MRT4530_53912C.1
tgggtttcaaggtaagtgtggtgatattgcctcaattaatcaaatattcaaatgggagcaaaacttttgtaatattccccaaaatctcaagggctccttgctatcattcaacctaattaataccaacttgggatgtgaacctgctatccttggctttctttggggccaccagactccagtctgatctgcatccagaattcatttgacactcaaaatcccaaagggaggcttctcgtctaggggacactgttaatcagttgaggcaaaaatgtgccatgtaggatcacatgacaatcttagcaagcatcttgctttcatcaagtcctcaaatcttctgacattgcggaaggtatacaatgcgttgtcagaatatcctgagtagccacctttg

SEQ ID NO: 51530 - DNA, 204 bp, Oryza sativa
  Clone ID: PAT_MRT4530_53913C.1
atgagcctagatgttggacaccctgacttgaagaccaccggcacatacacctatcaccaagctgttgttagggagaagggagaggggcagaggcagctagcccttcgccagactggttctctagcaaggacagggctagcgctctcagtggcctccatgttgtgggggacgaagtacaccaccgccatgaagctcggcctctag

SEQ ID NO: 51531 - DNA, 417 bp, Oryza sativa
  Clone ID: PAT_MRT4530_53914C.1
ggacaaacagccacgatacggctcattgttattccaagggaacagaactcacatgcgcgtgccaacagtatgaatcaaaagctgtttcgaggtgaagcacaatgctcataactacatgtccgatacgattgcatcatctgtaacagaagacatagctgatgttctgaacaaacgccttgttcaacgatttgtacttgtctgcgcacttgcctatgtattactgtgggcgatcattgtgcttagctcgatacccttgcccttagggaaagacaaacatggattgctgcccttgccgatggtgaacacattgcccaaaccggtggcgaaggcatggcccaatgcgtgctacacatggatggtctcaaaactgcccttgtgcttctccctgttcttaattactccaacacgaccagtgtt

SEQ ID NO: 51532 - DNA, 542 bp, Oryza sativa
  Clone ID: PAT_MRT4530_53915C.1
cccacgcgtccgcccacgcgtccgcggacgcgtgggctttatctctacttattataaaacttaaagatgattctgtactcatccttatttccgtccatagtccgactttagagctgggatgtcgtgcgtgaacgggtcacgcgatggagggagtatatacgactgaaataaatttaaacggtataatttttatattatggaatgaagggagtatatccgactgaagtgcagaagtattctctccttaaggggttgtttagtttaaaaaaaaaacttttcccaaaaagcatcacatcgaatctttagatatatatgcatggaacattaaaatatagattaaaaaaactaattgtacaattagggaggaaatcgcgagacaaatcttttgagactaattagtccatgatttagccataagtgctacagtaacccacatgtgctaatgacggattaattaaactcaaaagattcgtctcgcggttttcatgcgagttatgaaattaattttttcattcgtgtctgaaaaccccttccgacatctg

SEQ ID NO: 51533 - DNA, 1187 bp, Oryza sativa
  Clone ID: PAT_MRT4530_53916C.1
ccacgacataccgtaaagaggcaaaatgcattatttaatgatttttaatcccgaacgaaaatcggggcattacatctaataatcaaaactgattcaaaattagtggctagtcatttttccaagacttttgaagcaaaagaggatacaatagctaagtacttggaagaggctaggttgaatgagagacattttttggggataacagtaaaagccataacaagggaggaaaagggagaagctgatggaactggcaaaagcagcaacagcaggccaactgctggaaaattctttctttgaggtggttgctcaaccaagtaatgaaaggaaagaggtgttgtgcatagaaaacaaggatgattggagagaaccaattctcaaatacctggttagtgcacaacttcctgaaaaagaagaagaagcaaggagaatacaattgatctcgcgaaagtataaagtggtggaaggacaactatataaaagtggagttattgcccctctgttgaactatgttacaagagaagaaggtatgaagatggtggtggatatacatgaagggttatgtggagctcatcaagcaccatgttcagtagcatcaaaagtaataagacaaggaatttattggccaacaataatgaaatatacagaaagatatataaagacatgcagagcatgccaaaagtttggtcccacttcaaaagcaccaccaaaagaattacaaccaataccaccagtatggccattttataggtgcggaatagatatagtagttcctcttccaagagaaaaaggagatttgcgctttgtcattgtcgcaattgaatacttttcaaggtggattgaggcagaagcagtagcaaggataacttccgcagcagtacataagtttgtttggaagaacataatgtgccgatttggaatcccaagggaaatagtatgtgacaatgggaagcaattttagtcaggaaaattccaagacatgtgtaaaggactcaatttgcaaatcaactttgcctctgtaggacatcctcagacaaatggagctgtggaaagggcaaatggtaaaatcatggaagctatcaagaagaggttgaaaggatcagcaaagggaaaatggccagaggatttgctatcagtgctttgggccctaagaactacagtagtccgatcaaccggaatgaactccttta

SEQ ID NO: 51534 - DNA, 1511 bp, Oryza sativa
  Clone ID: PAT_MRT4530_53917C.1
ctcttctcttctcttcttcttcttctttcccttctcttctccgccgccgacgaccgaataaggagagtagaggagagagagagagagacagagagatggctgcggcggcgcgtctcctcgcgcgtatctcgaggcagggcgtggcctcggccgcggcggcgaggcggcaggcggaagcggcggcgctgctcggcgcttcggcggggcggcacttggccccgccctgctcttcgatcaaggccttgcctctgctgaatcagccgaggctgtactcaacttcaacctttcaaaggtttgggttttcatcttctgctccccagcaagatgataaggcagcaaataaacagacagaggatggagttaataaaagcactcaatctgaagcttcaaatgaaaccaatagttctcctggaaccgagaatgcatctcaagcaggttcacaagattctgtgccccaatctaacaggaggaggagaggtactaaacgaactgcattttctgattcagatacagaagaccttgacctgtcaaaggaggacctgacaaagctagttctggagaaagaagaattgttgaaatctaaggatgaagaagttaaagacatgaaggataaagttttgcgcagctatgcagagatggagaacgtcattgcgagaacaaagcgtgaatcagataatgcaaagaagtatgcagtacacggcttctccaagagcttgttagatgttgcagacaatttatctagggcatcatctgttgtaaaggagagcttctcaaagatagatacatctaatgaatctgctgaagcagtgaagctactaaacaccctattagagggtgttgagatgaccgaaaagcaacttggggaggtcttcaagaagtttggagtggaaaagtttgatccacttaatgagaaatttgatccaaataagcatgctgcgcttttccaaattcctgatccttcaaaaccatcaggaactgttgcggctgttgtgaaggtgggctacatgctacatgatcgtgttctccgtcctgcggaagttggtgtcactgaaggtggtccaattgaagaggagccggaggagaaatctgacaagtcagattaagttagatatcgacttgtccttcagggatttttctaggcagccagacaagtgcttcgcacttgcatgaaaacattacggttctttggaacttcgaagggcatggcagacacagttttgcactaatgtatcaaccgatcaacaattttcccgttttagttggataagccgatccataggttacttgtttcaaggatatttgtaatacgaaatgccattttgctgtgatgagcgtcttctttttacctttctgtttgatataatttagtgcagactccgtccctttctattgatccaggcatatccagccatcactgtgtaataaaaaaaaagccatgtccatgtgtacgcctgaaatggcaatttgtagtctcgtagtcaaatttctctcaaaaaaaaaaaaaaaaaaaa

SEQ ID NO: 51535 - DNA, 140 bp, Oryza sativa
  Clone ID: PAT_MRT4530_53918C.1
tagtggataccccgggctagcaggaatacggcacgagggacgagaactatgagaaccactatggtagatagagcatagccaagtacatacccaaataggaagccgaggaaggcagcctacctactagggagctaacgaat

SEQ ID NO: 51536 - DNA, 1041 bp, Oryza sativa
  unsure (1)..(1041): unsure at all n locations
  Clone ID: PAT_MRT4530_53919C.1
ctcttctcttcttcttcttcttctttcccttctcttctccgccgccgacgaccgaataaggagagtagaggagagagagagagagagagatggctgcggcggcgcgtctcctcgcgcgtatctcgaggcagggcgtggcctcggccgcggcggcgaggtggcaggcggaagcggcggcgctgctcggcgcttcggcggggcggcacttggccccgccctgctcttcgatcaaggccttgcctctgctgaatcagccgaggctgtactcaacttcaacctttcaaaggtttgggttttcatcttctgctccccagcaagatgataaggcagcaaataaacagacagaggatggagttaataaaagcactcaatctgaagcttcaaatgaaaccaatagttctcctggaaccgagaatgcatctcaagcagatacagaagaccttgacctgtcaaaggaggacctgacaaagctagttctggagaaagaagaattgttgaaatctaaggatgaagaagttaaagacatgaaggataaagttttgcgcagctatgcagagatggagaacgtcattgcgagaacaaagcgtgaatcagataatgcaaagaagtatgcagtacagggcttctccaagagcttgttagatgttgcagacaatttatctagggcatcatctgttgtaaaggagagcttctcaaagatagatacatctaatgaatctgctgaagcagtgaagctactaaacaccctattagagggtgttgagatgaccgaaaagcaacttggggaggtcttcaagaagtttggagtggaaaagtttgatccacttaatgagaaatttgatccanataagcatgctgcgcttttccaaattcctgatccttcaaaaccatcaggaactgttgcggctgttgtgaaggtgggctacatgctacatgatcgtngtctccgtcctgcggaaagtggtgtcactgaaaggtggtccaattgaaagagagcccggagagaaatctgacaaggcagaattaagttagatatcgact

SEQ ID NO: 51537 - DNA, 2292 bp, Oryza sativa
  Clone ID: PAT_MRT4530_5391C.1
atgggtgattatacagccgattgcacaggaatcggctatatgcaaaacctagctaacggtatgaccggtcatgacaccggtctaaccgcgtcctatgccggtcagaccgtgcctaccatagccggtcagactgtaccctattctggccagatcggacctcctgtggccggtctgaccgcaccactgaccaccggtcagaccgggccatgggccggtcagatcggttccctgggagtttctccaggttttcataccacgactagcaatattgattttaattattattcatcacctgttaatactgttagtcatgctactccacatatccctaatgcctacaatgatattaataggggatatcctcccgatactaggtatggccaatataacaatattgtgccgcaacaaccaccttttaggccaccaagtccaccaccagatccaccaaggcctgaaactgtggaggattggtttagaaatattatcagggagaatttagcaaagctaaggaatcgcgctagggagtaccaaaagccgtatcctgattattatgacattttcccatatcctcgtgattataaaattcctgaatttaccaagtttagtggtgaggatagtaggactacatgcgagcatgtagataaattcttagcgcaatgtgccgaactaagtgacggttcggattatatcacaagcgaaagtgaaatagcattgtcacctaagaccgaatcacaaatcggtcatatggatgttggaaaagataatgataatgtcttgcgggatagtagtgagatagaatctaaaatagttatgcatatatatcaaaggccgtatcctgaacacatagattcggtcccatacccgcaaggatttgaggtgcccaacttcacgaaattcacaggtgaggatgctagaacaacaatggagcatatcggccgatttattgatcaatgtgaaagaccgattgatacttcatcggtcacttgtgaaacgatttcggttacacctatgcttaagaccggaattgttagtgatcctctccctattagtcctactgatgttgacaaaaagaaagggaaaagtgttgttattggggatcttcggcccaagaataggatcaataatgcaaaggccgaatatcgtaaggttacaaaagatgagtcatttagttcccaaaagaccaaaaagccgaagctcgcttttgagatgcttatggctaagtacaagaaaggattagccggtcaacgatttgataaccaaactagtgattcaaaaagaccaagatcatctcgtaggaagagatttggtcaaacaccaaagcaatcagagccatcaactataccaactccatacaaacctccggttgtgatgccatggtatccatatccaatgtcactatatggttatccctttatgtattacatgtcgtggatgcctcaaccatctatgccgtgtcatcaggaatggaagcaatcacctaggtcagtaccaagtcattctaacccaagacaagaccgttttccacaaaagaatcggtccggtggatcaaaggtgaaagaggtaaagaaggtgtgggtgaggaaagaagccaaagctccggaggtcgttatcaataaggagtctcaagttgttcatgtacctactggagatgtggtggaaaccatacaagcaaaggggatcgaagccgacaccgtgattgtcaaaagtggaggtttgatcgaggcatctagctggtctgaccgccaacctgtggccggtctgttcgaacctcttggccggtttgaccgacggcttgtggccggtttgaccgggcccagaggtcggtctgactggggggcattggagaagagtgggaaaattgagagcaacataggagcttccactccgaccaaaaatatgaagaatcattgcttagctcctgaaaaacaaccacagccaaagtggataccttttggcttatctcgctctcaaaagaggaggctacaacgtcttcgagccataggtcaaaaagaaaaggaggccgaagctgtagagaacaaaacatgtaataatttagagcctcgaacgactcctaagagagtgtggagacctaaagaagtaaaagttaagagaccggtgatttcccatagtagagataaatccaatttgatgagagaagaatcatcgatcattagagataagtctccttcgcatggtgctatgaatgttggtgcggtgtttgtcttgccttcgaaatcgtgcagtcaagaaagccgattttgctcggggggcaagacattaatatgctcatga

SEQ ID NO: 51538 - DNA, 204 bp, Oryza sativa
  Clone ID: PAT_MRT4530_53920C.1
gttacgatctaaagagaagctctccgcttcgccggcgccgctccccccacccccgcgcgcggaagattgtcctcgtggcggagcgcgtgctgcggctgttgtgctgcacagccgccgggcaccacatttgcagcagcgccgccttcgccgcactcgtccatcgccggagcttccgctagggtttcggcgagccgggggaggggg

SEQ ID NO: 51539 - DNA, 1172 bp, Oryza sativa
  Clone ID: PAT_MRT4530_53921C.1
ttttttttcggacgcgtcggcgatttctcatctgaattgcaggccaattccagttgagtttctccacagaccacagatatggcttccggcaggatagctctgctctgccttcttggcttgctgctggtagcagcctcaccggctgccattgctgccaaagatgacaaaatcttctaccagattactttcatgtggccgggagcgtactgcgcgcagacgaaggccggatgctgcatgccgaagaccgacgtcgcgccggcgtccgacttctacgtcgccggcttcacggtctacaacgccaccaccaactcttccctgtccagctgcagcaacactccattcgacatgaaccaaattggggatgtcacgaggctgatgcagtactggaacaacatcaggtgccccagcaagagcggccagaagggctggaagaacgcgtgggagacgtccggcgtctgctccgacctcaccgagagcgcctacttcgacaccgccctcgccctccgcgacaagatcaaccccctttctcgcctcgtcagcaacggtattaagccggactttgggctgtacagcgtgaagaagatcaaggaggtgatcgaggaggggatcggcgcgccggcgctgatccagtgcagcaagggcccgttcaacaagttccagctataccagatatacgtctgcgtcgcggaggacgccaagacgttcgtggagtgccccagcccgaggaagccgtacacctgcggcgacgacatcctcttccaccctttcaagaagtggatgctcaagaccaactccaccaaatcctacgccgccgccgacgccatcgaccagctgctcgaagcggtcatggaaatctgagctcgatcgatcgatcgatcaagaagacaaattaacccttgttgtgatatgcgatttgtgcgtgtgtgttgtctgtttcgatcgtgatgttttctgcgtgtttatttcgtgatgttctctcatcgcgcccgcgcgcggttgggtacgatccgggacacctacgtagcactgaatccgtctctgtgatgcattcagagaataagtccgaatatgtgcggccttgttaatgttttcatgaataactcgtgtagtgggattactttgtcatcggacatttcatgatttccgatgcacaccttggctgggcacccgcg

SEQ ID NO: 51540 - DNA, 255 bp, Oryza sativa
  Clone ID: PAT_MRT4530_53922C.1
atgacgggatccgtgcgggaggggaagaggtcgccggatccgcccctcccgtcgccgccaatgccactacgcttcttcatcttctcgctgtcgcgcttctccatcttttgccggatcaaggagaggaggcgccgctggccgctgctgcagccggtaggcggaagtaggcgccgctactacaggaaggaggcgcaagggctgagcatgggaggatgtgagggcgcacgctggtggaggcgctggatgcctggatga

SEQ ID NO: 51541 - DNA, 339 bp, Oryza sativa
  Clone ID: PAT_MRT4530_53923C.1
atggaggggatggatccagtggcttgcggtgctccagaccggtcgatccgcctccacaatggtgaaggaaaagaggtggttgtggaggaagtggatctagcggcagcaaccacaatgacaacaacgactatcgtgatgatgacattggctgccatgacgacaacgatagctgggtctcaacaaggtttcagtggctccgctagcaccctccctctcctagatctggcaaaggggtatgaggatggtgatgggccaacatctgcaagtctgaggctagatgggggttgccgcccgattgagatgtgggtaaccgttgtagtcgacaatgatgtccagtag

SEQ ID NO: 51542 - DNA, 250 bp, Oryza sativa
  Clone ID: PAT_MRT4530_53924C.1
gaacaaagactataggggcgctcaactactaatggaaaaactcaattacaagggtacgagtgcgcatacgcatcatgaaatcgactgacatgcgccaacacatacacgggcgtccacgtgcagccagcgaatcatgccacagcactactggtctagcggagcatgcacgaatacggagcacatggatgtgctgtgatacattacaggatcatcaaagaagcgcactatactcgatgccgtacgttggaca

SEQ ID NO: 51543 - DNA, 119 bp, Oryza sativa
  unsure (1)..(119): unsure at all n locations
  Clone ID: PAT_MRT4530_53925C.1
attnnnctattttacattggagcaacaatttgggcgggggggtatttatcttctggcaggaacttcccgtacatttcacncnnaagaaggcttaaagcatcaatacaagtgaaatacac

SEQ ID NO: 51544 - DNA, 566 bp, Oryza sativa
  Clone ID: PAT_MRT4530_53926C.1
gtcgaggctgtgcggtggtcgccgacgacgacgaggaggaggaggatatcgatcgccggcgatggggtactggtgggaccgcgtcgtgcttccggtgaggagggcgtggctcggcgtcgccgcccgattcggggttcggcagacagggctgtggaggctgaggcaggaggtgagcacgtgcgagtacgaggacgtgcgcgtgatgtgggagatgctgagccgcaccagcacggcgggggcgggggcggggcgggcggcgccgccggcgaggaggcacagccggttccggcagccgcggccgtggaccgagagcatctgcctctgcgcgggcttctagaaggtctcccttgtgggcttgtggctgtggcttagctcgtcctcttctcttcgcgacttctctttgattttttttttcttcttcctttttttttcttttctccgtctcactactgggctctgagatgtagtaatcgattcctcctcttgtatcgatccgcctagatgatacttggggtatgtgaatgaacagagctgtttcagattattaaaaaaaaaaaaaaaaaaaa

SEQ ID NO: 51545 - DNA, 580 bp, Oryza sativa
  Clone ID: PAT_MRT4530_53927C.1
ccggccgggatctgacctataccatactcgcaacccgcgacaccggagtgagcactggctccggcgacgcagaacgtgcggctctgaatctagatgcagcaaggcatgagatagaagtgcagaacacagaacagctgaaagaatgaccgtcgaggctcagcgatcggagaatgactactcgaagcgatggctctcgattctacacactcaacaaaaggagcttcaggatgggggcgtccatagcacggccaagaagctggttagagattggcttcgctgcatccatgcagcgtgatcgtgccgcatcattgctccagctgtgtggcgatctatcgctgaagctgacagatgatgattttctgaggggtgaggactatgaactgaagactattgctgaccaagtgaatgatgagggtatgccaacattcctgatgatgaaggacggagatgtcaaagagagcgatgtcgccgctatgaagggtgaactggagagcaagcttgagctacatatggctatgtagtggtatagtgcattactactgatatcctagatagtacgggccttcacgctctgaaagga

SEQ ID NO: 51546 - DNA, 1041 bp, Oryza sativa
  Clone ID: PAT_MRT4530_53928C.1
atgggcttctctgccaacacgacaaaggcctcatttggatggtcctctattgggaaaagtacacgcaaggtccctcaacttgtcagcgagatacaaaatcgtcctcgaaccgcaaaaccggacatccggcgtcccccaacttacaaaaccggttacaaaaggtccctaggcggttttgactccagttttgtcccacgtggcggctggctcagcgtgggacccacgtgggccccacaggcggcggcgtgcgtggccggagggtggtgcggccggcgacggcggctccccggtggcggcgcgcgggctcaaggcggcgcgagctcgccggcctcctcgtcccctcgtgcggtcggtgatggcggacgagcgacgagaagcaggcggtgcgacgcccccgccgcgtacagtggcacggtgaccgtggccactatcgcctatcagaggagacctccgcccgcgcccggagccgccgacagcgatgaggccgagcgcacgaacctcacgctcgcgctcgcgttcgccgggtggggagccggccggtcgatatcctctccgccgctccttccccgtcggccgcgccgcccggagatcctcggcgtcgagcgtggtgtggaacgcggcggcgtccgggacaagccgcaggatctcgtcggccacgcggacgccgttgagattgcgcaccgtggcgaggtcaaggccgcgcccgtcgccgccgccttgctcccctgctcccgcgtcgtcgccgccgacaccttgctcccctggtcgcacggccaccgcgcctacaacctcctggacgacggccacgacaccgtccaggccaacgtcgagctcggcctcgctgtcgactcccgcgagtacggcatcggcgcccaggtagcaaagttcgtcgggctcaagggctacgggctcgccgtcgtcggcagggttccgggctccccgcgcctccgccgtgcttccccactacggccgccgccgccgccgtcgtggcgccgccctcctcctctcctgctcgccccggctagctttgcagataagtga

SEQ ID NO: 51547 - DNA, 290 bp, Oryza sativa
  unsure (1)..(290): unsure at all n locations
  Clone ID: PAT_MRT4530_53929C.1
attcgacccgcgcagagtccccaaccccacatngccgcgcgcccccgatggcgtcctcctcgtcggcggcggcgctctggacgncggcgccccaccnncacggcagctgcatcaggatccacgncatcttccaccagcgtcaccagcggagggggaggaggccggtcgtcgtcgcctcgtcggtgaggncgntgcaggncgcgagccttgtgtttggtcacggngccggtggccgttncgtcgaggaggacntcggcggaggaggccgtctacnaggtcgtgctgcngca

SEQ ID NO: 51548 - DNA, 2199 bp, Oryza sativa
  Clone ID: PAT_MRT4530_5392C.1
atgacgagtgggaacgggttcaacaatattactcaaggcgtcgtgagaggaaatgtcccgctacctcaagttgtagtttcaccaaaggctcaattagaacaaaaatttcatgattatttccacactagtgaaactgagcttaggttgtctaatttaacatcggttaggcacaaatacaatgaatctgttgctgattatattaaaaggtttagatatattaaaagccgatgttttagtttgaaaataactgacaaagatttggccaacattgcatatgatggatttcttgattctattaaagagaaattgaatggccaaatatttcttgatattgatcatgtgttgcatgaagctctggctcaggaaagccgagtggatgacaatagcttaaatgctagcttagattatagtgcaatatcatgtatagccgaaccaagcgatgattcggattgtgttaataatttgtgcaatgatgtcataacgattatatccgaaccaagtgttggttcggattgtcttactagcttggatgataatgcaacaaccattatagtcgaaccaagtgttggtttgtattgtgttactaatttagacaataatggaatagccgaaccaagcaatggttcggattgcattgctagtttagagaatagcatcattgaaaatatagccgaactaagtgatggttcggattatattacaagcgaaaatgaaatagcattgtcacctaagaccgaatcaaaaatcggtcatgtggatgttggaaaagatgatgacaatgtcttgcgggatagtggtgaaatagaatccaaagtagctatgcatacatatcaaaggccgtatcctgagtacgtagattcggtcccatacccgcaaggatttgaggtgcccaacttcacgaaattcacaggtgaggatgctagaacaacaatggagcatatcgaccaatttattgatcaatgtggtaaggccggtaatgatgatttgcttaagttaaaattgtttcctctttctttgtcaaactttgcatctacatggtatagtttatttgctcctaattcaatttctacatggtcacaaatggagcatgagtttcatggttatttcaaagatgcaagcttgatggagcaaagaccgattgatacttcatcggtcacttgtgaaactatttcggttacatctatgcctaagaccggaattattagtgatcctctccctgttagttctattggtgttggcaaaaagaaagggaaaagtgttattattggggatcctcggcccaagaataggatcaaaaatgcgaaggctgaagatcataaagttacaaaagataagtcatctagttcccaaaagactaaaaagccgaagctcacttttgagatgcttatggctaagtacaagaaaggattagctggtcaacgatttgataaccaaactagtgattcgaaaagaccaagatcatctcgtaggaagagatttggtcaaacatcaaagcaatcggagccatcaactataccaactccatataaacctccggttgtgatgccatggtatccacatccaatgtcatcatttggttatccttttatgtattacattccatggatgcctcaaccacatatgccgtgtcatcaaggatggaagcaatcacctaggacaataccaagtcattctaactcaagacaagaccgtttcccacaaaagaatcggtccggtggatcaaaggtgaaaaaggtgaagaaggtgtgggtgaggaaagaagccaaagcttcggaggtcgtcactgtcaaggaggagtctcaatatgttcatgtacctactggagatgcggtggaaaccacgcaagcaaagaagatcgaagccgccgccgtgactgtcaacattggtggtctaaccaagacagctggccggtctaaccgccagtctacggccgccggtctgaccgggcccagaggccgattagactggggggcattaaaggtgagagggaaaattgagagcaacataggagcttccacttcgaccaaaaatatgaagaatcattgcttagctcctggaaaacaaccacagctgaagtggataccttctggcttatctcgctctcaaaagaggaggctacagcgtcttcgagccataggtcaaaaagaaaaggaggccgaagatgtggagaacaaaacatgtatcaatttagagccttga

SEQ ID NO: 51549 - DNA, 681 bp, Oryza sativa
  unsure (1)..(681): unsure at all n locations
  Clone ID: PAT_MRT4530_53930C.1
tcacttatctgcaaagctagccggggcgagcaggagaggaggagggtggcgccgcgacggcgacggcggcggcggcggccgtagtggggaagcatggcggaggcgcggggaggccggaaccctgccgacgacggcgagcccgtagcccttgagcccgacgaactttgctacctgggcaccgatgccgtactcgcgggagtcgacggcgaagccgagctcgacgttggcctggacggtgtcgtggccatcgtctaggaggttgtaggcgcggtggccgtgcgaccaggggagcaaggtgtcggcgacaggcgcggccttgacctcgccacggcgcgcagcctcaatggcgtccgcgtggccgacgagatcctgcggcttgtcccggacgccgacgtgttccacaccacgcgcgccattgtacgcggcgggggcgtcncgccgccttgcttctcgtcgctcgaccgccatcaccgaccgcacgagggggacgaggaggccgtcgagctcgcgccgccctgaacccgcgcgccgccaccggggagccgccgtcgccggccgcaccaccctccggctgcacgcgccgccgcctgtgcgacagcaaagagcgagaggaaggaaggagagagagaggagaaaaagagagagggtgctgacgtggtctccatgacatgtggggtccat

SEQ ID NO: 51550 - DNA, 495 bp, Oryza sativa
  Clone ID: PAT_MRT4530_53931C.1
atgaggccgagcggcgcggagtcgtcggcgccgccgctccccatccgcagccgcgctcgcctgccgccgccgagcttgctgtcccgtgtctccaccgccgcgtcaccacccagcacgaacctcacgctcgcgctcgcgttcgtcgggtggggagccggccggtcgatatcctctccgccgctccttccccgtcggccgcgccgcctggagatcctcggcgtcgaggcggccgaggcggagatcgtcagggacaagccgcaggatctcgtcggccacgcggacgccgttgaggctgcgcaccgtggcgaggtcaaggccgcgcccatcgccgccgccttgctcccctgctcccgcgtcgtcgccgccgacaccttgctcccctggtcgcacggccactgcgcctacaacctcctggacgacggccacgacaccgtccaggccaacgtcgagctcggcctcgctgtcgactcccgcgagtacggcatcggcgcctag

SEQ ID NO: 51551 - DNA, 1045 bp, Oryza sativa
  Clone ID: PAT_MRT4530_53932C.1
atggtggagcggtggccggcggacgagggcgggaggaggcaccgccgcttcttcttgccgccgccggctgcggcgcagggtgtggagaaggtgaccgcggagttcgcgcgctcgatgcggagctcggcgacgagtggcatggatccaattaacccaaaaagtaaatggttatccagaggaaaagtacttcagtggggaagcacggcggaggcgcggggagcccggaaccctgccgacgacggcgagcccgtagcccttgagcccgacaaactttgctacctaggcgccgatgccgtactcgcgggagtcgacagcgaggccgagctcgacgttggcctggacggtgtcgtggccgtcgtccaggaggttgtaggcgcagtggccgtgcgaccaggggagcaaggtgtcggcggcgacgacgcgggagcaggggagcaaggcggcggcgatgggcgcggccttgacctcgccacggtgcgcagcctcaacggcgtccgcgtggccgacgagatcctgcggcttgtccctgacgctgccacgttccacaccacgctgcggtgcgtgaaggaatcgacaagctgctcagaggattcgacggcgccgtgccgtcgcatcatccgtcgtcgtcttgtagccagcaaggagctgcggcggcagcggcagcgggagcgggaggacatcttccgcctcggccgcctcgacgccgaggatctccaggcggcgcggccgacggggaaggagcggcggagaggatatcgaccggccggctccccacccgacgaacgcgagcgcgagcgtgaggttcgtgctgggtggtgacgcggcggtggagacacgggacagcaagctcggcggcggcaggcgagcgcggctgcggatggggagcggcggcgccgacgactccgcgccgctcggcctcatcgtcgtcggcggctccgggcgcgggcggaggtctcctctgataggcgatggcggccacggtcaccgcgccactgtatccaccaatttattcctgtccacttcaagtctcaaacttgaagcttaa

SEQ ID NO: 51552 - DNA, 1104 bp, Oryza sativa
  Clone ID: PAT_MRT4530_53933C.1
atggcagaactgtggggaagcacggcggaggcgcggggagcccggaaccctgccgacgacggcgagcccgtagcccttgagcccgacgaactttgctacctgggcgccgatgccgtactcgcgggagtcgacagcgaggccgagctcgacgttggcctggacggtgtcgtggccgtcgtccaggaggttgtaggcgcggtggccgtgcgaccaggggagcaaggtgtcggcggcgacgacgcgggagcaggggagcaaggcggcggcgacgggcgcggccttgacctcgccacggtgcgcaatctcaacggcgtccgcgtggccgacgagatcctgcggcttgtcccggacgccgccgcgttccacaccacgctgcggtgcgtgaaggaatcgacaagctgctcagaggattcgacggcgccgcgccgtcgcatcatccgtcgtcgtcttgcagccagcaaggagccgcggctgcagcggcagcaggagcaggaggccatctccgccgcggccacctcgacgccgaggatctccgggcggcgcggccgacggggaaggagcggcggagaggatatcgaccggccggctccccacccggcgaacgcgagcgcgagcgtgaggttcgtgctgggcggtgacgcggcggcggagacatgggacagcaagctcggcggcggcaggcgagcgcggctgcggatggggagcggtggcgccgacgactccgcaccgctcggcctcatcgctgtcggcggctccgggcgcgggcggaggtctcctctgataggcgatagtggccacggtcaccgtgccactgaccatccaaatgaggcctttgtcgtgttggcagagaagcccatgcctacgccttgctgcggcctcacggtccttcacaccttcaccgacatgcatgcattgatgcatcatacatactctaacttcagaagagatgcggagccgagattcaatcaaactacttcagcttcaccaaaaagtgaaacagagtggaataaagtgatacaaaataaacgaactacagataacctacttggaggagcttcaaatcctaagaaacacttgattggttggcagtttttgagaatctga

SEQ ID NO: 51553 - DNA, 678 bp, Oryza sativa
  Clone ID: PAT_MRT4530_53934C.1
atggccgtcgtccaggaggttgtaggtgcggtggccatgcgaccaggggagcaaggtgtcggcggcgacaacgcgggagcaggggagcaaggcggcggcgacgggcgcggccttgacctcgccacggtgcgcagcctcaacggcgtccgcgtggccgacaagatcctgcggcttgtccctgacgccgccgcgttccacaccacgctgcggtgcgtgaaggaatcgacaagctgctcagaggattcgacggcgccgcgccgtcgcatcatccgtcgtcgtcttgcagccagcaaggagccgcggcggcagcggcagtgggagcgggaggccgtctccgccgcggccgcctcgacgctgaggatctccgggcggcgcggccgacggggaaggagcggcggagaggagattgaccggccggctccccacccggcgaacgcgagcgcgagcgcgagcgtgaggttcgtgctgggcggcgacgcggcggcggagacacggggcagcaagctcggcggcggcaggcgagtgcggctgcggatggggagcggcggcgccgacgactccgcgccgctcggcctcatcgtcgtcggcggcttcgagcgcgggcggaggtctcctctgataggcgatggcggccacggtcaccgcgccactttcagggacgattttgtatctcgctga

SEQ ID NO: 51554 - DNA, 327 bp, Oryza sativa
  Clone ID: PAT_MRT4530_53935C.1
gtggccgatagatggtaggagctgcaatggacttaatctgtgcgcaaggccgtgagcactggtggtgatagtgactaagagcgtcatgccgtctatacgggcaaccttaaatgcgcggcgcttatgtaccacggagggttgaccgtgcaccggtggttcgttagcaagtgctgcacgcaagcatagggggcttcacacatggtagcccatggttggctatgccaccatgccgtcctcatgaacaaaatggatctgatgatatccaatccagggtgcacattgcctgttttgattcttgacacgccgtctttgctataagctacgata

SEQ ID NO: 51555 - DNA, 447 bp, Oryza sativa
  Clone ID: PAT_MRT4530_53936C.1
atggagagctcggtgcagagcactgttgtcgaggtcgtcaccgcagtccatgcacggctgggttcgctgagggccacgcgtcgccgctcccttgctccgtacgcagggccggtcctgacttttcagggtcttgtactcgagggcagccggcggcaagcaaattgcaacaaggaagaagcagcggcaccgcagaattgcgtcggcgctggcgcgacacgcgacgatgcgggctaccctggtggcctggttgcgcgcgatttcgccgggaggagaggacgttggcggcagacggcggcactctcacgatctgttcttgttctattctctttacgcacccgcgcatgtgatctgttcgcgtcgctggccttccaccgcttcgtttgcgctcactgctgggccgggccaggaacaggggggcgctgtcgcgcggggagggaggcgcgcgac

SEQ ID NO: 51556 - DNA, 249 bp, Oryza sativa
  Clone ID: PAT_MRT4530_53937C.1
atggctgcggtgctgaggaaggcgacagcgcagcacggggtggataaggacggcggcgagaggcggctggaggtggctgctatggtggtggttcgggtggtgtggtggcggcggggtttcggtggcagattaggggagtggagcggcggacgacgtgcggggcagtgtggtgaacccagaggtggcaccggcgccatgcgacagcggcgcgtggctggaggcgatggaggaggtggcgactcgggttag

SEQ ID NO: 51557 - DNA, 267 bp, Oryza sativa
  Clone ID: PAT_MRT4530_53938C.1
gtaccgggtcgctgtaaaccagtgtctactcactgtgggcattatctacattcggttcagctaagacctcatgttgaagacaagcatttctttcgccttgcttgctaatggaaaatattcttacaaggaagctcttatgggtttctttattgggtcaacttcatattcagccttttcatataatttcgaagacttgggctccttccaaatctaaaactttcatgtggttggtcgcccacaacaaggtgtggacaactcatatggttg

SEQ ID NO: 51558 - DNA, 3033 bp, Oryza sativa
  Clone ID: PAT_MRT4530_53939C.1
ggagtctcgcaaccttccccttcccacctcccgctcctcctcaaccagcgccagccgcgtcagctcgcaataagcacttcggaccgccacggcgcgcgggtcttgcggcggtagtctctccctggcggcatgacgcggcggcgcacctggccgtgacgcgtcttgctaatggcagcggcggcggtggggggaaggggggagaggctgtcgtcctcctccccgacggcggcggcgccgcaggtggacgccgggaagtacgtccggtacacgcccgagcaggtggaggcgctggagcgggtgtacaccgagtgccccaagcccagctcactccgccgccagcagctcatccgggagtgccccatcctcagcaacatcgagcccaagcagatcaaggtctggtttcagaatcgcagatgccgggagaagcagcgcaaggaggcctcccggctgcaaactgtgaaccggaagctgaatgcgatgaacaagctgttgatggaggaaaatgaccggctgcagaagcaggtgtcccgtctcgtctacgagaacggctacatgcggactcaactgcacaatccttctgcagccaccacagatacaagctgtgagtctgtggtgacaagtggtcagcaccatcaacagcaaaacccagcagttctgcatccgcaaagggatgcgaacaacccagcaggtcttctcgctattgctgaggagaccttggcagagttcatgtcgaaggcgacaggaactgctgtcgaatgggtgcaaatggttgggatgaagcctggtccggattccattggaatcatcgctgtttcgcacaattgcagtggcgtagcagcacgagcttgcggccttgtgagccttgagcccacaaaggttgctgagatcctcaaggatcgcccctcttggtaccgtgattgccgatgcgtggatatcatccatgttatccctacgggtaacggcggaaccattgagctaatctacatgcagacttatgcaccgacaactttggcggcaccacgcgacttttggactctccgctacacaagtggacttgaagatgggagtcttgtgatctgtgaaaggtcattgactcagtccactggtggcccatctgggcctaacactccgaattttatcagagccgaggtacttcccagtggttatctgattcgaccatgtgagggaggtggctccatgatttacattgttgatcatgttgatttggatgcttggagtgtgcctgaggttcttcgaccgctctatgaatctccaaagatccttgcacagaagatgaccattgcagcattgcgacacattaggcaaattgcacatgagtcaagcggtgaaatcccctacggtgctggtcgccagcctgctgttttcaggaccttcagtcaaaggctcagcagaggtttcaatgatgctgttagtggatttccagatgatgggtggtctttgttgagcagtgatggtagtgaggacattacaatttcagtaaactcgtctccaaacaagcttgttggatcccatgtcagcccgaaccctctgttttctactgttggaggtggcatcttgtgtgcaaaggcatcaatgctacttcagaatgtacctcctgctctacttgtgcgatttctgagggagcatcgttctgaatgggctgatcctggtgttgatgcttattctgctgcttctttgcgagccagcccatatgcagttccaggcttaaggaccagcgggtttatgggcagtcaggttatactacccctcgctcataccttagagcatgaagagttcttggaggttattaggctcgaaggacatggtttcagccatgatgaggtgcttctatcacgggatatgtaccttctacagctttgcagcggggttgatgagaatgctactagtgcatctgcacagcttgtctttgctcctattgacgaatcttttgctgatgatgcaccacttttaccctcaggattccgtgtgataccactagatacaaaaatggatgggccatctgcaacacgcacgctcgaccttgcatccgcccttgaggttggaccaggtggagcttcgcgtgcttcagttgaagcatctggcacatgtaacagatcagtcctgaccattgctttccaattctcatacgagaaccaccttcgtgagagcgtggcggcaatggctaggagttatgtcagagctgtgatggcatccgtgcagagggtggctgtggcaatagctccttctcgacttggaccccagatcggaatgaagcaccctccagcctctcctgaggcgcttacacttgctagctggattggtaggagctatagggctcacaccggagcagatatccgttggtctgataccgaagatgccgattctcccctggcgctcctgtggaagcacagcgacgcaatactgtgctgttctctgaagcctgctcctatgttcaccttcgccaacaatgccggcctcgacatccttgagacgacgctggtcaacctccaggacatctcgctcgagatgatcctggatgacgagggccggaaggcgctgtgctcggagttccccaagatcatgcagcagggtttcacctatctccctggaggcgtctgcaagtcgagcatggggcggcaggcatcgtatgagcaggcggtggcgtggaaggttcttagcgacgacgacgcgccgcactgcctcgccttcatgctcgtcaactggaccttcatgtgatccaccatccatggtttccagcttccagctagtgcttttgcttttgtgccattgtggcaaactgaacaaagacctgaataccaccaccgtattgtattaaacatatgcgtccatacatgcatggtgcttgctttatcctagctagtgctagcacctgtgtgtatggtctctccatgtttgaagcttaaaattttagaaccctggttttttttttctgctgctgtgtggatgaacaagtttcaggacctatgtatctctttctatctatgctaatgctatgaattgtgtgatgtgcgc

SEQ ID NO: 51559 - DNA, 393 bp, Oryza sativa
  Clone ID: PAT_MRT4530_5393C.1
atgagtaccaactttatcatacattcaaactatattgattatgatgctagcttatctggtaaatgcaatggtgtgggtataatgatcgtgcataccattgttctatgtcatgacgatgatattagagtagtatttcgtaatttaagcgtggtgtttagattactggatatcgttatttggggttatatactgcgaatacgttgaggtgggccgctgatggtgacagctcaatacgggtattcctccgcgcgtgtatatagtcctaagttactttcctggggagggtactcctccgtatttagccccggttagatggtcagggcggattatcataagaaactcgacaatcaggggtgacttctcgaagcaccaagagggcattggaaagagagt

SEQ ID NO: 51560 - DNA, 447 bp, Oryza sativa
  Clone ID: PAT_MRT4530_53940C.1
atggggaataaaatactggcactggaggctggggttttgtggcaatggattcaaagggttctttctgctggaagcttatcgtggatgggcaacgccctgcatgtggaggcgttagcaatgatgaaaagtctagaaaaagtgtctcaacaggggatgacaaaaattgaggttaaaacggatgcacagatgctgggcaaagcacttatttcccaagatctgaaccgtcgccctgatggtgtcattttcagaaaattaagggctttcttaagatcaaactttgatgtcttttctatttcagttttccctagatcttgtaacaaagtggctgattgtttggcctcttttggtgtgggtatcgtggccactagctccaagtgtttctggagccaagccccgacgtttgtatctcctttggtctccggcgatttgcctggagatactggttaa

SEQ ID NO: 51561 - DNA, 600 bp, Oryza sativa
  unsure (1)..(600): unsure at all n locations
  Clone ID: PAT_MRT4530_53941C.1
tcgggtgagattcggcacgaggctgtcactggggcggtacaangncncgtccgttacgtcccctggaagcgctagctcccancgtcccactacnngaantnncgnactanatcctcccnggcacntgtagcctacccttcnagttcaaangnnntctatacngntgtcaacggcccagccncgcacgatgtcatgnntggnggggancctncnannctcgggtggctgnnctctggtncggccgccctgnctgcnnggncnatngtcngcncccatngtnncatgngcngggcctancngtncggnggnttcccgacaantcccangaccccgancaatnctatgntcccggngagattcagactaaactgtcancnaccncnnctcnnacacngtcatatancatnnataatgtgtcctgtcccacatgtgaaaaccggtcccgggggacttttggccnggtcggnccggatgtngntatgaacctgactctctancgaagcctacatnagnatggaccnttttncagtcaggcgtctccnacggngcaagtccttaacacaaaacaactcgtagggggggcngntttcactcnccccc

SEQ ID NO: 51562 - DNA, 1442 bp, Oryza sativa
  Clone ID: PAT_MRT4530_53942C.1
gttttccacaatgatcagagatcaatctgtacctgaccctctgcaacgtcatgctcgctgcgtacgtctcgcgctccgaggtcgcggaggccaggaaggtgttcgacggaatgccgatgagggacttggtgtcctggaacacgatgatccatgggtacgccatgagaggggaggtcggcttggcgagggagatattcgacgggacggaggacagggatgccttctcctggagctcgatgatctccgcttacgctaagagccggcgatccaaggaagcgctggagctgtggcgggagatgcacgccgccagcatcatcccggactgcattaccttggtgagcgtggtctcggcgtgcagtgatttgggagcgctggccgttggtgcagaggtacaccgcttcgtggagagcaacaggatagagctggacttgaagcttggcactgctctgatcgacatgtatgccaagtgtggtgacattgagagtgcacagagagtgttcgacagaatgccagagaaggatgtgcaaacttggagttcaatgattatcggactggccaatcacgggcttggccatgagtcgctcagcttgttctcgaagatgatatctgaagggatgaaaccgaatggggtcaccttcgtcggtgttcttatcgcgtgtactcatgttggccttgtgagcgaaggcaagaagtattttagatcaatgaatgaagttcatggtatagagccaacagttgagcactatggatgtatggttgatcttctggggcgttcaggccatgttgaggaggcaagacaactcatcaggagcatgacattcgaacccgacacaattatctggagagcactacttggggcctgtcgcatccataagaatgtggagattgcagaggaagccatggccaaactgcgagttctggatcctcttggtgatggacactatgtgctattgtcaaatatatatgcacaggcaaactcttgggaaggtgttgcagaaatgaggaagacgattagaagggacaatattcagaggattcctggaagaagttcaattgaatgggatgaaaagattcatgagtttgtctctggtgatagattgcatccaaggtccaaggagatctacagagtgttggaagagatgatggatcggttaaaacaagcaggttataagcctatgacaggtttggtattgcaagatattgatgagcaatctaaggaacgctccttggctgaacatagtgagaagctggccattgcttttgcgctgctaactacccctgcgaggtcaactattcgaataacgaagaatcttagagcttgtgaagattgccattcagctatgaagttgatctccttggtgtatgatcgcaagttgattgttagagaccggaaccgtttccatcatttcagtgaagggcagtgctcatgcaaggattactgg

SEQ ID NO: 51563 - DNA, 1277 bp, Oryza sativa
  Clone ID: PAT_MRT4530_53943C.1
atggagtcgccgccggagtcctcctcctcctccccggtcctcctcaacatcgggggcaagaggtacgcgaccaccgtcgagacgctcacgcagcgggagcccagctccatgctcgccgccatgttcagcgggaggcacacgctcccccggcacccggacacgggcatggtgttcgtggacagggacgggaagcacttcaggcatgtcctcaactggctcagggacggcgccgtcccagacatgtcggagtctgagtaccagcagctcctgcgagaagcggagtactaccagttgctcggcttggctgattgcataaatgatagattgggttggaaaaatgatgagaatttctcggaggccgaattgacacgcaaagatgtgatcaagtgcatccaagctccgagagtcagatttcgtggtgtaaatctatctggccttgatctatccaaacttgatttatcagaggtggacttcagctatgcatgcataaagaatgccaatttttcctctgcttatcttcgtaaagcaaagttcaggctgacagaagctacttgttcttcattccaaagtgcaaatttacatgagtgtgagcttattggagcaaatcttgaaggatctgttctagataaagcaaaccttcaaagtgcaaacctacaggatgcatgcttaaagcaatgttgcttcattgaaacggatcttcgttctgctcatctacagggtgctaatcttatgggcgccaacttgagtggagctaatcttgaaggggccaatctcaagggagctaagttggccggtacaaacttggaatgtgcaaatcttcagcgagcctacttgcgagaagttgatttgcgcgaaactcatttaactggtgctaagcttggaggtgcaaatctgcttggagctatcagataataccaagggaagaagcttatatcttctacatttacaattaaactgaaactggtgctttggtacctcgaacattatcttgcctgcaccaacggtttgttcatgagtaaatagtttcttgctaccgattctgcagatagtcatacagctttagtcggcggttgtacatatacccttgtcacattcctctgattcgaaaattcggtgatgaactgttggatacagctagttgcttagtatcatcatggatagaagctgttctagtaggaaaatttcctgcatactttgggatattgttgtgaacaatgactgaaaattttagtgggaaatatatcttcgttaatgtgcaaaaaaaaaaaaaaaaaaaa

SEQ ID NO: 51564 - DNA, 303 bp, Oryza sativa
  Clone ID: PAT_MRT4530_53944C.1
atgacgagctcgacaaggagacgaatagatgtccgacatccctcaccgcgtcactcactgggcaccaccattgcctcctacatgtatgccttctccatcatggagcagtttgtcacttcggcgttcttctctgcctcagaggacttctccctcctctcgggaaaggtctcagacacaacgttcttcccgggcgatgggcgtggaggatgtgctggcccggtacttgtggaggcgatgtgttggctcttccgcgaagggagctcctccgctatggcgatcgtctcggatgtggtgctccactag

SEQ ID NO: 51565 - DNA, 579 bp, Oryza sativa
  Clone ID: PAT_MRT4530_53945C.1
gcacgagggggattaaaaaacctgcgtgacaaagtgaagcagcaccaagaaaaagtaggggagaaggtattattcactatcttcctaatttatgtcaaagtagggtttaacaattgattaactgacagttttgccatcttcgtatctctctgtgttgatcactgggtggttaatgcagggatactttccttgtgtcattttactttgataaacataattctgaatgtgacatgtatggcatgtaaagtataatcttttctggatagtgttttgttggttcaattggtagacttttattggaagctaaaaatacgttctcaagcttaccatgatgatgatgctacatgtccatatcttcagtttgatgtacgtttctcttttctagttcaaaattaatcttttggtggtcaagacttttctcttttctagttcaactaatctttcggtagtcaagacctagagtccaaatctgatatctgtatcttgtacactctcctacttcaaacaaagatactaatttctcctactaaagttggtaattaatatttgggtcccccctaatcttttctagttcaacta

SEQ ID NO: 51566 - DNA, 3615 bp, Oryza sativa
  Clone ID: PAT_MRT4530_53946C.1
atggacctatctaggagtttgtttagaagaatagcaagcagagacgataaatctttaagttgtattgataaacaaaaaggtaaaaaagaagacatagatgagcttgaagatattgcagaagtagacaaacagctcgaaagatatcaaagagatactctgaaggcaataagacctcaacaaatatattgcatgggattttttgagaataaaaatgggttatacagaatatctagagaagtagagttaagcgttttaacaaagccagttgagttaaaaattgtagccaaggaatttgaaaatggattaaagtattcagggtataaatatattcaccaaggtatgtatataataggaatcaaaggtatgacaagaaagaaaataggagctaaagttttaataactctgttagataaaaggtgggacacaatagataaagcagcattaggatttttagaaggtgacatgaatgagaatatgttgataacatatatagccccagatctaatgatgcctataaaagaatttatagataaaatgagttttggttttcaaacaaagggatacgaggaatttaaaggaacaaatttgctagtaagcatagaatttataggaagattaactaatagaagtgcctccaaatacaaaataaatgtaaatgacgtgattgaaaatatgcactctaagggaataactttcatgagccctttaaaaataagttctgaagaaagggcaggagaagaatggaaaattagtgatttaattgaaagcaaaactttgagtcagcctgaaaattatataagttatcaaaatagtaaaggaaataccagcattagatttataaattacaaacccagaaccacagatgacttagaaacagaagcatctgatagaaatataatagataatagaagacatagtgtttcagagtttatggaaaaattagatcaagaaagtgagataaaatattacgaaaataaattaaaggaaataaatgaagaatataataactctatgaagtgtgagtggcctaaaataagagataaagaactttatttctatagagaattagccagagtaaagaaagtaaagaagaacgaagatatggcagtagaaatttttaaaaaccaagaaaccaagatagaacagataaagaagaaagagcaagatgagcatgacaaagaagagcaaaatcttggtaaaattttaagtgaagaagagcaatgggcagagaatgaaaaattatttcttgaaagttatgaagaagaaattaatctaataaatgagatggagaatatagaaaatgaaatagacaatgcagaacaatataatgattttataaacacattagatgaagtagggttacataatcttgaaaatgcaatggaagctatggaagtggacttaggaacaggaaagagaaaaagatatggagaaggtactgtgaaaaacgaaggagaaagagaaagaccagctagggcagcaggaaaatggccccctgatagagaagaattttcgtataactatataccaggtcaatataggcacatgggtactaagagaagagactttgagaagcctgttaaatttcaaaaccagaggagtgatggtgctatattaaatttagccgcacatgaccctattgattggcctaatattattagtatttggaaatgtttaatagttcaaaaatatatacaaaaccagcacaatataggaagtaaagttgaagatatgataacctacttagaaacatttttaggtgaatctgctaaggttctatgggaacaatgggttgaaaagaatcctaataattatgaagaattgaaaagagctggtagcaatccgcataattttgcaaatgttatatctaacattattatagctgaagatccggaattaggttatacaactttgcaaaatgaaaggttaaaagaaatagaaaaattaacgttaacaagttggaaaggcataaaagaattctcccaacattatttatataatgctacaactgctaaacaaggatataacaggggtatagttgaacgttatttcaataaattacctgacccactaggaagtatgatatttgaagaatataaaaaggaaactgaaggagctgaaatcaacatctctcaagccataacttttgtgtttaagcaactaagaaaaatatgcacgggtatccaagcccaaagatctatgaaacactcggattacaatttctgcaataaaatagttcaaatacccttgtcatatggagaagacaagcctagaagtaaaagaatttataaacatcaaaatagaaaccataataatattagaacgaagaaaaggttccttcaacaatcagtacaaaccacagtaatacatgagcaaggaattacttttatcccatatcaaaataatgttccatatatctcagaggtacgaaagcgtggtggagtctcccccaaactcgacaacttagaagtacccaatcttgagcctgaagaaagaattaatgaatatgagcttagtgagaatatagacaactattatatatcaaattccaacatagagtgcataggactacaagcatttgcaccaaattggtatagagatattaagtctaaaagggatatagaaaaaattattcaaagattagaagatatccaaattataggagaaattcctatgaaatattgggagaaaaatgctattgagtgtaaaattaatataatcaacccagaatatatcattaagactagcccaatagaagcaactccgaaagacatagaagaatttaagatgcatatagaagaactgttgaaactaggagccataagagagagcagaagtccacacagaaaggtggaacaaaatgggttaatattatccaaaaagaaaatggaaatatgcaaagaaaaaattaacttccttggacatgaaataggagagggcaaaattcatttgcaagaacatattgctaagaaaattttagaatttcctgatgctatgaatgataaaaagaaattacagcaattcttaggacttgtaaattatgctagaaatcacatcaataatttagcaaagttagcaggaccgttatatgctaaattaagaaaaaatggtcagagatattttaattctgaagacatcaaattagtaagattaataaaagagagggtgaaagaattaaaacctctagaattaccattagaagagagttactttattattgaaactgatgcatcgcagcttggttggggtgctgtattaaaacaaaggcctactaaatattcatctaagtcagaagaaaaagtttgtaggtatgcttctggaagctataaattaaaaaccgtaggcaatacatatagagaaatacttgcaataatcaatgcgataaatgcctttaggttatatttagggttcaaagaatttacggttagaacagattgcgaagctatatgtagatattataatcagcttaatagcaaaaagagttccactaggaggtggattttatttgaagatatcattactggcaacggatataaagttatatttgaacatattaagggaaaagataatcatttacctgatctactctcgcgattgcctattttgcaggaatga

SEQ ID NO: 51567 - DNA, 4137 bp, Oryza sativa
  Clone ID: PAT_MRT4530_53947C.1
ctagcccaatagaagcaactccgaaagacatagaagaattttagatgcatatagaagaactgttgaaactaggagccataagagaaagcagaagtccacataggtctgcaattcaggtaaacgagaaagcatgtcaggcaaattattatctttccccttaatatgttcaaatataactttatagccgtttcctgttataatatcttcaaataaaacccatcttctagttgagcttttcttgctatttagctgattatagtacctacaaatggcttcacaatcggttctaaccgtgaattctttaaatcctaagtacaacctaaaggcattgattgcattgattattgccatgatctctctatctgtattattgacagtttttaatttataacttccagaagcatatctacatattttttcttctgatttagcggaaaatttagtaggtctttgctttaatatagcaccccaaccgtgttgtgatgcatcagtttcaatgataaagtaactttcttctaatggtaattctagaggttttaattctttcaccctctcttttattaatattactaatttaatgtcttcagaattaaaatatctctgaccattttttcttaatttagcatataacggtcctgctaactttgctaaattattgatgtgatttctagcataatttacaagtcctaagaattgctgtaattgctttttatcatttatagcatcaggaaattgtaaaattttcttagcaatatgttcttgcaaatgaattttgccctctcttatttcatgtccaaggaagttaattttttctttgcatatttccattttctttttggataatattaacccattttgttccacctttctaaaaaatatttcaagatgagcaatatgttctttgtaagtccttgagaagactaacaggtcatttatgtagactaatatgaattcttggttttcgttaaatatattctgcattttcctttggaaaattgctggtgcattttttaatcctaatggcataacaagccattcataatgtccttgaggacatgtaaatgcagtccattctatagattcttctgccatctttacttgccagaatccagttttcaagtcaaattttgagaaatatttactaccttgtattctattaatccattcttgcttatttgggatattataggcatcttctatagtattatcatttagtcttttatagtttttgaccatcctagatttacctctaacttcttctgcatgatttcttactatgaacgctgcagacctatgtggacttctgctttctcttatggctcctagtttcaacagttcttctatatgcatcttaaattgttctatgtctttcggagttgcttctattgggctagtcttaataatatactctgggtttattatattaattttgcactcaatagcatttttttcccaatatatcataggaatttctcctataatttggatatcttctaatctttgaataattttttctatatcccttttagacttaaaatccctataccaatttggtgcaaatgcttgtagtcctatgcactctatattggaatttgatatataatagttgtctatattctcactaagctcatattcattaattctttctttagactcaagattaggtacttctaagttgtcgagtttgggggaggttccaccacgctttcgtacctctgagatatatggaacattattttgatatgggataaaagtaattccttgctcatgtattactgtggtttgtactgattgttgaaggaaccttttctttgttctaatattattgttgtttctattttgatgtttataaattattttacttctaggcttgtcttctccatatgacaagggtatttgaactattttattgcagaaattgtaatccgagtgtttcatagatctttgggcttggatacccgtgcatatttttcttagttgcttaaacacaaaagttatggcttgcgagatgttgatttcagctccttcagtttcctttttatattcttcaaatatcatacttcctagtgggtcaggtaatttattgaaataacgttcaactattcccctgttatatccttgtttagcagttgtagcattatataaataatgttgggagaattcttttatgcctttccaacttgttaacgttaatttttctatttcttttaacctttcattctgcaaagttgtataacctaattccggatcttcagctataataatgttagatataacatttgcaaaattatgcgaattgctaccagctcttttcaattcttcataattattaggattcttttcaacccattgttcccatagaaccttagcagattcacctaaaaatgtttctatgtaggttatcatatcttcaactttacttcctatattgtgctggttttgtatatatttttgaactattaaacctttccaaatactaataatattaggccaatcaatagggtcatgtgcggctaaatttaatatagcaccatcactcctctggttttgaaatttaacaggcttctcaaagtctcttctcttagtacccatgtgcctatattgtcctggtatatagttatatgaaaattcttctctatcagggggccattttcctgctgccctagctggtctttctctttctccttcgtttttcacagtaccttctccatatctttttctctttcctgttcctaagtccacttccatagcttccattgcattattaagattatgtaaccctacttcatctaatgtgtttataaaatcattatattgttctgcattgtctatttcattttctatattctccatctcatttattagattaatttcttcttcataactttcaagaaataatctttcattctctgcccattgctcttcttcacttaaaattttaccaagattttgctcttctttgccatgcttatcttgctctatcctctttatctgttctatcatggtttcgtggtttttaaaaatttctactgccatatcttctttcttctttactttctttactctagctaattctctatagaaataaagttctttatctcttattttaggccactcacacttcatagatttattatattcttcatttatttcctttaatttattttcgtaatattttatctcactttcttgatctaatttttccataaactctgaaacactatgtcttctattatctattatatttctatcagatgcttctgtttctaagtcatctgtggttctgggtttgtaatttataaatctaatgctggtattccctttactgttttgataacttatataattttcaggctgactcaaagttttgctttcgattaaatcactaattttccattcttctcctgccctttcttcagaacttatttttaaagggctcatgaaagttattcccttagagtgcatattttcaatcacgtcatttacatttattttgtatttggaggcacttctattagttaatcttcctataaattctatgcttactagcaaatttgttcctttaaattcttcgtatccctttgtttgaaaaccaaaactcattttatctataaattcttttataggcatcattagatctggggctatatatgttatcaacatattctcattcatgtcaccttctaaaaatcctaatgctgctttatctattgtgtcccaccttttatctaacagagttattagaactttagctcctaatttctttcttgtcatacctttgattcctattatatacataccttggtgaatatatttataccctgaatactttaatccattttcaaattccttggctacaatttttagctcaactggctttgttaaaacacttaactctacttctctagatattctgtataacccatttttattctcaaaaaatcccatgcaatatatttgttgaggtcttattgccctcaaagtatctctttgatatctttcgagctgtttgtctacttctgcaatatcttcaagctcatctatgtcttcatttttacctttttgtttaacaataccacttaaagatttatcgtctctgcttgctattcttctaaacaaactcctagataggtccat

SEQ ID NO: 51568 - DNA, 3566 bp, Oryza sativa
  Clone ID: PAT_MRT4530_53948C.1
tcattcctgcaaaataggcaatcgcgagagtagatcaggtaaatgattatcttttcccttaatatgttcaaatataactttatatccgttgccagtaatgatatcttcaaataaaatccacctcctagtggaactcttcttgctattaagctgattataatatctacatatagcttcgcaatctgttctaaccgtaaattctttgaaccctaaatataacctaaaggcatttatcgcattgattattgcaagtatttctctatctgtattgcctacggtttttaatttatagcttccagaagcatacctacaaactttttcttctgacttagatgaatatttagtaggcctttgttttaatacagcaccccaaccaagctgcgatgcatcagtttcaataataaagtaactctcttctaatggtaattctagaggttttaattctttcaccctctcttttattaatcttactaatttgatgtcttcagaattaaaatatctctgaccattttttcttaatttagcatataacggtcctgctaactttgctaaattattgatgtgatttctagcataatttacaagccctaagaattgctgtaatttctttttatcattcatagcatcaggaaattctaaaattttcttagcaatatgttcttgcaaatgaattttgccctctcctatttcatgtccaaggaagttaattttttctttgcatatttccattttctttttggataatattaacccattttgttccacctttctaaaaaatatttcaagatgagcaatatgttctttgtaagtccttgagaagactaacaggtcatctatgtagactaatatgaattcttggttttcgttaaatatattctgcattttcctttggaaaattgctggtgcattttttaatcctaatggcataacaagccattcataatgtccttgaggacatgtaaatgcagtccattctatagattcttctgccatctttacttgccaaaatccagctttcaagttaaattttgagaaatatttactaccttgtattctattaatccattcttgcttatttgggatattataggcatcttctatagtattatcatttagtcttttataatttatgaccatcctagatttacctcgaacttcttctgcatgatttcttactatgaatgctgcagacctgtgtggacttctgctctctcttatggctcctagtttcaacagttcttctatatgcatcttaaattcttctatgtctttcggagttgcctctattgggctagtcttaatgatatattctgggttgattatattaattttacactcaatagcatttttctcccaatatttcataggaatttctcctataatttggatatcttctaatctttgaataattttttctatatcccttttagacttaatatctctataccaatttggtgcaaatgcttgtagtcctatgcactctatgttggaatttgatatataatagttgtctatattctcactaagctcatattcattaattctttcttcaggctcaagattgggtacttctaagttgtcgagtttgggggtgggggagattccaccacgctttcgtacctctgagatatatggaacattattttgatatgggataaaagtaattccttgctcatgtattactgtggtttgtactgattgttgaaggaaccttttctttgttctaatattattgttgtttctattttgatgtttataaatctttttacttctaggcttgtcttctccatatgacaagggtatttgaactattttattgcagaaattgtaatccgagtgtttcatagatctttgggcttggatacccgtgcatatttttcttagttgcttaaacacaaaagttatggcttgagagatgttgatttcagctccttcagtttcctttttatattcttcaaatatcatacttcctagtgggttaggtaatttattgaaataacgttcaactatacccctgttatatccttgtttagcagttgtagcattatataaataatgttgggagaattcttttatgcctttccaacttgttaacgttaatttttctatttcttttaacctttcattttgcaaagttgtataacctaattccggatcttcagctataataatgttagatataacatttgcaaaattatgcggattgctaccagctcttttcaattcttcataattattaggattcttttcaacccattgttcccatagaaccttagcagattcacctaaaaatgtttctaagtaagttatcaaaaatgtttctaagtaagttatcatatcttcaactttacttcctatattgtgctggttttgtatatatttttgaactattaaacctttccaaatactaataatattaggccaatcaatagggtcatgtgcggctaaatttaatatagcaccatcactcctctggttttgaaatttaacaggcttctcaaagtctcttctctttgtacccatatgcctatattgacctggtatatagttatatgaaaattcttctctataagggggccattttcctgctgccctagctggtctttctctttctccttcgtttttcacagtaccttctccatatctttttctctttcctgttcctaagtccacttccatagcttccattgcattatcaagattatgtaaccctacttcatctaatgtgtttataaaatcattatattgttctgcattgtctatttcattttctatgttctccatctcatttattagattaatttcttcttcataactttcaagaaataatctttcattctttgcccattgctcttcttcacttaaaattttacaaagattttgctcttctttgccatgcttatcttgctctttcctctttatctgttctatcttggtttcttggtttttaaaaatttctactgccatatcttcgttcttctttactttctttactctagctaattctctatagaaataaagttctttatctcttattttaggccactcacacttcatagagttattatattcttcatttatttctagcaaatttgttcctttaaattcctcgtatccctttgtttgaaaaccaaaactcattttatctcactttcttgatctaatttttccataaactctgaaacactatgtcttctattatctattatatttctatcagatgcttctgtttctaagtcatctgtggttcctgaatactttaatccattttcaaattccttggctacaatttttaactcaactggctttgttaaaacgcttaactctacttctctagatattctgtataacccatttttattctcaaaaaatcccatgcaatatatttgttgaggtcttattgccctcagagtatctctttgatatctttcgagctgtttgtctacttctgcaatatcttcaagctcatctatgtcttcatttttacctttttgtttatcaatacaacttaaagatttatcgtctctgcttgctattcttctaaacaaactcctagataggtccat

SEQ ID NO: 51569 - DNA, 4068 bp, Oryza sativa
  Clone ID: PAT_MRT4530_53949C.1
atggacctatctaggagtttgtttagaagaatagcaagcagagacgataaatctttaagttgtattgataaacaaaaaggtaaaaatgaagacatagatgagcttgaagatattgcagaagtagacaaacagctcgaaagatatcaaagagatactctgagggcaataagacctcaacaaatatattgcatgggattttttgagaataaaaatgggttatacagaatatctagagaagtagagttaagcgttttaacaaagccagttgagctaaaaattgtagccaaggaatttgaaaatggattaaagtattcagggtataaatatattcaccaaggtatgtatataataggaatcaaagccccagatctaatgatgcctataaaagaatttatagataaaatgagttttggttttcaaacaaagggatacgaggaatttaaaggaacaaatttgctagaaataaatgaagaatataataactctatgaagtgtgagtggcctaaaataagagataaagaactttatttctatagagaattagctagagtaaagaaagtaaagaagaacgaagatatggcagtagaaatttttaaaaaccaagaaaccaagatagaacagataaagaggaaagagcaagataagcatggtaaagaagagcaaaatcttggtaaaattttaagtgaagaagagcaatgggcagagaatgaaagattatttcttgaaagttatgaagaagaaattaatctaataaatgagatggagaacataaaaaatgaaatagacaatgcagaacaatataatgattttataaacacattagatgaagtagggttacataatcttgataatgcaatggaagctatggaagtggacttaggaacaggaaagagaaaaagatatggagaaggtactgtgaaaaacgaaggagaaagagaaagaccagctagggcagcaggaaaatggccccctgatagagaagaattttcatataactatataccaggtcaatataggcatatgggtacaaagagaagagactttgagaagcctgttaaatttcaaaaccagaggagtgatggtgctatattaaatttagccgcacatgaccctattgattggcctaatattattagtatttggaaaggtttaatagttcaaaaatatatacaaaaccaacacaatataggaagtaaagttgaagatatgataacctacttagaaacatttttaggtgaatctgctaaggttctatgggaacaatgggttgaaaagaatcctaataattatgaagaattgaaaagagctggtagcaatccgcataattttgcaaatgttatatctaacattattatagctgaagatccggaattaggttatacaactttgcaaaatgaaaggttaaaagaaatagaaaaattaacgttaacaagttggaaaggcataaaagaattctcccaacattatttatataatgctacaactgctaaacaaggatataacaggggaatagttgaacgttacttcaataaattacctgacccactaggaagtatgatatttgaagaatataaaaaggaaactgaaggagttgaaatcaatatctctcaagctataacttttgtgtttaagcaactaagaaaaatatgcacgggtatccaagcccaaagatctatgaaacactcggattacaatttctgcaataaaatagttcaaatacccttgtcatatggagaagacaagcctagaataagattgtctttcaaagaaatattaggtataagaatccctgttaaagtaaaattgacacccaaagtatcttataaaatattagcactagtagacactgggtgtacaaagaatattattcatgacaaatatttcacaagatgtcctgaaatagttcacacaattgacgacaataaggcagaagtttccacagacatgtccggaataaagaaaattcataatcagttagcttataatatggaggtttacattaatgcaactaaatatataatagatgagattacaataagagatttgtcaatgattaatgatgacatgataattggcctaaggttccttcaacaatcagtacaaaccacagtaatacatgagcaaggaattacttttatcccatatcaaaataatgttccatatatctcagaggtacgaaagcgtggtggagtctcccccaaactcgacaacttagaagtacccaatcttgagcctgaagaaagaattaatgaatatgagcttagtgagaatatagacaactattatatatcaaattccaacatagagtgcataggactacaagcatttgcaccaaattggtatagagatattaagtctaaaagggatatagaaaaaattattcaaagattagaagatatccaaattataggagaaattcctatgaaatattgggagaaaaatgctattgagtgtaaaattaatataatcaacccagaatatattattaagactagcccaatagaggcaactccgaaagacatagaagaatttaagatgcatatagaagaactgttgaaactaggagccataagagagagcagaagtccacacaggtctgcagcattcatagtaagaaatcatgcagaagaagttagaggattaaaaaatgcaccagcaattttccaaaggaaaatgcagaatatatttaacgaaaaccaagaattcatattagtctacatagatgacctgttagtcttctcaaggacttacaaagaacatattgctcatcttgaaatattttttagaaaggtggaacaaaatgggttaatattatccaaaaagaaaatggaaatatgcaaagaaaaaattaacttccttggacatgaaataggagagggcaaaattcatttgcaagaacatattgctaagaaaattttagaatttcctgatgctatgaatgataaaaagaaattacaacaattcttagggcttgtaaattatgctagaaatcacatcaataatttagcaaagttagcaggaccgttatatgctaaattaagaaaaaatggtcagagatattttaattctgaagacatcaaattagtaagattaataaaagagagggtgaaagaattaaaacctctagaattaccattagaagagagttactttattattgaaactgatgcatcgcagcttggttggggtgctgtattaaaacaaaggcctactaaatattcatctaagtcagaagaaaaagttcgaatgaagaagtccatgaattataatggagttgagttcttcacgtttggagaagacaataagctcaaagtattcccaccgaatacctataagtttaagccaaaaacccacataatattagatgaagtccaagaatgcattttagataatttctggtatcaatacaataataagagggaagaaaaaggctatatgctatcaatattaaacagtcttgctgaatatttccatctaatgaatgatataatgccaacatcagaaaataatgaagtaataccacaaaaacccatatatgttgtttttgacggaaagcttcctggagtgtacatatcttttgaagagatagtagcccaaaaaatagatgcaaaattaatgggtggattgtcatggaaaaaatatatagattttgatgaagctttaactcaggccagaaaaatattaggaataaactactacttggaaccagcagcaaaagaatatatacaaaaatgcaaaaaagccaaaaataagaaagctccagagaacccatattgttcaaatattaagaatgaaggatcatcccaaaaacctacgtataaggaatgcttgactaagggagtagatcctttggatggcgaatatatcgattggaaaataattgaaaaatttgaagaagcatccccccaaattaaaaaagaattgaaagaagaaatacttaaagaattaaagaaagaaatgaatgacaaatttgaagaaatgaaaaaagcatatgatgaaaaatttgaagtctccttttctgatgtagatactatggatttaggtggtcatgggcagcctgaccaataa

SEQ ID NO: 51570 - DNA, 104 bp, Oryza sativa
  Clone ID: PAT_MRT4530_5394C.1
atgcgtcgagcatttccggacttgtcgggtactccggacattctggatgatttcgtcgacctcgacgagatctccggctctcttgtgccattctcgtggcctac

SEQ ID NO: 51571 - DNA, 178 bp, Oryza sativa
  Clone ID: PAT_MRT4530_53950C.1
atgggcagtggccacttcagcatgttctcccatgaccaaggtggtcgcactcctacgatggtggtgccactggcgtcgcagatggatctttgtttttttctaccacagatcctcgttttctgctatgtccatcttccttgtgacgccgggtgcttcttctgctgcgttgtccacaaag

SEQ ID NO: 51572 - DNA, 6141 bp, Oryza sativa
  Clone ID: PAT_MRT4530_53951C.1
ccaagccttgttagattcagaatcagaagatgttaaagaaaaacttgaaacaatactaaataatatagacaatgactcatgttcagatgaagaaaaaaatgcagagattaattgttgccaagacagtggttgctcttgttatgagccagataattcagaagaagagtctgatgaaaatatactcgttttaaccagtttagaagaatttgttctcgatacttttgaaaccattcaagatccagaagaaaaaagaagagttctcgaaaaattcctttcaagagtcaagactgataaggataaactaaaaaaggatattcaaaagagcaaattcctctctattgatgaagtgttcaaaagattagatgaacagaaaaagaagaatgagaaaccagatttgatgagcctattcgaagaccaaaaaattatgaaacaagatttagaagaaataagaaagcgtctatacatgttagaattaaaagaaggattccatatggaagaaaaggacgaaccaattcaagaagatgatcaggttgttggaaccattcaaaaatatatgaagcaaaaatggtacacagaagttatgtatcgttttatagacggatcctactttcagcatatcactttaattgattctggtgctgatgtcaattgcattcgagaaggtattatccctcataaatatttctataaagccgcccacagaattcgtggggcagatggaggacttttaacagtagaatatcaaatccctgaaatctatatttgcatctcggaagtttgcattaaaacatctttcctactcgttaaaaatcttaagcaagatgttattttaggaacaccatttttatcacttattcgtcctttcctagtcacaaacgaagatattcaatttaagataatgggcaaacaggtgagcctaagattttcgtctaacacagatgagattcttgaccagcttgttcagaccaagagagaacaagttgtgaatacaatatatttacatgacgattctttcccatcatatcttccaaaatctatggacttgccaggtggtgtgaattttggtggtattgaggagaagataatcctgtatcttccatgtccaagtctcctgcagacatctttcacagcatttcctaaatcagattgaaggatctgatcgagggttgcatatatggaattcacaagaccatgatctataatggtttggagagatatttcttcatggttgtatgtgggtaggttccggaatctttgaagatttatctcagctttgagaaccaggaatctataggatgggtcagaaattgcctgattatctagtcttaagagagggagcatatatatgattactcgtatggctgggtttctttctctcccttctaaaagatcaaagaaataatcttggagtccaaggaatattttcatttgtctctccttaaacttttgccaaacaagatcgaggatgtcttgcccaaagcaggataaagtttgttccgttttgaagcttaatctgggttggagattttcgtatgtagtactcatgggattttggcttttaagtttctttttgcaagaatctttgtaggcacaagatctacatggtgcttttggctgagtccggagtatatattgtggaaggaataaattaggatgattatgcagtatgtatggtgtttggggaatgatatcatgcctttttgtggatgatgatggtttattatgtgggaaagattgcaataggttattgatatttatgtggaaagcaaccatgctcgaagcaggatctgctgagatcaaaatcttatctgagaataccttggtattcttatctgttgccatagattgttcgacttccatgagaagtttatcttggccatcacgggatttctcctcgcgataatctagtaacctttcttcatgatgagggatatcttgcattttagcccttttttctgttatcttttgatctgagggcacgaaatttttgaaataatatgccaagctatttaaggcatgagctttttcttttttgttttttgtttgccacaaaagatttaataacccatgttgtagctctgttattctgaaattgtgattaaatcgttctccatggcctctgggcagttggggcagtctccatgaactcatatttgtgagccattcagacttctgtgaagccatttccctgcatatatattcaaaatctttagtagcttttaataaatatctatcttcccatgatgtcttacctggcaattctatagattttggaagatatgatgagaaagaatagttgtctatattctcactaagctcatattcattaattctttcttcagactcaagattaggtacttctaagttgtcgagtttgtcgggttttggggagggggaggttccaccacgctttcgtacctctgagatatatggaacattattttgatatgggataaaagtaattccttgctcatgtattactgtggtttgtactgattgttgaaggaaccttaggccaattatcatgtcatcattaatcattgacaaatctcttattgtaatctcatctattatatatttagttgcattaatgtaaacctctgagatatatggaacattattttgatatgggataaaagtaattccttgctcatgtattactgtggtttgtactgattgttgaaggaaccttaggccaattatcatgtcatcattaatcattgacaaatctcttattgtaatctcatctattatatatttagttgcattaatgtaaacctccatattataagctaactgattatgaattttctttattccggacatgtctgtggaaacttcggccttattgtcatcaattgtgtgaactatttcaggacatcttgtgaaatatttgtcatgaataatattctttgtacacccagtgtctactagtgctaatattttataagatactttgggtgtcaattttactttaacagggattcttatacctaatatttctttgaaaggcaatcttactatatatttatttccaaaattggttatggcctctcttagttgaattattttagcagtattactgtcttttaatgttatcaattgctctttaaattcggtgttttgtatgtccttattctctggtaatgccttaatatcgcaattattttttaggttctctaattctacttctagtttatttagtctattttctaacactcgtactctactagataaagtcttttcatccgattctaattctatttcttttctccatttttgtttatttgcttttatacattcagcacaagcttgttttagacatatactacaagtcactctattttcttgactagggtaatatatgcaaaaagcacatttgatattatagtcaccctttcctcgaatccaatcatgttcacaatttaattgatccatcatttcaacctttagacctgctaattcgtcaattaaatctaactcttcatcggatgattcatattcttcgttgatagtttcaacttcgtctgtttctatgatagaatatattgattcgtcatcttttatttcatcatcgcatactaatatgttttcgtttacgctatctataattagaaccctctcttgttcttcatatttactagaatatctcttttgatctttatttgggcatgttctacttaaatgatctggcgagttgcatataaaacatctgcatgttttgtcataggttttctttggattatatcttcttacatttcttttatgtaagaagggtgctctattatctgatcttcttaagaaatatcttttctttgttctaatattattatggtttctattttgatgtttataaatccttttacttctaggcttgtcttctccatatgacaagggtatttgaactattttattgcagaaattgtaatccgagtgtttcatagatctttgggcttggatacccgtgcatatttttcttagttgcttaaacacaaaagttatagcttgagagatattgatttcagctccttcagtttcctttttatattcttcaaatatcatacttcctagtgggtcaggtaatttattaaagtaacgttcaactattcccctgttatatccttgtttagcagttgtagcattatataaataatgttgggagaattcttttatgcctttccaacttgttaacgttaatttttctatttcttttaacctttcattttgcaaagttgtataacctaattccggatcttcagctataataatgttagatataacatttgcaaaattatgcggattgctaccagctcttttcaattcttcataattattaggattcttttcaacccattgttcccatagaatcttagcagattcacctaagaatgtttctaagtaggttatcatatcttcaactttacttcctatattgtgctggttttgtatatatttttgaactattaaacctttccaaatactaataatattaggccaatcaatagggtcatgtgcggctaaatttaatatagcaccatcactcctctggttttgaaatttaacaggcttctcaaagtctcttctctttgtacccatatgcctatattgacctggtatatagttatatgaaaattcttctctatcagggggccattttcctgctgccctagctggtctttctctttctccttcgtttttcacagtaccttctccatatctttttctctttcctgttcctaagtccacttccatagcttccattgcattatcaagattatgtaaccctacttcatctaatgtgtttataaaatcattatattgttctgtattgtctatttcattttctatattctccatctcatttattagattaatttcttcttcataactttcaagaaataatctttcattctctgcccactgctcttcttcacttaaaattttaccaagattttgctcttctttgtcatacttatcttgctctttcctctttatctgttctatcttggtttcttgggttttaaaaatttctactgccatatcttcgttcttctttactttctttactctagctaattctctatagaaataaagttctttatctcttattttaggccactcacacttcatagagttattatattcttcatttatttcctttaatttattttcgtaatattttatctcactttcttgatctaatttttccataaactctgaaacactatgtcttctattatctattatatttctatcagatgcttctgtttctaagtcatctgtggttctgggtttgtaatttataaatctaatgctggtatttcctttactattttgataacttataaaattttcaggctgactcaaagttttgctttcaattaaatcactaattttccattcttctcctgccctttcttcagaacttatttttaaagggctcatgaaagttattcccttagagtgcatattttcaatcacgtcatttacatttattttgtatttggaggcacttctattagttaatcttcctataaattctatgcttactagcaaatttgttcctttaaattcctcgtatccctttgtttgaaaaccaaaactcattttatctataaattcttttacaggcatcattagatctggggctatatatgttatcaacatattctcattcatgtcaccttctaaaaatcctaatgctgctttatctattgtgtcccaccttttatctaacagagttattagaactttagctcctaatttctttcttgtcatacctttgattcctattatatacataccttggtgaatatatttataccctgaatactttaatccattttcaaattccttggctacaatttttaactcaactggctttgttaaaacgcttaactctacttctctagatattctgtataacccatttttattctcaaaaaatcccatgcaatatatttgttgaggtcttattgcccttaaagtatctcgttgatatctttcgagctgtttgtctacttctgcaatatcttcaagctcatctatgtcttcatttttacctttttgtttatcaatacaacttaaagatttatcgtctctgcttgctattcttctaaacaaactcctagataggtccat

SEQ ID NO: 51573 - DNA, 494 bp, Oryza sativa
  unsure (1)..(494): unsure at all n locations
  Clone ID: PAT_MRT4530_53952C.1
agggaataatactctcctttaacaactgagcaaaatgttggcgtatgtgtgctgggaggtggatgatttatttacactcgcaagaattttggtgggttaggccaaaagattgacactacacctctgacgggctaacccaaaccctcatctttaacggcttcgcgcatggttagtgatctgtggtcactggtgagtccagacacctttgacgggtggccggccatcacaggtgacacccacctctgacgggcaagttactagaaggccgtcagaggtgttggtctccgctagcctagggcgagttgggacccgtcacaggtgacttatctctgacggcctttaaataaaggccgttagaggtgatggtctccgtaggtataagctgtcacaggtgatctacctgtgacggncccaaaagtaaagggccatcacaggtaggtcaactctgacggggctttatttgctaatccgtnacaggtgaggtaccctttgcg

SEQ ID NO: 51574 - DNA, 581 bp, Oryza sativa
  Clone ID: PAT_MRT4530_53953C.1
tgagtagagtgtccactagttggggttttgtttattctagaaaatcgaaccaattgcattttaggatcgaataccatcctcaatctaatggcaaaaccaagaaggttaacctatgcttggagctctatttgcgttgctttgttcatgctatgccaactaagtggaattcatggttgtagcataattctgattcaatatctcatatcactcagttttgcttaagtctcctttcgaagatctttatgggtatccatctagtcagtttggaattggagatgatgcctgcagtgttccaaatttggataactggctaaaggaaaggaaactgctgactcaattgctcaaacaacacctcaatcgagcaaaacagtagatgaaaacttatgccggtaagaaaagaagttcaagagaatttgttgttggggaccttagtcttttgttgctaagagggcaaatcacaagctatcatttcgttattttggtcctttccgggtgattgccaagatgggtaaggtagcttatcgcttacatattcctgaggacagcaccatccatccggttttccatgtatcccaactcaa

SEQ ID NO: 51575 - DNA, 366 bp, Oryza sativa
  Clone ID: PAT_MRT4530_53954C.1
gcgcttaacgacactgtcggcaacgggaacatcaccatcttcgagccaaggaacgaggacatggagcgcgacctcgacctagagttccgccgccaccaccccgcgccgccgctgctgccatcgacccgaggagatactctcgtggggatccatcagccgatcgagaacgacacctccggcggcggtggagaagcccctacggctaaagtgcctcactcagatttgggctatgaagttgccatcagcctcgacacgccgctcacgttcctcccggatgagagcagcagcgaagaggagacagtggcgacttggcggctgttgacggtcgttatcgatcagtttcaaccgtcaatattaccaaaatag

SEQ ID NO: 51576 - DNA, 1425 bp, Oryza sativa
  Clone ID: PAT_MRT4530_53955C.1
atggctgtagtccgtggacactgtgcgcttgtaaattgcatacttcttgttttactacaggaatcgaagcaagtgaaaatgaagaagcttgagaagatgcttctcctactgtcgctgcttgcggtgatcgccgtcgttgctcgatgcgacgcggcggctctgaggctgcacgccacccacgccgacgccggccgcggcctcagcacgcgcgagcttctgcgccggatggccgcgcgcagcaaggcccgctcggcgcgcctgctctccgggcgcgcggcgagcgcccgcatggacccggggagctacaccgacggcgtcccggacacggagtacctggtgcacatggccatcggcacgccgccgcagccggtgcagctcatcctcgacaccggcagcgacctcacctggacacagtgcgcgccgtgcgtgtcctgcttccgccaaagcctcccacgcttcaacccgtcccgttccatgacgttctcggtgctgccctgcgacctgcgcatatgtcgcgacctgacctggtcttcctgtggcgagcagagctggggcaacggcatctgcgtctacgcctacgcctacgccgaccactccatcacaaccggtcatctcgactccgacaccttcagcttcgcgagcgccgatcatgccatcggtggcgcctctgtgccggacctaaccttcggctgcggcctctttaacaacgggattttcgtgtccaacgagaccggcatcgctggcttctcccgcggcgcgctgtccatgccggcgcagcttaaagtcgacaacttctcctactgtttcaccgctataacagggtcagaaccgagccccgtgttcctcggcgttccgccgaacctctacagcgacgccgccggcggtggccatggcgtcgtccagtccaccgctctcatccggtaccattcgtctcagctgaaagcgtactacatctccctcaagggcgtaaccgtgggcacgacgaggctgccgatcccggaatcggtgttcgccttgaaggaggatggcacgggcggcaccatcgtcgactccggcaccggcatgacgatgctgcccgaggccgtctacaacctcgtgtgcgacgcgttcgtggcccagacgaagctcactgtgcacaactcgacgtcgtcgttgtcccagctctgcttctcggtgccgccgggagccaagcccgacgtaccggcgctggtgctgcactttgagggcgcgacgctggacctgcctcgggagaactacatgtttgagatcgaggaggccgggggaataagactcacctgcctcgctatcaacgcaggggaggacctgagtgtcataggcaactttcagcagcagaacatgcacgttctctacgatctggccaacgacatgctgtcctttgtccctgcacgctgcaacaagatctag

SEQ ID NO: 51577 - DNA, 300 bp, Oryza sativa
  Clone ID: PAT_MRT4530_53956C.1
atgaacatacggaggagacagaagcctaccaccacgaacactggcgagctcatcccctctccgatgcccttcttcgctcggaccgcggagccatgccggctggaccgttcgccggccctagagattggtggtggaggaggtgggggtcatcttgaccgccatcgtggcctcatggactcttctaacactgctcgacagtcgacacccattcagtctggtggaataaggggattcgaagcagcggcctcgatttataacactggagggggtagagaagagtgggtgcgctaccaccactag

SEQ ID NO: 51578 - DNA, 449 bp, Oryza sativa
  Clone ID: PAT_MRT4530_53957C.1
ccgccccaccggactaccgaagaggacgacgtgtgtcgcctcgcatgcgccggcctccgccacccgcgcgcgccagtctcccgccgacatgcgctacagcgccccaccgccggccacgcgccccgacgcctcttgccgacacgcactacaacggcccgccgccggccacgcgccacgccgtcgagccaccacccgcttcgaccgaatccaacctggggcacgccagatccactccccgtcgtcagcgttcaccgcctcccccgcacctaagaggatgcgccgtcgtcggagaaggcgccgccgccgccctcctcgctcgccagctggctttccggcggtgagctccggtggcagcgaggtgaggggagggaggagaagggggcggcggctctgggcgtttcaccccccgtgtcgcatgcgcgagggcgacgcaggggcagtttatatca

SEQ ID NO: 51579 - DNA, 713 bp, Oryza sativa
  Clone ID: PAT_MRT4530_53958C.1
ctgcaggattacagaggagattggtatgatcggtccatgcatgttatattcaaggaggactttaggattggtggacgtggtgaagcaagctaagttttgataaattttggataaatatgaatgcttagttacattctgattgatcaagagaagcatacactgcatttgaaagtatgaacacacatattttgctttattgagtttgcaagccaacatggaaatcatagtttcatagtaactgatgagtgtagtactgaattataggaaaatgcattctctttacataagcttttcctggtatgagttaatgcatcagttaatgataatgcatactggatcacacttcctttttatctctatagtgtcagagtcacctcttacaaatgttcttatatactgcagacttacagttcataatagtattatatatatatcctctgtatggtgcataaattcagatttttattagccttcagattttttttttactgtctcagcttctcatgcagattaactgttgtattccatgtccagaaaaatttacaaggtctgctccccttgtccagcaactatttgcataaatttcccttgaaaaaaaaaagatatttcctgcgtgttgaaatagaactaggcataatttatagcaaattgaaatagatatttcctgcgtgttgaactttttagttgatgattgaatagtttctggaaaaggt

SEQ ID NO: 51580 - DNA, 704 bp, Oryza sativa
  Clone ID: PAT_MRT4530_53959C.1
gcacgaggcggaccagtgctggtagggcagaagctcttcgccccggcgccctgcccccccccgccccgctcccccccgcccgggccccgtcgcccgcggcggtcccggcgcgaggcccctggcattctttcgcccgtcggatccatcatagaaggcccagatcgaagaggaaaagaggaagcggagcgagatatttgcagaggagccctccatttaccatctattgtcaacaaggtcctcccgcgaccatctcggccgttcgatcgacttgtgcggcgcagattgagccaaaaagagaggcgcagtgcggatgttttcctatgggaccctcaagtattcggtattatcaagcatacccccatcccgccggcggcggcggcggcggcggcggagcaaagtgttgccgcgccggcgagtactgcggtgatcgccggcgtttcgcggggataacaccgctaatgcatggttcttctcctacaatcctgtgtatatgctgtaacacgaagagaggcaattttagagaactcttttgtgtgctgattagcttgtttatataataggttttagctctgtctctctcaactgtaaatgatcaacaaactattgtttcttctctttccttttcaaatcatcatcgttgagtactaatttgaagaacaaaagaaaaaaaaactttggtgattcaaaaaaaaaaaaaaaaaaaa

SEQ ID NO: 51581 - DNA, 320 bp, Oryza sativa
  Clone ID: PAT_MRT4530_5395C.1
cggtcgcgtgggcgcggtgtattccaggttttggagctcaggttttgggacacaggctttgcagaggccgcgtttgcaaagccggtgtcaagttctctggttaggtcgctggttcagactttgtggttagtgccacagttacagggtctgtggtgtgcgcggtgtgtatagtgtgtgtgcaggcaggcaccaatgggggctgttagtgtttgaatactagtacttaatctgttatgtaagctattacactagttggtagtatctcaattatcgactgggttggctaaatttgtgttttatattagtggattgtgcggatc

SEQ ID NO: 51582 - DNA, 1937 bp, Oryza sativa
  Clone ID: PAT_MRT4530_53960C.1
gaaggagaaatctcccgtcacttcgtctcctccgctccttgcgccgccgccaagacgagtcgcggctgaacagaacaggggaggggcggcgatctccatctggcgagcgagcagagcagggcaggggaggggatcctggtcgtatattcacctaccttggagtaattcgcatacgtcacaagttaaaagatgggtatccttgagaggatcaaggagattgaagccgagatggctcggacacagaaaaataaagcaacagaataccatcttggacaactgaaagcaaaaatagcaaagttgaggacacaattattagagccccctaagggttccactggtggaggagatggttttgaagtcacaaagtttgggcatggtcgtgttgcacttattggatttcccagtgttggaaagtcaactcttttgactatgttgactgggacccattctgaagctgcatcatatgagttcacaaccctcacttgcattcctggtattatccagtacaatgataccaaaatccaacttcttgatcttcctggtatcattgaaggtgcatcagaaggcaaggggcgtggtagacaggtcattgctgtcgcaaagtcatcagatcttgtgctcatggttctggatgcctcaaaaagtgaaggacaccgccaaatattaactagagaactggaagctgttggacttcgtctgaacaaaaggcctcctcagatatatttcaaaaagaagaagactggtggaatttctttcaacagcatgattcccttgacccatgttgatgagaagctctgctatcagatactgcatgagtacaaaattcacaacgcagaggtgttattccgcgaggatgctaccgtggatgacttcatcgatgttattgaaggaaatcggaagtacataaaatgtgtttatgtatataacaagattgatgttgttggtattgatgatgtggataagcttgctcggcaaccaaattcgcttgtgatcagctgcaatttgcagctaaacttggacaggctactagcaagaatgtgggaggaaatggggctagtgagagtgtatacaaagccacaaggacagcaacctgatttcacagatccagttgttctttctactgatagaggtggctgcacagttgaagacttctgcaaccatatccataggagtttggtcaaggatgtgaagtatgtacttgtatggggaacaagtgcgaggcattacccgcaacattgtgggcttggccatgttcttcaagacgaggatgtcgtccagatagtaaagaagaaggagaaggaggacggcggtcgaggccgcttcaagtcgcacacaaacgcggcccgctcgcatatccgacaggggagaagaaagctcctctgaagacctgaatgtggacatgaaaccgcagttttgtcggctgtgccaacatcaaaatagagctacttttttgcctggagctggttgagctgtgcgctacttttttcaatgtggagccctgttttgtgccttcagaagggccatacttgagtactcgcctggttccgttcctcctgtatctctctgcagaacacacctttgcagtgcaactatgaacatcattgtgtatctgtgcaccattgcaaatacgggcggcaaatggatgtgctgcgcttgtgttagaatgtggtgataatgtccaatatccaatgtggacgaagatgctcactgcagtgcaaccatgaactaataaatgcatatatgaggagcatggcacaagctcaaatctggaccgttaattcaaacggatgatgcgtcttataaagtgagtataaggcttgtactgaacatgaaagatagcaacacgttcaaatttagatggtattccaccgtcctttggtcggctccgatttggtgccatatgttgggttgttggccccgaccggaatgaaaaaaaa

SEQ ID NO: 51583 - DNA, 862 bp, Oryza sativa
  Clone ID: PAT_MRT4530_53961C.1
gttagcaagctttttgtcattttgtacatcgagtatgacaaaagatggctcgcttgaacaagcaaaaaccagctaccagcaatatgaagaattgactaagcagtttaatattgatgaagaatggtggaaagggtataacgatccgcagttaaatcgtcttgttagccaagccttagctaataatgttaacttagccaaaagtgctattttggttaataaagcgctatataatgcgaatttagttggtgctagtttagtaccaacttttagtggtagtggttcaagctcggcatcaaaattgttgagcgttaccaaggcgtcaaatgttgtacacaatgcctcattcaatttaagttatacgcttgatttatggcgtcgtttagctgatagtgctagtgcgtcggaatgggaatataaagcaacgatagaagacttaaaagcaactcgactttctattattaatgccgttgtggctagctattatcaaattgcctatttgaaagatgtgattaatgttagtgaacaaaccattaaaaattatgaacagattaatcatattctagaaaataaaatggaagtgggggcaattgatcacttagcggttgaacaagccaagcaaggccctttgaatgcacgtaatggtttgattggctatcgcactactctaaaagtgggggaccaaaccttacgtaacttattgaatttaaagccaaatgagcctttgccaatagagtacccagcgattttgtcagttgaattgcaaggggttgatatgaatgtacttatttcagctatcgcaaatcgtccagatgtaccggcaaaattaaaacgtttgcaatcggcatttaaatcattaagtgcg

SEQ ID NO: 51584 - DNA, 242 bp, Oryza sativa
  Clone ID: PAT_MRT4530_53962C.1
ctgagaacgaaacgcttctgtatgttagacttaatcttgttgtttattgtgtgagttgtgattagtgcgtgcatgagtggggttgatgaagaaaatccatgatctgcatgtaagtgcttgcatgtaggaagttatatgtggatatcggctggtagcctcacctgtgccaagaaactggagtcctggcatggaccgaggatcagttagctgtgttgcatgtgtgttagtgcatttgcatggac

SEQ ID NO: 51585 - DNA, 1503 bp, Oryza sativa
  Clone ID: PAT_MRT4530_53963C.1
atgggtgcgctcgccgacggcgacgatgcgatggggaggctgaggcgctgggagacgacggggcgacagcggcggcgacgacgcaatggggaggctgaggcgctgggagacgacgaagcgacggcggcggcgatgagacggcgttgggtgcttgcgtcccttgcagaggggacggggtcagcggggcgacctcgaccccgtgaagaaaaccacttagcgattcctccgctcatcctcgcgcgcgccgccgccgccgccgccgccagctgcaagccgccttgccccacggattccctctccccgcgcgagctgactcttcgtcgggcttctcgccattggcgtacgtactcttgctgccgcacgcgccacgcggtgctgcgcgttctactctggtctccggtggcctcttggccggaagctgccgcggcggcgatgcgagctgcttggccgcagggggggcgccgcgccgacgcccgcaacctgttcgacggaatgtctccgcggaagaaggccaaggaatcgcccggctcgaccggcggcgaccggataggggacctcccggacgaggtgctccaccacgtgctctccttcctaccggcgcaggaggccgtccggacgtgcctgctagcccggcgatggcgccacctctggaagtccgccacgggggtgcgcattggcgagggcgagactgatccgggaagcgtgaaggaccaccaggagtttcttgaccatctgttggtactccgtgatagtgtgcctatggaaacctgcgtgctaaggtttagtgagcacagcaaagagctcatcgaggacgcagcccggctgaatttttggttcaagcatgctctgcttcgcaaagttcggttcctccagcttgaaaactgggagttttatgacccggttccgatagatgagctgcctcttgtctcccggcacttgacaaggctacagctttacggtataagtctaaatgatagcttccttaacttctcgagctgtccagcgttggagcatctattgtttgagttttgtttcttcgagtgtgccaagatctcatctaactcggtgaaacgtctgagcatcacttgctgtagtttcaatgcgaccttgcgagtacgtgtagatgtcccaagtcttgtttctctgcggcttgatgagtttgacaaccgggctccagtgcttgagaggatgccatcattagttgacgcatttttgcatattgcagtttatgttgatgttgccatcttgaattccagtttattacttgctcttattgctcccatgtcatttgccatgtggacaattttcaattttgaggaaatcgggatttttgatgatgacgaagacgaagacgaagatagagatggagatgatgatgaagactcttacgaagacgatgatgataaagatgaagatgaagactcttacgaagacgatgatgatgaagatgaagacgaagactcttacgaagagggaaatgaggatgacaatgaagatgcttga

SEQ ID NO: 51586 - DNA, 496 bp, Oryza sativa
  Clone ID: PAT_MRT4530_53964C.1
gcagattaatctcacgtaattgattgattccaaaaccaaactgtcttacagattacatagcaattctaaaggatagactcctaacagcttacggaataagaaactaacaaactatctaacaaactccgaaccgaatcaaaatagaagtaaaaactattcctcgtcacgccttaccgtcgcccgcctgttgctgcgacgtttgtattgcaatccccacatgacaaacagacccaatcttgagtgtgatcattgccgacaacgtcaggtgtcctttccctttggatttcctttttgatcgatgatagctttgatgttatcaggaagtagcgcctctactcgctcccgcatcgtctgaacttgctcatcttcattgcagacagatgaagaagtagatgccgtagcaaccttacaaatcttcagcctctttggagaaagaggagggggaggagcagcagaagcaagatcgtaacaaactgatcgaacttgccagaagttg

SEQ ID NO: 51587 - DNA, 476 bp, Oryza sativa
  Clone ID: PAT_MRT4530_53965C.1
cttcaaacttccaacttttccatcacatgaaaactttcctacacaaataaacttctaacttttttcttcaaacttccaatcttagtcaaacttccaattttagcgtggaactaaacacagccctactacaaatccaaaagtctgccccttcaagctacttagagggagaaaaacaccaatgttaccatcctttaggtctcaaccttctgaataatcaaaatggtggtgcatcaagcatcttcattgtcatcctcatttccctcttcgtaagagtcttcgtcttcatcttcatcatcatcgtcttcgtaagagtcttcatcttcatctttatcatcatcgtcttcgtaagagtcttcatcatcatctccatctctatcttcgtcttcgtctttgtcatcatcaaaaatcccgatttcctcaaaattgaaaactgcagaaataacaaatacgacaagcacagtaaatttcaagatgtc

SEQ ID NO: 51588 - DNA, 470 bp, Oryza sativa
  unsure (1)..(470): unsure at all n locations
  Clone ID: PAT_MRT4530_53966C.1
cgcgcgagctgactcttcgtcgggcttctcgttattggcgtacgtactcttgctgccgcacgcgccacgcggtgctgcgcgttctactctggtctccggtggcctcttggccggaagctgccgcggcggcgatgcgagctgcttggtgctgacccaggagatccctcgttcctgctagttatcggcgcgccctcgtgtctgcccgagcggttcttgctccgcgcaggccgagggggnnggggcgccgcgccgacgcccgcaacctgttcgacggaatgtctccgcggaagaaggccaaggaatcgcccggctcgaccggcggcgaccggataggggaccttccggacgaggtgctccaccacgtgctctccttcctaccggcgcaggaagccgtccggacgtgcctgctagcccggcgatggcgccacctctgaaagtccgcacgggggtgcgcattgcgagggcgagac

SEQ ID NO: 51589 - DNA, 603 bp, Oryza sativa
  Clone ID: PAT_MRT4530_53967C.1
gatgccatcccttttgcttccacaaaacgcctctactccgctacgctatggctactacctgacaacgatcaagccatcgtcaggatagctccaggggagagtccctctcacgttaggttgttcccttcccctgaattcctaaccattttctatcatagaaatcacatatttttaacaccaccatctccctcctggcctgtgaggcgagcacgtttgtttaatcgtcgttgcctcgcgcgtgggcgccgaagcttcgatctgcatccgatcggatcagaatcatcacctgctcatccggtggttgtgtttctgtctgtccaccctgctgctgctgcctcgtttgacctaccgtttctttactctggcgccagcagcatacgtgctatagtgtgctgccattggatggccacgttgtccatgaactggtcaagaggaggacgaagagaaatagaacaaggagaagcgaatcattcaacagctcggtacacgaatggttgttgccgtgttgcgttaggcttttgtgagctggtgaggaggttgtcctcgatgacaagctaggtgtgaaggacgatggtttcttgatcgggacggccgggcatccat

SEQ ID NO: 51590 - DNA, 653 bp, Oryza sativa
  Clone ID: PAT_MRT4530_53968C.1
cttctcctctcaacccacccaccaccacattctccctccctccccatcggcagcggcggcgggtctagcaacagcggcttcggcggcggcgcacggtggggaggacagcggctccagcggcggcggcagggaggtcagcggctgcgaagatggctcacggcgtcggctcatggagggggcggtggtgtggtggagggagcaatagatccagcggctgtgacggcggctctcggcgtcggctcagggagatggttctggtggaggttccggcgggctcagcggcgtgtctcagtgacgacgacgacgtgagcgatgggtccggcggcgggctctcctccctctccctcctccactgccgccagttgccgtcgccaccaccgccgtaggctgccgccagctcggggcctgccggatccagccgatgcggcaccaggaaggccggatccgccgtcgcgacgacaggggtggctggatccgtcgccacgacgacctaggaggccggatccgccgccgacaccgacgggggcagcgccacgatgatgacttcaaatttttgttaatgtattgttttttgtgatgcttgaatgcttgggtgaatggaaattttttactgtaaattgtaaaaaaaaaaaaaaaaaaaaaaaaaaaaaaaa

SEQ ID NO: 51591 - DNA, 521 bp, Oryza sativa
  Clone ID: PAT_MRT4530_53969C.1
ttttttttttttttttttttaccgtgtaaatggggggttttgagcaagatacttcaagctgttgtaaaatggttctgttacatgagtgacagcttagtggatcatcccataggctgattaaaaataagagatgtaaatagtccaatcgaagggcacattctgtgcccgtgagagagctcacattgatctttaggcggaagctaaaacagcaagaccctctcctttttgtctatagtgcagcaccaaatggcatgttggttctcagcttggtattcttctctttgagtgtcaatttacatgttcagctgagccgaaatcgcggtggagatatacaacttgtgagccaagaactatctcacctccgaccatgcttgctggctcgagggtcagaatgctatggattcaacgaccttcttcggagccaaatgtgaagcaattccttttcgtcgcaaggaaaagcaatcgacttgaagccaatagaggaaaaaaaatatttattgtcatctcactgaataaggctc

SEQ ID NO: 51592 - DNA, 449 bp, Oryza sativa
  Clone ID: PAT_MRT4530_5396C.1
cagatacagaattggaactgattataaagctagcttcccttgtttcatactccgaagggagggccaaatgtgcttaatcagtaggtccttgtgctatccatatcttcaacgagtgaccaggactacaccaagatgatgaacaagttaaacttaacaaggaagatgctttgaggatttttttgttttcttttacaagaccaagaaacagagctttagcactcggtgtacacctgatgtaggaaaagaatgtgattcctaaaagtattctagcacagttcgctctgttgaatgtacagataactaaaaaacgccaaacaaatctgctgtgcggaaggaagaatgttatctgcccttttgctttgtttaaaccttacctttatatactataatttcctacttgactgaacggccaatcagccgtaagtctgtaaaaaaaaaaaaaaaaaaaa

SEQ ID NO: 51593 - DNA, 1572 bp, Oryza sativa
  Clone ID: PAT_MRT4530_53970C.1
atgtcggacgaaaccgccagccaaaccactaagggaggtgatttgctctggttttcagagaagaaggaggcgttatacccggttttccagttgagggatgttattcacgcaaacgcaagagatgagggagattacgccatcggttcaggagaagggtcagagtttgctgttgatgcatacgccatcgctgctgcaggaggagacgtttgtgtattggacctattgcatcttttagctcgtcaaggtggtacattaacttcaactgagagtatcggactcgctgtgaccgggagctccgagttggccactagcaatggcattgtcggtgagtttggagctctcgcactcgcctccgctgtggcaccttccctccctctgccatcaccgcccaggtataccggatccaagaaaatcgtggacagtaaagcaacccaagaggatctgcagccgcagatgcaaacaattttctcgtcaactggcgaacattcagtgtcaaaactgaagagctgcagagattcagtggccggaacaaccacggaggaggacgagggagcccttgaggcgcggcacgccgcctgcgagctcaccgctcgagttcttgagtacgcagggacactagtcaagccattggcgacgactgatgagattgacagagcagttcatcagatgatcatcgacgctggcgcctacccttctcccctaggctacggtggttttccgaagagcgtctgcacgtcggtgaacgagtgcatctgccatggaatccctgactcacgggtgctacagaatggagacatcattaatatcgatgttactgtctacttgaatggataccacggtgacacctcaaggacatacctatgtggagaagttgatgaatctactatgcaacttgtaaagaaacttatatattgttctgtaactaacatgctgaggggaatatcagcctgcaaacacggtgctagttttaagacaattggtcagagaataagtgatagtccagcttctacaaataatttcatgatttctgatttcagtgagtacgtggacgagtacgggtacagcatcgatccctttgtcggacatggaattgggaaaatattccactcggaaccgatcatttggcatacctgccagacattcacaattggtagagcctactctgtccatgggaggcacccagtgcacactgtgggacgacgggtggacggctgtcacggtggacagcagcctcaccgcgcagttcgagcacaccatcttggtcaccggcgacggcgcggagatcctcaccatgcacccgcgaaggcggaagccccaaatggccggacgggagcacttataactgacatgtggcactcacttaccagcgccaccgcctttgcattaactagcttaggggacagactgttagcacccatagacaaaaccttccgaagttcctcaggtcttatgatagaaggttatgggattctatgtggagggccattaaggcacaagaatgtcaaagccctcctagacttccacgtgttcaaaatccctgactttgatcttttaatcgtccattccacataa

SEQ ID NO: 51594 - DNA, 595 bp, Oryza sativa
  Clone ID: PAT_MRT4530_53971C.1
ttttttttttttttttttttttttttttttttttttttttttttttgttttttttttttttttttttttttttttcaccaaaaaaaggggggggtttttattaaaaaatagcggggggccccaagggggttcgccccaatataaaaatggggggggggggcccgccaaacgggcttaccatgaacccaggggttttttgcccggttaagtcacggtgccaagggaaaaaaattgggggactccaaaaggggggttgcccggctgggggtttttttttttagggggccacaacaatggtaatgggtttacaacaaaccggaatgggaaaagatttgccagggttttacagtgggggggggactttttcccccaaaggattaaataatttattaaaaaaatcctgggtgggtaaggaaacacatggacctacccttttttggagtttagctccccccccccgggaaaaggggccccgaaattatttttcggggccttggaaaatatgagggcccccccggggtgcctttggaattggacaaagaaaccccaccttttaaagggttccagggcccccgtttgcggcgaagagggtaag

SEQ ID NO: 51595 - DNA, 328 bp, Oryza sativa
  Clone ID: PAT_MRT4530_53972C.1
agcccaccaggaacaattaacgaaagatgaaattattacagatatgccaacatatggttagagcatatatgtgcttcactttacagagaaaaaccatgtagttggagaatacttcagggtaggagtacagcactggcaggaaaaaggggtgacgggatgtgagactttttacaaactatatatattccaaaattttggttgcggggtttgtacatgaaaaccaagcaagctagctacaaagaagttgggggttaagatttacatttctgatgtaagcagtttgaaagaacaatatgggagggcacatgggggagacctggactgatct

SEQ ID NO: 51596 - DNA, 527 bp, Oryza sativa
  unsure (1)..(527): unsure at all n locations
  Clone ID: PAT_MRT4530_53973C.1
ccccccgggggtttgnaanggaaattccnggnaccgaaagggttgtttacttgttcnttgggnttcctaaaattttccgtttggtttactcccccnccggaaacttaaanctttgganatgtcccctttctttggcggttttccgggaagaaaatttattcaccanggcgggtggggaaaaatttccccntttgaactttccncnattggcatttcccnanaaaaaggttattctcttggggccagggccccccccagggnntggttgtattgnttcncccanttggtggcattggcgaangctccgnggttggggtggattcgctggcacccnnttccgccaccntggcttgcggcttgttacattgggtttttccaccccccnccgtttttcaangctttaatgggtccnaacaangtttttggggggggggtttncccgttcccaanttcccnaanggacngcccnaatncnnaatttannttgtttnnccgntnaatngtnggaanaagttgaatnnttnttc

SEQ ID NO: 51597 - DNA, 2022 bp, Oryza sativa
  Clone ID: PAT_MRT4530_53974C.1
atgcaaggcgaccagaagaaggtggggacccacgtcagcgcaagaaagcccgtccccgatgatgttggtcgcgatcgccgtggagacgtacggcgaccgagccggccgatatccgtggcccgcaacgagatcaaggcaggagggaggctagctataccccccatgcatgatatccccgcctgccgcaagaacgaccaagttaatctcgcccgcccatttctaatcagatggagtacggacagattccgagaagaagatggcgtgggctgcgtggcgcaggagcgtgaggcggccaccgcacaaccgcgctcacctcccccagtcacgccttcgccccaagcaagtcaggcaagtcaggcctcgccactgctatccgagccccttgattggggaacggatgccgaggaggatgaggatgacgtcattgctctggagctacaccaacattcagcggagacattcaatccgcagaccgccaaagcacgcaaagcagcttctccatctccggcgtccaaggctttccatcaggaaatcaatgcccgaagccaggaagaggagctcgacattactgcagagagaggagagggacggagcgccattacgccccctcccgaaaaggcacaagaggaagatgcagagaagaaggccaaaggaaaagcaacattaaagtcgataatcgtagccccggcaagagctacaagcaagtctcaaatcgaggcagaagaacaagatctttcatcaaaatggcaagcggccacggccacttttatccaacaatatggttcaatctttggaggaaccatatcaatatttcaggcagcaatcccaataatttacggtgccttgaaggtgctctccaccttcttcccgccgggagctaggcgtgtcacctccggcatcacaccgccgcttccggacgagatcgcgccgccgccgagggggaggctgccgcatgtcatagtccatctggacgagatggaggactggactccaggaccgccctgctcgccttcttccggggtgagcggactgccctcctcggacttgtctgatttgggaggcccgatacccacggtgcgcaccttccagtggtacctgggctgcgccgacggaacccagcctcctcggcgacgggcggcagcgaggcggggatgcagggcaccgccgcagagaagagaagacccggaggatgatgaggatgacgacgggcggcggcgccacgctgaggatattccaccacgccgccgctcgctgcgcgatgtcatcattggaaggggccagtcggttgagtcgcgggcggcggaaggggcgcgacaccggagccgcacgccgcatccttccggccgccagcgagcgcacgacgaacagggggaccacgacccgatgctgccgctcctggcagagatcgttcccaagtcttcacgggaggcggagaacaagacgaagaggacgggtggggaagaaccgatactgggagaggataaggtggagtcggcagctgagttgggccaggagaagatgggccatctcggcccagatgcgcagcaggcccccaagatggacctcctcgctcagtccactcaagatgacgaggcccaagcttccacaggagaccagcccaccctggtgcagcaggccgattgcgaggagcaacaccaggccacgctgcagccgccgatcatcctgcaggcgctgctcgagctggcgccgcccgacgcggccaagacgaaggggtgcggacgcaaggtggtgcagatgccgtcacggcggagcggccgtaaggcgcgcttctcgtcggtgccggtgtctaagtgcgcagaagtgcgcctcatggaggagatggggcttctcaccccgggtgaaccggtcggggatgcggcggtggaggcttatgcaaagtccttcgacacaccgcttccgtcgcatgtcattgccggtctgcgggtgctcacacgcctggatggagtgcacgacatcccggtgccaggagaggaaggaaccaccacaacggcggtggtctga

SEQ ID NO: 51598 - DNA, 132 bp, Oryza sativa
  Clone ID: PAT_MRT4530_53975C.1
atggggaaaaacgaggagataaggatgggcggaggaatcgaggcgcccgtgctcgctctccgctttctccgagcggtggctgttgcatgcatgcaggtgctgttgaccccgaaatctttcactcccgtttag

SEQ ID NO: 51599 - DNA, 2226 bp, Oryza sativa
  Clone ID: PAT_MRT4530_53976C.1
atgcggcccggacgacggtggggatacaggcgcgtcgcggtcgcattggcggtgtgcgtccacgcggcggtgcttctctcggccgtcgtctacttgtcctccgtcctctctgcagctgggcctggggctagctcctcgtccctgcaggaaacggagatgatgagactgaccgccaagctggagcagatcatcgggcggccaccgcacaaccgcgctcacctccccagtcacgccttcgccccaagcaagtcaggcctcgccactgctatccaagcccttgactggggaacggatgccgaggaggatgaggacgacgtcattgctccggagctacaccaacgttcagcggagacattcaatccgcaaaccgccaaagcacgcaaagcagcttctccatctccggcgtccaaggctttccatcaggaaatcaatgcccgaagccaggaagaggagctcgacattactgcagagagaggagagggacagagcgccattacgccccctccggaaaaggcacaagaggaagatgcagagaagaaggccagagaaaaagcaacattaaagtcgataatagtagccccggcaagagctacaagcaagtctcaaatcgaggcagaagaacaagatctttcatcaaaatggcaagcggtaaaaccaaagttttggtggcggaagcgccaaaatccttcttcatcaacctctcaggtcgtcttcaatcgcccagctacctccttcaatccactaaatctcagagaaaagttcaaggagatcttgcacggcaagtgcttccgctgcttcgcttcagatcaccaggcagcagcttgcagggatcccatccgctgctatacttgtagacgcagtggacacatctccttccgctgcccaaacaaatcaaagcaacccattcactcccgcctcaccttccccaagcaagccccctccattcaatcccgactcatcttcccaccacttcccagcaagaaccaacagcaaccaacaacaacccgccctggttcggttttccatcgtttgcacaaaccagcggtgaccatggatcacatacctggtctgccgaatcaacggccggcagtcggctatgcaacggtgccgatgacggagctcatgcagcacgagctggagcgccttcactatcatggcgcactcatctcggctgaggtcgagggacaggagacgtcccccagggaggtggcgcgtgcactgacccagcaggttgggatccccatctcggacctgcgagtcacgcgccatcacccggaagatttcttcgtcttcttcgatttcccagaggggcaggccgcggcagcgcggagaggcttcatcactctggatggaggaaggttcaccatcacgccatggagcgccgacaggcatgtgcaccacccgaactggtggtttcgtgtgcggctctgcctggagggattgccgcagtacgcatggaatagggcgggattggagggcgtcatggtgctctccaccttcttcccgccgggagctgggcgtgtcacctccggcatcacaccgccgcttccggacgagatcgcgctgccgccgagggggaggctgccgcatgtcatagtccatctggacgagatggaggactggactccaggaccgccccgctcgccttctttcggggtgagcggactgccctcctcggacttgtctgattcgggaggcccgatacccacggtgcgcaccttccagtggtacctgggctgcgccgacggaacccagcctcctcggcgacgggcggcagcgaggcggggatgcagggcaccgccacagagaagagaagacccggaggatgatgaggatgatgacgggcggcggcgccacgctgaggatattccaccacgccgccgctcgctgcgcgatgtcatcattggaaggggccggtcggttgagtcgcgggcggcggaaggggtgcgacaccggagccgcacgccgcatccttccggccgccagcgagcgcacggcgatggccgccaaggccgctcacagaccaggcacagctcccgatgctcctgccgctacagatcccgtcgcacgcgctccccaagctccttgactcctcgcgatcaggatggcacgggcgatgcaggctgcgcgacaaccaaggtggtcgctgtcagtggccaggctgatggcgaccagcagtgtagcgcccgttccgtcgtggcgcctagcgggaaaactatctcttaa

SEQ ID NO: 51600 - DNA, 2752 bp, Oryza sativa
  Clone ID: PAT_MRT4530_53977C.1
tcagaccaccgccgttgcggtggttcctttctctcctggcaccggcatgtcgtgcactccatccaggagtgtgagcgcccgcagaccggcgatgacatgcaacggaagcggtgtgtcgaaggactttgcataagcctccaccaccgcatccacgaccggttcacccggggtgagcagccccatctcctccatgaggcgcacttctgcgcgcttagacaccggcaccgacgagaagcgcgccttacggccgctccgccgcgacggcatctgcaccaccttgcgtccgcaccccttcgtcttggccgcgccgggcggcgccagctcgagcggcgcctgcaggatgatcggcggctgcagctgcgagaacagaggagataagacgaccttttcacgttcaccttctcctccgtggatgggctgagtctggaccgtggcctggtgttgctcctcgcagtcggcctgctgcaccagggtgggctggtctcctgtggaagcttgggcctcgtcatctccagtggactgagcgaggaggtccatcttgggggcctgctgcgcatctgggacgagatggcccatcttctcctggcccaactcagctgccgacgccaccttatcctctcccagtatcggttcttccccacccgtcctcttcgtctcgttctccgcctcccgtgaagacttgggagcgatctctgccaggagcggcagcatcgggtcgtggtccccctggtcatctgagaaggggagcaggggtgaggagcataggatcttgatcagagggtcaggaagactcacgagagcgtcgactggctgctggtcgccatcagcctggccactaacagcgaccaccttggtcgtcgcgccgcctgcatcgccggtgccgtcctgaccgcgaggagtcaaggagcttggggagcgcgtgcgacgggatctgcagcggcaggagcatcgggagctgtgcctggttcgtgagcggccttggcacccatcgccgtgcgctcgctggcggccggaaggatgcggcgtgcggctccagtgccgcgccccttccgccgcccgcgactcaaccgaccagtcccttccaatgatgacatcgcgcagcgagcggcggcgtggtggaatatcctcagcgtggcgccgccgcccgttgtcatcctcatcatcctctgggtcttctcttctctgcggcagtgccctgcatccccgcctcactgccgcccgttgccgaggaggctgggttccgtcggcgcagcccaggtaccactggaaggtgcgcaccgtgggtatcgggcctcccgaatcagacgagtccgaggagggaagtccgctcacgccggaagaaggcgagcagggcggatggggcggtcctggagtccagtcctccatctcgtccagatggactatgacatgcggcagcctccccctcggcggtggcgcgatctcgtccggaagcggcggtgtgatgccggaggtgacacgcccagcttccggcgggaagaaggtggagatcactattcgtggcaggaggtcaggattccgcatccacatccagcatgagaagatggccatgttctgccgctgaaccgactcatgctcgatgcgatcgaagaggcagatgggacccatgacgccctccaatcccgccctgttccatgcgtactgcggcaatccctccaggcagagccgcacgcgaaaccaccagttcgggtggtgcacatgcctgtcggcgctccatggcgtgatggtgaaccttcctccatccagagtgatgaagcctctccgcgttgccgcggcctgcccctctgggaaatcgaagaagacgaagaaatcttccgggtgatggcgcgtcactcgcaggtccgagatggggatcccaacctgctgggtcagtgcacgtgccacctccctaggggacgtctcctgtccctcaacctcggccgagatgagtgcgccatgaaagcgaaggcgctccagctcgtgctgcatgagctccgtcatcggcaccgttgcatagccgaccgccggccgttgattcggtagaccaggtatgtgatccatggtcaccgttggcttgtgcaaacgatggaaaaccgaaccagggcgggtcgttgttggttgctgttggttcttgctgggaagcggtgggaagatgagttgggattgaatggagggggcttgcttggggaaggtgaggcgggagtgaatgggttgctttgatttgtttgggcagcggaaggagatgtgtccactgcgtctacaagtatagcagcggatgggatccctgcaagctgctgcctggtgatctgaagcgaggcagcggaagcacttgccgtgcaagatctccttgaatttttctctgagatttagtggattgaaggaggcagctgggcgattgaagacggcctgagaggttgacgaagaaggattttggcgcttccgccaccaaaactttggttttaccgcttgccattttgatgaaagatattgttcttctgcctcgatttgaaacttgcttgtagctctcgccggggctacgattatcgactttaatgttgcttttcctctggctttcttctctgcatcttcctcttgtgccttttcgggagggggcgtaatggcgctccgtccctcaggtttcacccccactcctcgcaaggcagcgggcagtcccctctcgtgcctaggtgaatctggaagccgcataggacgtcgcagggcccatccaaactccatcacgcccacccttgcctag

SEQ ID NO: 51601 - DNA, 864 bp, Oryza sativa
  Clone ID: PAT_MRT4530_53978C.1
atggatgtgaagggtcgctccgcctccgcgcccgcatcgccgtgcgtcgtgctcggggacgacgccgccgatgccgcagcggtgcgtgtgtcctcttcctcttcctcttcctgcctctggttcgattggtttgcgattcgatgcgctcgtgctcctagttttgcttttgcgctcaagagagtttttgtctgggtagttgccaaagttgatcggaaatatgggagtatgctcaatgctgggagtccactccaaattctttacacagatcagttagctgatgcgaaaggtggtcttaaggcaaatgcaccatgtgaaataacttctgttacagaatgcacctgccctctagaactacaaggcatgttgaaggaggaatgtgttgatcagtacaagctactatctgacaggctgcttgccaagatagttcccaaggttgcaagagtcaagaaaccagtttccagttcagaggtatatgcagagtttggtgtttctgcatattcaaaatatggtacaagaacagtgagtacatcattgagagtatgcaggcaggaaaaaacttcatcgagtggtatgagtaaccctgtccagaaggatcatcctgtgagaaatgcacatggaactggcaatgaggtcttcaagatcccttggatatttggttcagtggcattctgtgtgatattacttattttcctttggtacctgtggtggtctaaggcagcatcaaatgcatgccaactgcagtcccttcccctgaaccgaaattggaggctgtcatcagatggtggtccatgggctgagcgcaggcgatcctctgggaggcgttcatcggcacaactgaaggagcgcaggatgtcatattcataa

SEQ ID NO: 51602 - DNA, 653 bp, Oryza sativa
  unsure (1)..(653): unsure at all n locations
  Clone ID: PAT_MRT4530_5397C.1
ccacgcgtccgggtgtcctcccatgcagccatcgtcttcttcctcgtcgccgcgtcgtcgctcctctcatgtacgtgcatgcatgtctgtatagtatcttccggtcgatcagtttgatatatctctgcgagaatgtggcggtgcagacggtgaggcggcgccgaagatgacggcggtggcggcggactacgggtacccggcggactatgggtacgcggcggggagcaagctggggccggagaactgggggaagctgagcccggcgtacaagctgtgcggcgacggcaagaagcagtcgcccatcgacatcgtcaccaagcaggccatctccaaccccaacctcgactcactcaaccgcacctacaccgcctccgacggcaccctcgtcaacaacggcaaggacatcttggcaagccatctaacctaactagctagacctancctacattgggattttttttgaatttgtttttatttttaattctaaaaacaaacatttctcattcatattttcaatatctgaaccttttgaccacgggtttggcgtggcaaaataatactgccatgtcagtctgaaacacgngtgtggtagaaataaattttcatgctggttttaggtgacgtgatatgttattttaccatggtaggcaggt

SEQ ID NO: 51603 - DNA, 323 bp, Oryza sativa
  Clone ID: PAT_MRT4530_53980C.1
tttaaaaaaaaaaaaaaaaaaaaaaaaaaaaaaaaaaaaaaaaaaaaaaaaaaaaaaaaaaaaaaaaaaaaaaaaaaaaaaaaaaaaaaaaggacaccagggggggcgatcgggggggtccgttctagggtacccggggttccctccccgggcttgggccttttagtctcttttatggggctccttgttccgcatctctgggccgggggctcccgcggcgctaccggggaaacccctggagttacccagcctttttcctttgggcggtatccccttttggccggctgggatgatggccaaaaggccctgccgacaggcctttt

SEQ ID NO: 51604 - DNA, 663 bp, Oryza sativa
  Clone ID: PAT_MRT4530_53981C.1
atggcaaccacggcgtccccgttcctgtccccggccaagctgtcgctcgagcgccggctcccgcgcgcgacgtggacggcgcgacgaagcgtcaggttcccgccggtgcgagcccaagatcagcagcagcaggtgaaagaggaggaggaggaggcggcggtggaaaacctgccgccgccgccgcaggaggaggagcagaggcgggagcggaagacgaggaggcaggggccggcgcagccgctgccggtgcagccgctggcggagagcaagaacatgagccgggagtacggcgggcagtggctgagttgcacgacgcggcacatccgcatctacgccgcgtacatcaacccggagaccaacgccttcgaccagacgcagatggacaagctcaccctcctcctcgaccccaccgacgagttcgtctggaccgacgagacgtgccagaaggtctacgacgagttccaggacctcgtcgatcactacgagggcgcggagctgtcagagtacacgcttcgtttgatcggatctgatcttgagcacttcatccgcaaactgctatacgatggggagataaagtacaacatgatgtctagagtcctcaatttcagcatgggcaaaccaaggatcaaattcaacagcagccagatcccagatgtaaaatag

SEQ ID NO: 51605 - DNA, 311 bp, Oryza sativa
  unsure (1)..(311): unsure at all n locations
  Clone ID: PAT_MRT4530_53982C.1
aatgattaattggaagttaaattaataattgaagaaatgaaaaagggattaaatgaaataaaaattaaggtgttaaatgaaaggatnnggttggaattataaagtgtggtagaaanaactacatatagttttttctaccacactttagagtctttctattatattatcttgaatctacatagaatagattactagattgaaatagtagtctaattcaatttcttttttcactgcatccacttaatttcaatcaagtcaaaatgaaaaaatccatggagggagagaaaaataatatgagaatagactatagt

SEQ ID NO: 51606 - DNA, 1103 bp, Oryza sativa
  Clone ID: PAT_MRT4530_53983C.1
tgacgaaaattcaaggaacttgcagctcccagctgtataaattgaaggatccgggttagactgacgcgcgcccccgggagttttctcagaaacatcattccccccaccccagccatcatccgtctgctccggaacccggctctgagagagtgagaggatttgagataaagaggccggctgtggccttgatcctgcctcgcaagctggcgttgtcacaggcatgtcttcagtgtcgccgagaaaacagccgcttgttcagcgggaggcatccacgagcatgaatgataacgagggcggattctcatggctgacagctctgggattcggtttccttaccttcaactccgggatggcgatctaccggtccgatggcgatcgtggatcggtggcgttcgtattaacatcgtacatcgatctcgtgctgctcttcgcgtgcctccgtctcttcgagaaagcgccgagggactctgcccgccgggaatggctcaaggtctttgtatggggactgacgacgttgctcacggtgatgttctcgtacaaggtggcggcaatcatgccgccggtggtcgccgtgatcgtctgggcgatggcatttgccacaatcggtggtgggttctacgccttcttcgtgcaccaggacaaggctgctcagctagagcaggccaacagatagattcgcgtatgttttggttcattgttgtgtcgtctgtaaacatagtttctactgctaccactactacgagtgctggatgtaatgtatttcgaaataaatgcaataccaagaggaatattactggtattgctatgcttgtttttaaaaaaaaaaaaaaaaaaaaaaaaaaaaaaaaaaaaaaaaaaaaaaacaaaaggtggtcgttccttcagaaatttttacatggcctctcctggcacataaccacgggaagccgtcaaggcgtcaactagatctgaagcaggttttgaaaactactccctccgctcaaaaaaagacaaactctgggtttctgtgtccaactttaattgtccgtcttatatgaaatttttttataatttgtatttttattattgttagatgataaaacatgattaatattttatgtgac

SEQ ID NO: 51607 - DNA, 749 bp, Oryza sativa
  unsure (1)..(749): unsure at all n locations
  Clone ID: PAT_MRT4530_53984C.1
tctctctctctcttcacacagtaacgaactctccagtctccaccacgcgtgcgaggaagcacagttgaactcaagcaagacgaagtcgttgtcgctggccgctggccgctgggggagtagatgacgtcgccatcggagcaaccactgtcggagaagacttcgagctcgccgccggcagcggcaacaccgcgagaaaatgcggtcgacgccggttaggccttgagctcgccggtggcagcggcgccacaacaaggaacaaccgttatcaaagaggacccgagctcggcggcggcggtggcgtcaacgtcacaaggagataccgctagcgccggttagggcccagagctcggcggcggcggcacttggagggagcgggttgaagcttgaggcgccgttgatggagatggctgtgagctcgccgacgaattaaggtgaggatggtgggagcatcgagctagcaaggatttgttccatgctagtttctttatgttgacacaagtgtttcttgatgttgcattttggtattccttgatgttgcaattcatatttnctggatgttgcatttggtacttgatgttgcaggtgatttctttagatgttgcatatgtttttgctcttgaagtctgtgttttttagtgtttcatccgactgaaacattttcagtaaaataatgaaacattctttcataaaggatggaacatcaaagaaacaactcacgttggaacattttttctggaacggggaaacat

SEQ ID NO: 51608 - DNA, 976 bp, Oryza sativa
  Clone ID: PAT_MRT4530_53985C.1
aatggaatcttcaaaaatttatatgatattattttcagctaacaattatctctagctagccttggcttattgattgcttttgcaacatattacatccaatgcttcaatatctaagctgctatgtacgactactactttatgacgaatgctacaattaatatgtatgtggtcttccttgcctatatactgtatgtcattaaaggcgactgttcttgctcttgtgctgctgtttttgtttgcatgcctaagggatggctatagacttcagattatttctctacgaagtagtcaaatgcttattgttagctcaagcccactttatctacaatgatgatcattgggtccttttttttaatgatgaagcaggtcagtacctttggctgctccatcggcacgaggctgaaatgtggttgcatattctagaacatgatatttcagatgagatcgttgccttgcagccctggtggtctatatttgaatagccaagtggtttatgtctttgtaagatcaaacatatgagttacattcctttttccttttcagggaatgcaaattagaaatgacatgcttctttgttaccttctcctatgatcatgttcggctgatttgctgccctcctcccttttccccttctgcttcgaagaagtaaaactcatgctctctttgactaataatgaagacagataattggcctatgcttaaggacaagagacattgaagtcaccccaacagagcaatgccaccttcctttttaccgttagatcaatgacttcattacccccacaggtatttttattcttataaatcggtatcctcagtttatcggtaagtattcacatgtattattcctttttttaagaaaaaacattgaatatagctttgtctacacatgattcgctataataagcacatttatattcttttgtgttaatgatgcttctccacatgatgcattagttctaaacttattatcggg

SEQ ID NO: 51609 - DNA, 2298 bp, Oryza sativa
  Clone ID: PAT_MRT4530_53986C.1
atgaggtcaacgcaggtgtctgcgccttcgaggaacgaggaccacgccaccccatgcgccctcgacaagcctcttgccatctccggttgcatgcgtggtcttcttccccagtgcaacggcggcggtggtggtgactattccaacgggcgacgacggcagcagccttccccaccgagcagcggtgacgacgtccttctctcccgcaagcgggcagtggcgccctgccctcctgcaattggcggcggtggtggcaccgctccctctccccactacaggctccttctctcctcgtcaagcggtggccaccgcctcgctagaatctggtgggtcgatggctctccaatggcgcgacactcgggatctggctcctccctctccccctcggcatccagcgcagcgatggattggcagcttctcggtggcgcgatggcacagcggatcccgcgcagcgtcggtcatcggttcagaatctagccccccgagttcacgacctccactcacacgaacacggctaccttcaggttgtgctagagacttttgttgttcctttatatgttgtcgtggccatgcaatagaccttccaacagcatcagaaatgtagttcatgttaccatacggacgaaggaatggagcagcccttttcagcacgtgattcaccacaacttcacaacaatcaggacccaattgagtgccactcactacagtcatccgatttgctgacagcagggtaccctttgcaacaggagtatcatgggggtctaataaacgagtataagataacttcttttccagcctacaacatgtgagtgtttcattgtagtgatgcacaagaattgtgtgaaacagaagtgaaaaaagaaaaataacagaggttatcaccatgtgttcttgcggtgaaggagctgcaggtcttggaggtatcattccataggaattgttttcctcatcactcggctgagcttcgccatttgcactctcttgttcatcctcatttgttgcagaatttgacaagacttggggattaacatgcacttgtcgtccatctcgagaatcagcaagaagtaattcagtcaacctttccactttctcactaagtgactcaatttttctatcactttgtgtctgccttctttcaaaatgttctattagagcttctttctccagttgagcttgtttctgaccttcaatagccatttggaccttggttgatctatacttctcctttccaggcatctccaaatctctaggtgttggtcccttccccactgagcgaacaaatccattcctttcaggcccacatacacgtgacataaggtccccttcagttatgcttttttctgtccactccggatgttcctcaactgcgtcctcaagtgccttcttcctctttcttgtttcctgatgagtagaggcagacccaagattttcctcgcttaagttagccaactcctttttcttttcaatgacagcttgtagcgctatattgtttttcttgattctttctgctctcaatctttcatattcattcacgtaggttgtattctcatttcctcctccatttgccattctttttcctccattttctgcaagctcatcatttctttcgcaatcgtgcatgaatagatgatttgtattagcaacaagttcttcatcttcatcgtgtgtacttgtactactccctgttcccctccttgttgatctagacagatttggcaacccagattcatgtctagctggttcacttccagcgcaatcgactctcttcctctttcttgtttcctgatgagtagaagcagacccgagatttccctcgcttgatttagccaactcccttctcttttgaattatagcttgtagtgctatattgtttttcttaattctttctgctctccctctttcatattcattaaggtaggtagtattctcatttcctctttctcttgccattatttttctttcgtgatcagaactttcagtttgtactttagccatatcatagaagtctcttggttttgtctcaataacagcactccaaccattgtcacttgggtcttcaacatagtatacttggactgcttgagaggccaaaataaaaggctcatcggacagcttgctaccagtattaaataaatgcttgagattaacatttgtggttcccaacttatcgaccttaatccacttgtcctgtacacgattgtcaacccactcacatttgaagagagcaatatttcccttgtgcttatagtccaattcaaggatttcagttatagcaccataataggtcttattttccaccat

SEQ ID NO: 51610 - DNA, 2171 bp, Oryza sativa
  Clone ID: PAT_MRT4530_53987C.1
gcacaaaaatggatttatttgaataaccaccagcaatattggaaaaacagactgccatcaataggatcattgaaacataaattaaaagtaggaactcaataataacagaaaaaccttaaattaactcactaggttagattatagggaaacaaatacagcaataaaaacacaaaaactacttaataaaacctacctacatttcaagatgaattggcggcatctgatccatctgaagaggagctatcactgtctgagtcactagaagaggatcctgtatcactgctggagctgctagagctgctcgatctacttgcattttgtccattattatcagcttgttctggcacagaagtagctaatttctcatccacaatcaaattttgctttggagattttacaccaatattaggctcttgacttggttgttgtggggcaacatgttgtgcatgcaactctgcatcctgccttgcaagcatggctcgctcagccttcctcttttgcttgctcaggttcttcttgtagttggccacaaatctatcaagttcccaaagtgtctcagtatccatgctatctatttcaacctcaatctcatcatcatgctgtctaacagacagattcttgttcttaatgatctgcacaacaacatcaagcttctccggtggcaaattctgaaggttgttactaagcttccgcttctcatctattgtcatatctctcttatccggatccttggcctttggtttcttcatcgatggagtcctggcactataagtgggagtatgacttaatggccttgacttggagtccaacaccatatggtgttttacagaatctgaccgatcaaggaagcgcacgtcaattggtggaggtggaaacttatttggcaatggcggacatgaggcaaggtactgaacctcagcctcaatttcgggccactgcgcctcaaagattcccaacaactgctcagccatgaaatgcacatcctgccccttgggattataggtcatggcattatggaacgtcagccgtacatcatcagcaaactccctcgggttcctgtactggccatgcgtgagtcgggtctttatcgtgccaagatccattgggtgcttgataatagcaaaataatcatgcaaaccaagcgcaacagcatctacaggcttgttaaacacccaaccaaatttgtgcttcattagcctagaaagcagcgacatagatttcttaaaagcatgagagtatagcctctgctcagcatcataaccagcaccatgagatgctaaggaacgatgcttcttcttgtggtgcttgggtttcttacgaccatgtgaatctgaaggcggaaacttatccttggcaagcaagaactctgaattttgatacaactgattcgcctttggtgtccgcttctccttctcgaaggactctgtgtgagtcactgacacggttagtggcccgcgctgcatcactgagcggaccggaacaatagcaccagcaacttgaccaggtatgggcgtcacaggatcagcgagtgcgaactgcgagtgcgcatacccaacaggaagctgaggcggcggcaccaccacaggcaaagcaagggccgctgcagactcagccgcgatggcctcagcggccgccttcagccgcttggaaagcccacgcacctggtcgagctccgacgcaagctgccgccgcagctcgctccgcgccctccgcttccgcgccttctcctcggcggccgcccggacgtctccatggccgttgggaacggccccgccgtcccgattaggccccgcggagacgtcgtcggaagcgggcgcggcgggctccccctgctgcgcgggggcaaccggggcgctcggcggagggggatggggggaggaagcgggcgcggcgggcggatcaggccgaggcgccgcaggcccatcctcggggcggcgaatcgacctccgaatcgaggctagggtttgcgcgagggggctggagctagggctagggttcggagggggtttagggtttttgcgtgggtacttgcgccggtacaccctgatctccggcgcccaccgcgacgtcaccggcccctcctccaccgcctccgccacggccggggccgcggggctcgccgcgggccgctcctccccgccggcgccggcgccaggaggggacgaggccat

SEQ ID NO: 51611 - DNA, 1500 bp, Oryza sativa
  Clone ID: PAT_MRT4530_53988C.1
ccggccgggtcatccttcacacaattcaaacattatagttgaagcatagtagtagaatcctacaaaaatgaagatcattttcgtatttgctctccttgctattgttgcatgcaacgcttctgcacggtttgatgctcttagtcaaagttatagacaatatcaactacaatcgcatctcctgctacagcaacaagtgctcagcccatgcagtgagttcgtaaggcaacagcatagcatagtggcaacccccttctggcaaccagctacgtttcaattgataaacaaccaagtcatgcagcaacagtgttgccaacagctcaggctggtagcgcaacaatctcactaccaggccattagtagcgttcaggcgattgtgcagcaactacagctgcagcaggtcggtgttgtctacttcgatcaggctcaagctcaagcccaagctatgttggccctaaacttgccgtcaatatgcggtatctacccaagctacaacactgctccctgtagcattcctaccgtcggtggtatctggtattgaattgtagcagtatagtagtacaggagagaaaaataaaaaaaaaaaaaatacaactagaatccaacaacaatgaagatcattttcgtatttgctctccttgctattgttgcatgcaatgcctctgcgcggtttgatcctcttagtcaaagttataggcaatatcaactacagtcgcatctcctactacagcaacaagtgctcagcccatgcagtgagttcgtaaggcaacagtatagcatagtggcaaccccccttctggcaaccagctacgtttcaattgataaacaaccaagtcatgcagcagcagtgttgccaacagctcaggctggtagcacaacaatctcactaccaggccattagtattgttcaagcgattgtgcaacagctacaactgcagcaatttagtggtgtctactttgatcagactcaagctcaagcccaaactctgttgaccttcaacttgccatccatatgtggtatctaccctaactactatagtgctcccaggagcattgccactgttggtggtgtctggtactgaattgtaacaatataatagttcgtatgttaaaaataaagtcatacatcatcatgtgtgactgttgaaacttagggtcatataaatctaaataaaatcatcttacctatttaaaaaaaaaaaaaaaaaaaaaaaaaaaaaaaaaaaaaaaaaaaaaaaaaaaaaaaaaaaaaaaaaaaaaaaaaaaaaaaaaaaaaaaaaaaaaggggggggcgttttaaaggatcaaaagtaaaaaaacccttgctgggggcgccttattttttttaaagggtcaccaaaattaatttaacgggccgtttttttaaaatggggggattgaaaaaaccttggggtccccaatttaaaacgcctggaaggaaaaaccctttgggcaagctgacttaataccaaaagggcccaaacccttttcctttccaaaggt

SEQ ID NO: 51612 - DNA, 576 bp, Oryza sativa
  Clone ID: PAT_MRT4530_53989C.1
attaaaataggggattttatttagatttatatgacatcaagtttcaactgtcacgcatgatgatgcatgactttatttttaacatttgaaccattatactattacaattcagtaccagacaccaccaacggtgggaatgctcctcggagcaatgtagtagttaggatagataccacatatggatggcaagtttaaggccagcaaagcttgagcttgagcttgagtctgatcaaagtagacaacaccgacctgctgcagctgtagttgctgcacaatcgcctgaacgctactaatggcctggtagtgagattgttgcgctaccagcctgagctgttggcaacactgttgctgcatgacttggttgtttatcaattgaaacgtagctggttgccagaagggggttgccactatgctatgctgttgccttacaaactcactgcatgggctgagcacctgttgctgtagcaggagatgtgattgtagttgatattgcctataactttgactaagagcatcaaaccgtgcagaagcgttgcatgcaacaattgcaaggagagcaaatacgaaaatgatctt

SEQ ID NO: 51613 - DNA, 661 bp, Oryza sativa
  Clone ID: PAT_MRT4530_5398C.1
gatcgagttagcccggccggctcctcgtctcccttcccgtgtcgcctcgccgcgcgccgccgcccgtgtgtacgtacgttacgttacttcctcgtgccgtgcgttgctgaatactagtatgacggttcgctcggagacgggcggcgcggccaccaccaccaccgtcgtcgtcgccgccgccgtcgacgcgccgcccccgtggcggctgcggaggcagcgctccgtcccggccgccgtcgccgccaccttcgccccctgcgtcggcatcggcggtcaccacgcgccaagaagagtccttcgcttgggagggaataaggcggcggcggcggcggcggcgcaccaccgccgcggcgaggcggaggaggagggggagtacttcgattccggcggcggcgtgggtgtcctgcgtgcgctgtggaggaggatcgtgagggggaggaggtggaaggtgatgagccggagcgggtcgtcgacggcgaggaggagggagcagtacgcgcaggacgagtacgagcagaacttcgacgagggcgccgccgcggccggcggggagcccgagccggagtacctctcgcgctccttctccgcccgctacgccgccgccggcggcggccggcgatccgccgggctagcgcgctttggcgtttcgcgcgctaattaa

SEQ ID NO: 51614 - DNA, 803 bp, Oryza sativa
  Clone ID: PAT_MRT4530_53990C.1
ccggccgggatcatccttcaccacaattcaaatattatagttgaagcatagtagtagaatccaacaacaatgaagatcattttcgtatttgctctccttgctattgttgcatgcaatgcctctgcgcggtttgatcctcttagtcaaagttataggcaatatcaactacagtcgcatctcctactacagcaacaagtgctcagcccatgcagtgagttcgtaaggcaacagtatagcatagtggcaacccccttctggcaaccagctacgtttcaattgataaacaaccaagtcatgcagcagcagtgttgccaacagctcaggctggtagcacaacaatctcactaccaggccattagtattgttcaagcgattgtgcaaacagctacaactgcagcaatttagtggtgtctactttgatcagactcaagctcaagcccaaactctgttgaccttcaacttgccatccatatgtggtatctaccctaactactatagtgctcccaggagcattgccactgttggtggtgtctggtactgaattgtaacaatataatagttcgtatgttaaaaataaagtcatacatcatcatgtgtgactgttgaaacttagggtcatataaatctaaataaaatcatcttacctatttaaatagcattcctctatgaggataaatcctattacattatcgtagctaattaccatcacagggactttacaattttactatatgcatgcatttgatcctaaaaaaaaaaaaaaaaaaaaataaatgaagtgcattaagcaagttcaaaaaaaa

SEQ ID NO: 51615 - DNA, 2774 bp, Oryza sativa
  Clone ID: PAT_MRT4530_53991C.1
tttttttttttttttgaacaaaacagttgtagcattttattagtgcttcataaacttagaacagaaccgccacaaagtttcacatacttgtggcattttattttttttttgatacacctatactatttcattagtacatcactctgaggcctcgttctccgactcatttgagaagcctaggtaggtttgatgctcttagtcaaagttatagacaatatcaactacaatcgcatctcctgctacagcaacaagtgctcagcccatgcagtgagttcgtaaggcaacagcatagcatagtggcaacccccttctggcaaccagctacgtttcaattgataaacaaccaagtcatgcagcaacagtgttgccaacagctcaggctggtagcgcaacaatctcactaccaggccattagtagcgttcaggcgattgtgcagcaactacagctgcagcaggtcggtgttgtctactttgatcagactcaagctcaagctcaagctttgctggccttaaacttgccatccatatgtggtatctatcctaactactacattgctccgaggagcattcccaccgttggtggtgtctggtactgaattgtaatagtataatggttcaaatgttaaaaataaagtcatgcatcatcatgcgtgacagttgaaacttgatgtcatataaatctaaataaaatcacctatttaaaccccagacaccctcaaaaaccctaatcccctccctcccgccgccgccgccgccgccgccgccatgggctccgcctccgcttcctcgctcccggcctccgccggcttcggcgagaacctggtcctcatcctcgacttcggctcgcagtacacccacctcatcacccgccgcgtccgccagctgggggtcctctccctctgcgtctccggcacggcgccgctcgcctcgctcgcgggcctccgcccccgcgccgtcgtcctctccggggggccccactccgtacacgcctcgggggcgcccacgttccccgaggggttcctcgagttcgccgccggcgcgggcgcccacgtcctcggcgtctgctacgggatgcagctcctcgtgcagtccctcggcggcgccgtcgaggccggcgagaagcaggagtacgggaagatggaggtggaggtaaccgcccgctcctcggcgctgtacggggagggggaggtcgggaagcgccagacggtgtggatgagccacggggatgaggtggtgaggctgccggaggggttcgaggtggtggcgcgcagcgtgcagggtgccgtcgctgccgtcgagaaccgtgagaagcgcttctatgggcttcagtatcaccctgaggtgacacattcaccccaaggaatggaaacactgcggcgcttcctttttgatgtttgtgggataaaagctgattggaagatgcaagatgtgctggatgaagaaattaggacaatccaaagcatggttgggcctgatgaacatgtgatttgtgctttatctggtggagttgattcaactgttgctgccactctggttcacaaggcaataggggatagacttcactgtgtttttgttgacaatggcctattaagatacaatgagagggaacgggtaatgttaacctttgaaagtgacttgcaccttcccgtcacatgtgttgatgcatctgagcaatttcttagcaagctaaagggtgtcaaagatccagaaatgaagagaaagataattggaagggaattcatagcagtttttgatgattttgctcacaaattagaacagaagataggaaaaagacctggatatttagttcaagggacactgtaccctgatgtgattgaatcatgcccacctcctggaagcggaaggacacattctcataccatcaaaagccatcacaatgttggtggtcttccaaaagatatgaagttaaagctaattgaaccactcaagctcttatttaaggatgaggtacggaagttggggagtattttaaatgtcccagagtcattcttgaagcgacacccatttcctgggcctggtcttgctgtacgtgtcctaggtgatgttacagaaggcaatgctttggaggttcttcgtcaggttgatgaaatatttgttcaagccattaaagatgcaggtctctatgatataatttggcaagcatttgctgtgtttttgcctgtacaaacagtgggagttcagggtgaccagagaactcactccaatgcagttgctttgagggcaattactagtgaggatggcatgactgcagattggtattattttgagcgtgagttcctggtagatgtggtcaacaagatctgcaacaatgtgcgaggtgttaaccgtgttgtccaggacatcacgcaaaagccacctgcgacagtggaatgggaataggaacttcgtgctctgaattctgatgccgtggagtggcctacttttatgctgcaatggagtgggaatatcaacatattcccatattatacatatagctgtttattactagattgtttgtttacatcctttgacaaatccctatttgtcaacctgtgatagattttgaactgagaaaagctttgaactgcacttattaactgtgctttctattcttgaatagatatcttcacctttgaagaccttttaaaaaaaaaaaaaaaaaaaaaaaactacaaaaaaagcaccacaaacagaaaggggcatccagacgaacccccagactggtgctctccctccttaaatgttccagaatcatttttgaaacgacacccatt

SEQ ID NO: 51616 - DNA, 399 bp, Oryza sativa
  Clone ID: PAT_MRT4530_53992C.1
atggaagcagctggactggaggaggaggaggaggaggaggaggcgatgccatggtggtgttgccgcagcaggaggaggcggcgtccgtcgaatccaagggagtccacgtcatcggcagccgaatctatgatccggagaacctacaggtggtggcaactagagcctacaggcggggctcaacaacacgagcaccgctccatgcacacgaactcccagtctaccacaaacgccacactccctaacgacattaccgattgggagggtgagggagagatgagaaagaggctaacatgtggccctatcctcgtcttggatccagatcaagtccatgagggatccatgtggcatatgcccacgttgtctcatggagcggatcaggggctagtttttgaccagtga

SEQ ID NO: 51617 - DNA, 900 bp, Oryza sativa
  Clone ID: PAT_MRT4530_53993C.1
gcaaaatttgtaaggtggattctgtaacacaatccaccttacaaattttgcaccaaaaggaaggtggattgtgttacagaatttaattttggtgcccatattggaggaaaaaaacacaaggcaaaaaagctggagattcttggtaatagaaacaatgcaagacctgccactggcaatcaatgtacaggtaatagaaatcccagaccaaatggcaacgcaggttctggaagcagaaacaatgaaccaaatgtgtttaatagcaatattgcccaaccaagcagtgacactttctctggaagtcaaaccaacggaaccattggaaatcctcacaaggaaatctcatctgatggtgatggaataagcaatagcaaactagagcaaaattgctgatactggatcatctgaacacaagtgatgaataaagatacttgaagcttatggttgaaccggttatagcatacttcaggaacatcttcccagttgtccccatgtgtgtgtcatgccacaagtgcagccaaggatttgagcaccacactttgggcaaagaaacgggaggtactgcagctgaactgtggcgtgctgtcattcagtaaagaaacaaacttggctggaaccaaacaggtctttaacctgctgatgtacatagttttctctttacactagttgtcttattttttgttgcaaatcatgtagaaataaaaaaaaatccttgcttggatgatggtatcttgcatgctttagcttgaattgctctggaaattttatctggtcagtaagacagtttctggttatcactcttctgtcttctccagttttctttggtcataattttgcttttagtttgtatagttcaaatatcataatttattgcaatgtacctttgataaaaaaaaaaaaaaa

SEQ ID NO: 51618 - DNA, 312 bp, Oryza sativa
  Clone ID: PAT_MRT4530_53994C.1
ggccgcgggttttttttttttttttttgcgtgattaaatgaggctttgcgaccccgtcaaaacgctaatatgctgagaagtatctcactatgtctagatccaacatgatcgtaacctcataacaataaatatatactagaagctatccatcacagccagaacttaagccttgggctggatggcagagtaagagcaggggatgggcttctaaaccttgacggccttgagggataaaggaaggcacttcttgctgccgccggcgctgatgatgctgatctctacccataccgacacacaggtcttctggagggt

SEQ ID NO: 51619 - DNA, 1006 bp, Oryza sativa
  unsure (1)..(1006): unsure at all n locations
  Clone ID: PAT_MRT4530_53995C.1
cttcgtttgctgcggcgacctggacgacgaccccacccctcctgcgccgacgccgctcgccgctccgacacccaacggcctcaacgatcgcctcctccgcctcacccgcacgcaccaacggggcccctcccaaaacccaaaccctaaccctaaccctaaccctaaaccccctccgccgccgcctcctcaagagcccgaactgctagtgtaagctggccggccgccgccgcctctgcaagctctctaccgccggcgatgagtccgccggagacgacgacagcatccgcgacatactggacgatctcaccacccgcctcgactccctgtcagtcgacaggcccaccgcaaggcccagaccccacgtgtccccacttccctgcgccctccatgccgaccccgacccctctcagtctcagcttaatgatgggaccaaaccctcttcatcagtggaacacccatacaaaataacttgaaggaaatgtgggctctgttttatttctgttgcccagaagtcttgggtgataaggagcagttcaaagcaaggtatgagcacgctatcattcaaggaaatgacaagaatgctaccaatcgacaaaagcacataggctcaaatgtagcaaaggaattaagagaacggataaagccatactttttgcgacgcatgaagaatgaagtgtttcttgatagcggcacgggagaagataaaaagcttgctaagaagaatgagctaattatctggctgaaattaacatcttgccagaggcaattatatgaagcttttcttaacagtgaactagttcattcatcaatgcaagggtcacccttggccgcaatcacgatattgaagaaaatatgtgatcatccgctgttgttgactaagaaagctgctganggtgttttggaaggcatggatgcgatgttaaataatcaagaaatgggaatggttgagaaaatggccatgaaccttgcagatatggctcatgatgatgatgacgttgaaatgcaa

SEQ ID NO: 51620 - DNA, 5262 bp, Oryza sativa
  unsure (1)..(5262): unsure at all n locations
  Clone ID: PAT_MRT4530_53996C.1
ctcctctcaaacacaagcctaagaggcacccgagatcagcatgtgttccgttccgtggtcgtcacaattagtacaagtagcatgcaaaatgtcacgccttagtgactactagcatgcaagcatggattttaagcaaaagaaacagacatgccctacgctacaaggatagaagacagaagcggcaggctcaatctatccatgtcgcatctctgcttcaacctctccgccatttcaccaaacttggctctcaactcacccacatcagccagctccatgctcttgttcctttccagcatctgctcactctcttcaacttggtcggaatgcacatcgtcggtagagatccttaactgccgcagatggcttctcagccacatgtttgcgtgtagggtccctttgagaggcggcgcctgatggtgtttaaggtcagggttagggcttcgtctatgtgaggagccccgtaggttcgtgcgcgtgtggctcagctgccggttcatgatcctgttgcctgtcggtgtgccgacgtgcttcgaagcaggacaggagcgcttctcttcaatgtcgctcccgatgtcgcggtttggactggggtctattgatctcattcctttcttgttcttgcgcgagagcgggcaatgacgttggaggaatggaattcttttttcttcatagtattggctgtcctaattcaagcagagtcccatgaccctccgctgtactttctctaggtgcttttcgtattgcgagagatggccaacacatcattatcattcaatgttggtaagattgcgttcttagaaaacagaaagctgtgatgtctcaaacccgctatgccttgttgattctgtaattgtctttactacatcaaggagtcatctatcataatttgatgtccatgctcttctggccattgcttttgtgtcagcaaaacatcacacccttgttgagggcgaatttaaagctctagggtcgaccttttgcttagctacgattggattccaagcaggatcaactactataacccgatctgccttggtgagtgtattgccaagtccaccaacatgtgaggtcaacaacaatattggactgtcaagcccctcttgaaagtccttcagaatcttcttcctctcagatatcttggtggtaccatcaatacgcaggaacttatggccctcgatagatacagcatcctgaataaggttaagcattacacgtgtctgtgaaaatatcaaaacatagtggccctcttcaacaaggttcctcagtaagggaaggataaaagctatcttgcaggaggcgccttggacaatctgtagtcttttgtcagcataaaggttatcttcaagaatcctttccaccatgcacatatctcggttattcagcatggcacccatttcttccaggaaatcatcagtatctcttttagtcaaaagtagagggtgatcgcatattttcctcaaaatcgtgctagcttccaaggatgaacccttcaatgctccagtttgtgaacgaactggatctttattcaggaaggcttcatacaatcgcctttttgctgcatttgaagccatttgcttctcttgatcagtagcattcttgtcatttccacaaagaattggcttctcgtacctaagttcgaaccaggacatctttaatttattttgaataggtgttccagtgagtacaatgcgatgagcagaaggtatttgaaacaagctctgtgccctttgcgtctttgtattcttgacaatgtggccctcgtcaagaataacatagtcccacagtggttcttcttcgttgttgtcaacattgttaccgttgccattgcctcttagtaacatgtaattattccggacgatgtggtaggatgttagtagaatgccaccctcctggatggtcttgccgagtcccatgtcatcggcgaggatccctccggtggcggtgcagtgcagcgcccagagccaggcgaggccgtcgcgctggtgcgggtagagcgaccccaatacgcggcgggggatcttcatcttcatcttgatggcgccgacgccggcttccaccaccatgttgactagctcctcatcctcatctacctccacctccacctcctgttgaggttgaggttgggaagtcggggccattggaacgaatcggccgttggcggcggcggcggcgagggctccgcggccggtggtgaaagtggaaggaactttaaagacaacaagggtactactagttgagtttaaacggaacggagttgagtttaattcagatcccttcctgccttcaccccgcgcccgcccgcccgcctcttcttccttcgctttcaaactttcccaatcctttaaagttcgggcttccgttggacccttcctctccaatggctccggagaagactcgatcacggtcagcttttcgtccagctcatttatctgcctccttatcttgtctccacgatctggtagcttcgccacaagcaccgtgtttgcaagggtttgcgaaagccggttgattttggccttgatttcctcaggactttctgtgcttgtgctgttcggggagtatgttcgagcaatgaactcttttggcttcatcgcataggcagcaccattggcaacatagtcagatgaggctcccttgtagtagtgcttggccattggcatagctcgacgactgctgtccaaaccatcattatcattcagtgtaggtaagattgctgtcttagaaaacagaaggctgtgatggctcacgcccgctatgccttgttgctccaggaattgtatatgcttcctcaaggagtcgtccatcacaagttgttgtccatgctcttcttgcaattgcttttgtgtcagcgaaacatcaaaaccttgctcaggcagactgaaaagctcttgaatatccctcttgctgaaataacgagtttgttctttgtgctctgtagctgtcctaaacagagcccccttgaagacctgcaatttgtatatcttttcttcgatggttccagatgtcataaggcggtatacgatgacatctttcatctgcccaattcgataagcacgatcaacactttgattgtccgtacttggattccaagcaggatcaactactatgacacgagctgccttggtgagtgtaagtccaagcccaccaacttgtgtggtcagcaaaaatattggagctccaggaccctcttggaagtccttcacaatcctttccctctcagaaatcttggtggtaccatcaatgcgcaaaaacttatagccttctaatattatagcctcctgaataatgtttagcattttacgagtttgcgagaagattaagacgttgtgtccctcgctaacaagattttggagcaaggacatcataaaagataacttgcacgagacatcctgaccaacttgcaattcaacgtcatcatcatcatgagccatatctgcaaggttcatggccattttctcaaccattcccatttcttgattatttaacatcgcatccatgccttccaaaacaccctcagcagctttcttagtcaacaacagcggatgatcacatattttcttcaatatcgtgattgcggccaagggtgacccttgcattgatgaatgaactagttcactgttaagaaaagcttcatataattgcctctggcaagatgttaatttcagccagataattagctcattcttcttagcaagctttttatcttctcccgtgccgctatcaagaaacacttcattcttcatgcgtcgcaaaaagtatggctttatccgttctcttaattccttgctttgaaccttcaagttattttgtatgggtgttccactgatgacaatacgatgtgcacagggtatttcaaatagactttgagccctctgagtctttggattcttgataatatgcccctcatcaagaataacatagttccataatgtttcttcctcgtcatcaaaatcattggtgaagttgccttttatcatcttgaaattgtttcgaacaatgtcatatgttgttaaaaggattccaccctccttgaaggcatatttaagctcatagttgcgagcatttgcattgggaccagagtagtctctgatcttatctttgaggctcacaactgaaagttccttggtccaatgagtcagaagcgtctttggagctacaactaacactctcttgattaaacgggaatggaacaatccagccaggaatgcagaaacctgcatggtcttgccaaggcccatgtcatctccaaggatccctccagttcccctacaatgcagaacccaaagccacctgagaccctcacgctggtgggggtaaagcatgttgaatatccttcctgggagattgtagggcttgcgcgttacacctgtcccagtgggctccatcttgaagtcctctgtcttctcccaaccaacatcatcagcatggttttccttcccattctctgcatcttggtcgatgtcgtcttcatcgtcatagtccccaaaaaattttgaggccttggattcggttgtggttttccttgacaccgtatcaaaggcataagctcctttggctttcatcttatcatcgttgccgcggcccccaaaagaagaagaggccttgaacaccttcctggtgacctcctctttaacaccaaaaccaccgtaggcacctcccgcatcatcgtcgtcgtcatcacagtccacaaaggatgaagagggtttggtcccatcattaagctgagactgagaggggtcggggtcggcatggagggcgcagggaagtggggacacgtggggtctgggccttgcggtgggcctgtcgactgacagggagtcgaggcgggtggtgagatcgtccagtatgtcgcggatgctgtcgtcgtctccggcggactcatcgccggcggtagagagcttgcagaggcggcggcggccggccagcttgaccttggcgggttcgggctcttgaggaggcggcggcggagggggtttagggttagggttagggttagggtttgggttttgggaggggccccgttggtgcgtgcgggtgaggcggaggaggcgatcgttgaggccgttgggtgtcggagcggcgagcggcgtcggcgcaggaggggtggggtcgtcgtccaggtcgccgcagatgtcgtcaggtcggatcgcagtcggtcgatctgcttccttccgagttctgacgncnncgncgncnncgncggtggaggaaaggnttggnnttttctatctaacccccccccgcttgggttgggttgggggt

SEQ ID NO: 51621 - DNA, 2351 bp, Oryza sativa
  Clone ID: PAT_MRT4530_53997C.1
tcatgaaatgcctctggatgttctcgaagggggcctgccaatctctgatgtcgaagaggcatgtgcttcttggtatctttgaatttcctgtgctagtattatattttataggaataaatatttacattgcatcactaatttattggagattgataagcagaacagtcgtgacatatctccaaatactattttgctcattggccttcaattgaaaaattacagaaaccacatgagcagtgaaacagctaaaagaaaagggaaaataatagctgaaagagggaaacgagctttctccaacaaataattgccatcccatgacaaaaatctaggaaccaaacaaaaagattacactctatgtaccctatgaacctcctttgaaaaaaaaataaaggagactaaccaaagccccaacaaatttgtgacgatgcgtcttgcaaatgtataatacatcacaatcaaccaaaatgcatcatgaaatgcctctggatgttctcgaagggggcctgccaatctctgatgtcgaagaggaatgtgcttcttcgtatctttgaatttcctgtgataatactatagctgaagcagatttttgggattgcagttgattctttagatgaactctgtgctgctgctgcatgctctcaaactggtggagccgggatgggaaattgattgcattgtagctctgagtgtcgtgatttcgattaccatcttctgtcacttgtagaatctgagagtatggatttgttgaagatgtgcgtttcaaattttcactgaaaggcacagtcttcagccgagttctcaagatcttgaaggctgcactttgctgaggcagtagcatcaggagaccataaagtgttttgagaagccaggtatgttttccaggctcaagaagctgcaaacgtaagtaagcaaatacaggagtctctaaaagacggattaatttgtctagttgcacgagaaacttcacatttatatcttcctctcccaaagactggataacagaaattgcatgattgtatgcctgcgcaagtagacacaagcttattgtagccatcggagagtgacaccaagaagcgtataaagattgaaataagtccttgccacaagaatcaaccaatgttttcttaagaagagaacgcagctcagcaagttcggttgatgtgagcaaaattaaattcaaggcctgaaccatggtggatgcaaattcaaggtcaccttcggtctcaagaatagtagagaactctcgataaactttttcagcacccaaaagcatacaaagtcgacgaactatcaatgcgccacgtttctccagtagaacatgattgttgtgaaaagtgtggattaagtaggatacaagatgatgaaagtgatgagactcttcagctatgcgcacatgaacttccaacactaacaatatcaggcacactgtctaacactgttatccaccccaccaaaaattgtctcacataaggattcaacacattcatgcgctccctcaagagtggtataaattcttctatgctgaactggtcactctcagttactatatccttgacaagcctgtcaagaagatgagcagcactctgcacgttagcatcagagtctgcagaaagcttgcataatgcatcaaaaattttgttgaagtagatgatgaaatcccctcttaccacctttgctatgttgtatagtgcttcacacgcatagtagcgaactctactgtcttggtccaggaaggaggtaagcacaggaggcacaatttgctccaaatgttgagcagcctcactggtgagtccaaccgtgactgctgcaagaccaatcaatccgcccttccgatggttcgcttggggcgacatggtgaaatcgttggtgagcagagcgatcactgctgatatcttgtcatgttctcccgacgtcgccagctgcttcacgatcccctcaatctcgagcgcggcgttcttccgcttctcgtagagcttgtcggagaggttgcgcagcacggcgcccgggatgatggagagcgcgtcggcggccatctccgaacaacccgccaaggagatcccccctcccctgccgccgctacaccctcccgatcgcccgcgatcgccgcatcgaccgcccgccccccgcacccgcacccccaccccccaccgtcgacgcaaccctagccccccgaacaggcgaaggcgacgacgagagaccacgagggggtgcgccccgccaaaccctagagacctaagcccacctccgctcgctcgcggggcaccctggcgaagcctatctcaatggattggaggttggagacgacggtggtgtgatctggaggaggagggggaggaggaggtggggatccg

SEQ ID NO: 51622 - DNA, 216 bp, Oryza sativa
  Clone ID: PAT_MRT4530_53998C.1
aaaaatgaaagacaactttttttctatttatatcacccaaagttttacatgtcacatatgaagatattctgagcttatttttaacttccgaaccacttttctgttaaaacttattacaagacaccgccatgggtggatatggtactgggtgcaccattgtacctagggtggataccaaatttagatggcacgttaaaaagccaacagagtttgagc

SEQ ID NO: 51623 - DNA, 295 bp, Oryza sativa
  Clone ID: PAT_MRT4530_53999C.1
catttgttgagaatggcggtcatcgcaacaacaccatcctatcaggcatttgtgacaatgtcaagatatgtatgggcgtccctaaccgtagcacgttctctgaatccaagagcagagatgttctatgtcaagggtggtactgaattacgataaacacatggaatgtgttccatccaagataaccaaagaaggagacaaggtcagtgttgggtttacagtaatgccggggtttaagattggatgcactgacatcagatgcagggtgtatctgtccatggtcaacgaaagaaacttc

SEQ ID NO: 51624 - DNA, 300 bp, Oryza sativa
  Clone ID: PAT_MRT4530_5399C.1
atgtctttcggacatatccgaaaatttccagaagcgaaaattgagttcttcgatttgtatttcaccgggtttcggcggtccaaccggcaatacaccggcggtcagaccggcgacgagtggcggtcagaccggcggcataagggcggtcagaccggcgacgagcggtcggaccgatcgatctacaccggtcagaccgacagcatcagggcgattgctgagggctcgttaaggctcacaagcagctcgcgagctggctcgtatgagttggatcaaaactccgaacaagaaaaaaggggctga

SEQ ID NO: 51625 - DNA, 4056 bp, Oryza sativa
  Clone ID: PAT_MRT4530_539C.1
atgtgcaccttcatcgtggtccttacttccatcgtcttcctcatggtcacctccaatggccaagcacaagctcccattggctgcatcccgcgcgagagggacgcgctgctagagttcaagaacagcattacggatgacccgatgggccagctcaagttttggcggcgaggcgacgactgttgccagtggcgaggcatccggtgcagcaacaggaccggccatgtcatcaagcttcaactttggaagcccaagtttgatgatgatggcatgagcctcgtcggaaacggtatggtaggactgataagtccctctctgctttctttggagcatctgcaacatcttgatctcagctggaacaacctaagtggttcagatggccacattccagggttcataggatcttttaggaacttgagatatctgaacctctctggcatgccgttcatcggcgtggtgccgcctcagcttggtaacctctcaaagctgcaatttcttgacctctcatcttgcatagggctagaaatgcagtcaagatcaggcatgacatggttaaggaacatacctttgctacagtatctcaaccttaattcggtagacctcagcgcagttgataattggcttcatgtgatgaaccagcttccttccttaagggttcttaatctctctaattgctcacttcaaagagcagaccaaaagctgactcaccttcacaataacttcacccggctcgagagacttgatctctccgggaaccagtttaatcatcctgctgcttcttgttggttttggaacattacaagcctcaaggacctcatactttctgggaacagattatatggccaactccctgatgcactggcagatatgacatccctccaggtcctcgatttttcgattaatcgtcctgtacctatctcaccaataggtctgcttccatccagccaagcacccccttcctccggtgacgatgatgccgccatcgaaggcatcactatcatggctgagaacttgagaaatctatgcagtttagaaatcctggacctcacacagagtctctcatctggaaacataactgagttaattgataatttggcgaaatgcccggccagcaaactgcagcaattgattttgaaatacaacaatatcacaggcatcctgccaatatcaatgggagtgttttccagtttagtataccttgacctctcacaaaactatctcacaggacaactgccttctgagataggcatgcttagaaatctgacatggatggacttaagctacaatggcctggttcatttgcctcctgagataggtatgctcacaaatttggcctatatcgacctaggccacaacaacttttctcatctgccttctgagataggtatgctctcaaatctaggatatttggacctaagcttcaacaacctagatggagtcatcacagagaaacactttgcgcatctagcaagcttggagtcgatatatttgccttataattccttggagattgtggttgatcctgaatggttacctcccttcagactaaagtatgcatatttttattgttgtcaaatgggccccatgtttcctaaatggctccaaacacaagttgatattattgaacttgacatagcaaacacaagtataaaagatacctttccagaatggttctggacaacagtttcaaaggccacatatttggacatctccaacaatcaaatccgtggtggattgccaacaaatatggaaaccatgttgttggagacattttatctggattcaaacctaataactggtgaaatacctgaattgccaataaacctcgaaacactggacatctccaacaattacctatcaggacctttgccatccaacattggagctccaaatcttgctcacctgaatctctactccaatcaaatcagtggacatattccaggatatttatgcaacttgggagctttggaggccttggacctaggtaacaatcgtttcgagggagaacttcctcgatgttttgagatgggagtaggaagcctaaaatttcttcgattaagtaataatagattatctggtaacttcccatcttttctgcgcaaatgcaaagagctacatttcatcgatctatcatggaataaattatcaggaatattacctaaatggattggagacttgactgagttacaaattttacgtctgagccataactcattctctggcgatattccaagaagcatcaccaaacttacaaaccttcatcatttagatcttgcaagcaataatatttcaggtgctataccaaatagtttgtcaaaaatactagcgatgataggacaaccatatgaaggagctgatcagactcctgcagcatcaggagtaaactatacttctcctgtggccacaaaagggcaagagcgccaatataatgaggaaaatgtggaagtggtgaacattgacttgtcttccaatttcttgaccggcggaattcctgaagacatagtctctcttggtggattagtaaatctaaatctatcaaggaatcacttgagtggacaaattccatataagattggggccatgagaatgttggcatcgcttgacctatcagagaacaagctctatggcgaaatcccagcaagcctatccagtttgacatttctaagttatttgaacttgtcatataatagtctcacaggaaggataccatcagggtcacaacttgagaccatctacaatcaacaccctgacatatacaatggcaacagtggtctctgcgggccgccacttcaaaagaattgttcgagtaataatgtaccaaagcaaggttctcagcctgtacaattgctcacacacacacacataaacctcacaaaacttgagcaccttggtctatcaaggaactactttggccatccaattgcttcaagttggttttggaaagtaagaaccataaaggaacttggtcttagtgaaacctatcttcatggtccatttcctgatgcactagggggaatcacatccctccaacagctagattttaccaataatgatctttcacggaacaagttctatggagcattacctgtgtggattggagacttggagaatttgcgatttcttcagctaagtcacaacatgttccatggaaatattccagtaaatatagcaaatcttggcagtcttcaatacttgaatttagcagcaaataacatgtcaggatcaattcctcggactttggtaaacttaaaagcaatgacactacatccgacgagaattgatgttggttggtacgaatctttaacgtattatgtcctactcacagatattctgtcgctagtgatgaaacatcaagaacttaactatcatgcagaaggaagttttgatctggtgggcattgacttgtcacaaaaccaattaactggtggaattccagatcaagtaacttgtctcgatggattggtgaatttaaatttatcatcgaatcacttgaaagggaaaattccagacaatgtcggggacatgaaatcagtagaatcacttgatttctcaagaaacaatctttctggtgaaatcccactgagcttatccgacttgacatatttaagctccttggatttgtcacataacaaatttgttggaagaataccacggggaagtcaacttgacaccctatatgcaaacaacccatccatgtatgatggcaacagtggtctatgtggacctcctcttcaaaggaattgttcaagcgttaatgcaccaaagcatgggaaacaaaacataagtgtggaggatactgaggctgtgatgttctttcatttcgggcttgtgtcagggctttgtgattggtctctgggtggtgttctgcgccatatagttcaaaagatcatggagagttgcttatttccaccaagccgacaacttatacgacaaagcagcaaaacagaggacaaaacaggggataagaggaaaggaggggaggtatcaccagtttgctccaagaggacaaggcttcttcagttcttcgccgtcgccgcctgcatgcaggagcggatttga

SEQ ID NO: 51626 - DNA, 1997 bp, Oryza sativa
  unsure (1)..(1997): unsure at all n locations
  Clone ID: PAT_MRT4530_53C.1
aacaccataaaatagtgtgtgatctccccacacgcacacagaagctagcagcaacaagcttcattcgcctcaccctctcccatcatatcatatgaggaagcaggattctttccaacctacaatatatcttttccctgatggctagctagctctttctcggactttctttctttctctctctctatccgtctctaccacatcgcaccacctaaccttctcgagctagacccacccacaacgagagggaggcaggcaggccgcccggagacatcaaattcattctcctcttctcttccaaacaaccacctcacttaccagcctaaaaaatccaatcaaagagaggtatagttggtttatatctgtgtatatataccatggcctaattgatgaccatggacggtcgccggagacgccggaggtggcccgccgcccaaacttccccttgcagcttcttgagaagaaggaggagcagccgtgctccagctcggctgctggaggtggtactgggccatcatcggcgggtggcaacgggaacaatggatcgggaccgggcggtgccggaggggagatgcagcagctgcggaaggcggcgccgaagcggagctccaccaaggaccggcacaccaaggtggaagggagggggcggcgcatccggatgccggcgctgtgcgcggcgagggtgttccagctgacgcgggagctggggcacaagacggacggcgagaacgagtggctgctgcagcaggcggagccggcggtgatcgcggccaccggcaccggcaatcccggcaacttcacctcgctcaatatctccctccgctcctccggatctcgctgtccgccccggcgcacctcgcgcgttacctagccccgccgccgccgcctcggatcccgtgcggacgcgtgggaccgggttgtcagcctcgggttcccgtccgagggccccgcctcgtcgtcctctcgccgtccccgcttctgttgaacttccactcgggcagcgtcggtctcgatgtgcaaccttcgccttccgccgctgccgccgccgccgacctctccaggaagcggcgctgggagcaggaaatgcagcagcagcaacagcaacaacagcagcagcagcagcagcagcagcaacagtaccagcagcagatggccgggtacacgcagagccaaatgccgggcaccgtgtggatggtgccgagcaacagcacgcaaggaggtgggccgtccggtggtggcggtggcggcggaggaggcagcggggagtccatttggacgttcccgcagatgagcagcgccgccgcggccgccgccgtgtaccgggggagcgttccgagcgggctacatttcatgaacttccctgcaccgatggcgctcctaccgggacagcagctggggctcggcccagttggaggcggcggtggcggtggaggaggcggggaggggcacatggggatccttgccgccctcaatgcttaccggacacaggcggcgacggatgccgccggtcagcaaggcggaggaggaggtggaggaggatctagccagcagcaacacggaggcggcggcggcggcggcgagcggcatcagagcataagcaccagcgactcgtaggccccccccggcggagatggatcatcagcgccgcgccaacggcggcggcggcgaggctggcggcgcggcgagctcgcagtgagctgagctaagctaagctaagctagctaagctgtgatgatgggttaatgggaggtagctgtgcaaatgcgaatgcaaatggcatatgatgatttgattagagagagtacagattagggtgtttggaactgcttgctgctgctctcgttaattaatcatctcaattcatcaatcaatggattgtttgcttctttagtttaccccccttattttttacctgggattattttagtttgctcttttggattaattaattaatcaatgtaaggtgtttgtnataaaaaaaaaaaaaaaaaaaaaaaaaa

SEQ ID NO: 51627 - DNA, 701 bp, Oryza sativa
  unsure (1)..(701): unsure at all n locations
  Clone ID: PAT_MRT4530_54000C.1
cgaaaaccgaaaaaaaattatgatcttttagaggtattcccattcgtgaccatgaccatgcccatcatggaattaatgtacaacccgaaaacgcggagaaatataaaaaagcaacccgttgttgaccctagaccgtgaccccaatattcatgaacccaacgtgccgaccgaaaaaaatcagaaaacgcgacaaaatatcaaccgccaatttacaactcttgcgacgcgttcttgccacccttgccgccagtcttcttggggaggagattctgatgaatgttgggaaggacaccaccctgggcgatggtgacgtggccgagaagcttgttcaactcctcatcgttgcggatggcgagctggaggtgacgagggatgatacgggtcttcttgttgtcgcgggcagcgttgccagccaactcgagaatctcggcagcgaggtactcgagaacggcagcgaggtagacgggagcaccagcaccgacacgctgagcatagttgcccttgcggagaagacggtggacacggccgacggggaaagcgagaccggccttagaagagcgagatngggcgttcttgccgctgctggccttgccaccggacttgccgccgccagtcattttgaatgagttctcgggtgggaacacgtggggaaaatggatgtcgttgtgccggaggcgaaagactccctcgtgccgaattct

SEQ ID NO: 51628 - DNA, 6313 bp, Oryza sativa
  Clone ID: PAT_MRT4530_54001C.1
atggattgctcaatgacaagcagcatattgtcggcgaattacaacaccatcctgttcgagttcggcgtgatcctggtgaccagcaagatcctgtacgctctcctccgaaagctgtaccaaccgcgcatcttctccgacctgctgctcggcatcgtcctcgcccagttccgcgtgctctcgctcaccaacgccatcaacctcgtcttcggcaagatcggcggcttcgtcttcgcgccctacctcttcgccctcggcgtcgagatggacccctccgcgctcctcgacgcccccaccgccgacgccgccgtcgcctacgccggcatcttctccaccgccgtcctcgtcacgctcttccacgcccccatcatgcgccccacctccggcatcgtccacgagaactccctccgcgccttcctcgccctcgccgccgccctcgccaacaccgcctccccggtcctcacccgcctcgccaccgacctcaagatcgccaagaccgccgtcggccgcctcgccgtcggcgcaggcatcgcctccgacatgctcaccaccatgctcatcgccatcggcagcatgatctggcgcgacaccggcaccgagggggccgcctcgcccctggcgcagccggcgctcaccgccgcggtcctggccgtggtcctcatgtcgggcctggtgtcgagggccatggcggagtgggtggacgggcgcaacccagaggggcgccgcatgcggggcttcgacctgtcgctggtggcgctggtggcggcgacgctgtgctggttcacctccgcgctgcggctggacgtgaacatggcggccttcctggtggggctggcgttccccagcgaagggagggtgtcgcggctgctggtgagcaagatcaacctggtgctcagctccttcgtcctcccgctctacgtcgcccacgtctgcctctcgctccgccagaccaccgacgacatcgaggcggcggggctccgcaaggaccagggcttccgcgtctacgtgatggagctccccttcccctggtggaaggtgctgttcgtcaccgccatgggcacgctgggcaagctggtggggtgcgccgccgccggcctgctccgggggctgggctggctggaggcgctcgccctgggtctgctcctcaacgtgaaggggtacttccacgtgtactgcgcgctggcggcgttcgaggccggcatcatcacggacaagtcgttcatggccatcatcttcatggtggcggtgaacgtggcgacgacgccgatggtggggatggcgatcgcgtcgtgggcgcggcggagcgtgcagtggcggctgatggggctgcagcaccacgacccggcgacggagctccgcctggtggtggggctgcaggggccccaggacgtggcgacgctggcgttcctgatggaggcgctgcggtggggcggcgggaacggggagctggcggtgtacgcggtggacatggtgcagctgacggaccagacggcggcggccatcgtcaagggcggcgggttcgacggcgtgacggtggtggacgaggaggtgtcggagatgcggaagcagatcggggaggcgctggacgcgtaccagggggatgatggcgcggtgagggtgcggagggtgcttgcgctgtcgtcgttcacggacatgcacagcgacatctgcatctgcgcggaggaggccatggcggcgctgaaggtgctgcagctggcgccgtgctccgtcggcatcctggtggaccgccaccgccacgtcgatgccgccgcgtcgcagtcgcagtcgcagggcgtcgtggtggtcttcatcgggggcgccgacgaccgggaggcgctcacgctcgcctccttcatgtccaagcacgccagcgtccggctcacggcgctgcgggtggtgcagaacgccacggcgcaggcgagggcgcgggcgcggaccagcctgttcgagtcgtccaagagtagccgccgtgcgggggcgtcgtcctcctcctcggcgtcgtcagtgctggggcaggaggaggtgcaggcgcaggtggacgacaagttcttcgcggagttctaccggaagcacgtggccggcagcaaggccatcgggtacatggagaagcacgtcggcgacggggcggagctggtggcggtgctgcgggcgctgcaggcggagtaccgtctgttcgtcgtcggccggggccgcgaccgccggtctgtgctgacggagggtttggaggagtgggcggagtgccttgagctgggccccgtcggcgacatcctcgcctcctccgatttctcctccaccgcctccgtcctcatcgtccagcagtacgacgccaagaagcactacaaggataggagtatgggaggcggcgatggcgatgaggtgctgctgctgccggagccgcgccctcgcaggggcctcgcctcctgggcgctcgatctgctggagcgcgccgccgtccgcctcggccacgacgcctccaagccgctctactggctctccggcaacttcgcccccgtccaccacgagaccccgccggccccggccctccccgtccgcggccacctccccattggagacctgaagggattttatggattgtttatggtccaaatgcaacaactccggaaaaaactcaaagtattggattttacatatggacatgggacagctaatactgcacttatctatcaccatggtaaacttatggccctgtcagaggcagataagccctatgttgttaaggtccttgaagatggagacttgcaaactcttggattgttggattacgacaaacggttgaaacactctttcactgctcatccaaaggtcgatccatttacagacgaaatgttcgcttttggatattcgcatgaacctccttactgtacataccgggtcattaccaaggatggagccatgcttgatcctgtgccaataacaattccagaatctgtaatgatgcacgactttgccattacagagaattattctattttcatggaccttcctctgttgttccgaccaaaggaaatggtgaagaatggtgagtttatctacaagtttgatcctacaaagaaagctcgttttggtatactccaacgttatgaaaaggatgacacaaacatcagatggtttgaacttcccaactgcttcatattccacaatgctaatgcttgggaagagggtgacgaagttatcctaattacctgccgcttggagaatcctgacttggacaaggtgaacggttaccaaagcgacaatctcgagaactttgggaatgagctcatagcgaaggtagcaggcattataaaatttgatctacatgctgaaccggagatcagtggcaagaaacaacttgaagtggggggaaatgtgagaggaatatttgacttgggacctggtagattcgggtccgaggcaatttttgtgcctagggaacccggtgtatctggagaagaagatgatggttatttgatattctttgtccacgacgagaatacagggaaatctgaagtcaatgtgattgatgcaaagacaatgtctgctgatccggtggcagttgttgagctaccaagccgagttccctacggattccatgctttctttataaacgagacaagtgaagcggtagcgatagcgatagtcccttggggcgggggcgcggtggcggtggcggtggcgcgcgaggtccccgtggagtacctgtacccgccattcaacctcacctacttccacttcctcgacaccaacggcgtcttcctcctctcccgcaacgccaccttctccgccgccgtctacaacgccggcgtcgacccttcctccgacgacaaccagtcccgcttcttcttctccgtcctccacgccgcctcccgcacccccgtctggacagccaccgccggcaccaccatcctccagtccatcgtcctctccctcaccgcccagggcctcgccctctccgaccccgaccccgccgccgactacgcctggtccacgccccgcctccgcgcccccgtcgccgctctccgcctcctcgacaccggcgagctcgccctcctcgacgccgccaacgccacgctctggtcctccttcgaccaccccaccgacaccctcctccccgcccagcccctgctcgccggcgtgttgctcacgtcgcccgtctccgaccaggacctcaacccgggcgcctaccgactcatgctcaccgacaccgacgcgctgctgcagtgggcgactaataatggctcctccttcctcacctactgggcgctctccaccgaccccaactccgtccaggactccaacgccgccgtccactccatgacggccaactcctctggcctctacctcctcgctgccaacggcagggacaccgtcttccgcctgcgcttcccctcgcctgacgctaatggtgacccctgcctcctcaagctcgactcttccggccgcctgcgcgcgctccggctgagcaccacatcgccacgcgcgaccctccccaccgtctgggcggcaccgaccggcggctgcgacctcccgctgccgtgtcggtcgctcggcctctgcacgcccggcaccaacggctcctcctgctcctgcccggacgctttcagcacctactccaccggcggctgcgcgccggcggatggctcagcgcttccacttctagctgacacctgtgcgccgccgcctaatttcaactacatgaccctcggcgaggggatcggctacttcgccaacaagttcgcgtcgccggacacctccggcgaggagctcccggcgtgccgcaacctctgctcggccaactgctcctgcctcggcttcttctacaggaactcctccaagtcttgcttcctgctgaactaccggatcggctccctcttccgcggcgacagcgacgccgccgtcggcttcatcaagacgttgccgccggcgtcgcgtcgccagggcggcggcaagggctcgtcgctcagctttataaccatagtgttcggcatcgcgctgccaaccgtggcggccgtgctcatcggcttcgtcgtgtacgtgatgtgggtgaagagccggcaggccagcaacaagaagaagaagaagaagcagggcggcagccgcagctggttcaagctgccgatgctgtcgtcgcagcaggcgtcgtatgcgagtgaggagcagcagggcgaagaagacgacggcgacggcgacgaggttctcatccccgggttgccggcgaggttcacgggcgagctcacagacccagagcggagcgcggtggtggcggtgaagcggatgaacaaccttgggtcgcaggggcgacgcgagttcctgacggagatggcggtgatcgggaacgcgcaccacgtgaacctcgtcaagctgcgcgggttctgcgccgagggcgcgcggcagctgctggtgtacgagtacatgaaccgcgggtcgctggaccagtgcctgttccgcgccgccgccgccccgctggagtggccggagcggatgggcgtgtgcgtgggcgcggcgcgcgggctggcgtacctgcacgccggctgcacccgcaagatcctccactgcgacgtcaagccggagaacatcctgctgaacgaccgcggcggagtcaagatcgccgacttcgggctggcgaagctgatgagcccggagcagtcggggctcttcaccaccatgcgcggcacccgcgggtacctggcgccggagtggctcaccaacgcgcccatcaccgacaaggccgacgtgtacagcttcggcatggtgctgctggagatcgtgcgcggcaggaagaactgcaggtcgggcaagggcagcggcggcgaggcttcgtcggactcggacggctacttcccggcgatggcgctagagctgcacgagcaagggcagtacgaggcggtggtggaccagcggctggaagggagggcggacgtggcgcaggtggagcgggtggtgcgcgtggcgctctgctgccttcacgaggacgcggcgctgcggccggccatgacgacggtgtccgccatgctcgacggcagcatggaggccggagttcccaggacggagctgctcgactacctgcgcttgtacggccgcggcctggtcgacgtccgctccggcctccatgctgcggggaaaggcggctccgacttcaccagcggcggcgccggcagcagcagctggtcgcccacgtcgtgcgtgtcggcgcagcagctgtcgggccccagatgacatgacacacacatttactactgttttttctttttcttgtgtgaatactactgtagattatacagaatattttccatgttgagctgctattgttgcaggc

SEQ ID NO: 51629 - DNA, 455 bp, Oryza sativa
  Clone ID: PAT_MRT4530_54002C.1
gaagaacttgaatagcttttagccgctttggttctgcaggacgatctagatctctcgcccagaacgcgacgacacttgccggagagcactaccaacgacaacagctcttatcctctatggactctacaagctggccatcgtttactgatgtcaatactgctcgctctgtcatattcacccaaagggacagggccacccgccatgcatggaaagctggagacagcaaatcgaaagaggacgcaacgaactactacatgagcagagtgagccagctcctgaacgacggtgctgctgaatcctgttaagaatttatgaactctatgctacatgggttctgtcagctgatcatcattatgctaatgtggtcgctgacaacttaccattctatcactgcactatgggaactatgtacctctgggtgtactggcgcataatttatccatctatgtatgaag

SEQ ID NO: 51630 - DNA, 1157 bp, Oryza sativa
  unsure (1)..(1157): unsure at all n locations
  Clone ID: PAT_MRT4530_54003C.1
aaaagagacgaacactactactagtatagtattccccattggattccatccgccggccggcctgctgcctgcctgccattgatagattccatcgtcgtcgtaggatagagagtactagtttgcaattcaattcaatcccccatacccaatccaaagtttgtccctgtcgctggctatcattggtttgatggagatggaatgatccatgcgatgcgtatcaaagatgggaaagctacctatgtgtcgagatatgtgaagacttctcgtctcaagcaagaagagtattttggtggagcaaagtttatgaagattggagacctgaagggattttatggattgtttatggtccaaatgcaacaactccggaaaaaactcaaagtattggattttacatatggacatgggacagctaatactgcacttatctatcaccatggtaaacttatggccctgtcagaggcagataagccctatgttgttaaggtccttgaagatggagacttgcaaactcttggattgttggattacgacaaacggttgaaacactctttcactgctcatccaaaggtcgatccatttacagacgaaatgttcgcttttggatattcgcatgaacctncttactgtacataccgggtcattaccaaggatggagccatgcttgatcctgtgccaataacaattccagaatctggaatgatgcacgactgtgccattacagagaattattctattttcatggaccttcctctgttgttccgaccaaaggaaatggtgaagaatggtgagtttatctacaagtttgatcctacaaagaaagctcgttttggtatactccaacgttatgaaaaggatgacacaaacatcagatggtttgaacttcccaactgcttcatattccacaatgctaatgcttgggaagagggtgacgaagttatcctaattacctgccgcttggagaatcctgacttggacaaggtgaacggttaccaaagcgacaatctcgagaactttgggaatgagctgtatgagatgagattcaacatgaaaaccggtgctgcttcacaaaagcaactatctgtttctgctgtagattttcctcgaattaatgagagctacactggcagaaagcaacgngatgtgtattgcgctattct

SEQ ID NO: 51631 - DNA, 517 bp, Oryza sativa
  Clone ID: PAT_MRT4530_54004C.1
gcggagctggaggaggcgacggaggggttcaagtcgcagatcgggtcgggagggttcgggtgcgtgtacaggggcgagctcacagacccagagcggagcgcggtggtggcggtgaagcggatgaacaaccttgggtcgcaggggcgacgcgagttcctgacggagatggcggtgatcgggaacgcgcaccacgtgaacctcgtcaagctgcgcgggttctgcgccgagggcgcgcggcagctgctggtgtacgagtacatgaaccgcgggtcgctggaccagtgcctgttccgcgccgccgccgccccgctggagtggccggagcggatgggcgtgtgcgtgggcgcggcgcgcgggctggcgtacctgcacgccggctgcacccgcaagatcctccactgcgacgtcaagccggagaacatcctgctgaacgaccgcggcggagtcaagatcgccgacttcgggctggcgaagctgatgagcccggagcagtcggggctcttcaccaccatgcgcg

SEQ ID NO: 51632 - DNA, 277 bp, Oryza sativa
  unsure (1)..(277): unsure at all n locations
  Clone ID: PAT_MRT4530_54005C.1
gagatggcgtgccacgcgccgctctcctgcagcatccgccgccgccgccgccgcccgcttcgctcccctccaccgcgtgcacgtcctcctcgcgccgccggnctctccgtggggcggcgctgggcggttaanacggttacgcctgcgggggcactgcccctngcccgcntcggcgcgcgccgcgagggtggtctcnncgcgctgctnnttctacggcgccgtnncnacgccgggaagtcgcccgcggaggcgctccgaaggtcctggagtcccccgg

SEQ ID NO: 51633 - DNA, 2521 bp, Oryza sativa
  Clone ID: PAT_MRT4530_54006C.1
ccggctcttcgtcccgggccggggccccgcccccgcggctgtgctgaaggccggtgcggtccacggcgcggcggtccttgacctgggcctgcccgcgggcatagtctcatcgtgtgtgccctgctctacagagacgaacactactactagtatagtattccccgttggattccatccgccggccggcctgctgcctgcctgccattgatagattccatcgtcgtcgtaggatagagagtactagtttgcaattcaattcaatcccccatacccataggccataggataggagtatgggaggcggcgatggcgatgaggtgctgctgctgccggagccgcgccctcgcaggggcctcgcctcctgggcgctcgatctgctggagcgcgccgccgtccgcctcggccacgacgcctccaagccgctctactggctctccggcaacttcgcccccgtccaccacgagaccccgccggccccggccctccccgtccgcggccacctccccgagtgcttgaatggagaatttgtcagggtaggacccaatccaaagtttgtccctgtcgctggctatcattggtttgatggagatggaatgatccatgcgatgcgtatcaaagatgggaaagctacctatgtgtcgagatatgtgaagacttctcgtctcaagcaagaagagtattttggtggagcaaagtttatgaagattggagacctgaagggattttatggattgtttatggtccaaatgcaacaactccggaaaaaactcaaagtattggattttacatatggacatgggacagctaatactgcacttatctatcaccatggtaaacttatggccctgtcagaggcagataagccctatgttgttaaggtccttgaagatggagacttgcaaactcttggattgttggattacgacaaacggttgaaacactctttcactgctcatccaaaggtcgatccatttacagacgaaatgttcgcttttggatattcgcatgaacctccttactgtacataccgggtcattaccaaggatggagccatgcttgatcctgtgccaataacaattccagaatctgtaatgatgcacgactttgccattacagagaattattctattttcatggaccttcctctgttgttccgaccaaaggaaatggtgaagaatggtgagtttatctacaagtttgatcctacaaagaaagctcgttttggtatactccaacgttatgaaaaggatgacacaaacatcagatggtttgaacttcccaactgcttcatattccacaatgctaatgcttgggaagagggtgacgaagttatcctaattacctgccgcttggagaatcctgacttggacaaggtgaacggttaccaaagcgacaatctcgagaactttgggaatgagctgtatgagatgagattcaacatgaaaaccggtgctgcttcacaaaagcaactatctgtttctgctgtagattttcctcgaattaatgagagctacactggcagaaagcagcggtatgtgtattgcgctattctaaacagcatagcgaaggtagcaggcattataaaatttgatctacatgctgaaccggagatcagtggcaagaaacaacttgaagtggggggaaatgtgagaggaatatttgacttgggacctggtagattcgggtccgaggcaatttttgtgcctaaggaacccggtgtatctggagaagaagatgatggttatttgatattctttgtccacgacgagaatacagggaaatctgaagtcaatgtgattgatgcaaagacaatgtctgctgacccggtggcagttgttgagctaccaagccgagttccctacggattccatgctttctttataaacgaggaacaactggcaaaacaatcagcgtgacaagtgatagcggactgcatacatcctacagtaacttgttatattttagtcggagggaaatgatatatacatatgaatgtacatgtgtatcctcttactcggggaaataattggcttaaggtacatatatgtttaactcgaattgaacaattactcctatattaattacttattaagggagggttattataaaaaaaaaaaaaaaaaaaaaaaaaaaagaagaagaaaaaatgcacgcatgaggagcaattaacgaatatattctctccatccccaaatatttgacgccattgaccattttaaacatgtttgaccattcatcttattcaaaaagtttaagtaattattaattattttcctacaatttgattaattgttaaatatactttaatgtatacatataatgtatgcatatagttttacatatttcacaaaaatttttgaataaaacgaacagtcaaacatgtttaaaaaagttcacggcgtcaaacatttaggaaaggagggtgtatcatgtatcatctggagttctagtgctatatgcatgcatgatttgttcccaaaaaaaaaaaaaaaaaaaaaaaaaaaaaaaaagggcctcgtgc

SEQ ID NO: 51634 - DNA, 308 bp, Oryza sativa
  Clone ID: PAT_MRT4530_54007C.1
cccactcgtcctcccactcgtccgctcgttaggccggtcgccgtagctggacgcgtggtctttccccatgttgtccgcggcggcttctctaccttcacacacgacacatccttcttctcctaccatctttacctcaccgaccatcaatctctactacatctctcatccaacatacaaacctatcacacatttccatatcacttatcacctcttatatctacacatctacagatcttcatttcacaatacaccgcaccccaccttaaaaaaacaaataatattcattccctcaataggttccaatcttt

SEQ ID NO: 51635 - DNA, 9020 bp, Oryza sativa
  Clone ID: PAT_MRT4530_54008C.1
atggcgacctcccgcgacgccgatgagatcatcgagaagctctcctccgaccgggccagaacccgcgatgagggggtgaagctgctgggcacctggctgcaaggcgaccgcgccttctccttctgccgcctcctcgcccgcaacaccgccaacctcaagcccgcccatctccccgcctccgccacatggcccttcctcatcatggcgctcaccaaatgcgtcatcgccgacatctccggcaagaagcgctctcccaagagcgccgctgccaggatgctccgcctcgccgtccagtgcgctcaagacttccgcctctcagggcggtcgttacttttgatttccgtcgctaagaaacttttcagtcatatatgggaggttgtaaaagatgctcccagctttctgatagagtacagcataattcttaggcagcttttaactgttaaggagtaccggtatcagatgaaacctcgaacatatagcagttttgttgtgctctacatgaagaaagttgcgactggttttgatgaaaaaatcagtaatcaggccagctccaaggaggaatccttccgttgtacactgacccttcacgttctacttgaaaacccaccgggtgattaccctgatatcatgagggaggagagcttgttcatcacctatgcaaaggttcagctggaacttgctagggctattcctgagattttggaaaaacttcttgatgtcatcattaaggaattagaccaaaattttaatactggagccggtttagtatggtgcgaggcacctcgagacgagaaagctggctccttgaggtgcttccaggaagaattgatggatctatctgctactgccttatatctggcctacaaatgcacaccgaggacatcacataacaagaaaaagttaaagacggagcatgttatgaccgccatcatggatagcctgctgagaggatcccttgtttggagtggttctatttgttgtcttattcacaagtatgggtaccgagtggataaatctttgttgatcaattggttcaaggcgacctgtaagggtttgaaaagtgttttgagcaatgcaaatgccctacggtttcaagattcactgctttggcttatcagggttctcaaggagttctctgcgcttctcatgtctagtgctagggatgcaccaccattttggttaacaaatgacgagatgtcaattttggaaggttattggcaagatacctggaattctcttattcacgcacttcctttgtttagcaccacagctctagtcgttgattcagttctgaggttgttgggtgaaatgatcatgcgggaccaagttcatgcatcatttgtgtcagaagatacatgggacctacaaatatttaaacaattaccatcatcgtctactctgtacttcattgcttgttacttttcaaagataggttttcagggcgatgtatccaattccatatttattagaaagaatctgttaagatcaacttttgagttagtgcactccaagggtttctctcttttgaatgaacaaagtgttctgatgattcctgaaaccattttttctctctgtgctggtttttcctcgccagtgattaactcagcagatacatcgcaactgtttggtgaatgtaaaaacttatctaaggacaagtgctggtctcacgaggaagaactaggttattctgtggaaactctatcggagatcaatctggaaagtcctaccaaggccatgtctgagaaatgcagccgagcgcaccttcctcggcatattcagcaacccttgctcctggagcttctagagttcaccaaaggattcatgtcctcaaataaacagtttgagaaagtggacttacctaatcttgtttatgcctgctctctagtctgcaatctaattcattgttcgctgttgtcaagggtctttgaagaaaaatcttcttttctgcaagttatgttggattatgtcaccaatgccataaaacatattgtgtcagtggttatgaaggaacatgctgaactttctcatggtcttaccaatctaggatcagtatttgacacaactggctcagccttatcctcatttaagagcttcatgcattctccattatttagtctgtggagagttaataacaaaactagttctgtgcttggtgtcaccgaattacttgatgaactcttagaggcaatttctgagctatttgctcagttctctagtttgatgaacaattttgatggagacaatcctagtaaaatgttgccagtgccttttgtcagtttgtcagaggacctacatcctgacaacagaagtagttttgttgatatggatcttgatatgactggctctggtgaagtagatcctgtcacagcaggtggaagtggaagtatgggtatctcaccacggcctttggagtgcaagctagaactagtctgtattatttcaacttttttctctgttgtgccgcttcatacctgggaagtcttgtacaacttagctgacaaagaggtcaatatcaaggttggccaggctatcttgcttgaactttgcacaaatatctctgcctcatcaagtagtttatcttctgtgaaccaggatgtcttcttagacttactaaacaaggctacagagatcagtttcacagattggtttttccgcatcaggctgattaattgcatctccaactttatttatctgttccctgatgtcgcacaggacatgattggtcatttgcttagcatgctgcatgatactgattaccgtgttaggttgtatttggctcggaaaattgttgtgctattccaaatatgggaaggacacagcgagttgttccatgatgtttgctccagtattggtgtcaagatggtgcagttttcaaatgaaaatccagttagagctagagaagtgttggctattggtccacagcctgttcctattattgaaactgctctgattacactagctcatttgtccttacaaagtgaggatattgaggttgagtgtgtattcatgatttccgctgttgctgctatagagccttctcagcgagaattaacttatgctctatttgattctgtctcaaagaggctcaattatgcttcacgaagtaagtatttggaccaactgataggtccaattcttttccggtgggttgcttgtgaagtgagcctagtttcgcttgttgaggtgaaagaaatgtttggctttaaatcggatgagccaaagaacttcattgaacattgctgctcatggttactttctttccttattctgaggggtgagactgccgatcttaattggctatccaagattttgtctcaacctttgtctgctgttataaagggatactttgtcccgatctttggattgtgcattgctgccagatatggctcagggccagaaaaggacttagcagagactgtcttatgtgaatcccttttgcagcttggtgaaatttctgagcctgagcgcgatgatctcattaaaaaacatatggtttccatagttggctttttgctatcagtttcatcttcttcacgtcagccagaaatcccacacttctccaaggaggctgtggcacactcggtgaaaacagttgttgacggatttatggatgcaatggatggtaatttggctgaaacagttgttattgataaaatcaatatattccgttcagacagggtttttaagtttctgttggcaatacatcagcaaattgcagatgctagccatcctaggcatattcgccatcggctttgtgccattgaggttttgatagatgtacttgggcatagagtggctctttacagcacttggttctatattatttgtatagtggggagttacatccagagacaaccattgcaagaccaatgctgcaatatcttgtccaagttgttggctgctttcaattcgaactgttctactgaaactgatgctgcgcttggcaagcagcttcaggatttggagccacttcctagctttgattgcttaaaagatatacaagtgttccatgcttcactttctggttcctatgattcaagagatcagtttctaaagtttgttagcagggctcctcacttgccaccagagctgtttctgctgagctcatcgtctgtggcaaatgaagcttcatcggtgcttgctgattttatttctagggctggcatatctgatgtgcatcaagtgatatttcatgtgccgaatcttactgaaaagtatcccatacaaccacatatttccaaggaggataaattgccctcggactatggcatttctgatgatattttggttggtcttctgaaacttttgaaagcttgtttgtctgatgagtcagctgaaataatagatgttacttcacggacactgaggggagttctgtcaacggcaaggggtctgaatgctctgcattgccttgattctcttgataggtctttgctgatggttcattcacgaggcataaatgctcaggtagttgaacaaacacttttgggcatggaaaaggtttctggtgtgcttgtttattatgctccctatggtatgacatttattattctctcttttttcctgccaaactttggctcgatagtttcacttgaagattcagatttatggagaactgatggtcggacttacaagcaatggctatgcaccttggtgggctcactaatttgtcattgtgatgacatcatcttgagactttgtaggagtattgcttttctcaaagttgaggttgctgaacttttgcttgcaagtgctcttgtgaacattgcgggcaatttggattcaaatgctggcatctgcagattaatttcatctatggtggaggaaaaaatattttgtgactccaatcatttgatgaagtcagtttatctgtttttggatgcgctgaatgttgtcaggtcttattatgttgcagaaaaagccagaggttgcccttcaaatactctcaaggatggtagatctgttagatccaaaagtcgatcaccaaccaccaccccatcatcctcctggaagaaggtgtactggctttcagttgattattttgtggctgccagagctgctaataggtgctcatgtgactttgcaacactaatgtatgttgagctttggtgtgaggaaaaattcaatatgctagcattaggacctccagatttttcgcacgaagagtcgctctaccgtagttttgccacatgcccatttatgtttcttgcctttttacagttgcccccacatattgatctactggttgcttcatttactcgcataaatgagctggacagcatttatgggatcacactggcgaatgagataacttcacaaatcattagatatgagcatgagggtgattggagtagtgctcttgaatatcacgatttacttgtaagatcaactcgaaaggagaaccatggcagtttggctgggacagcattgactggaccatctgatgtgccttctaaagctgaagagaagatgctgaactggcaaatgcacaaaggtctgatgagatctttgcagaagactggatgtagtcatgtccttgatgtctactgccaaggtttaagcaaccaaaaaagttgtcttcaacaagattcagaatttattgatatgcaatatgaagctgcttggagagctggaaattgggatttctcctttttcattccatactcttctcagccttctacccattcccaaagttactgccttttcaatggaaatttgcacagttgcttaagagctctgcagaatggtgattccgaggagttccatgtgaagctttctaactccaagatggatcttgtgctggctctttcaaatgctagcaaggagagcacaaaatacatccattctactgttatcaaactacagatgttagatcatcttactatggcttgggacctacgatggaaattctgtctcaatcagacatcaaagtcttatgttggaaacaaggatttttctccagttccaactgttcctacaaggatgcagatttcagatttggaactgctgaataaagagtggactttcatcctgtgtcaaacagaacgtaaccttgaccttttggaaccttttctagcattccgcagtgccgtccttaagatcttaggttctgaagagcatctcagagaacatttatttcaatctgcttcagcactccggaagggagcaagattttctttggctgcagctgctttatatgaactcaaagaacttcgttaccacatggatcatcaagctatgccaaattcttatttcctatttaagcttgaagaagctaaactgctgagagctcaagggcagcatgatatggctataaatcttgggaaatacattctaaagaaccatcctgataagaagaatgtatcagatgtctatcgattagtcggcaagtggttggctgaaacaagatcgagcaattcaagaactatcattgatgactacctaaggcattccgtagattttactgaattgcacaagtgcccagacaaaaagtacaagtctaggcagtgccgaacatatttccatctagcgcattacacagatggcttattcaaaagctatgaggaaagactttcatccaacgaatggcaagcagctctgcgattaagaaaatacaagtctaaggagctggatacactgatgaaaagacttaaaagttcatcaaagagtgaaaagactgattactcagtgaaaatccaagagttacagaaacaacttgcacttgacgaagaagaggcagggaagattcagtgcacacatgccaaatttagcgctaaaattcaaaaaagcagcaaggatgatcgggacaaattcttgaatctagcgcttcaggggtaccaacgctcactcgttgtcggtgggaaatatgatctacaagtggttttccggttggtctcactatggtttagtcttttctcaagagagcaagttgtgaaagcaatgatgaaaacaacaaaagaggtccagtcctacaaattcataccattggtctatcaaattgcttctagacttggtagctcaaaagatgcgcagggctcaacaaacttccagaatgcgctagcttctcttctgaagaaaatggccattgatcatccttatcatacaatatttcagatctgctataatgcacagcttttggctctagcaaatggtgaccgcgtcaaagacaagcaaaggagtagaagttcttttattgtagacatggacaagaaacttgctgctgaaaatctgttaaaggatttatcttcttctcatggagctttgattcgtcagatgaagcaaatggttgagatctacattaagttggctgaactagagaccaagaaggaggttcctgttgtaactgctagtattccagtcgatcctaattgtcagtatgaagaaggttcctttccacattttaatgggctagcagattctattatggtaatgaatggaattaatgctccgaaggttattgaatgtattggctctgatggtaacaaatatcgccaactcgcaaaatctggaaatgatgacctgcgacaagatgctgtgatggaacaatttttcagtctagtaaatatgttcttgcaaaatcacagagatacatctgagaggagattgagaattcgcacatataaggttgttcccttcaccccaagtgctggtgttgttgaatgggtaaacgggactgttcctcttgctgaatatcttgtgggaagtacaagaagtggtggagcacatggaagatatggaactggagactggacatatcatcaatgcagggagaccatgacaaatgacaatatggggacacatgaaaacatggcattcacatacatttctttgtcctgtaataccaggcctgtgatgcaccacttcttccttgagagattcttgcagcctgcagattggttccaaagtagacttgcttacacaagaagtgtggcagcaagctcaatggtaggatatattgtgggacttggagatcgtcattcccagaatattctcattgatcaagagacagctgaggttgtacacatagatcttggtgttgcatttgaacagggtctcatgcttaaaactcctgaacgggttccatttcgcctgacgagggacatgatagatggcatgggagttactggcgttgaaggtgtatttagaaggtgttgtgagaaaactctttcggtcatgagggcaaataaagaagcgttggtcactattattgaagtcttcgtccatgatccgttgtataaatgggctctttcaccactgaaggctttacagcgtcaaaaggaaagtgaagacattgactcgtgcttggatgactcgcaagaggcttgcgagggcaacaaggatgcagcccgagctatcctccgtgttaagcagaaactagatggatatgaagatggtgaaatgagaagtgtacagggccaggtgcaacaactgatacaggatgcagtagatgcggaccggttgtgccaaatgtttccagggtggggagcatggttatggaatctgagccaaggcaaaaatgtgcccatgaagcttttagttgatgccctcagggtgctctcccacacatacattcatactgtatgggatgggatgggttctttaattgatgccctcactcaaacagcagtagagttaatgacaagacagtggcatttggttgttgaaagattcaaagggcatgtctacatacatcaaacagctgatgcctttcgcagttgaactcgatgagaagattttcttggcgtttgcccaggcacaaacaaggttcggtgtacagtgttgagtgtttcctcaaccccctgttacgatgcaatgtagagctgacactcacaacgaaaaacatagttttttttttttggccatctgttggtgcgtgagcgtgtacattatcgtagaaagagcttttcctgtatcattatttgagcagcgcagcgccttatgtatcgctcgatttttgccccacaggcagagttttgcgttaatgagtcgttatctgcattgaaaaaaaaaaaaaaaaaaaa

SEQ ID NO: 51636 - DNA, 366 bp, Oryza sativa
  Clone ID: PAT_MRT4530_54009C.1
gctgcgaaatactgctgtggaagttgctgctgattgtgactgctttcctgtctaatggttattccatcaccgatggggcaagaagcctggtaaggtcaatggacagaaaattgagctcataacagctggtgtcacgactacagcatacgcgccacaactgcagaagctgactggaatgcaatctagcatagtagtcattgctaacccaaaacatgtcgcagagcacgatgctgcgaacgatattgacacagatccagacgctgctgctaatttggatacaaagtagcgtggcagcacttctagggcttgccgggggaaagcaaaggggaaatcccataggtgccctttccagaacgacatggaaaa

SEQ ID NO: 51637 - DNA, 266 bp, Oryza sativa
  Clone ID: PAT_MRT4530_5400C.1
gggaaaaaaacgcagcacttcaaaatccaaaatgttttgtttttttcctttgtacaagctgatggctgcctatgcaagatatcttctgggctgcatagaactcgatatatatctactgcttctacaaacaacaggcattacaaaatggaataccaccaagcagcattcctttccaggccggcagcagcagcattagagaaatgctcacaaaatactaaatgccgttacaaatgctcctgtctcccccctatgttccaaaaactaca

SEQ ID NO: 51638 - DNA, 416 bp, Oryza sativa
  Clone ID: PAT_MRT4530_54010C.1
ggggttggtgtttttttttttttttttttttttttttttttttttttttttttttttttttttttttttttttttttttttttgaaacaaccggggccaagggggggctaacacccgtttacccccgtcctatagggaaccccccctaaccagaaagggggggggacggacccggttttttccggcaaccccttctttacccagaaaaccccttataaacccccccccaaaaagctttccacaaggggttcccggggggggccccccggggccccgctccctcaaaaccccttttaagggggcccaagtcccaacgggcctttaaaaaatcacctttttcccttcccccccccacggccccgggcccaaacccccccgttaacaaaactaaaagcaaaactgggggcggtcgcccc

SEQ ID NO: 51639 - DNA, 1950 bp, Oryza sativa
  Clone ID: PAT_MRT4530_54011C.1
atggagcgggacgccgcggaggtggaggtgcggcggcggctgcgcgacgtcggcgcccgcctgagctcgcttccggacgacggcgagctgctcaggttgctccaggaagcagccaaattgttgtacagagtgaatcagtgtgaggtagacagaattcacagtgctcttatccctgttatgagagcattgattaagaaagagctactggatcacactgaccccggagtgaagctcgccgtagtgtcgtgtttaaccacgctgatcaagatccgcgcgccggatcccccttatgatgatgatgtgatgaaggatgttctcaagcttgttgttggggtcttctgtgaactggatgatgtggactgcccctcctatggaacaagggtttcaatgcttggaacttttgcaaggatacggggttgtgccttgttgttagatcttgactgcaatgatctgatacgggatatgtttcaccatttcttccgcaccgtatccaatactcatcaggagcatgttatatcctatatggaaaccataatgaagtttgtgatcgaagatattactgatatggaacaagatctaattaaagatctggcatcctgcctgcttcagaatgttaaaaaggaagaaaaagaaactcctccagcatcttttgtacttgcagagagggtaataggactctgccatgaaaagttaaagccagtgttcatcaaactacttcagggtgctcccataaccgaatatagcaatcttgttacatcatttctccaagatgctatagttgctggagataacaatgttggtgcttttatgcatgacatgaaggaagtagtgtctcctaaatcttcgaccatgatgggtaaaactataggacaaccagcagatagtggggatgagttgaaaccggaaattgtacagggaactaaagaggctcctaattcaaataaaaaagctcttgacggtagcattgttggctcgagaatcaaagtacggtggcctgctgatgaaatgttctacaatggattggttaagtcatttgatgcttcttcagaaacacacgagattgtgtatgatcatggtgatgttgtacggcaatctcttaaggatgaaaaatgggagttcattgctgaggagcaagactacaaccccgatgcatcccccgacatgctagaagaccgaagtgatgaaggaagtcttggacagccattccaggatgttcacaaagctgcaagcagccattctttcgtcatccaagagaaatacaataccgtgctaaatgaaatcggatgcatttccaccgaaaccaccggctcacttctcgtgcgcatacaaccaagaattgttgaagcattgcaactaaatcagaagaggcctgctatgaagatacaaccaagaattgctagagaattgcagcttagtctgaacaaacatgctaggaaggtacaaccaagaattgttgaagaatctcagcttaatcataacagacatgatgggatggtgcaaccaggagttgccagagaatcgcaagttaatcaaaatatgcatgttacgaagggggtacagaagcatatagccaggtacaataacaacaagcctactaaaattgaaggggccaatgtgggaacaactaaacatgctaaggtcaaaagggcagcattagcttgtgaaaatgtggttggaagggatgtctttcttaagagaattgttcgtccatataaccgtgttgcaagagctactattcaaagtcaagaccccttagaaatggtcggaggaacaatgctgggaagggagtgctacaaagtagtgatagacagtcttatatgtggagatgctgaattgttccggccgcatagaaatttgaactatattagagacgctattggtcattgcattgcatggccatcccaactaaaaattggcgagaacttcttagaagagatagctcaaacatga

SEQ ID NO: 51640 - DNA, 459 bp, Oryza sativa
  Clone ID: PAT_MRT4530_54012C.1
atggcttccagctcgcagaccaccgtgtccatggaggtggcgatgaaggttgaggggagtggtggtggtggtggtgatggggaggaaggcgaggtggtggccaagaaggaggaggaggtggcggcggcggcggcggcgatggagctcgatcttcttggcgcgctgcgagcggaggaggtcatgccggcggagaaagggaaggccgccgtcgtgatggtgggcgaggcggtggccccgtccgtggaggagagggcttctgctgtggcggcggcggcggcgaacggtggcggcggcggcggcgaggcgaggcgccggctgttcaagtgcaactactgccagcgcaagttctacacgtcgcaggcgctgggggggcaccagaacgcgcacaagcgggagcgctcccctcgccaagcgcggcgccgccgtggcggccgcggcggcggccgccgggcgcggcct

SEQ ID NO: 51641 - DNA, 420 bp, Oryza sativa
  unsure (1)..(420): unsure at all n locations
  Clone ID: PAT_MRT4530_54013C.1
atggatgggggtgggnctgggccactgacgncgncggtgcggganccagtggcgtcggggaagncggcgaagaagaacgggnagncggtgncggtgncggtagtgaaggcgnaggtgncggtggcggcagtagcggcgnaagaaggcggtgtcggcggcgaggcgggcaagggcatcagggcggagagggaaaaggccggcgatggcggcggtggcgtgggnattaggagcgcgcggcgggggagaaggcacggcggggggccgagctacaactcgagtctgtaccgggtgggggagtacgcgcggtgcatggcagcgatgaggcggtgccgaggggcgctgctggtgtgccagatgcagtgcgagggcccctgcttctacgactgcgacgccaactgcaaggcgcactaccacttctaa

SEQ ID NO: 51642 - DNA, 354 bp, Oryza sativa
  Clone ID: PAT_MRT4530_54014C.1
atggtggtcatgacatccaaggatgccgccatcgctcatctaaaaaaagatgtagttttcaaccagagaagctcatcgagaaagggagagggtaaccctcgacaacgccccaaggaggttacgaagcccgaagacgtagccgctgccggcctggtgaaccaccgactaggctttcgcctaggaccctacacccttgactgtagatcgccgtctaccaactcagaaccccccacacagacaaatggcagcacgcagcatccaccacaccgcaccgacgcccctccgtcagctgacttcatcgaaccaccacccctgagagctagcctagaacccctccgttccaccacccgctag

SEQ ID NO: 51643 - DNA, 376 bp, Oryza sativa
  Clone ID: PAT_MRT4530_54015C.1
atggaggcaattgctgagaccctagcgagctccgtgcggcatgcttcgggccggacgggtggggggccggggggaagggttggagaccacgcgagggcgtgggggcacaacgcgccaatgcacttgcgaaccatatcctccgcacgtgagaggcttcgtataacatggcttgatgaagtgtgtgcatcctctggagggtatgctccccctagtagaggcgtgacagaggcagatgtgacgctacgacaccgtcatgcacaatggcgactatctagtgacgacggtggcattggtggggctctaacgggtggacaccgggaagcgccggcagatccaaaggtggctgcgacgctcgagggcgcgtacggattcggca

SEQ ID NO: 51644 - DNA, 396 bp, Oryza sativa
  Clone ID: PAT_MRT4530_54016C.1
atggcttcttcgtcgctgctccgatccgccggcggcgcgctccggcggtggatccctcggcgcctcttccccagcaccagctaccgggtttggttcgggaggagacaatctggctatgaacaggcgttcgcggagagcccgcggcggcgccatctcggctccgattgcggcggaagtaccgacgacaatcagggccgggactcaatggatgaattgttgaaatgcaaaaggcaattagagaagaacaaggagggagcttttaggcccgctgacattccagaccatgaaagcaagaaagacgagctctatagaaagatgagatcgacttttgacaagctgtgccactgcttagatgagcaggaacatatacttcgagaaattgaagatcaagtttga

SEQ ID NO: 51645 - DNA, 843 bp, Oryza sativa
  Clone ID: PAT_MRT4530_54017C.1
cggcacgaggccccaccaaacgtctatgctgtgacgaacaccaccaccatggacgccaccatggacgccaccaccaccgccaagcgcaagcgcccagccgcctccgacatcgccgacgacgcccccaccaccgtcgacgaggtctccgacgccgaggtcgaggagttctacgccatcctccgccgcatgcgcgacgccacccgacggctcggcgcccgccctcccccgccgcgcgcgccggcgtggcgccccagcttctcctgggaggacttcgccgacgcgccgcccaagcaggcgccgccgccgccgcagcagcccgccgaccacgagcgcgtcgccgagaacgccaccccgccccggcgcccggcgcccggcctcgacctgaacgtcgagccgccgtccgacgcgccggccacgccgcgctcggcgcgcgccccggcataggcgcgcgccacgaggaaacgcggcgcgtcgcgcatgcgggtgctcacggattacaactactttgctagctagaagcagctagctgcagtgttggattgatccatccatggcgctgccttgtcctccttgtgtgtgaacaggtgagacctggttaatcaatcgctcttgctgggaagaaacaatccattattggtcccatcatggagatgtactatcatgtaccaagacaaaatgacgggtttaattaattaccccctatattattcgttctgtaattcagtatatgtcattgttcattagctagtgaccacttgttaaccttgacgggactgggttttattttctattgttatttcttcccttttctttggaatgagcaattgggcatgatcttgtctt

SEQ ID NO: 51646 - DNA, 417 bp, Oryza sativa
  Clone ID: PAT_MRT4530_54018C.1
caaaaaaaccatggaggtccatattttttcccccatgggtaaaaaggcccccggccaaaggaaagcccttgttttttaccacccccccagggtcaaccccccggttggctttagagcccaagggcccggttctgggggccctgggaaaccctacccggggggaaacccccccggccccagggggggggcccccgtggaaaaaccccggggggcccccccccgggccctcaaagccccctttcgggaggcgggggaacccctgggccggggggggcccaacatggggggccccggccccccgggaaagccccccaaccaggggggggggcgccgggccccggcaccagttggggtcacccggggagggcggccggaaaaaaccctgccggagttgttcgcccacgggccccccggggg

SEQ ID NO: 51647 - DNA, 639 bp, Oryza sativa
  Clone ID: PAT_MRT4530_54019C.1
gtccggcacggactgccccgtcgcataccgattcttctccgccgtcccgctggcgtcaggaggagacacaaggcggagatgcgggcggcataaggagggagaggagagaggacggggcgcggcgagatctggcgaatgctttcgacggaacggatgcggcgagattccagtatcagccatgttctccgcagcgctcctctcgaaaccctccctccctctccgtcgtctccgccgcccgccgtcggcgtcgctctcatcgccgggggcggcgcttcgccggacagcgggtggggactgggaatccatgcctatccagttatcacaccgacaagacggtcccactggtcagagagagagagaagggtccgtagttcttcacgtggcccctcagattacgtatcagcgttcaactttaatcatccgtcttatttaattacttttttaaaaaaataaaaaacataagtcacgcataaagtactattcatattttatcatctagtaacaataaaaatactaatcataaataaattttaaataagatgggacgatcaaaatttacctagttgcaaatgacctggtgtagaaccgaacacgaactctgtggaaacttatccaacaaggctctgctagagtatttcc

SEQ ID NO: 51648 - DNA, 228 bp, Oryza sativa
  Clone ID: PAT_MRT4530_5401C.1
atgacggtggcggcgaggacaaccccggcgcctccgcgagggctcccgcggcggcgtggtgcctgcgtgtgcccctaccaaaagtgcccgctggaggctaacccgagcgccaacggcaaggaggacccgggcctccccaccctcctcgagaacaacgacttcttctccgacaactgcaacccgcacgccgccgccgccttccccgagcccggcgaccgctccaattag

SEQ ID NO: 51649 - DNA, 725 bp, Oryza sativa
  Clone ID: PAT_MRT4530_54021C.1
ctggctcggcagcggtgtcgccgtcggcgtcgccggcgccggagcaggcggaggcggaggcggaggccaccgcgcgggccacgcgtcgtccatcgtgtggcagcggaggcgtggttggtggtggtggcgaggcgaaggagacgattgggctttggggctctcgcacgataaatgttcctgctttggctctgattaatgagtggcagcagctttactcgaaatcaacggtccataaagacctggtgcatcgaccacttttggtgcaaaagccaatcacgaggagcgtggggcccgtgaacagtgcaaggcgtggaacacgggggcccacctgtggtaaaggaccctccgtagacctggttcttcatgtgccgcatgaaccaagatgcggaccccacctacggtgcaacgcagtgaacggtgggctgggcctggctgccgcccccgtccgggccagcccaaaggtggctcccaaatccgccgatgtcgcgtccttgcgagccggagtgaaggaggccctcgtagctttccattcctggccacccatcactgccggagttgaggtcgaaggcggccatgcctatcctagaagcactgccactgccggatccagtgaagtggtacagggagtcggtgaaggggtcgtgcccgccggcgggggaaagtgaatcggactacgacatgaagtccctcgtgctggagccgtccgtctccgcctcggactaatg

SEQ ID NO: 51650 - DNA, 163 bp, Oryza sativa
  Clone ID: PAT_MRT4530_54022C.1
gttcttagctgacaggaagactgctaagtcccattagtaatattttacaagaggggtgggggtgcctgaaactactgtgaagaaggggaacgactattcactatgaccctttgtgcttggattcctcatatttttgggccttggaccctctcttctttcaatt

SEQ ID NO: 51651 - DNA, 3873 bp, Oryza sativa
  Clone ID: PAT_MRT4530_54023C.1
atgccgacggcggcggcggcggccacggcgtcgctgcgggtatccaacatcccgccatcggccgtcgccgcggagctgctcgccttcttcgactccgccgtcgccgtcgccggcggcgcgttcgcctgcgagatcgcggcggcccaccgcgggtggctcagccggggccacggcaccgtccagttcggctccgccgcggcggccgctgccgccgcgggcctcgcctcctccggccgcctcccccgcttcctcggcgccctcctctccgtctccccttcccccgtcgacctcctcccgcgcgcgtccgacctctccctccgcgcggccggcgcgggcctcgtggtgggcgaccgcgtcgccgagcgcgtgttcgaggccgccgacgcgtgggacggcgtgcgcgccgaggtcatcccggggaagcggcgggtggacctgtacctggagcacgattcccagaggtacaagctcgaggtgctcttcgaggacatgaaggattgcctcgggtgcaccctggacgggatgggcgccatcttgctgcagctcaattatgcaccaagaatacacactgcaatttctgggcctgcagttaattcaaggtttatggatgaccgctttcatgcatgcaaggaggatgctaaattttcctgggtcagggcacttgattttacacccaattattcttttgggaggtgctctactcttgtccttaaactgggtaaaagtgcattggtgtctgatattctcaaaagtttacctttctcaggaaatttaggggaattgactatgaattcaatggatggtgttggtgcctcctccaatgtggttccccttgttcattgtccgagggactattcagtgccttatgaagttctgtttcgtctgaactctctcatgcatatggggaagatagtcgccaagcatgttaatgccgatctgtttaaagcccttcaagaactaccggttgatgtctcaaggagaatttttgagaaaatgcacaaattagagtctacctgctacgggcctttacaatttatccaacaggaggcttatagcatgaagagaagccataatgttttgctctccaatgaaggtgaaggtgaaggtgaaagaaaattgatgaagtgttatagagttaacataactccctccaaaatattctgctttggacctgaagaagaggttacaaattatgtggttaagcatcattctgcatatgcttctgactttgtgagagttacttttgttgatgaagattggagtaagctttcttctaatgcaatctcagctagaattgaacaaggtttcttttctaagcctttcaaaactggtctatattatcggattctctccattctaaaaaaaggattttccattggtccaaagaactttgaatttttggccttctcagcaagtcaacttcggggaaattctgtttggatgtttgcttctaatgcttccttgaatgctggaggtataagaagatggatgggccactttgagaatatccgttcagtttctaaatgtgcagctagaatgggtcagctgttcagctcctccaggcaaacatttgaagtcttacgatgggatgtggaagtgattccagatattgagatcacaactgatggctccaaatacatattttctgatggtattgggaagatatctttgagatttgccaagcgagttgcacaccacgttggattagatcctactaaccttccttcagcttttcaaataaggtatggtggctacaaaggagtcattgccattgatcctatgtcctctattgatctttctctgcgtcctagtatgaagaaatttgagtctgagagcaggatgttgaacattacaagttggagcaagtctcagccatgctatgtgaatcgtgaaattatttctcttctctcaacattgggtataagggatgaaatttttgttgcaatgcaacaagatgagatgcgtgaaacagaagaaatgctaaccaacaaagaagttgctttgtcagtcctagggaaacttggtggttctgaaacaaagacagcagtgaagatgttgctgcaaggttatgagcctagttcagagccttacctgtcaatgattcttaaggcccatcaggagaataggcttactgacattagaactagatgtaaaatacatgttccaaaaggccgtgttcttattggttgtttggatgaaacaggtgtattagaatatggtcaggtttacattcgaattacaaagaacagcaaagaacaaaaggacagtaatcaatcatatttttataatgatgacgggaaaacagccacagttgttggaaaagttgcaatcacaaaaaatccgtgtctccatcctggtgatatccgagtacttgaagccatctatgaccctgatttggtgggcatggttgattgtcttgtcttccctcaaagaggagaaaggcctcatccaaacgaatgctcggggggagatttggacggcgacctctattttattacttgggatgacaaacttattccagagaaagttgatacacctatggactacacagcaacaaggccgcgcataatggatcatgttgttacactcgaggaaattcagaagcactttgttgattacatgataaatgactcgcttggtgccatctcaactgcccacttgattcacgcggaccgttcgccactgaaagctcggagtcccgagtgcctccagctggcaactctgcattccatggcagttgacttcgccaagacgggagctccagctgaaatgccgcgaacattgaggccgagggagtaccccgacttcatggaacggtgggagaagccgatgtacatctccaatggtgttcttggcaagctctaccgatcagcgatgggtcacatggagaaatcaggagattcaggagctctctcatcatcctcagcacaaccaagccccacatacgatcctgacctcgaggtccctggctctgacgaattcctgcaagctgcagaggagtactacgagctgtacgaggagaaactgaccacgctgatgaactactaccgtgcggagctcgaggacgagatcctgacgggcaacatccggaacaagatgctgtacctgaagagggacaacaagaggtacttcgagatgaaggaccggatcgtcgccgccgtcgacgccctgcacagggaggcgaggggctggctgctgagctccaggaaggaagaggacgcgtcgcggatggcgtcggcgtggtaccgcgtgacgtaccacccagaccgccgccgcgggaagcggttctggagcttcccgtggatcgcctgcgacaacctgctggcgatcaaggcgtcgagccagctcaggcggcggcggcagaaggacgatgactccaccgcggtggtgcagatggactgcagcgcctgatgtggcagaggattctctgactttgagtcactgacatgtgggcctgctggataagggatccatgtgtcagtgacaagttagagggaaataaattagaggttctctgacgcgccgtcctaagtgaactttcaactgcacagttcattgctgtgcgcctgtgcctgtacgctgtacaaatctggttcgactaatcttagctgagctgaacagcagagctccggctcgcaacttggaagaggaaagagtttgatgatgaacacctacgtagagtaaaagttcctcttcctaataaaagagtcttagtgctgatctaccggtaaggtggaggcttccatttcttgttttctgcgaaggaaagaaacttaggatgtgtttagttcacacaaaagttgaaagtctcgtggctagtgctcgctctctcgctccctcgtgccgattcctgcagccctcgagactagttcc

SEQ ID NO: 51652 - DNA, 528 bp, Oryza sativa
  Clone ID: PAT_MRT4530_54024C.1
gtggaggagatcgcaatgcgcgtggaggactggacctggtcgatcgtgatcctagtcgcgcgggagatcacgtgtgagcaagtataaaccagggaacgacggcgagtgagagatactcaaagcaggcaacggcagtgagctgcaaggattggtgacagtcacaagcacttttgatttgatccgtgatgagtcgtcctcgctcctcagatcaacggcttgtggatgaatcatccgacatgatgattttttttggggggcgcaacacaaaacctgcatagctattggcactttgacaatgcaccaaaacatggtgggtctgtgatgggacatgaagtggttgatcacaacagagaagcacgtcacttgagattataccaatactatttttctgataatcctacctatggcccagttttattcagacgcaggaatagaatgagcagacataaataatgaggcataagtaatggagaaaaaaacagagacatgctcattctattcctgcgcaatcagttagggtttgtgggg

SEQ ID NO: 51653 - DNA, 961 bp, Oryza sativa
  Clone ID: PAT_MRT4530_54025C.1
gcaccacggctggtagtagtactcttaccctcttgcattagccttttccttcatcatacaatttatcttgagaaatcaagctgtacctccacaagttgacatgtcgacggtgacctcgtgcaccttcctgagcatccgccccacggtgagctctgctggcagtctcttatccaagaaaccggcagcgtttgtttcccttgcgtcggagaggaaatctaggcctctttcgccgtgcttcgcaattagctccaacaaaccaggggacccaaaaatagatgtgtcgccattcagcatttcacccgttgttctggtgaacccggtgccggtggacggcgagcggtggcaggtggcggagaacaaagatgaagtgagcctgtggttcgacgtgccggggctttctccggcagatctgatcgtcgagatcgacgaggacgtgctcgtcatcaagaagaagaagaaggcgagcccaaagagcaactacaatactcctacttccggtgccattgcagatcatcaggaggccaccgccgacgagttcagcggcggcgggatctacgcgcggctgctcctcccggcggggtacagtagagagggtgtccaggcaaagctcacctccggcgagctgaagctcaccattggcaaggtcaaggagagtgtccgcaggaagatcaatgtcgatatctctgtcaagtagaattcagtgagcttccatggaattcatatatggtcatctgtgatgaaggatcggagcaacggtgcaagttatatcttgcctaagattctagctcatatatatatcaataactggtccatgatctgatctctctctctctatgtatacatcctttgctgttttcctaaggttgagtatgcttatgtatgcaagctttattccggctgcatcctaataaataaaatgatcatctttgttgtgctttcaaaaaaaaaaaaaaaaaaaaaa

SEQ ID NO: 51654 - DNA, 411 bp, Oryza sativa
  Clone ID: PAT_MRT4530_54026C.1
aaaacaaacaaccccaaactgtttttttcacaatgtttgccgttgacaatggaaagagtaatttaggtccaaggggatcattggcggggggaacaaaaaattggttgccccacaacccccaccagggggcccaacagggggcgctttccgtttttgggcgggggaaaaagtaaaacctcccggtgggaagggaaactgaattatttttgcaaaccatgatgatgagggatgggctccttaggaccccccccccccttagggttttggtgttcccattttggccactggaggggtcactctgaatggctttaatccttttgggtgccctggggggaatcctaataattgaccctggacttggacttggaaaattcctcctggggggcctccttttccttcttggggggggct

SEQ ID NO: 51655 - DNA, 288 bp, Oryza sativa
  Clone ID: PAT_MRT4530_54027C.1
atgacgtcagcggacgtagagcgcgacgcggcgaactcaccggtgaccaaagaagcggcggaagatcaacggacgtcgacggcgacgaggaaaggcggcgcagatcttcggcttgacgacgacgacgatgctccggcggtcaatagcgacggcgaaggggcggacaagaacggcgacgcgatggcgacaacgatggcgatctccccgagcgacggcgacgactggaacggcggcggcgcacggctggagcggcggcgacgacggcggctcgaggttacacggcgctag

SEQ ID NO: 51656 - DNA, 756 bp, Oryza sativa
  Clone ID: PAT_MRT4530_54028C.1
atgggaaacaccaatgccatctcctgcaaaccggacagcaactggaaagattctgactggatccttgacatttcagggagagtttcaaaggaggagcgcatggggctcatgatgctgctgtggcgaatttggtatgtacgtaatgggattactcatggaaaggcagcaattccggtggaggtttcccaacgttttatcatcagttatatggcatcactgttggagattcgacaacacccgaatgccaatttgattaaagggaaacatgtggttcaatatgggtcgtcaatgcctttgccaagacaatgcaagccaagtgcagaatccagctcttggataagaccacaggaaggctggatgaagctaaatgttgatggctcatattaccctagtgatgggaagggaggaactggcgctgttctcagggacagctctgggaacctaatttttgcggcttgtggtgttttgcacagaccggcaagtgctctggaagctgagatggtagattgtagggaagggatcagcatggcgctacaatggacgctgctgcccatcattgtggaaacggactgcttggagatggtgcaattgattcactctgatgagaaggccatgtccgatttggcattcctgatcagggaagttaagctccttcttaaaggaaatagggagattgtcataaaaaaagttagtcgtggtcaaagcagagactgtcatgtcttagcaaataaaggagttgcagaaattagcgagtag

SEQ ID NO: 51657 - DNA, 1619 bp, Oryza sativa
  Clone ID: PAT_MRT4530_54029C.1
atgcgccgagccgccgccgccgcggcggtggcgcccgccgacccgcagctgctggcggcggcgttcgagtcggccatcgcgtcgcgctcgccgcgcctcggccgggccgcgcacgcgcgagcgctgaggctgatcgccccggcactctcgcccttcatctgcgcgcacctcgtcaacctctactccaagctcgacctccccgcggcggcggcggcggctctcgcctccgacccacaccccaccgtggtttcgtacaccgctttcatatccggcgcggcgcagcacggccgccctctcccggcgctctccgcgttcgccggcatgctccgcctcggcctgcgccccaacgacttcaccttcccgtcggccttcaaggccgccgattccgcacctccgcgctccaccatcgggccccagatacactccctcgccatcaggtttggttacctccccgtcgaccccttcgtgtcctgcgcggcgctggacatgtacttcaagaccggacgcctcaagctggcccgccacctgtttggtgaaatgccgaacaggaacgtggttgcgtggaacgctgtcatgacgaatgctgtgctcgacgggaggcccctggagacaattgaggcttattttgggctccgggaggctggtgggcttccgaatgtggtctcggcctgtgcattcttcaacgcgtgtgctggggcgatgtacttgtcactcggggaacagttccatggcttcgttgtaaagtgtgggtttgagatggatgtctctgtgttgaattcaatggttgatttctatgggaagtgccgatgtgcagggaaggcaagggcggtatttgatggcatgggagttaggaatagcgtgtcctggtgttcaatggttgctgcatatgctcagaacggcgcagaagaggaggcttttgcagcatacctgggtgcaaggcgttctggggaagagccaacggatttcatggtttccagtgcgctcactacatgtgcagggctgctaggccttcaccttggacgcgctctgcatgcggttgctgtccgttcttgtattgatgcaaacatttttgttgcgagtgcattggttgacatgtatgggaagtgcggctgtgttgaagatgccgaacagattttttatgagacaccacagaggaatcttgtcacttggaatgcaatgatcggtggttatgctcacattggtgatgctcagaatgcacttctggtatttgatgatatgataaggagtggggagacagcacctaattacatcacccttgtcaatgtgatcacttcatgcagcagaggaggtttaacaaaggacggctatgaattgtttgagacaatgagggagaggttcgggatagagccacggactgagcattatgcttgtgtggttgacttgcttggtcgtgcaggaatggaagaacaggcttacgaggtcatacaggggatgcctatgagaccttccatttctgtatggggagctctacttggggcgtgcaaaatgcatgggaagacagaattgggaaggattgcagctgagaagttgtttgaacttgacccccaggactctggcaatcatgtactgctctcaaatatgtttgcttcagctggcag

SEQ ID NO: 51658 - DNA, 360 bp, Oryza sativa
  Clone ID: PAT_MRT4530_5402C.1
atggagcaacagacgacgagttacgaagagctcgatggagggttctgtgcttactactgcggtaccgcctcgctggtgcctcttcttgctgtcgcctctatcagcttagtcaacaacagaggtccatttcctgatttgccactggctatatgcttttcagagggtcagcctgatagtattgttcaggacattgaaaacatggttcgcttgtttatagaaaaggttttggcacttgacaaaagctttgttgacccacgttgtttattaaatcccacacaagaagcgctgatcaacagggaatggagggagtacaatcttatcatgagcaagttatggtctgcacaaccattatatggataa

SEQ ID NO: 51659 - DNA, 444 bp, Oryza sativa
  Clone ID: PAT_MRT4530_54030C.1
atgttttttcactggctggcccggcctctcgtgcccagggtttcccaaaccgtcgggggcggggttattgcgctccggcggaggttaccgtggtatttatattaccgtacccccgcggtaaggctaataaccgtggtacgcggcggcggtggcatgacagtgaggaggaacgggcccattgcaggcagcgagcacggaggaggcctagcactcggtgcgatcagaagcacaaggagagaggggttcaccgtggcaagcgagagtacagcgagggagaccaccggtgcttggtccacagtggaggaaggtgttcacctcatccacgaagaccctcaccccccaaagctcatcaccatcgatcccacgatgcgcagatccatctcgcgcgcgcgtgctcatcctgcgcgatcaaacgatcgatccaactgtttgcattcgtcgtag

SEQ ID NO: 51660 - DNA, 383 bp, Oryza sativa
  Clone ID: PAT_MRT4530_54031C.1
cgagcaaaaaaacgatttaaaggctatagacccacctttccgaagaaagggcttcgttaaacgacaaaccacaaactgggatataaaagacgccacaaagaaggtccacaaaaacaccacaggccacagcagccaaggcaacaagcaaaccctgcaaaaccaaaaaggaaaggtttttaaaaaccagccacacaaacggaaagatagaagcccacacggacagaacaaaggaaagcagcagaaatcaagcatggccaaggacccaggcaggaaccccgaacctctttagaactggacaccctcataaccctagtacccatagccaaactcggagccgacctccacggagacccatcaccagcgcggggaggcccccggggccc

SEQ ID NO: 51661 - DNA, 167 bp, Oryza sativa
  Clone ID: PAT_MRT4530_54032C.1
cgcttttggtgaggacggaccacaacgagccttacgtggagcttcaacagtatgctcctgctgacactgcgtgctatttgcctgggacaagatctagtttatctggcctccggtgcgagagtctagctgcaagaagcgattgaactcaaacatggcgatacttgcat

SEQ ID NO: 51662 - DNA, 463 bp, Oryza sativa
  Clone ID: PAT_MRT4530_54033C.1
gttgatcgtcagatgcgttaacatatactccgctgaggatcgctctaattccgatttgaggatgtagaaaaggatactgatgttgatctagagctgatcacatcacgatgtgccaatgagcgaaatgctagatggtcgttcgagatccattgagcactaccctatacacgagacggtatgatatacactttatactactttacttactagctgatgcgcgtccgcacaccactagcaccagtcgcatatatttaccattcactggccggcgcatgagcatgactatggcatctgtctatcgtacgactcaagatgaattaatattaaacgcgcattatatgcctacttatctctatgcaacatggagatattagtgatcactgtgagttaacacattactggggactcacgtgcaacactctagatagactggctcttcatttgaatgaagacatcgaatgtc

SEQ ID NO: 51663 - DNA, 687 bp, Oryza sativa
  Clone ID: PAT_MRT4530_54034C.1
atggaggtcgaggggatagtgaagctccgaccgctatacgcatcaaggcgtggggtgccaggagcagcacttcaaccttgggtttggtttatgccgagctttacaaccaacgagagagagagccgagagaagagagaggagaaggcgagcggggcggcggctctccggtggctggagggcggcgacgtcggcgtccacgcgtgttcccgagcaagacatacccggggagggcggtggctggcggagagagtgaaggagttggccggaacggcgcagtcaagagcttgtcttcggcggcaaagagaggtggcggtggtggttgctatggggtgggggagaaggggaaaacgggaaaaatggaatcaactcgtcgaggcgaactcgatggcgcgatggtttggcttgcgaagctccggtgagggagatcgggtggtggcggccatggggaggagagagaactggacggctatttataggggtgagaggcggtggtgagaggcggttcggaggaggagatcgagaagacacggcgacggtagcgtgaagaaaagaatgacggcggccggcttcgtttgcttagcggcgacggaagaggagttggcggcggcatgcgccgtgcacggcacgcgcaccaggaggaggaggcggctcggctggtggtgtgggctggtttgggccggcttggct

SEQ ID NO: 51664 - DNA, 246 bp, Oryza sativa
  Clone ID: PAT_MRT4530_54035C.1
ggagaaggaacaacataggattagacattcacaaagtgaagggcataaacccacaaatcccttaaaaaggggcacgagcgggatcggataatgacactaagagcaacaggaacaaaaggatagtgcggtgacttcgtttggtcgagcataggaacaagtcccagcctatgtgacgatagaaaggggagggggcaggttgactgttttcttatcgaacacaagctacatacctgccagttattggga

SEQ ID NO: 51665 - DNA, 282 bp, Oryza sativa
  Clone ID: PAT_MRT4530_54036C.1
atggagagaataacgaactccacctcgaagttgtcaaaggagttagaagaagatccttacacacattgccattttaagatcaagaagggggaggataaggtggagccagccgccggtggatcccgcggtcgccagcttctgcttgggcggctgcaccggcgaggcggcagccagcagcacccgtcagatgcagggcagcagaacgggccggccatgttcggcctgctaagtcgctccagttgcgtggagctggagcccattccaagtctccgtccggtgtag

SEQ ID NO: 51666 - DNA, 229 bp, Oryza sativa
  Clone ID: PAT_MRT4530_54037C.1
gcaagaaagcgtggggtttcttctccgaggttatagttactctttggacatttaagttcattaaagtgagctggtgggattgccgttctttccgcctctttacctgtaaagtaaattttggtgcttcgagaaacatgtcactactgttgtacttcggtgtaatacaaacaggccaaccctaaagttgcagcgaaatctttgttcttttcagaggggaaaaaataataat

SEQ ID NO: 51667 - DNA, 744 bp, Oryza sativa
  Clone ID: PAT_MRT4530_54038C.1
atggatcttgacaagtccacctcaaccaccgcgtctttgaagaaattgtaggacgacggcgccctccctggtcgcgggaccatgcagagggagacaggaggtattgaacccgaacccatcttgggccatatggttgtggtcgaagattatatttcttgcggttttcttcctccgccttccgaatttcttcttctcgtcttgaacttctatggcctttctttgcttcatttgaaccccaactccattgcattccttagaatcttttcttatatctgcaaggcctacattggggtagagcccttccttgatctcttccgcttttactatgacttgcgtcggatggaacccaacagtgtatctggatgtgtcggattccgacttcgggattgcctgaagtcgcgttacatccccttccagtgcccctcttcttgcagcaaatggcgggcgagatggttctatcttcagatagaaaactcggatcccgtccttgttgtccctgaagaacaactagacaaaatcccagagtggactgccaaacccgccctgactccctctctccggtctttcatcgacatcatcgatgacctctgaacacaggggttgccagggtacgaagtcgttgccgactttgtaggtaggcggatccaaccgctccaggcctgcgcccatccagcctttgactactctgtgccagaggacgcgatccgagtttctcctcggggtattttttcttgtatttcgaat

SEQ ID NO: 51668 - DNA, 304 bp, Oryza sativa
  Clone ID: PAT_MRT4530_54039C.1
tgtttgttttttttttgactttgggtatttttttttttttttgcttttggaaccaccccccttgtttaggttcgggaaacccaaaaaaatttgcttccggaacacacgccttttcttttcagctaaaatcctgaaaagggttacgcttctacttccacccgaaacaactgggaggcctggaccccctttccaacaggggtaaaagtcgccgtttccctaggtatgaagggcggatgcacacccgaggggatcccccggcccttgctttctttagggctcttattttgacgacagttccgaaaag

SEQ ID NO: 51669 - DNA, 1209 bp, Oryza sativa
  Clone ID: PAT_MRT4530_5403C.1
atggagtcgcgagactcgcgatatgagagcagcaaggctataccgttaaacctgcttgaggactggagtactccacaagctgtaaataaaacaaaatcaaaccgaccgttcgaactccgaaacctttttctcgccggagccgtgcgcgcgtacggcgtgggaggttggtggcttttatgcccgtggggaatacttgtagattcatatatcatatttttttcagaggagggaggtttctgtggtgtagaatcttgcgcacaggccagtcttcctgattctttcttggccgacttagatgagttatcggacaatgaagcctatcccgaaggcgaagatgaagaggcaagaaatatggaagaagatggtgatggtggcatgccttgctgtgaatttcttaatcacgatgatcttaacagtgcctcagagcttcataagactcaacgttataacgacattatgcaacttctcggtgcaaagaagaaaaatctgtctggattttctactgcagcatcccagtttcgtgttggttatcttgaacaaactgaagtatttcaaagcacaattccatctttaagaactcatgcatgtagaattatatctgcaaaatcaacactagcagcaaggattgattccataagaggggatccaactggaaaagctgggcatagcttgttagaagaaatctgtaaaaagactgaaaagttgcaagaattaccacctgcgaagatcctaaagccacttcctgttccagattgtatgcccaaaaagaagagaggaggttgtcggctccggaaaatgaaagaaagatatgcacagactgacatgatgaagctggcaaatcggatgcagtttggtgtgccggaggagagctcattaggtgatggcttagggaaaggttatggcttgcttggacaagcaggaagtgggaaactacgtctcttagctggccaaagcagacttgctgctaaggttgccaaacgattcaaggcaaggagttgtgacaggagtgagtcaaggtcggggttaacatcaactctggcatttacaccagtccaaggaatggagctttcaaatccactggtgcacaatgaccattctgtcagtggaacccaaagcacttatttttcggatgttgggacattttcaagtatcagaggaaaagatgccatccccattcagtcatcagaaattcagaatccaggggtgtga

SEQ ID NO: 51670 - DNA, 3648 bp, Oryza sativa
  Clone ID: PAT_MRT4530_54040C.1
atgtggcagggccatggcggggcggtgcacagccacgaccgcatcgacgcgctccgcgcggtgcgcggcgccgggggcggcctcggcatgccgccgccggagaagttccggagcgggcacctgcctcgcgcggcggcgccgccgctgcgcaccgacgacggcagcgtcgcctcgggatccgacatggaggagtcgtcggacaccgaggaggtcgaggtgtgcagcggcagatactccgtggactcgtcgccccgccgcgaggacattctcaggcgcacggccgtgccccagtaccggtatgctacggttcccgggatgccgagttactactcgagcgattactcggatctgagctcgtcgagagacactgcactgccaaggacgaagcagcagcaggtacggcggccccaggcacaggtcggtagatatgttgaggaggaggagtactcggactcagctgggagctcggagttctccagtcaggtggagacacggagcaaaggtgtggcctcgaggggtgggtatgcatctgagtactctcataacggcccagcgcgaagagaagcgaacaatgcagttccgaaaacccggatggcagctgcagagaattacagccgcactgcacctttaaactcaagaacatatcaacaggataagtattctgcccatgtccctgctcaagacaatgtgaaatcttctcaaatgagaaaccctctcctaggattatctgtcataaatctggaacatttgcttcctcttgagaaaagcatgtgcgctgagcaggatggactatctgatgtacccagtgcaccgccaatacatgcttatgatcaggaaataagccaagtttctcaaaatgttgatgcaaacgtatgcgatggttcgactgtcaaaaaagaggaatataatgatgatggcttggaacctaacttgcctgagaaaagtgaaaggagcactttaaatcctgggcacagcagcaaaccatctagttcaattcctcttcgagtccccacgtttcatgccagcctgcaaaatgtgcttctacaatcagaagaagagctcatggcaaaacggacatctgagcttgttagcgatggagttgcatccaaacccaagaaaacaattggcaagatgaaggttcaagtgcggaaagtccggatgtctgtagatgtaccatctggttgcaatttctcatcattgccgatggtgaaactaaattcagttcggtaccgtttgtcaaatgtacaatccacactctcctctggatgggagtcggttcgaaggatccaaactttaccacagctacctgctaacagttccttttcaaaacatagcttagcgtacatgcaagcaagtgctcagtacatcaagcaggtatctggtgtgctaaaagttggcgtgactaccctgcgcaacagctcatcctatgaaacaccgcaagagacttactcttgccaattgaggcttaaaagtacacctgaagatgatgttgtaccgatgcagccaggatctggtgaaacacatgtcttcttcccggatagccttggagatgatttgatcattgatgtttctgattcaaaaggaaagccctgtggacgtgttgttgctcaagttgctacaatggcagaggaatctactgacaagcttcgttggtggtcaatataccgggaacctgagcatgaactcgtaggccgcatacagctatacatacactacacaactgctgcagatgagaacaacacgaagtatggctctgttgcagaaactgtggcttatgatattgttttggaagttgcaatgaaagcacagcacattcaacaacggaatctcatcttgcatggttcctggaaatggttgttgacagaatttgcattgtactatggcgtttcagatgcctacacaaagctgaggtatctctcttatatcatggatgttgcaacccctactgctgattggctcaatctggttcatgaccttttgttacccgtactaatgaagacccaaggcactgctgcattgagccatcaagagaaccgcatattaggtgaagttgaggagcaaattgagcaaactttagcgatggtatttgagaattacaagtctctgaatgaatctttgccgtcgggtttagtggaagattttagacctccaactggtttggctgcttgtgctctagaaccagctataaagctttacagtcttctccatgatgtattatctccagaggctcaactcagattatgcggttatttccaggctgctgccaggaaacgatcaagacgatacatgcttgagactgatgaatatgtagcaggaaattccgaaggcataagagtggatctggtgacctttacaacagcttaccagaagatgaaatcattatgctgtaatctacgtaatgaaatctttacagacattgaaattcataaccagcacatacttcccagttttgttgacctccccaatttagctgcgtccatctatagtgtggaactctcaaatagactgcgtgcttttcttgtggcatgccctccaactggcccttcatcacctgttgctgatttggtgattgcaactgctgactttcagaaggaccttgctagctggaatatatgcccaattaaagccggtgttgacgcaaaagagctatttcatttgtacattgtcttatggatcgaagacaagcgcaggacgttgctggaaaattgcaggatggataaggttaaatggtcaggagttaggactcagcatatgaccacaccttttgtggacgagatgtatgatttgctgaagaatacattgacagagtacgaggttatcatttgccgatggccagaatacatatttgttcttgagaatgctattgcggatattgagaaagcagtgatagagtctcttgaaaaacagtacggggatgttttggctccacttaaggattgtattgccccaaagaaatttggtctcaaatatgtgcagaaactcacgaagcgcaattcagttggcccctatactgtacctgaagatctgggcattctcctgaatacaatgaaaagactattagatgttttgcggccaaggattgagagtcatctgaagtcatggagttcttgtatgcctaatggaggaaactctgcagctattggggagagacttagtgaagttacggtaacactgagggccaaattccgaaactacatgcaagctgttgtggagaagctctcagaaaatactcgcatgcaaaatactacaaagctcaagaagatcattcaggattcaaaagaattggtgatggagtcagatattcgaagcaggatgcaagcgttgaaggaccaacttgttgaggcaataaatcatgtacacaaggtcactgaagtccatgtgtttgtagctatatgccgaggtttttgggaccgaatgggacaggatgtcttgagtttcctggagaatcgcaaagaaaacagagcctggtacaaaggcgcacgtgttgcagtatctgtgctggatgatacatttgcatcccagatgcagcagctgctgggtaattcgatccaacagaaggagctggaaccacctagatccatcatggaagttcggtcgatcctctgcaaagatgcaccccgacagaagaactctagcttctattactga

SEQ ID NO: 51671 - DNA, 1578 bp, Oryza sativa
  Clone ID: PAT_MRT4530_54041C.1
atggcgctgctctgcttcctgctcgacatgcggaacatcccccctccgctcctccacctcctcaagcagtgcctactccacctcgccaacctctacgccgccatcccctccgccgacctccccgaccgcctcgccctctgctacgtccaccccgccgcctcctcctcgcctcctcaggacgcagcagaacagtgtattacagtggagtttgtattgctggaaacaggagctgcattcgtatgtgatggtgtttctgaaaattccaatggtttcatagacacaatttgtgaccttgaaaactgtgtggtttatgttacctatgttaatccagaccatattgaacagatatgcaggtgccatggtcgccctattgaccttgctaacacaaataaggcaaaatggatgtgcccaataactagccgacagctcacagcttctgatgttactgatactgctgtgaaaattggggaacagacagtactgtttcttcctgactcagaaggcgtttcaagcttgcgacgagcctcatcctccatttcttttgacgtgattgagcgcaccaatttagcctcactaaatgaaggactcataattgggacgcctcatattgtgattcccagctctaatgatgttgaggttgctcttgatgatgagtgctcagatcagaacacccaacgtaggtctaacgttttctatggtctatgtgagacacttttcaagcttgatcagggacttgtgtgctcctcaaaatgcaatactgaaacgatgaagataggatcccttgagtgttattatcttctccaaccatctgagaagggaccgatgcttctgaggaggcttgctggatctgaagagatactgcctctcccagttgtgagtcgaccttgcaactctaccggtaccaaggaagtccagaatttgatcgaaacctcattatctaagattgtgctgaaggattacaaccctctacaacatgagagaggttttcactcgagactgaattgtctggtgaaggatagccttcaatttggatcaattgctccggcttgtggcgcgaaggatcctcatcatcttgattcgttgagtgaaccacaaatattgacattccggggtccagaggaaaacaaggtgctgaggctgtgtagggaggagggtggagatatccaatcgttcagcttcagcgagccacaggcagcgtcaaaggagaaggcgtcgcccaggcccagcatcaccgaggagtgggaacagcttatcatcatcgacgacgacttcaccagtgccgtcacatgttctacttctagggccaaccccaagctgccgtccccagtgaaaccgctgggcctggacgacaagacaagcaggattctggagaggctggaagctcccagggcaaagaagcagagggctaccaccagcacacgcaccggcaacagcaacacaactccaccaccaccagcgtccagcattggagccggaacacagatcaagaagccattgctgccatttgaacccagcgcaagccaacctctgagacccaccttcaacaagctcaggcggaagcccactgcagctacctag

SEQ ID NO: 51672 - DNA, 228 bp, Oryza sativa
  Clone ID: PAT_MRT4530_54042C.1
gtgtttgagctgggtatcatagtgcattcgattatcatcgggatatcactaggtgcatccgagagcccaagcacgatcagaccgctcgtggccgcgttaacatttcatcagttcttcgaagggatagggctgggaggatgcattgttcagtctttatgtgcttcatgtgggagtgtgggactactcacaaaacggaaatgcttcaagacaaaagaatatctaccatga

SEQ ID NO: 51673 - DNA, 1425 bp, Oryza sativa
  Clone ID: PAT_MRT4530_54043C.1
atggcgtcgttcgcggtgtccggcgcgaggctcggggtcgtgcgggcggggggcggcggcggcggcgggggtggcccggcggcgcgatccggcggggtggacttgccgtcggtgctcttcaggaggaaggactccttctcacgtggcgttgtgagctgcgcgggtgctcctgggaaggtgctggtgcctggcggtgggagcgacgacttgctgtcctctgcggaaccagacgtggaaactcaagagcaacctgaagaatctcagatacctgatgataataaagtaaaaccttttgaggaggaggaagagattccagcagtggcagaagcaagcataaaggttgtggctgaagacaaacttgaatcttcagaagtgattcaagacattgaggaaaatgtgactgagggtgtgatcaaagatgctgatgaaccaactgtggaggataaaccacgagttatcccaccaccaggagatgggcagaagatataccaaattgacccaatgctggaaggatttcggaaccatcttgactaccgatacagtgaatacaagagaatgcgtgcagctattgaccaacatgaaggtggcttggatgcattttctcgtggttacgaaaagcttggattcacccgcagcgctgaaggcattacctaccgagaatgggcacctggagcacagtctgcagcattagtaggtgacttcaacaattggaacccaaatgcagatactatgaccagaaatgagtatggtgtttgggagatttccctgcctaacaatgctgatggatcccctgctattcctcatggctcacgtgtaaaggctccaggtgaaataccgtacaacggtatatattatgatccacctgaagaagaaaaatatgtattccaacatcctcaacctaaacgaccaaattcgctgcggatatatgaatcacatattggaatgagtagcccgatggagtacaatgttagagcagaaaattacatgtgtcacatctcgtactttatatttattttgaaacagatggagtgcaatgttagagcagaaaattacatatgtaccattgaaattagaaatgattttgcaatcttgagttatttttctatcgaaaagcccctggaccttgatacattatcgtggttgctgcggcacggagaggagcgaggcaagcacatggaatgcaaagcagtggcgaaagcccttctaatggcctgcaacctgcccataggtagaagggagcgtgtcaaggaccgtggaggcggatctcccagatctatccccaaatccatggcaggagaggacggcaacgatgggatattgaatcgttccgctgaggcacgcgccatcctcctgtcagggctggtggacctcgtcgccggcgcgagcagcatggccatcggcgagtctgcgtccatccacgcgtaa

SEQ ID NO: 51674 - DNA, 3288 bp, Oryza sativa
  Clone ID: PAT_MRT4530_54044C.1
cttgactccccccactcctccctcgtgctgctcctcctcgtcgctcggctcgaggcgcggcatttgcggcgggagggatctgcgcgcgagtgcgtgcgggcaggcggcgggggagcacgcaccgggggatggcgtcgttcgcggtgtccggcgcgaggctcggggtcgtgcgggcggggggcggcggcggcggcgggggtggcccggcggcgcgatccggcggggtggacttgccgtcggtgctcttcaggaggaaggactccttctcacgtggcgttgtgagctgcgcgggtgctcctgggaaggtgctggtgcctggcggtgggagcgacgacttgctgtcctctgcggaaccagacgtggaaactcaagagcaacctgaagaatctcagatacctgatgataataaagtaaaaccttttgaggaggaggaagagattccagcagtggcagaagcaagcataaaggttgtggctgaagacaaacttgaatcttcagaagtgattcaagacattgaggaaaatgtgactgagggtgtgatcaaagatgctgatgaaccaactgtggaggataaaccacgagttatcccaccaccaggagatgggcagaagatataccaaattgacccaatgctggaaggatttcggaaccatcttgactaccgatacagtgaatacaagagaatgcgtgcagctattgaccaacatgaaggtggcttggatgcattttctcgtggttacgaaaagcttggattcacccgcagcgctgaaggcattacctaccgagaatgggcacctggagcacagtctgcagcattagtaggtgacttcaacaattggaacccaaatgcagatactatgaccagaaatgagtatggtgtttgggagatttccctgcctaacaatgctgatggatcccctgctattcctcatggctcacgtgtaaagattcggatggatacaccatctggcgtaaaggattcaattcctgcctggattaagtttgctgtgcaggctccaggtgaaataccgtacaacggtatatattatgatccacctgaagaagaaaaatatgtattccaacatcctcaacctaaacgaccaaattcgctgcggatatatgaatcacatattggaatgagtagcccggaaccgaagataaacacatatgctaattttagggatgaggtgctaccaagaattaaaaagcttgggtacaatgctgtacagataatggcaatccaggagcactcttattacgcaagctttgggtatcatgttactaacttctttgcgccaagtagccgtttcggaaccccagaagacttgaaatctctgattgataaagctcacgagcttggtttgcttgtacttatggatattgttcacagtcatgcatcaaacaataccctggatggtttgaatggttttgatggtactgatacacattacttccatggtggaccacggggtcatcactggatgtgggattctcgcctgttcaactatgggagttgggaagttttaagatatttactgtcgaatgcaaggtggtggcttgaagaatacaagtttgatgggtttcgatttgatggggtgacctccatgatgtatactcatcatggtttacaggtggcatttactggcaactatggcgaatattttggatttgctactgatgttgatgcagtagtttacttgatgctggtgaacgatctaattcatgggctttatcctgaggctgtagccattggtgaagatgtcagcgggatgcccacattttgtattcctgttcaagatggtggtgttggttttgactatcgtttgcatatggctgtaccggacaaatggatcgaactcctcaagcaaagtgacgaatattggaaaatgggtgatatcgtgcacaccctaacgaatagaaggtggtcagagaagtgtgttacttatgcagaaagtcatgaccaagcactagttggtgacaagactattgcattctggttgatggataaggatatgtatgattttatggctctagacagaccttcaacacctcgcattgatcgtgggatagcattacataaaatgattaggcttgtcaccatgggcttaggaggcgaaggctatcttaatttcatgggaaatgagtttgggcatcctgaatggatagatttcccaagaggcccgcaaagtcttccaaatggctcggtcctcccaggaaacaactacagttttgataaatgccgtcgtagatttgaccttggagatgcagattatcttagatatcatggtatgcaagagtttgatcaggccatgcagcatcttgaggaaaaatatggattcatgacatctgagcaccagtatatatcgcgcaaacacgaggaggataaggtgatcatcttcgagagaggagatttggtattcgtgttcaacttccactggagtaatagctattttgactatcgcgtcggttgtttaaagcctggaaagtacaagattgtgttggactcagacgatggcctctttggtggattcagtcggcttgatcatgatgctgagtacttcactgctgactggccgcatgacaacagaccatgttcattctcggtgtacaccccaagcagaaccgccgtcgtgtatgcacttacagaggactaatgatcagctctgatcattgggggaacaactcaagggagttggtggtaatgacgccggaatacaactcaagtgaaaggtgaaaagaaaggctgccctgacgatgtgatttgaggggcttgtgtttcatcgccaatgccaggaagatgaggtagaaaagcctactgatgagctcctgttttcgagtgactcgtgaaggaaatagaccagggtgaacggcttttttcagagctataccaaacccatcctatgttgcgcattcgctgtagttttgtacataacgatatcggttggcatttgtatgtttatgaataatctgttcgacagaaatgtttttctccttgtatttagtgctcaaaaaaaaaaaaaaaaaaaaaaaaaaaaaaaaaaaaaaaaaaaaagataacccaaaaaaaaaattattatctatctttcttaaaaaaaaaaaaaaaaaaaaaggggcggccgcccttttttttttttttttttttttcaaaaaaaaaattgaagttcataattttttccccatttgtttttttgcttcctgccaaaaaaaaccctttttttttttgcacccccccaaagttttacccacagtttgttttagtgccccagggcccagttttgggggtcctag

SEQ ID NO: 51675 - DNA, 2050 bp, Oryza sativa
  Clone ID: PAT_MRT4530_54045C.1
atggactccgcccgtagctggctccagaagcttcagccgcgggacaaggacaggggcaagccggcgtcgcccaccgccgcgaggaaggacggagcggcggcgatggccgaggatggggaggaggcgatctcgagcaccaccgccaccaaggtggcggccgccaagcagttcatcgagaaccactacaaggaccagatgaggtcgctcgaggagcgcaaggagaggcgtcggatgctggagagtaagcttgcagatcctgatgtatctgaagaggagcaaaacaatattctgaaggacttcgaaaatagggagagagaaatcatgcgctcaaggaggcacaaaatgggtgttgatgattttgaattgcttaccattattggcagaggtgcatttggggaggtgaggctctgtagagagaaagctacatccaatgtatatgcaatgaaaaagcttaagaagtctgaaatgttacgaaggggccaggttgagcatgtgagagctgaaaggaatcttcttgcagaggttgacagtgcctacattgttaagctttattgctcatttcaagacgaagagtttctataccttgttatggaataccttcctggtggtgacatgatgactctactaatgcgcaaggatacacttacagatgatgaatctagattttatgttgcggagacaattctagcaattgaatccatacacaagcacaattatattcatagggatatcaagcctgacaatttgctgttagaccgaactgggcacctgaagctttcagattttggcttatgcaaacctctagatagtagtagctttccaaatctgagtgagtttgactatgcagtggggaaaaacattaatccgtcaatggatggtgataaactattaagtagctctgctgctcccaggaggacacaacaggaacagctattgcattggcagaagaatcggcggatgctggcttattcaacagttggtacacctgattacattgctccggaggtactattgaagaaaggatatggaatggagtgtgacttgtggtcacttggagccattatgtatgagatgcttgtgggttatccaccattttattcggaagatccaatgtccacatgtaggaagatagtgaactggagaagtcatctaaaattccctgaagaggccaaactgtcaccagaagctaaagatcttattagcaaactattatgtaacgcggatttgaggcttggaacaaaaggagcacatgagataaaggcacacccgtggttcaaaggtcttgagtgggagaagctatatcagatggaggctgcttttattcctgaggttaatgacgagttggacacacaaaattttgagaaatttgaggagattgctccaatgcaaacttcatcaaaggcaggtccttggagaaagatgctttcctccaaggacacgaattttctcaattttacctacaaaaaccttgaactatcagatgatcctgaacatccaggaatagctcaagtaaagaaaaagaataacaagccaacgaggcggacctttaaatcaatattgcatgaatttgctgatactgaagaggaacctcaaagcagttccttgaactcaacgccatcacaattggatcagttgcccgagagccttgagccttctcctcactctagtatctcctcagaagattcacagtcgcggcatagatagcagttgtaatctgaagtggcaaaaagggtacataatgctatccgcagaacttaacggctattcagaagacaaatttggatgtatagaaaagctcctataaatttgcttttagataggcggtggggtgttccaatagccattttcttatattggagcctttagcatttgtttaccgacaatgccgtgcaatttggtttacattggggaggggtatccgtattcttctggtctgtaaattcctggattctgtcattctatacagggttgagattcattcttcggaaaaaaaaaagcttaaaaaaaaaaaaaaaaaaaaaaaaaaacctgcagcccgggggatccacta

SEQ ID NO: 51676 - DNA, 178 bp, Oryza sativa
  unsure (1)..(178): unsure at all n locations
  Clone ID: PAT_MRT4530_54046C.1
aaacgtggcnnannggaccacaaagaaagattatacgatttgggtgaaggacaaacaccggcaccaatggaaactcttaaaaatcaagcccagtcacggtcacaacaagaaaacccgctccaacacgtacaaccaccattatgctcacaaaccatggctttttggaggagggttgccg

SEQ ID NO: 51677 - DNA, 2006 bp, Oryza sativa
  Clone ID: PAT_MRT4530_54047C.1
gccccaagcaacctggtaacgacatcgacgtgtacctaagaccactggtcgaagatcttaaacagttgtggaagaaggaaggtgtccccgtgtgggacgaggacaaacaggaggagtttaacctacgagcgctgctgttcgtaaccatcaacgattggcctgcacttagcaacctatccggacagtccaacaagggcgggaaaacagtgtttgctatggttaaagatcttaaagtagtgttcggaaaggggcctggaagccagcatatagagagcgaagatggtcacgcggtgatgtggaaaaagaactctatattttgggagttaccatattgggaattcttggacgtacgccacgcaatcgacgtgatgcacctcactaagaacctttgcgtaaaccttcttggcttcctaggtgtatacggaaagtcgaaagatacactggaagcacgtaatgatctgaagcatatggaacaacgcggcgaccttcacccggaaccaaaggagaaaagaagccattacttgagtcctgccagctacactcttagcaaggcagagaaggaaagtatgtttgaatgcttggagagcataaaggtaccgtctggatactccacgaatatcaagcgaataataagcacgaaggagaagaagttcataaacctaaagtctcatgactgtcacgtgttgatgacacaactgctaccagttgtaataaggggtatccttccagacaatgtccgggcaacaataacaaagctatgtgcattcatgaacgcaatttcgcagaaggtcatcgatccggatagattagaagcccttcagaatgaagtggtgcaatgtctcgtcagttttgagttgatatttccaccttcatttttcaatataatgacgcatctgctttgtcaccttgtgaaagagatccgtattctcgggcctatgtacctacacaacatgtttcctttcgagaggtacatgggcgttctgaagaagtatgttcgtaaccgtgctcgtccagaggcaagcatcgccaagggttatggaacagaggaggtcatcgaattttgcgtagaatttatcgaagaccttcgcccaatcggggtacctgaatcacgccatgaagggagactacggggaaagggaactctcggaaggaaagcaataatgacggtagacaacaatttattccgtaaagcccatttcactgttctgcaacactcttcattggtagctccttacatcgaggagcacttggctctagttcgcgccaggaacatcggtaagtccgatgcatggattacacggcatcacattgatactttccccgcgtggctacgacaacatctcatgggtaacgagtcgatcaaccaacaacttgccttcctggcgaggggaccgtctgggtctatcgcgacattccagggatatgagatcaatgggtacacattctacacgagagcccaggacatgaagagcacgaaccaaaacagcgctgttcgtgtcgatgccatgggaaacgatggaacaactgccacatattacggtgccatcgaggacatatgggaacttgactatggtcctctcaaggttcctctgttccggtgccaatgggttaggttgactggtggaggcgtaatgattgatgacagtgggatgacaactgttgaccttaacaaggttggatactcggacgaaccttttgtccttgccaatgatgtaacgcaagtctttttcgtgaaggacatgtctagcaaaggaaagaagggcagagggcctgatgagcctaagcgtcaagtggttctcccaggcaaaagaaaaatcgtcggagttgaggacaagactgacgaggattacgatcagttggatgggcaaccccctttcacggtgacgattgaccctagcatcctcctatcaaatgaagacaccccttactcacgcagcgatcacaaggagggaacaatagtgaggagaaagtacgtgcggtcaaccgtcaccgccgatgtaatgccg

SEQ ID NO: 51678 - DNA, 4690 bp, Oryza sativa
  Clone ID: PAT_MRT4530_54048C.1
atgaagaggaagtacataatgatgccgattattattcaaggccccaagcaacctggtaacgacatcgatgtgtacctaacaccactggtcgaagatcttaaactgttgtggaaaaaggaaggtgtccccgtgtgggacgaggacaaacaggaggagtttaacctacgagcgctgctgttcgtaaccattaacgattggcctgcacttagcaacctttccggtcagtccaacaaggggaaggttctgtacatgggtcatcgtcgattccttgctgcaaaccacccggtacggaagaaaggcaagcactttgaacataaggcggaccaccgtacgaagcctaaacatcgcagcgggaaaacagtatttgctatggttaaagatcttaaagtagtgttcggaaaggggcctaaagttgaaagtacactagaagcacgtaatgatctaaagcatatggaacaacgcggcgaccttcacctggaaccaaaggagaaaggaagccattacttgagtccagccagctacactcttagcaaggtagagaaggaaagtatgtttgaatacttggagagcataaaggtaccgtctggacactccacgaatatcaagcgaataataagcacgaaggagaagaagttcacaaatctaaagtctcatgactgtcatgtgttgatgacacaactgctaccagttgtaataaggggtatccttccagacaatgtccgggcaacaataacaaagctatgtgctttcatgaacgcaatttcgcagaaggtcatcgatccggatagattagaagcccttcagaatgatgtggtgcaatgtcttgtcagttttgagttgatatttccaccttcatttttcaatataatgacacatctgctttgtcaccttgtcaaagagatcagtattctcgggcctgtgtacctacacaacatgtttcctttcgagaggtacatgggcgttctgaagaagtatgttcgtaactgtgctcgtccagaggcaagcatcgccaaggggtatggaacagaggaggtcatcgaattttgcgtagaatttattgaagaccttcgcccaatcagggtacctgaatcacgccacgaagggagactgcggggaaagggaactctcggaaggaaagcaataatgacggtagacaacaatttattccgtaaagcccatttcacggttctgcaacaatcttcattggtagctccttacatcgaggagcacttggctctagttcgcgccagaaacatcggtaagtctgatgcatggaatacacggcatcacattgatactttccccgcgtggctacgacaacatctcatgggtaacgagacgatcaaccaacaactggccttcctggcgaggggaccatctggattaatcgcgacattccaaggatatgagatcaatgggtacacattctacacgagagcccaagacatgaagagcacgaaccaaaacagcgttgttcgtatcgatgccataggatacgatggaacaactggcacatattacggtgccatcgaggacatatgggaacttgactatggtcctctcaaggtccctctgttccggtgccaatgggttcggttgactggtggaggcgtaatgattgatgacagtgggatgacaacggttgaccttaacaaggttggatactcggacgaaccttttgtccttgccaatgatgtaacgcaagtcttttacgtgaaggacatgtctagcaaaggaaagaagggcagagggcctgacgagccgaagcgtcacgtggttctcccaggcaaaagaaaaatcgtcggagttgaggacaagactaacgaggattacgatcagttggatgggcaaccccctttcatggtgacgattgaccctagcatcctcctatcaaatgaatacaccccttactcacgtagcgatcacaaggagggaacaatagtgaggagaaagtatgtgcggtcaaccgtcatcgccgatgtattgccgcgtcgggccgagcgcaaccgacagcggaaccgcgcctcgcaccagcaccggtccggagcgcaccgacccacgccccgccgacccccaccaacggcccgcaggcagaagagggccgaaccggcgacaccacgcacgcaggaccaccgcgccaaccgccgccccgaagccgccacaccgccgttaacgaacgagaacgagaacgatcgaacgaacgagagcgagaacgaacacgtcaacgtacgttgccgcgacaacgtgaacgagaacgagaacgatcgaacgaacgagagcgagaacgagaacgatcgaacgaagacaaacgagaacgagggaacgaacgtgaacgagctagggaacatggctgaccgcgatgaggaacagatattgtacgatacaatcgcggagggaagcagccagtactggaatgaagaagaggggaacgaggatccaaaccagtacttgaacgaggaagggaacgtggagagggatgcggaggggaagcagcaggggcacgtggaaagggatgtggaggggaaccaggaggaggaggctagtggtagtcaaccctccgttggacagaagagggcacgcgggcaacgaggtgcagcgaagaagcttgagggtcggcacatcataacggaagtggaagaagatggacgtcctagtgccccggccgaagccgccaagaactatgtacgtcacagcggttgggttgtgcgggataacgtgcctgtcagtacggtgtactggcgaagaacaagggcacgcggagatcatgagagctttgtcccagattcggagaaagagatgctgtggatcacaatgctcgagacattcacccttcccgcgggtcaacaagggcaggcgatgatggaaagaaacaaagaaaatgccgccaagaagaagtaccatcaccacttgaggtcaggcggctatagcatcgcgatgtcgaagtgggaggagatggaggcaagcttgcttgagaggggtatcgaaccgaccaccgctaaatggccggatcgatcgaagttctggtactatgctcacggtggaacgatcaacccagttgatggctccttggtcttcagcgatcagatacgcgaggctgcgcgtcaactaacggacgcagtggaagcctcttctcagggcacgttccgacccgacagagagaaggacgagctgagtcggatgaggagcaagagagataccgaggcgaagattgcagatcttgagtacagggtatcgagctacgagctcagcatgcaagaggaggtggcaaggaaggttgataaacgcatggccgcacatcggtcccacgatccccagccgaccattcctcttgcaatggtgagcccttcaggaaatcgtagcagctgcgcctcaacggggcaggtggcgtcgggcatggccatcccaacggacccttcagctacttaccactgcaggccgattccagcaggatactccaaggtcgaagttgagttggtcgaaggcgcgtacgaggacctcgagttggattaccctggaggagacggctcctgcaccgtctcctcctcaggctcctgcaccgtctcctcctcatgctccagcaccgtctccacctcaggctcctgcaccgactcctccacaagctcctcgtccgacaccttccaagtcaagggccccccaagctccaccgcctgcccccacaagggcaacgaagaaggcgaaagttgacgccgccaaaaacaaggacctagggtacgactgcacgcaagaggagcttgacgcttatgtggcatcagatgtcaggagacaattgaagccttggagtccagaaaaggagattcttatagacccgagtgccagaaacttcttcaggggtatgtctgcacctgccaaggagaccataaagctatcggactatgagcgaaaacttaagaaagcatcttctggaaagtccaaaccagtccctcagcttggagagcaaccaaaccaggtgatcgagccgttggtgaccggtgaagaatttggaatacaagattttattaatgacaccgggctaactacggatcaattgctacgaggcgcaccattcggaaaggcggaagtgaaatacaagtacgaactcggtaaaccgcttgtcaagcctgagcagctgcagtccctaccgacacagatgtacaaattccatcgactgtacatggagatgagcgccaccggtagagagatgatcgaagtgaggatcagggacacggacttcttgcaaggagaagatattctctggatcaattacaagggtatctacgaactataccagctggacgccctcgacgtctctattatgagttgttggactttaatggagattaaaagggcccgacggcggggggttttcgatactggattcatcgaccctcagaaagtaaacgtcgcaatgctcgacgagtatccgcaagccacagaggacaatctcgtccatctcctgaaggcgcagcattacaagatgttcatactattgccgtacaacgcagagtatgtgtcagtgcttagtgagctcagcgtcgaacttgctacatccgtttcccggcaacagcacgatggggtggatatcgacgacggcgtggtggagcagacgacggcgtggtggagcggtgggagggcgctgccgtcgatgaggaagaaggggacaacagaggaggagcagcaggaggaaaggtag

SEQ ID NO: 51679 - DNA, 596 bp, Oryza sativa
  Clone ID: PAT_MRT4530_54049C.1
cccggggatcgcctgcccagggacaatccccgcctattggccaaagcggccaggaatctcaaagaaattaaccaagcccgcgatcgcctcaaggaattattggagctggagttaagcgctaaaacttcccagattcctaaaaaggaccagaccagcaaagctcccaaagctaaacccaaatccaagcccaaggccacatctgctgcaccttacccgccccccggcgatcgtccacctcaatcccatcaccatcatcaccagaccaaccacaaccacagttccagttcccagcaccatcaccaagaaaaccacaatcgaccctactatcgggacttaaccggggcagatttgcgttgggctaatttaaaagagaaggatttgtcaggacggaaaatggtgtctgccaatctaagtaatgcagatttgagcgacagttttttacaccaagttaatttggaaaatgccaatctttttcgggctaatcttttccgggccaatttgttggaagctaatctgcggggagctaatttgcaggaagctaatctggtaggagcagatttaagtggggcggatcctcagagtcgacctgcaggcat

SEQ ID NO: 51680 - DNA, 426 bp, Oryza sativa
  Clone ID: PAT_MRT4530_5404C.1
tttttctggtttgctttgtcataggcatttcacgtcgcaaatgttggaaaatgcaatatcaggctatcgtagcacaaattcattacttattcaaaatcttaaattgcatcttcctactaaatagagagctggagcccgcacatttgcactagcttaacagtgaatggattgcattgaccacaaaggataggatcgaaaggtgaattggctcaagcacaacagcatcaaaaataacttctcacaatcactttggtcccaagttcagtgtcaccaaaatatcatttggaacctaactgagtatgagagcatactggtgacatctgatgatgcataggtgctgccaatcaaggatgggaacaaaagcttttggatctcacttccttgtttgcctcagtatcaaagcgtatcttcttgaataattccttg

SEQ ID NO: 51681 - DNA, 729 bp, Oryza sativa
  Clone ID: PAT_MRT4530_54050C.1
atggaggcgtcttcttgggacgcccttcgcaagcagtggttccaagttgtctatgccaatgtcgtcattaccctagtacatcctattgctgcaatcggaaaatatacctttaatggtttcttggcaaggaggttggaagctcagttagatgatcaaatgattgcataccgtaaattggtgtctatgaaatcagatggttcagagaatgatatcgagtctgatatagaaagatcactgaagcagcttcagcaagaattctatcggcttcgatcaagcctcagagtgaagcaacaacatgcttcgctccttgacctaagagattttgacagagcaaagtttgatgttgagagtggagactcagccgatcaagctcttcttagagaacaagctgcaatcagtaggagttctggacagatggataatgtgatatcacatgctcaagcaacgctaggaactctcatgtcacaacgatcaacatttggtggcatcactacaaagataagcaatgttagtagccggcttcctacggttgctggttgcggtttccaggttgaagctgttcaggaaccaagcaaaagcaggaaacatctacaaattatcccagatctggatagtagatcgtttatattcataatactgcacatccggatgtatcagatttattttatttcgtccgacgaagacagtagccctaccctgggaacaccgaaacaggccaaatcggagtaa

SEQ ID NO: 51682 - DNA, 5712 bp, Oryza sativa
  unsure (1)..(5712): unsure at all n locations
  Clone ID: PAT_MRT4530_54051C.1
atggaagaaggtgaagtgaaagacgacaatattccggactttgctcagtatgttggatttgaaggaaatcaaacgggcgagaaggaaatagctgctgatggtaacgacgttgcggatgatcttggtcagatgttgcagtacgccaggaaagactgcgaaagtgaaaaggaggcccataaattggacaagatgttggaggaccacagaacttcgttgtacccaggttgcgagcaggggcacaaaaagttggataccactctggagttgttgcaatggaaggcaaaaaatggggttagtgacaaggcatttggcgatttattgaaactcgtcaagaacattcttccggggggaaacaaattgcccgagacaacgtacgaggctaagaagatagtctgcccgttaggactggaagttcataagattcacgcatgtccgaacgattgtatcctatatcgcggtgaggagtatgagaacctagaagcatgccctgtttgcaaagcactacgatacaagattagacgggacgatccaggagaagttgacgggcagctaacaaagaagagaattcctgctaaggtgatgtggtatttccctataataccacggctaaggcgtttgttcaggaacaaggggaatgctagaatgttgcgatggcacgctgaagagcgtcaacaggacgggatgctgagacaccccgccgatggttcgcagtggcgaaacatcgacagaaaatttaaagaatttggaaaggacgcacgaaacatacggtttggtttgagtacggatggcatgaatccttttggagagatgagcagcggccatagcacttggcccgttacgatgtgtatctacaacctccccccctggctatgcatgaagaggaagcacataatgatgccgattattattcaaggccccaagcaacctggtaacgacatcgacgtgtacctaagaccactggtcgaagatcttaaacagctgtggaaaaaagaagcaaaccacccggtacggaagaaaggcaagcacttcgaacataaggccgaccaccgtacgaattctaaacatcgcagcggaaaacaagtgtttgctatggttaaagatcttaaagcaatcgacgtgatgcacctcactaagaacctttgcgtaaaccttcttggcttcctaggtgtatacggaaagtcgaaagatacactggaagcacgtaatgatctgaagcatatggaacaacgcggcgaccttcacccggaaccaaaggagaaaggaagccattacttgagtccagccagctacactcttagcaaggcagagaaggaaagtatgtttgaatgcttggagagcataaaggtaccgtctggatactccacgaatatcaagcgaataataagcacgaaggagaagaagttcataaacctaaagtctcatgactgtcacgtgttgatgacacaactgctaccagttgtaataaggggtatccttccagacaatgtccgggcaacaataacanagctatgtgcattcatgaacgcaatttcgcagaaggtcatcgatccggatagattagaagcccttcaaaatgaagtggtgcaatgtctcgtcagttttgagttgatatttccaccttcatttttcaatataatgacgcatctgctttgtcaccttgtgaaagagatccgtattctcgggcctatgtacctacacaacatgtttcctttcgagaggtacatgggcgttctgaagaagtatgttcgtaaccgtgctcgtccagaggcaagcatcgccaagggttatggaacagaggaggtcatcgaattttgcgtagaatttatcgaagaccttcgcccaatcggggtacctgaatcacgccatgaagggagactacggggaaagggaactctcggaaggaaagcaataatgacggtagacaacaatttattccgtaaagcccatttcactgttctgcaacactcttcattggtagctccttacatcgaggagcacttggctctagttcgcgccaggaacatcggtaagtccgatgcatggattacacggcatcacattgatactttccccgcgtggctacgacaacatctcatgggtaacgagtcgatcaaccaacaacttgccttcctggcgaggggaccgtctgggtctatcgcgacattccagggatatgagatcaatgggtacacattctacacgagagcccaggacatgaagagcacgaaccaaaacagcgctgttcgtgtcgatgccatgggacacgatggaacaactgccacatattacggtgccatcgaggacatatgggaacttgactatggtcctctcaaggttcctctgttccggtgccaatgggttaggttgactggtggaggcgtaatgattgatgacagtgggatgacaactgttgaccttaacaaggttggatactcggacgaaccttttgtccttgccaatgatgtaacgcaagtctttttcgtgaaggacatgtctagcaaaggaaagaagggcagagggcctgatgagcctaagcgtcaagtggttctcccaggcaaaagaaaaatcgtcggagttgaggacaagactgacgaggattacgatcagttggatgggcaaccccctttcacggtgacgattgaccctagcatcctcctatcaaatgaagacaccccttactcacgcagcgatcacaaggagggaacaatagtgaggagaaagtacgtgcggtcaaccgtcaccgccgatatggctgaccgcgatgaggaacagatattgtacgatacaatcgcggagggaagcagccagtactggaatgaagaagaggggaacgaggatccaaaccagtacttgaacaaggaagggaacgtggagagggatgtggaggggaaccagcaggggcacgtggaaagggatgtggaggggaaccaggaggaggaggctagtggtagtcaaccctccgttggacagaagagggcacgcgcgcaacgaggtgcagcgaagaagctagagggtcggcacatcataacggaagtggaagaagatggatgtcctagtgccccagccgaagccgccaagaactatgtacgtcacagcggttgggttgtgcgggataacgtgcctgtcagtacggtgtactggcgaagaacaagggcacgcggagatcatgagagctttgtcccagattcggagaaagagatgctgtggaccacaatgctcgagacattcacccttcccgcgggtacaaaggacaaagtgaaaaggtggactctgaagaaaatggcagaacagtttcagagcttcaagggagagctgtacaagaaatatatcctgaaggggcagacaccgaacttcgacactttcccaaagctaagggatcactgggacgagttcgttgcatataagacaggtgaacaagggcaggcgatgatggaaagagacaaagaaaatgccgccaagaagaagtaccatcatcacttagggtcaggaggctatagcgtcgcgatgccgaagtgggaggggatggaggctagcttgattgagaggggtatcgaaccggcaaccgccaattggccggaacgatcgaagttctggtactatggtcacgatggaacgctcaacccagctgatggctcactggtcttcgcctatcagatacgagaggctgcgcgacgactaacagatgcagtggaagcctcctctcagggcacgttccgaccggacagagatagggacgagctgacactcgccctgcagactccagagcatccaggacgaacacgagggaaaggggtgattccttggaagattggtttcaaggaggacatccacacgtacagaagtcggataaggagtaagagagatatcgaggcgaagattgcagatctagagttccgggtatcgagctacgaactcagcatgcaagaggaggtggcaaggaaggttgacgaacgcatggccgcacatcggtcccatgatccccagccgaccattcctcctgcaatagtgagcccgtcaggaaaccgtagcagctgcgcctcaacggggcagataggatcacagagcatggacgccatgcaaacacaggacgaatcgacctgtcccgttgatgacatcactcagcggacaccatgtgagctatatattccttacaagaacttatcaataaaggtggcgtcgggcatggccatcccaacggacccttcaggtacttaccactgcaggccgattccagcaggatactcgaaggtcgaagttgagttggtcgaaggcgcgtacgaggacctcgagctggattaccctggaggagacggcggtacatcatcctccctgggcgacaagcggcgtctcgtgcaccatctcctccggctccgccatctcctcctcaggatcctgcaccgtctcctcctcatgctccgccagcactgtctccacctcaggctccagcaccgactcctccttaggatcctgcaccgactcctcctcgggctcctacacctactcctccacaagttcctcttccggcaccttcaaagtcaagggcccccccagctccaccgcctgcccacacaagggcaacgaagaaggggtatgtctgcatctgtcaaggaagccatcaagctatcagactatgagcgaacgctgaagaaagcatcttctggaaagtccaaaccagtccctcagcttggagagcaaccaaaccaggagatcgagccgttggtgaccggtaaagaaatgacgatagaacaatttattactgacaccggtctaactacggatcaattgctaggagtcgcaccaatcgaaaaggcggaagtgaaatacatgtacgaactcggtaaaccgcttgtcaagcctgagctactgcagtccctacccacacaaatgtataagttccatcagctgtacatggagatgagcgccaccggtagaaagatgatcggagcgaggatcagggacacggacttcttgcaaggagatgagattctctggatcaatttcaagggaatctacgaactataccagctggacgccctcgacgtctctattatgagttgctggattttaatggagattcaaagggcccgacggcggagggttttcgatactggattcatcgaccctcggagagtaaacgtcgcaatgctcgaccaatatccacaagaaacagaggacaatctcgtccatctcctgaaggcgcagcattacaagacgttcatactattgccgtacaacacagaattccactgggtgcttttactcttcgacctgtcagcctgcaccgtcaacgtatatgactcaatggataaaaaagagtctacgtttgacaaggttttcgaacttatagacagggcttggtatcggttccgtcatttggtccgcggcaaatggagagaaagacttaggcggaagttcaaatttccttgcgcaaagcaaaagcagggaactaacttgtgcggctattacgtgtgcgagtattgccactgccttgcagaccaaatcatcaccacaagagagctcgattttattcgcatgagggataacctgatcacacataaggaatttatcgcggcggttcaagaacaactcatgggattcatcaacgaagaaatccttgatcccaagggtgaattctactacgacggaaacacaattcaccggtccttagcttctgagctagcagcgagtactactaatacgtcgaaatcgtag

SEQ ID NO: 51683 - DNA, 1009 bp, Oryza sativa
  Clone ID: PAT_MRT4530_54052C.1
gaagagagggcagaagccaaccattataaccacccaaaatcgaatcccccaaccaaaaaagaagcaacaagaagaagaagagaggagaaagtgagagtgcacacacactatagcatagcactactctcttcttctttaggagagagcacacagttccaagaaaagctctgagcttcttccatcgatctctcggccatggcacggtggctacagctgccgtgcagcctcctgctcgtcatcatgctcgtcgccgccacggccgccgccgccgacgtcgtcgtccgcgacgacgagaagtgcgccgcgtgcggcctgcccagcccctgcggcacgacgtgcacgtacgccagcccgccgccgcccgacgtgctgccgactccggtctactacccgccgccgccgcccgtctactaccccccgccgtccccgccgccggtggcctaccctccgccgaccacgccgtcgaccaactgcccgccgccgccgtacggaggcggaggctacaacccgacgccgagctacaacccgacgcccggctacaacccgacgccgtcggggtggttcacgccgccgaacatgccgtcctacctcacgccgccggggacgctctacccgcaggaccccggcttccggcccaacgcggcggcgggcggcgccgcgtcgtggcgcgcggtggtgctcgcggcggcggcggtggccggagccttggccttgtgatcggcgacgtatggtaattaattacacggcgtttttaattccctttattatgtgttcataataagattagaggagatatattccggtaagataatctcttttttttttcgtttttacggttcatgttcacgttgttgttgttgtcgtcatcgtcgtcggcaaattaattgttcttgtcatgtaatgtttgttgatcgatcccttttggtgataggaaagatgtacatcagactctgtaataatccatatatatgtctaatcaaatttcaattacatgtggcaaaaaaaaaaa

SEQ ID NO: 51684 - DNA, 950 bp, Oryza sativa
  Clone ID: PAT_MRT4530_54053C.1
atggaggcgtcttcttgggacgcccttcgcaagcagtggttccaagttgtctatgccaatgtcgtcattaccctagtacatcctattgctgcaatcggaaaatatacctttaatggtttcttggcaaggaggttggaagctcagttagatgatcaaatgattgcataccgtaaattggtgtctatgaaatcagatggttcagagaatgatatcgagtctgatatagaaagatcactgaagcagcttcagcaagaattctatcggcttcgatcaagcctcagagtgaagcaacaacatgcttcgctccttgacctaagagattttgacagagcaaagtttgatgttgagagtggagactcagccgatcaagctcttcttagagaacaagctgcaatcagtaggagttctggacagatggataatgtgatatcacatgctcaagcaacgctaggaactctcatgtcacaacgatcaacatttggtggcatcactacaaagataagcaatgttagtagccggcttcctacgataatcgagattggtgtttgtacaatattgattcaatgttatcctgttttgatggttcttcaggcattgtgcctctcactgcacagccgcatgacttctagtatcgactggacccatatactacatgttgctggttgcggtttccaggttgaagctgttcaggaaccaagcaaaagcaggaaacatctacaaattatcccagatctggatagtagatcgtttatattcataatactgcacatccggatgtatcagatttattttatttcgtccgacgaagacagtagccctaccctgggaacaccgaaacaggccaaatcggagtaatcatatcctcgcgtcaattagaagaaagaagtcgatggacacaatcattctttcacttgtcgcgtctgtctgcgcctttcttattctcgtctact

SEQ ID NO: 51685 - DNA, 3039 bp, Oryza sativa
  Clone ID: PAT_MRT4530_54054C.1
atggggagcaaccagggcaacgtccaagcgggctgcgacaggggcgggaaaactaggactattcatttccacttgtttgagtcggggttcatgccaagctataattgttggacatcccacggagagcaaggtgttgaaatagaagaagatgaagtggaagacgacaatattccggactttgctcagtatgttggatttgaaggaaatcaaacgggcgaggaggaaatagctgctgatggtaacgacgttgcggatgatcttggtcagatgttgcaggacgccagggaggactgcgaaagtgaaaaggaggcccataaattggacaagatgttggaggaccacagaacttcgttgtacccaggttgcgagcaggggcacaaaaagttggataccactctggagttgttgcaatggaaggcaaaaaatggggaaggtgtccccgtgtgggacgaggacaaacaggaggagtttaacctacgagcgctgctgttcgtaaccatcaacgattggcctgcacttagcaacctatccggacagtccaacaaggggtacaaggcttgcactcactcaaaacacccggtacggaagaaaggcaagcacttcgaacataaggccgaccaccgtacgaagcctaaacatcgcagcgggaaaacagtgtttgctatggttaaagatcttaaagtagtgttcggaaaggggcctggaagccagcatatagagagcgaagatggtcacgcggcgatgtggaaaaagaactctatattttgggagttaccatattgggaattcttggacgtacgccacgcaatcgacgtgatgcacctcactaagaacctttgcgtaaaccttcttggcttcctaggtgtatacggaaagtcgaaagatacactggaagcacgtaatgatctgaagcatatggaacaacgcggcgatcttcacccgaaaccaaaggagaaaggaagccattacttgagtccagccagctacactcttagcaaggcagagaaggaaagtatgtttgaatgcttggagagcataaaggtaccatctggatactccacgaatattaagcgaataataagtacgaaggagaagaagttcacaaacctaaagtctcatgactgtcacgtgttgatgacacaactgctaccagttgtaataaggggtatccttccagacaatgtccgggcaacaataacaaagctatgtgcattcatgaacgcaatttcgcagaaggtcatcgatccggatagattagaagcccttcagaatgaagtggtgcaatgtctcgtcagttttgagttgatatttccaccttcatttttcaatataatgacgcatctgctttgtcaccttgtgaaagagatccgtattctcgggcctatgtacctacacaacatgtttcctttcgagaggtacatgggcgttctgaagaagtatgttcgtaaccgtgctcgtcgagaggcaagcatcgccaagggttatggaacagaggaggtcatcgaattttgcgtagaatttatcgaagaccttcgcccaatcggggtacctgaatcacgccatgaagggagactacggggaaagggaactctcggaaggaaagcaataacgacggtagacaacaatttattccgtaaagcccatttcactgttctgcaacactcttcattggtagctccttacatcgaggagcacttggctctagttcgcgccaggaacatcggtaagtccgatgcatggattacacggcatcacattgatacttttcccgcgtggctacgacaacatctcatgggtaacgagtcgatcaaccaacaacttgccttcctggcgaggggaccgtctgggtcgatcgcgacattccagggatatgagatcaatgggtacacattctacacgagagcccaagacatgaagagcacgaaccaaaacagcgctgttcgtgtcgatgccatgggacatgatggaacaactgccacgtattacggtgccatcgaggacatatgggaacttgactatggtcctctcaaggttcctctgttccggtgccaatgggttaggttgactggtggaggcgtaatgattgatgacagtggaatgacaactgttgaccttaacaaggttggatactcggacgaaccttttgtccttgccaatgatgtaacgcaagtctttttcgtgaaggacatgtctagcaaaggaaagaagggcagagggcctgatgagcctaagcgtcaagtggttctcccaggcaaaagaaaaatcgtcggagttgaggacaagactgacgaggattacgatcagttggatgggcaaccccctttcacggtgacgattgaccctagcatcctcctatcaaatgaagacaccccttactcacgcagcgatcacaaggagggaacaatagtggggagaaaggcaaatccccgcgccgacgccgccgtatctcgccgtcgtctcgagctcgtcatcctcgccgccgcctccgcctcctccgctgccgccgcatctctgggaaaaaattcaggttgtcggcatctagtcggggcgcagtggttcgtggggaagtgtgctgttgggctaagttcttttctgccgctcgctttccagcgccatgcctccgctgccgtcgccactcctccgcctcattctccgccgcgcgcgcaatgccgccgccgccacgcctcgccgccggccgccacggccccgcaacgccacgccgccgccgccgtcgccacgccgccgccgccgccgccacgccgccgcgccaaccgccgccccgatgccgccacaccgccgttaacgaacgagaacgagaacgatcgaacgaacgagagcgagaacgaacacgtcaacgtacgttgccgcgagaacgtgaacgagaacgagaactatcgaacgaacaagagcgagaacgagaacgatcgaacgaagacaagcgagaacgagggaacgaacgtgaatgagaacaagcgaacgaacgtgaatgagaacgagcgaacgaacgtgaacgagcaaacgaacgaggacgaacgttaa

SEQ ID NO: 51686 - DNA, 3396 bp, Oryza sativa
  Clone ID: PAT_MRT4530_54055C.1
atggagaaccaattaatggaagagctccaagaagctgacgtcttatggccggagtcggagacgacgccgccgccgccctcgcgaggagcccacctgccggtgctggtgctgcaactgcaaggcgccgccgctcccgtcctcccctcgcgcggatcgtcgacgtccaccgcgacgccgttcggtcgtcgccgccgctccgacgtcgcgtccacggctgcctggctcgacggcgacgacgacgacgacgtgcaggcggaggagttccaggaggcggacgtgctctggccggatgacgacgacgccggcggcgaggacaccgcgagagatcatcagctcgacgacgaggtgggggagttctggtggctttccggagaggccggaagccgccgcatggatacggaggcggcggccgccgcggccgccgccggcgaacggcaggagcaacattttgcaatagaggagcaaccggaagtgacctctgacaagcagagcacacgcctcctgccccgctcgccagctttcccggtggacgcccatttcaaccttcattcaatggccagtgacttccttgtcatgcttgcgctgaagcctggaatggatctgaccgggactgacataccaactccaggagacgccaaggaggactgcgaaagtgaaaagggggctcataaattggacaagatgttagaggaccacagaacgtcgttgtacccaggttgcgagcaggggcacaaaaagttggataccactctggagttcttgcaatggaaggcaaaaaatggtgttagtgacaaggcatttggcgatttattgaaactcgtcaagaacattctttcggagggaaacaaattgcccgagacaacgtacgaggctaagaagatagtctgccctctaggactggaagttcagaagattcacgcatgccccaagcaacctggtaacgacatcgatgtgtacgtaagaccactggtcgaagatcttaaactgttgtggaagaaggaaggtgtccccatatgggacgaggacaaaaatgaggagtttaacctacgagcgctgctgttcgtaaccatcaacgattggcctgcacttagcaacctatccggacagtccaacaaggggtacaaggcttgcactcactcaaaccacccggtacggaataaaggcaagcactttgaacataaggcggaccaccgtacaaagcctaaacatcgcagcggaaaaacagtgtttgctatggttaaagatcttaaagtagtgttcggaaaggggcctggaagccagcctataaagagcgaagatggccacgcgacgatgtggaaaaagaactctatattttgggagttaccctattgggaattcttggacgtccgccacgcaatcgacgttatgcacctaactaagaacctttgcgtaaaccttcttggcttcttaggtgtatatggaaagttgaaagatacactagaagcacgtaatgatctgaagcatatggaacaacgcggtgaccttcacccggaaccaaaggagaaaggaagccattacttgagtccagccagctacactcttagcaaggcagacaaggaaagtatgtttgaatgcttggagagcataaaggtaccgtttggatactccacgaatatcaagcgaataataagcacgaaggagaagaagttcacaaacctaaagtctcatgactgtcacgtgttgatgacacaactgctaccagttgtaataaggggtatccttccaaacaatgtccgggcaacaataacaaagctatgtgcattcatgaacgcaatttcgcagaaggtcatcgatccggatagattagaagcccttcagaatgatgtggtgcaatgcctagtcagttttgagttgatatttccaccttcatttttcaatataatgacgcatctgctttgtcaccttgtcaaagagatcagtattctcgggcttgtgtacctacacaacatgtttcctttcgagaggtacatgggcgttctgaagaagtatgttcgtaaccgtgctcgttcagaggcaagcatcgccaaggggtatggaacagaggaggtcatcgaattttacgtaggatttattgaagacctttgcccaatcggggtacctgaatcgcgccatgaagggagactacggggaaagagaactctcggaaggaaagcaataatgacggtagacaacaatttattccgtaaagcccatttcacggttctgcaacaatcttcattggtagctccttacatcgaggagcacttggctctagttcgcgccagaaacatcggtaagtccgatgcatggattacatggcatcacattgatactttccccgcgtggctacgacaacatctcatgggtaacgagacgatcaaccaacaacttgccttcctggcgaggggaccatctgggtcgatcgcgatattccagggatatgagatcaatgggtacacattctacacgatagcccaagacatgaagagcatgaaccaaaacagcgttgttcgtatcaatgccatgggacacgatggaacaactggcacgtattacggtgccgtcgagaacatatgggaacttaactatggtcctctcaaggtccctctgttccggtgccaatgggttaggttgactggtggaggcgtaatgattgatgatagtgggatgacaacggttgaccttaacaaggttggatattcggacgaaccttttgtccttgccaatgatgtaacgcaagtcttttacgtgaaggacatgtctagcaaaggaaagaagggcagagggcctgacgagcctaagagtcacgtggttctcccaggaaaaagaaaaatcgtcggagttgaggacaagactgacgaggattacgatcagttggatgggcaaccccctttcacggtgacgattgaccctagcatcctcctatcaaatgaagacaccccttactcacctctcttcccctcccaatccaatataaaccttccccgtgcctccctccaccgtttccgccactcgccgccctctctccccgtcggaatcgagctcgcgccgtcgctctctctctccgccgtcaccgccgagctccggtccgccgccgtcgtcgccccggaccacctcccgcctcggcgccgccaccttcggcttcaccgcatccccggcgacctcgtccacccctccgtttcgctcgccgaccgccggagcaccgtcgaccccgtccacccgagccgcgccgccgccttcctccgctccgttcgtcgtttccgtcgtcgccgtcgacccggggggcgcgggcgcgccgcctcccgccgctgcgccggcgtggccgccttcgggcgcaccgtgcggctgccgcgtggggcccggctgtcagccgcccgcgccctcgggtgcggctga

SEQ ID NO: 51687 - DNA, 2345 bp, Oryza sativa
  Clone ID: PAT_MRT4530_54056C.1
atggaagaagatgaattggaagatgacaatattccggactttactcagtatgttggatttgaaggaaatcaaacgggcgaggaggaaatagctgctgatggtaacgacgttgcggatgatcttggtcagatgctgcaggacgccaaggaggactgcgaaagtgaaaaggaggcccataaattggataagatgttggaggaccacagaacttcgttgtacccaggttgcgagcaggggcacaaaaagttggataccactctggagttcttgcaatggaaagcaaaaaatgggaggaagtacataatgatgccgattattattcaaggccccaagcaacctggtaacgacatcgatgtgtacctaagaccactggtcgaagatcttaaactgttgtggaagaaggaaggtgtccccgtgtgggacgaggacaaacaggaggagtttaacctacgagcgctgctgttcgtaaccatcaacgattggcctgcacttagcaacctatccggacagtccaacaaggggcacaagcaaaccacccggaaaacagtgtttgctatggttaaagatcttaaagtagtgttcggaaaggggcctggaagccagcctatagagagcaaagatggtcacgcggcgatgtggaaaaagaactttatattttgggagttaccatattgggaattcttggacgtacgccacgcaatcgacgtgatgcacctcactaagaacctttgcgtaaacattcttggcttcctaggtgtatacggaaagtcgaaagatacactggaagcacgtaatgatctgaagcatatggaacaacgcggcgaccttcacccagaaccaaaggagaaaggaagccattacttgagtccagccagctacactcttagcaaggcagagaaggaaagtatgtttgaatgcttggagagcataaaggtaccgtctggatactccacgaatatcaagcgaataataagcacgaaggagaagaagttcacaaacctaaagtctcatgactgtcacgtgttgatgacacaactgctaccagttgtaataaggggtatccttccagacaatgtccgggcaacaataacaaagctatgtgcattcatgaacgcaatttcgcagaaggtcatcgatccggatagattagaagcccttcagaatgaagtggtgcaatgtctcgtcagttttgagttgatatttccaccttcatttttcaatataatgacgcatctactttgtcaccttgtgaaaaagatcagtattctcgggcctgtgtacctacacaacatgttttctttcgagaggtacatgggcgttctgaagaagtatgttcgtaaccgtgctcgtccagaggcaagcatcgccaagggttatggaacagaggaggtcatcgaattttgcgtagaatttatcgaagaccttcgcccaatcggggtacctgaatcacgccatgaagggagactacggggaaagggaactctcggaaggaaagcaataatgacggtagacaacaatttattccgtaaagcccatttcactgttctgcaacactcttcattggtagctccttacatcgaggagcacttggctctagttcgcgccaggaacatcagtaagtccgatgcatggattacacggcatcacattgatactttccccgcgtggctacgacaacatctcatgggtaacgagtcgatcaaccaacaacttgccttcctggcgaggggaccgtctgggtcgatcgcgacattccagggatatgagatcaatgggtacacattctacacgagagcccaagacatgaagagcacgaaccaaaacagcgctgttcgtgtcgataccatgggacacgatggaacaactgccacgtattacggtgccatcgaggacatatgggaacttgactatggtcctctcaaggttcctctgttccggtgccaatgggttaggttgactggtggaggcgtaatgattgatgacagtgggatgacaactgttgaccttaacaaggttggatactcggacgaaccttttgtccttgccaatgatgtaacgcaagtctttttcgtgaaggacatgtctagcaaaggaaagaagggcagagggcctgacgagcctaagcgtcaagtggttctcccaggcaaaagaaaaatcgtcggagttgaggacaagactgacgaggattacgatcagttggatgggcaacccccttttacggtgacgattgaccctagcatcctcctatcaaatgaagacaccccttactcacgtagcgatcacaaggagggaacaatagtgatgagaaagtacgtgcggtcaaccgtcaccgccgatgtattacc

SEQ ID NO: 51688 - DNA, 1122 bp, Oryza sativa
  Clone ID: PAT_MRT4530_54057C.1
tcatactttagtctcaaagaagtaagttgatgaaacagccaaaccagctgagtcataagtccgcacaagccgctgcctctttcctggtgattccatccagcagaactccaaatgaaaagaatccatgtcattcacaatcttaccgatgtctgtcggatatcccatgtacattcctccaggtaacaaggtcatttcatatcctccatcaaactgaagcaagttgttatttgctgatcctgtccagtgaacagttgttgttgtgctagatccagattttgttgacatgttatctagtgcagacacacccgcttgtccacccattgcatgcaaattttgaaatccatcacccataggtttacggctgtgttttaggtcaatttttgccaagacactgattgggattatcatcagaattagctgaccattgcggtccttttcaaggagaaccaccgtatcagcttcagaaagtgttgctccatacaccccgctcctcttagtcacagaacggccttcccatcttcccagtagtggagctattctatcactgttggtgatatctgcatcatctgaagagtacataagtgggacttcagatccctgcttttcatggaaaattataagcatatcgagcactccctttgggtccatgatgtggaaagcccttactcggccattgccttcacgagagtaaaggcaattctcacatacaatagatggcttacgagaagggatcttcaagtttttgggggattcttcaccagtatcatcttctcctagcacaccagcccgaaggacagtctccagcattccagcagtctgatacctcagagcaaatgccttttcctcttgaaagaatcctacgtagaatgctccattccacttgccgacgttgacgtcgaagaagcggcggagattgtcgatggtcatcgcgtcgtcgtcgtccacctccggcgggccggccaccgcggcccgcgcgcagagcctgccgcggcggaacggggacgggccggggcaggggacgcgcgccgcgcaggagccgtggcggccgctgcggctttgagggcgtgcggtggcggcggcggacgccgcgagccggaggacggcgacgagcgcctccgccat

SEQ ID NO: 51689 - DNA, 6114 bp, Oryza sativa
  Clone ID: PAT_MRT4530_54058C.1
atggaagaagatgaagtggaagacgacaatattccggactttgctcagtatgttggatttgaaggaaatcaaacgggcgaggaggaaatagctgctgatggtaacgacgttgcggatgatcttggtcagatgttgcaggacgccagggaagactgcgaaagtgaaaaggaggcccataaattggacaagatgttggaggaccacagaacttcgttgtacccaggttgcgagcaggggcataaaaagttggataccactctggagttgttgcaatggaaggcaaaaaatgggaggaagtacataatgatgccgattattattcaaggccccaagcaacctggtaacgacatcgacgtgtacctaagaccactggtcgaagatcttaaacagttgtggaagaaggaaggtgtccccgtgtgggacgaggacaaacaggaggagtttaacctacgagcgctgctgttcgtaaccatcaacgattggcctgcacttagcaacctatccggacagtccaacaaggggtacaaggcttgcactcactcaaaccacccggtacggaagaaaggcaagcacttcgaacataaggccgaccaccgtacgaagcctaaacatcgcagcgggaaaacagtgtttgctatggttaaagatcttaaagtagtgttcggaaaggggcctggaagccagcatatagagagcgaagatggtcacgcggcgatgtggaaaacgaactctatattttgggagttaccatattgggaattcttggacgtacgccacgcaatcgacgtgatgcacctcactaagaacctttgcgtaaaccttcttggcttcctaggtgtatacggaaagtcgaaagatacactggaagcacgtaatgatctgaagcatatggaacaacgcggcgaccttcacccggaaccaaaggagaaaggaagccattacttgagtccagctagctactctcttagcaaggcagagaaggaaagtatgtttgaatgcttggagagcataaaggtaccgtctggatactccacgaatatcaagcgaataataagcacgaaggagaagaagttcacaaacctaaagtctcatgactgtcacgtgttgatgacacaactgctaccagttgtaataaggggtatccttccagacaatgtccgggcaacaataacaaagctatgtgcattcatgaacgcaatttcgcagaaggtcttcgatccggatagattagaagcccttcagaatgaagtggtgcaatgtctcgtcagttttgagttgatatttccaccttcatttttcaatataatgacgcatctgctttgtcaccttgtgaaagagatccgtattctcgggcctatgtacctacacaacatgtttcctttcgagaggtacatgggcgttctgaagaagtatgttcgtaaccgtgctcgtccagaggcaagcatcgccaagggttatggaacagaggaggtcatcaaattttgcgtagaatttatcgaagaccttcgcccaatcggggtacctgaatcacgccatgaagggagactacggggaaagggaactctcggaaggaaagcaataatgacggtagacaacaatttattccgtaaagcccatttcactgttctacaacactcttcattggtagctccttacatcgaggagcacttggctctagttcgcgccaggaacatcggtaagtccgatgcatggattacacggcatcacattgatactttccccgcgtggctacgacaacatctcatgggtaacgagtcgatcaaccaacaacttgccttcctggcgaggggaccgtctgggtcgatcgcgacattccagggatatgagatcaatgggtacacattctacacgagagcccaagacatgaagagcacgaaccaaaacagcactgttcgtgtcgatgccatgggacacgatggaacaactgccacgtattacggtgccatcgaggacatatgggaacttgactatggtcctctcaaggttcctctgttccggtgccaatgggttaggttgactggtggaggcgtaatgattgatgacagtgggatgacaactgttgaccttaacaaggttggatactcggacgaaccttttgtccttgccaatgatgtaacgcaagtctttttcgtgaaggacatgtctagcaaaggaaagaagggcagaaggcctgatgagcctaagcgtcaagtggttctcccaggcaaaagaaaaatcgtcggagttgaggacaagactgacgaggattacgatcagttggatgggcaaccccctttcacggtgacgattgaccctagcatcctcctatcaaatgaagacaccccttactcacgcagcgatcacaaggagggaacaatagtgaggagaaagtacgtgcggtcaaccgtcaccgccgatgtaatgccggcaaatccccgcgccgacgccgccgtatctcgccgtcatctcgagctcgtcgtcctcgccaccgcctccgcctcctccgctgccgccgcatctctggggttcgagccgccgcatctcccttcatgcatctcgatctctccgatctcgatctctctccgtcgccttcgacgccgccgccttcgacgccgcgcaacgccgccgccgcatgccaacgccacgccgccgccgccgtcgccacgccgccgccgccttcgccgacgcgcgcgcaatgccgccaccgccacgccacgccgccgccgccacgccacgccacgccaccgccgccacgccacgccgccgccgccacggccccacaacgccacgccgccgccgccgtcgccacgccgccgcgccaaccgccgccccgatgccgccacaccgccgttaacgaacgagaacgagaacgatcgaacgaacgagagcgagaacgaacacgtcaacgtacgttgccgcgacaacgtgaacgagaacgagaacgatcgaacgaacgtgaacgagctagggaacatggctgaccgcgatgaggaacagatattgtacgatacaatcgcggagggaagcagccagtactggaatgaagaagaggggaacgaggatccaaaccagtacttgaacgaggaagggaacgtggagagggatgcggaggggaaccagcaggggcacgtggaaagggatgtggaggggaaccaggaggaggaggctagtggtagtcaaccctccgttggacagaagagggcacgtgggcaacgaggtgcagcgaagaagcttgagggtcggcacatcataacggaagtggaagaagatggacgtcctagtgccccggccgaagccgccaagaactatgtacgtcacagcggttgggttgtgcgggataacgtgcctgtcagtacggtgtactggcgaagaacaagggcacgcggagatcatgagagctttgtcccagattcggagaaagagatgctgtggaccacaatgctcgagacattcacccttcctgcgggtgaacaagggaaggcgatgatggaaagaaacaaagaaaatgccgccaagaagaagtaccatcaccatttggggtcaggaggctatagcgtcgcgatgccgaagtgggagcagatggaggctagcttgattgagaggggtatcgaaccggcaacagccaattggccggaacgatcgaagttctggtactatgctcacggtggaacgctcaacccagctgatggctcactggtcttcggctatcagatacaagaggctgcgcgacaactaacagatgcagtggaagcctcctctcagggcacgttccgaccagacagagatagggacgagctgacactcgccctgcagactccagagcatccaggacgaactcgagggaaaggggtgattccttggaagattggtttcaaggaggacatccacacgtacaggagtcggatgaggagcaagagagataccgaggcgaagattgcagacctagagttccgggtatcgagctacgaactcaacatgcaagaggaggtggcaaggaaggttgatgaacgcatggccgcacatcggtcccatgatccccagccgaccattcctcctgcaatggtgagcccgtcaggaaaccgtagcagctgcgcctcaacggggcaggtggcgtcgggcatggccatcccaacggacccttcaggtacttaccactgcaggccgattccagcaggatactccaaggtcgaagttgagttggtcgaaggcgcgtacgaggacctcgagctggattaccctggaggagacggatcctacaccgtctcctcctcatactccgccagcaccgtctccacctcaggctccagcatcgactcctcctcaggatcctgcatcgactcctcctcgtgctcctacacctactcctccgcaagctcctcttccggcaccttcaaagtcaagggccccccagctccaccgcctgcccacacaggggcaacgaagaaggcgaaagttgacgccgccaagaacaaggacccggggtacgattgcacgcaagaggagcttgacgcttacgttgcatcagaagtcaagagacaattcaagcctcgaagtccagaaaagaagattcctatagaccccagtgtcatgaacttcttcaggggtatgtctgcacctgtcaaggaggccatcaagctatcggactatgagcgaacgctgaagaaagcatcttctggaaagtctaaaccagtccctcagcttggagagcaaccaaaccaggagatcgagccgttggtgaccgggaaagacatgacgatagaagaatttattattgacaccggtctaactacggatcaattgctaggagttgaaccaatagaaaaggcggaattgaaatacatgtacgaactcggtaaaccgcttgtcaagcccgagctggtgcagtccctacccacacaaatgtacaagttccatcagctgtacgtggagatgagcgccaccggtagagagatgatcggagcgaggatcagggacccggacttcttgcaaggagatgatattctctggatcaatttcaaggaaatctacaaagtataccagctggacgccttcgacgtctctattatgagttgctggactttaatggagattcaaagggcccgacggcggagggttttcgatactggatttatcgaccctcggagagtaaacgttgcaatgctcgaccaatatccgcaggaaacagaggacaatctcatccatctcctgacggcgcagcattacaagacgttcatactgttaccgtacaacacagaattccactgggtgcttttactcttcgacctgtcggcctgcaccgtcaatgtatatgactcaatggataaaaaagagtctatgtttgacaagagctcatctccgtcaactaaccatcacctgccacctgccggagaaggccgttgtgacgccacccagccggagcgtgccgaagatcgcatctacctagtgctacgacgtcgacaagacgtcgagcgtccttactttgctggtcgcaacctatgcattgcgacatcatcaacatctactcaacctatgcaacgtcggagcgccactactgcttggtgcccgtgcatcgtcgtcaagccgaggtcgtcgtttcgtgcatccacgatgtctttctctccgccgcgccaaggctacgagatgccatccggccgcgatgcccttcacctcgtcaggtcggagtcgtcgtgttgtccatccgtgatgctttcactttattacgccaagggaaccgttcgtgctgaatctactccaacaaatgccctcagccgttccgccgatgaggcatttacttcttccaaggtcgctgttgttatcggcaccctcatagagcccttttatgggctgatccatcatccgaaagagcctctcgtcatcaccacctcaccgccgccggtggggagggaggaggcgccggatccgctccccatcgccccctcccccacgccgctgccgccgagagccgctgccgccaccgccctcttccccgcgcggctgccgacgcctcatggtggcggatctggcctcttcccaagcttgccgcgcagagaatgccaccaaggagaggagaagaccccggtgcctagagcgccgctgctcaccgaggaggagtaa

SEQ ID NO: 51690 - DNA, 8567 bp, Oryza sativa
  Clone ID: PAT_MRT4530_54059C.1
atggaagaagatgaagtggaagacgacaatattccggactttgctcaatttgttggatttgaaggaaatcaaacgggcgaggaggaaatagctgctgatggtaacgacgttgcggatgatcttggtcaaatgttgcaggacgccagggaggactgcgaaagtgaaaaggaggcccataaattggacaagatgttggaggaccacagaacttcgttgtacccaggttgcgagcaggggcacaaaaagttggataccactctggagttgttgcaatggaaggcaaaaaatggggttagtgacaaggcatttggcgatttattgaaactcgtcaagaacattcttccggggggaaacaaattgcccgagacaacgtacgaggctaagaagatagtctgcccgttaggactggaagttcataagattcacgcatgtccgaacgattgtatcctatatcgcggtgaggagtacgagaacctagaagcatgccctgtttgcaaagcactacgatacaagattagacgggacgatccaggagaagttgacgggcagctaacaaagaagagaattcctgctaaggtgatgtggtatttccctataataccacggctaaggcgtttgttcaggaacaaggggaatgctagaatgttgcgatggcacgctgaagagcgtcaacaggacgggatgctgagacaccccgccgatggttcgcagtggcgaaacatcgacagaaaatttaaagaatttggaaaggacgcacgaaacatacggtttggtttgagtacggatggcatgaatccttttggagagatgagcagcggccatagcacttggcccgttacgatgtgtatctacaacctccccccctggctatgcatgaagaggaagtacataatgatgccgattattattcaaggccccaagcaacctggtaacgacatcgacgtgtacctaagaccactggtcgaggattttaaacagttgtggaagaaggaaggtgtccccgtgtgggacgaggacaaacaggaggagtttaacctacgagcgctgctgttcgtaaccatcaacgattggcctgcacttagcaacctatccggacagtccaacaaggggtacaaggcttgcactcactcaaaccacccggtacggaagaaaggcaagcacttcgaacataaggccgaccaccgtacgaagcctaaacatcgcagcgggaaaacagtgtttgctatggttaaagatcttaaagtagtgttcggaaaggggcctggaagccagcatatagagagcgaagatggtcacgcggcgatgtggaaaaagaactctatattttgggagttaccatattgggaattcttggacgtacgccacgcaatcgacgtgatgcacctcactaagaacctttgcgtaaaccttcttggcttcctaggtgtatacggaaagtcgaaagatacactggaagcacgtaatgatctgaagcatatggaacaacgcggcgaccttcacccggaaccaaaggagaaaggaagccattacttgagtccagccagctacactcttagcaaggcagagaaggaaagtatgtttgaatgcttggagagcataaaggtaccgtctggatactccacgaatatcaagcgaataataagcacgaaggagaagaagttcacaaacctaaagtctcatgactgtcacgtgttgatgacacaactgctaccagttgtaataaggggtatccttccagacaatgtccgggcaacaataacaaagctatgtgcattcatgaacgcaatttcgcagaaggtcatcgatccggatagattagatgcccttcagaatgaagtggtgcaatgtctcgtcagttttgagttgatatttccaccttcatttttcaatataatgacacatctgctttgtcaccttgtgaaagagatccgtattctcgggcctatgtacctacacaacatgtttcctttcgagaagtacatgggcgttctgaagaagtatgttcgtaaccgtgctcgtccagaggcaagcatcgccaagggttatggaacagaggaggtcatcgaattttgcgtagaatttatcgaagaccttcgcccaatcggggtaccggaatcacgccatgaagggagactacggggaaagggaactctcggaaggaaagcaattatgacggtagacaacaatttattccgtaaagcccatttcactgttctgcaacactcttcattggtagctccttacatcgaggagcacttggctctagttcgcgccaggaacatcggtaagtccgatgtatggattacacggcatcacattgatactttccccgcgtggctacgacaacatctcatgggtaacgagtcgatcaaccaacaacttgccttcctggcgaggggaccgtctgggtcgatcgcgacattccagggatatgagatcaatgggtacacattctacacgagagcccaagacatgaagagcacgaaccaaaacagcgctgttcgtgtcgatgccatgggacacgatggaacaactgccacgtattacggtgccatcgaggacatatgggaacttgactatggtcctctcaaggttcctctgttccggtgccaatgggttaggttgactggtggaggcgtaatgattgatgacagtgggatgacaactgttgaccttaacaaggttggatactcggacgaaccttttgtccttgccaatgatgtaacgcaagtctttttcgtgaaggacatgtctagcaaaggaaagaagggcagagggcctgatgagcctaagcgtcaagtggttctcccaggcaaaagaaaaatcgtcggagttgaggacaagactgacgaggattacgatcagttggatgggcaaccccctttcacggtgacgattgaccctagcatcctcctatcaaatgaagacaccccttactcacgcagcgatcacaaggagggaacaatagtgaggagaaagtacgtgcggtcaaccgtcaccgccgatggcaaatccccgcaccgacgccgccgtatctcgccgtcgtctcgagctcgtcgtcctcgccgccgcctccgcctcctccgctgccgccgcttctctgggttgagagccgccgcatctcccttcatgcatctcgatctctccgatctcgatctctctccgtcgccttcgacgccgccgccttcgacgccgcgcaacgccgccgccgcatgccaacgccacgccgccgccgccgtcgccacgccgccgccgccttcgccgccgcgcgcgcaatgccgccgccgccacgccacgccgccgccgccacgccacgccacgccaccgccgccacggccccacaacgccacgccgccgccgccgtcgccacgccgccgcgccaaccgccgccccgatgccgccacaccgccgttaacgaacgagaacgagaacgatcgaacgaacgagagcgagaacgaatacgtcaacgtacgttgccgcgacaacgtgaacgagaacgagaacgatcgaacgaacgagagcgagaacgagaacgatcgaacgaagacaagcgagaacgagggaacatggctgaccgcgatgaggaacagatattgtacgatacaatcgcggagggaagcagccagtactggaatgaagaagaggggaacgaggatccaaaccagtacttgaacgaggaagggaacgtggagagggatgcggaggggaaccagcaggggcacgtggaaagggatgtggaggggaaccaggaggaggaggctagtggtagtcaaccctccgttggacagaagagggcacgcgggcaacgaggtgcagcgaagaagcttgagggtcggcacatcataacggaagtggaagaagatggacgtcctagtgccccggccgaagccgccaagaactatgtacgtcacagtggttgggttgtgcgggataacgtgcctgtcagtacggtgtactggcgaagaacaagggcacgcggagatcatgagagctttgtcccagattcggagaaagagatgctgtggaccacaatgctcgagacattcacccttcctgcgggtacagaggacaaagtgaaaaggtggactctgaagaaaatggcagaacagtttcagagcttcaagggagatctgtaccagaagtatatactgaaggggcagacaccgaacttcgacacattcccaaagctaagggatcactgggacgagttcgttgcatataagacaggtgaacaagggaaggcgatgatggaaagaaacaaagaaaatgccgccaagaagaagtaccatcaccacttggggtcaggaggctatagcgtcgcgatgccgaagtgggagcagatggaggctagcttgattgagaggggtatcgaaccggcaacagccaattggccggaacgatcgaagttctggtactatgctcacggtggaacgctcaacccagctgatggctcactggtcttcggctatcagatacaagaggctgcgcgacgactaacagatgcagtggaagcctcctctcagggcacgttccgaccagacagagatagggacgagctgacactcgccctgcagactccagagcatccaggacgaactcgagggaaaggggtgattccttggaagattggtttcaaggaggacatccacacgtacaggagtcggatgaggagcaagagagataccgaggcgaagattgcagacctagagttccgggtatcgagctacgaactcaacatgcaagaggaggtggcaaggaaggtggcgtcgggcatggccatcccaacggacccttcaggtacttaccactgcaggccgattccagcaggatactccaaggtcgaagttgagttggtcgaaggcgcgtacgaggacctcgagctggattaccctggaagagacggatcctgcaccgtctcctcctcatgctccgccagcaccgtctccacctcaggctccagcatcgactcctcaggatcctgcaccgactcctcctcgtgctcccacacctactcccccgcaagctcctcttccggcaccttcaaagtcaaggcccccccagctccaccgcttgcccacataagggcaacaaagaaggcgaaagttgacgccgccaagaacaaggacccggggtacgattgcacgcaagaggagcttgacgcttacgttgcatcagaagtcaagagacaattcaagcctcgaagtccagaaaagaagattcctatagaccttagtgtcaggaacttcttcaggggtatgtctgcatctgtcaaggaggccatcaagctatcggactatgagcgaacgctgaagaaagcatcttctggaaagtccaaaccagtccctcagcttggagagcaaccaaaccaggagatcgagccgttggtgaccggtaaagaaatgacgatagaacaatttattactgacaccggtctaactacggatcaattgctaggagtcgcaccaatcgaaaaggcggaagtgaaatacatgtacgaactcggtaaaacgcttgtcaagcctgagctgctgcagtccctacccacacaaatgtacaagttccatcagctgtacatggagatgagcgccacaggtagagagatgatcggagcgaggatcagggacacggacttcttgcaaggagatgacattctctggatcaatttcaggggaatctacgaactataccagctggacgccctcgacgtctctattatgagttgctggattttaatggagattcaaagggcccgacggcggagggttttcgatactggattcatcgaccctcggaaagtaaacgtcgcaatgctcgaccaatatccacaagaaacagaggacaatctcgtccatctcctgaaggcgcagcattacaagacgttcatactgttgccatacaacacagaattccactgggtgcttttactcatcgacctggaggcctgcaccgtcaactgggcggtcccctcttgcgccgcggtgaatccggcagctggacaaccgaacacctcggccgacccaactccatcacgcccaccctcgccaccggtgcctaggaaagggtcgagctatgcttcagatcaagcagttacccactcccgcttgtggcggtggctcaaaggggaggcgagggaggcgctggccgggctcggctcggcctcaaggccgaccggccgaccaaggcgaggcggcggcgaggcacgaccaccgacggcggtgaccggcggtgcgggaagcggcggcgacggccgaaaggaggcggcgcatggccggagcagcggcgtggccggcgctcgcgggaagatggggttccggtggggttccggcgacgcgaggcggtggagcgatatggcccacacggcggcggagctagcggcggcggcggcttggcacggcggcggccctagtggcgacggcacgcggccggagatgggcggtggcggcggagctcggcgagcgcggcgcgacggcggtagagggcgtgggagaggacggtcagcacctaggctcgtctatgcctactcccatgccgccacgggcttcgcggcatgcatgacgaagcaccaggccgcgcacatcgcggaccaccctggtgtcctcgccatctaccccgacgagcatctccaactgcacaccactcagtctccctccttcctccgtctctcaccgtccgttggcctcgtacaggcatcaaacggcggcggcacgggcgcggtgatcgcgatcttggacactggcatttatcccaagggccgcaaatccttcaccgctgactcgtcgtttcctccaccacctcgcaccttccgtggtcattgtgtctccactcgctcgtttaatgccaccgcctactgcaacaacaagctcgtcggcgcaaagtttttctataaagggcacgaggccaagatgggtcacctgatcaatgagacacaagagtccaagtcacctctcgacaccgaaggccacggcacgcacactgcatctaccgccgctggttcagcggtccctggcgctaactttgttggctatgccaatggcaccgcccaaggcatggctatacgtgcacacattgcatcctacaaagtatgctggagagatgatggaaatgcatcgtgcgctacctctgacattctcgccggaatgaatgaggcaattgcagatggagtagatgtcatatccctttccttgggtggtctaaagccacaactctacaacgaacccacctcccttggcgcattcaatgccatccgtagaggcatagtcgtgtccacctccgctggaaatgatggccctggcacgtatactgctaataacctcgcaccatgggtgataacggttggcgcatcaagcattgaccgtcggttcccagctcacgttgtccttggacataatcgcggaacctacatcggcacctcgctgtatttcggccaaaacacagccggttcatttctacctctagtgtacggtggtgatgctggttctgctctgtgtgaatacgggatgctttccagcaacatggtcaccggaaagattgtcctctgctatggcacaaaaaatactaccaaccccatagtgcaagaagctgctgtccaacaagccggtggtgttggtgccatcatttcaattgctccagaatatggtgatttcttacagagcttcgctgatatcttgccaacgtcgacgattaccttcaaggacaccgaaacgatccattcgtacacacagtcggtggccgacccggttgcaagaatcgacttcttaggcactgtgatcaaccaatcaccgtctgctccaagggtcgcagccttctcaagtcgtggaccgaaccgctttgctccagagatcctcaagcccgacatgattgcccccggtgtcgacatcctcgctgcatggaccggagaaatgtcgcctaccatggccaatgtcatcgacaataggcgcgtcgagttcaacatcatctccggcacgtccatggcgtgcctgcacatgagcggcatcgccgctatgcttaaggtggcacaaccgagttggagcccagcggcaatcaagtcggccatgatgacgacggcctacaatgtggacaatgatggcaatgccatcaaggacatggccacgggccaggcagccagcccgttcgagcttgggtctggccacgtcgaccccaaccgtgccctcgaccctggattggtgaacaacaccaccgccgacgattacataacattcctctgcagcctcggctacaacagtagtcagatcgcgctcttcacaaatgacggttcgacgacagactgctcgaccaggccacggaggtccgtgggcgacctcaactacccggcgttctcggtggtgttcgtgaggtccggagagcaggtcacgcagcgccgcgccgtgaccaacgtcggggcgaacaccaatgtcatgtacaacgttaccatcaccgcaccgcccggcaccactctcacggtgacgccaacgaggctcgcgttcgacgcgcagcgcagaacgctggattactccatcaccgtgtcggcaggggcgaccagctcgtccgagcaccacactaattgctaa

SEQ ID NO: 51691 - DNA, 486 bp, Oryza sativa
  Clone ID: PAT_MRT4530_5405C.1
atgacgttcggcggaggcggcgctcagtgcacgctgaggcggcggcgcgtggagaggtcatcagcgacggtggcggcagtaggagctgcggaggttgcgcacggagaagggatcggcggcgatggcacgcggaggctgcggcggctgcacgcggggatgagcaagaagtggagcagcgggggtctcaccagatctggacggccgcggtggcagtggcggatgtcgttggagatgctgcgggcgaggtcagggagggtggcagcagcggggatatcacgcacgacgtcggggagggcggcgctagaccagcgtggtagcgaggtcgggatgggcagtggacaatgtcggggagggtggcgatcagagcttctgccgccggccgtgaaggcggcggcctcagacgagacaacgcccggtcgcgtgctccaagaagaaatgaggccgcctctgggtcggtggggaattggccaattggggaaagagtaa

SEQ ID NO: 51692 - DNA, 222 bp, Oryza sativa
  Clone ID: PAT_MRT4530_54060C.1
aacgaaaagcaaaagcgaagataggccatgtagcagacgagcaacgaataccagtagatgaggcagcacgaggaacgcagtatgccgacgcatacccaggaagaaggaataccgaggagctgagccaaacaaaaaaagagcagaggccaaaggacaaacagaaaaaagaagaagaagaacaaaaagaagggcggccgctaaaaagaaaacaaggaaaaggac

SEQ ID NO: 51693 - DNA, 5499 bp, Oryza sativa
  Clone ID: PAT_MRT4530_54061C.1
atggaagaagatgaagtggaagacgacaatattccggactttgctcagtatgttggatttgaaggaaatcaaacgggcgaggaggaactagctgctgatggtaacgacgttgcggatgatcttggtcagatgttgcaggacgccagggaagactgcgaaagtgaaaaggaggcccataaattggacaagatgttggaggaccacagaacttcgttgtacccaggttgcgagcaggggcacaaaaagttggataccactctggagttgttgcaatggaaggcaaaaaatgggaggaagtacataatgatgccgattattattcaaggccccaagcaacctggtaacgacatcgacgtgtacctaagaccactggtcgaagatcttaaacagttgtggaagaaggaaggtgtccccgtgtgggacgaggacaaacaggaggagtttaacctacgagcgctgctgttcgtaaccatcaacgattggcctgcacttagcaacctatccggacagtccaacaaggggtacaaggcttgcactcactcaaaccacccggtacggaagaaaggcaagcacttcgaacataaggccgaccaccgtacgaagcctaaacatcgcagcgggaaaacagtgtttgctatggttaaagatcttaaagtagtgttcggaaaggggcctggaagccagcatatagagagcgaagatggtcacgcggcgatgtggaaaaagaactctatattttgggagttaccatattgggaattcttggacgtacgccacgcaatcgacgtgatgcacctcactaagaacctttgcgtaaaccttcttggcttcctaggtgtatacggaaagtcgaaagatacactggaagcacgtaatgatctgaagcatatggaacaacgcggcgaccttcacccggaaccaaaggagaaaggaagccattacttgagtccagccagctacactcttagcaaggcagagaaggaaagtatgtttgaatgcttggagagcataaaggtaccgtctggatactccacgaatatcaagcgaataataagcacgaaggagaagaagttcacaaacctaaagtctcatgactgtcacgtgttgatgacacaactgctaccagttgtaataaggggtatccttccagacaatgtccgggcaacaataacaaagctatgtgcattcatgaacgcaatttcgcagaaggtcatcgatccggatagattagaagcccttcagaatgaagtggtgcaatgtctcgtcagttttgagttgatatttccaccttcatttttcaatataatgacgcatctgctttgtcaccttgtgaaagagatccgtattctcgggcctatgtacctacacaacatgtttcctttcgagaggtacatgggcgttctgaagaagtatgttcgtaaccgtgctcgtccagaggcaagcatcgccaagggttatggaacagaggaggtcatcgaattttgcgtagaatttatcgaagaccttcgcccaatcggggtacctgaatcacgccatgaagggagactacggggaaagggaactctcggaaggaaagcaataatgacggtagacaacaatttattccgtaaagcccatttcactgttctgcaacactcttcattggtagctccttacatcgaggagcacttggctctagttcgcgccaggaacatcggtaagtccgatgcatggattacacggcatcacattgatactttccccgcgtggctacgacaacatctcatgggtaacgagtcgatcaaccaacaacttgccttcctggcgaggggaccgtctgggtctatcgcgacattccagggatatgagatcaatgggtacacattctacacgagagcccaagacatgaagagcacgaaccaaaacagcgctgttcgtgtcgatgccatgggacacgatggaacaactgccacgtattacggtgccatcgaggacatatgggaacttgactatggtcctctcaaggttcctctgttccggtgccaatgggttaggttgactggtggaggcgtaatgattgatgacagtgggatgacaactgttgaccttaacaaggttggatactcggacgaaccttttgtccttgccaatgatgtaacgcaagtctttttcgtgaaggacatgtctagcaaaggaaagaagggcagagggcctgatgagcctaagcgtcaagtggttctcccaggcaaaagaaaaatcgtcggagttgaggacaagactgacgaggattacgatcagttggatgggcaaccccctttcacggtgacgattgaccctagcatcctcctatcaaatgaagacaccccttactcacgcagcgatcacaaggagggaacaatagtgaggagaaagtacgtgcggtcaaccgtcaccgccgatggcaaatccccgcgccgacgccgccgtatctcgccgtcgtctcgagctcgtcgtcctcgccgccgcctccgcctcctccgctgccgccgcatctctggggtgagagccgccgcatctcccttcatgcatctcgatctctccgatctcgatctctctccgtcgccttcaacgtcgtcgccttcgacgccgccgccttcgacgccgcgcaacgccgccgccgcatgccaatgccacgccgccgccgccgtcgccacgccgccgccgccttcgccgacgcgcgcgcaatgccgccgccgtcacgccacgccgccgtcgccacgccacgccacgccaccgtcgccacggtcccacaacgccacgccgccggcggcgttgccacgccggcgggccaaccgccgccccgatgccgccacaccgccgtttacgaacgagaacgagaacgatcgaacgaacgagagcgagaacgaacacgtcaacgtacgttgccgcgccaacgtgaacgagaacgagaacgatcgaacgaacgtgaacgagctagggaacatggctgaccgcgatgaggaacagatattgtacgatacaatcgtggagggaagcagccagtactggaatgaagaagaggggaacgaggatccaaaccagtacttgaacgaggaagggaacgtggagagggatgcggaggggaaccagcaggggcacgtggaaagggatgtggaggggaaccaggaggaggaggctagtggtagtcaaccctccgttggacagaagagggcacgcgggcaacgaggtgcagcgaagaagcttgagggtcggcacatcataacagaagtggaagaagatggacgtcctagtgccccggccgaagccgccaagaactatgtacgtcacagcggttgggttgtgcgggataacgtgcctgtcagtacggtgtactggcgaagaacaagggcacgcggagatcatgagagctttgtcccagattcggagaaagagatgctgtggaccacaatgcttgagacattcacccttcctgcgggtacagaggacaaagtgaaaaggtggactctgaagaaaatggcagaacagtttcagagcttcaagggagatctgtaccagaagtatatactgaaggggcagacaccgaacttcgacacattcccaaagctaagggatcactgggacgagttcgttgcatataagacaggtgaacaagggaaggcgatgatggaaagaaacaaagaaaatgccgccaagaagaagtaccatcaccacttggggtcaggaggctatagcgtcgcgatgccgaagtgggagcagatggaggctagcttgattgagaggggtatcgaaccggcaacagccaattggccggaacgatcgaagttctggtactatgctcacggtggaacgctcaacccagctgatggctcactggtcttcggctatcagatacaagaggctgcgcgacgactaacagatgcagtggaagcctcctctcagggcacgttccgaccagacagagatagggacgagctgacactcgccctgcagactccagagcatccaggacgaactcgagggaaaggggtgattccttggaagattggtttcaaggaggacatccacacgtacaggagtcggatgaggagcaagagagataccgaggcgaagattgcagacctagagttccgggtatcgagctacgaactcaacatgcaagaggaggtggcaaggaaggttgatgaacgcatggccgcacatcggtcccatgatccccagccgaccattcctcctgcaatggtgagcccgtcaggaaaccgtagcagctgcgcctcaacggggcaggtggcgtcgggcatggccatcccaacggacccttcaggtacttaccactgcaggccgattccagcaggatactctaaggtcgaagttgagttggtcgaagacgcgtacgaggacctcgagctggattaccctggaggagacggcggtacatcatcctccctgggcgacaagcggcgtctcgctccagcatcgactcctcaggatcctgcaccgactcctcctcgtgctcctacacctactcccccgcaagctcctcttccggcaccttcaaagtcaagggcccccccagctccaccgcttgcccacacaagggcaacaaagaaggcgaaagttgacgccgccaaaaacaaggacccggggtacgattgcacgcaagaggagcttgacgcttacgttgcatcagaagtcaagagacaattcaagcctcgaagtccagaaaagaagattcctatagaccccagtgtcaggaacttcttcaggggtatgtctgcatctgtcaaggaggccatcaagctatcggactatgagcgaacgctgaagaaagcatcttctggaaagtccaaaccagtccctcagcttggagagcaaccaaaccaggagatcgagccgttggtgaccggtaaagaaatgacgatagaacaatttattactgacaccggtctaactacggatcaattgctaggagtcgcaccaatcgaaaaggcggaagtgaaatacatgtacgaactcggtaaaccgcttgtcaagcctgagctgctgcagtccctacccacacaaatgtacaagttccatcagctgtacatggagatgagcgccaccggtagagagatgatcggagcgaggatcagggacacggacttcttgcaaggagatgacattctctggatcaatttcaggggaatctacgaactataccagctggacgccctcgacgtctctattatgagttgctggattttaatggagattcaaagggcccgacggcggagggttttcgatactggattcatcgaccctcggaaagtaaacgtcgcaatgctcgaccaatatccacaagaaacagaggacaatctcgtccatctcctgaaggcgcagcattacaagacgttcatactgttgccatacaacacagaattccactgggtgcttttactcatcgacctggaggcctgcaccgtcaacggcttggtatcggttccatcatttggtccgcggcaaagggagagaaagacttag

SEQ ID NO: 51694 - DNA, 312 bp, Oryza sativa
  Clone ID: PAT_MRT4530_54062C.1
ccgctttgtcgatacgagaaaaaccaccccagggtttttgttgtaggcaaaacatgccaggcgttaggggggagccatgaaccatctccttggcctgggtgacgcgggcatggtcatggataatcatattcaagcggtggggattctgacaaatgcagtgaaagccctacagcatgtattacaatgtgcgtgggacatcgaagtgacaaccatcgatttcatggaagtacaggaggcgatcaccacccatgtggcaattattttgcaagataatatgggcaccgacaccatggccactgccgtcagattaat

SEQ ID NO: 51695 - DNA, 147 bp, Oryza sativa
  Clone ID: PAT_MRT4530_54063C.1
atggccgtggtcagaggtagccagcgccacggtcactctcttccaactctcaaagctactagtgcaccgtacgtcagtgggccggccaacgcccatgatcgctactgctacttggcacttgcagaggatacacacatggtaaaatag

SEQ ID NO: 51696 - DNA, 217 bp, Oryza sativa
  Clone ID: PAT_MRT4530_54064C.1
tctctgtacctgttgcgccgacgggcggggcgttggaaggagaaagctcgccatctgcccccgcctacgtctcagaagggacatcgttgacagatggttgaggatgagctggctaatcaaccgcactgtacttaaacagcatcggtggcagatccaccttgactacagctatttctgaaagtgatgccgactagcatcaatggtgaccacaatgagt

SEQ ID NO: 51697 - DNA, 373 bp, Oryza sativa
  Clone ID: PAT_MRT4530_54065C.1
cccacgcgttcgccacgcgtacgccaccatcgaggaccgaggcacatgagacgactgttctgctacatgcaacaacgttgctgagccccatataatgagtaagctaggcacaagactgggatagcggtgggcccgttcttgcaagcacctgagttcctactgagaatcccacatgtatgtggacagttcgagctgatggcgcatcgatctcgctatcaagacattaccattgttcaagccatagcgcggtggatacgactctagtgggctgtggaccgatacttggatcggaacttggcgtaagatcgagctctcgccagtgctagctggccatatacatgtgggatctacactaggtactatggtgcacgca

SEQ ID NO: 51698 - DNA, 413 bp, Oryza sativa
  Clone ID: PAT_MRT4530_54066C.1
ttgcatttagactcgtctcaatatttgcttgtgtctgcactgggtgaccaaggccggtctgaccgggcccctagtggcggtctcaccggcgtaggtcggccggtctggccggcaagtgaaccccggtctgactggcccaggggatttcggtcgtgtactggttgggtgctccatgggtggaaaacccgagccgccggagccgtaaccggttaccgcctcctagacagcttgtggaggtgttgctcggtaacctctccgaggagattacggaggaggtccggcgccggtttgtgagtggtttggagttcaccaccttcggagtgaaggaagaactacccctagtgatcgaggcttgggtagtcctttccgtgtgccggctcccgccttgcccacccttgacaaagtggcatgcg

SEQ ID NO: 51699 - DNA, 5100 bp, Oryza sativa
  Clone ID: PAT_MRT4530_54067C.1
atggctgataggtttcttacattgaaaaaccttgcgtctgtttttcttcaacaagggtcagcattttatgataatgctcttcgttgttacctacaagctgtagagcttgatgcaaatgattcagttgtatggaaccatctgggaacactttcctgctctatggggaactgcatggagaaactcttggaggtgcttatagctatctgtgatgaagttgcatgcctttctgtagcaaagttaatacttaggagttggccatcacatcatcgggctttacatgtaaagaagaccattgaggatgcagaaccagtaccctttgcacctcgaggtatcgacatacttgaacccaagcatgcaaaactcaaattttgtaacaaaagaaaatctggagatgatgaaacgcatcatgaaacagtgacaaagaagagtaggcagaatgctaaattgcagttgactgaagccaaatggatggcccttttagatggtatcctaagcttcttaagttcaaacaacacaaaatctaatgaagatcacggtgccaatacagagagtcaatgtgatactaagaggagtatcaatgggtttgcttataacatgatggatgtctccttatctacggaaacattgaaaactatggaatctgcaggtgggaatgaacatgatttgtaccatgatggtgaaagtgtgctgtctcatgactgcagaactgcagttaaagagaaggacaccaattcagatagagaacatcctcatgaaaggagaagcacacgtcttgagaggctgcgaagtcgtaaatctggtaaagatgaacatgaatccaatggaaaagatatatcacatgctataactcaatttctagattcatttatcttgaagcgcacaagtattccagaaaagatcgattgttctggaaatggtgatgcttctacccctgaagctctaacatatacacctgatcgtgaggcaagtgatgtgaagcaatttctttccaaaatatcaaaaaattgtggacctcttcatattggctatatgttacttgaggaaatagctcagaccaacataccttttcaagattactttgttaagttcattgaactagacaaaattactagaggctgggctcaagatagatctgcacaatgcagcttatttcttgctgaattatactatgatcaagctctttgttctggaagcccattagcatcctcagagttgtccaattcatcttaccatctttgtaaggtcatccaatcagtagctttggaattgccattcagaacctctgatggagcagcaaagtccaccaatttggatttgaatatggaaagccatatggaagaggtgtgttcaagcgataaaactgagaagaatgcctcaaatatgtccagaaactctgtaaattctgtcaactcggtttccagtaacattctttgtgatgaaacatctgaatgtgattcttcttcaaacactaattgtgttttctggattcgcttcttctggctgagtggttgtctgtccctttcatcagactgcaaagaaaaagcttacaaggagttcaacattgccctgtcacttatgagaagtagcaacgaagccaaaatcaatagagagtttgtccttctacctcacaataagcttgtaaaattgcttacagctgataggattcttcgtgaaattaacttggtcaagcttgaatctttactttggcataatgatgaaaacatcaataaaataactcatacagagttcatggaattgcttcctccacttttgctttccaccaaagatgtctatgttggcagtgcatatggtccaccaagagaaagtgagaaagttatttcactagagttaggtgccttggatgttttaatatcagcatgtgaaaatgctaaaccaatgaacatccaggtataccttgactctcatcgaaggaaaatgcaagttctaactgtggcagctggcatggttggatcggttaccaccaatgaggggaaaaaatcaagtgatatagagtttatggaaacaatgaataggaatcgactggaaagtgttgtagaagcagtcaaagatgtttctcgaaatgctagtaaagcgaaagcctttgttgatcagtgtgataaccctgatgggcaagacggtttcagttcactagtttctattgttggtgattttcaatcattgctcctcacaatcatgtgtgctgctgttaagatgatcctatccagaaaacactcgtgtactggaacctcctatcaggctgaccagttggagagttcctgccttgttgatgcagccatcgcattttgcaaacttcagcatcttgatcctatgatatctatcaaaattcaggcactgcatgatttgcttgctgaatatgggctctgctgtgctgggcgtgatggtgaaggggaggaagggacattcctcaagttcactatcaagcatctcatggcactagatgtgaaactaaaatcccaacttaatccaaatgggatggaagaagatgcagcagaaaatgacagagcagaagatgttacgactgatgaggcatctgtttgtgacaataaacataattctgaggatgaggaagaatctgaattggatgaaatacagtcaagcattgacagtgccttggaccaggcctttttctgcttatatggtttgaagataaaccctgattcttgcagtgaagatgatttagcagtacacaaaaatacaagccgtggtgattatcagacaaaagaacaatgtgctgatgtgtttcaatatgtcctgccatatgcaaaagctctatcttttggtaagaagcatcaattgcagcgcatagtgccttggtcattctttattcattttcttcagaaaactggcttggttaaattacgaagagtgctgcgagctatacgtaaacactttccacagccaccttatgacttattggtcaataatcctcttgacaatttcttggatggacctgattcatgcgaaaagattctctctgaaatttacgaaactaatggatctaaggaagctgtcctgaatgtactgttcccaggtgaaaatggctacgaagcattcaagaaactgtccaatgctagctcagagccatactcagaagtttatgggaacctgtatcactacatagcgcaagttgaagatataagtgcctctgacaagtatacaggttttgtgttaaaaaaagaagggggtgaatttgttcaacagagtgctaaccttttcaagtacgatctactgtataacccattgcggttcgaaagctggcagaagcttgctaatctgtatgatgaggaggttgacttgttgctgaacgatggtagtaaacatattagcattttggactggcgaacaaatacaactttaatccaaagagttgagatgggtcgtagacatagtcgacgctgcctattgatgagtttagcattggctaaaaccgcttctgataaggcccaaatgcatgaaatgttggccctagtttattatgatagcctgcaaaatgtggtacccttttatgatcaaagggctactttgccagtgaaggattcaacatgggagacattttgtcgaaattctatgaagcactttcagaaggcgtttgaactgaaggctgagtggctctatgcattttaccttgggaagttgtgtgagaaactggggcattcccctgctgaagcattttcatactacaacaaagctgttgtgttgaatccaacggcagtcgacccggtttacaggatgcatgcatcacgcatgaagttactttatacccaaggaaagcagaatctggatgctatacaggaggaaaaatccaaatattggtggatccaaaaagaatctggaggtcagcttgtcagaaagttcacggaaattcattacatgcatcaggaatttgctctatgcttgggcgatatcgttcctgttggtcttgggaagtaccttcaagttctaacttcagcaatccgcaatcctgagattcgtagagtttctggcgatgcttccgttgagaacctacttgagaaaatgtttggtgtgttcatggaccatgcaaacttatgggctgatataagcactattccagaggtcaatagtcccgagctatcagaaagcaatctttacagttatatccaccaatacatccatttgcttgagagtgatgtccgactggatgttcttgaaggactaaatgagaagataagaaagcgttttaaaacacccaaactgtcaaacagcaatttcgccaagatatgcaagcacgcttctctggcatggtgccgttgtattctcatcaaacttgcatccatcactccactgcctgaatccatggaaacaactgatcagcctgctccactatccagcggtctagtgctttacatcgacttgcaacctgatgagcttctcatctcgtctcctgatgggcctgctcaattcaaaggcctcgatatgaactggtttgagacttttaacagaattaagaacattccgatcaggcaaacatccgaagataacatggagactgctgttactgtcatgaagagcacctacaacttctatcgggagagctcttgcggaacattcccatcgggtattaatctgtacacagtcaccccatcgcagccacctgttgaaggcctacagcaagccccagacgcaattgagaaccttgacctcagtattccaaggaagctccttctatgggtttataccttggtccacggccgttactccaatatatcagccgttgtaaagtactgcgatgagatgaagtcaagaagtaaaagaggagccccgacatcgacagcgacagcttcacagcaaaccacagtttctccccaagttggctccaaagagaagagcacccacattgaccctagcgaagctcaagaagcagcagcccctactccagctccagcagcggcgattgctccttcccagcaagaggcaggtgttgcagttgcaagcagccctcatgaggcccagaaaaccgccgccgcggcggcggcttctcaactcacccgtagcagctcatcgagggcgatggagagcactggtcaggatggcggtagaggaaacgacggcacggcttag

SEQ ID NO: 51700 - DNA, 270 bp, Oryza sativa
  Clone ID: PAT_MRT4530_54068C.1
atgaaatggttttctgcagaaccggattatggcgagagccgaggggaaggggtggcgccgacaagcggcccccacccgtcagtgactcaaggtggcgggcgcacggtggaccgggtccacgcgtggaataggcgcgggcgcaccacgtggcagccacgtggtggccagggcagcctagccgggaggaggtggcgcccacgtggcgccacgacggtaccgaccggggcagcactggcaagcaacgtggacggcccagattcatcgaggtga

SEQ ID NO: 51701 - DNA, 3904 bp, Oryza sativa
  Clone ID: PAT_MRT4530_54069C.1
tatgatcaagctctttgttctggaagcccattagcatcctcagagttgtccaattcatcttaccatctttgtaaggtcatccaatcagtagctttggaattgccattcagaacctctgatggagcagcaaagtccaccaatttggatttgaatatggaaagccatatggaagaggtgtgttcaagcgataaaactgagaagaatgcctcaaatttctggattcgcttcttctggctgagtggttgtctgtccctttcatcagactgcaaagaaaaagcttacaaggagttcaacattgccctgtcacttatgagaagtagcaacgaagccaaaatcaatagagagtttgtccttctacctcacaataagcttgtaaaattgcttacagctgataggattcttcgtgaaattaacttggtcaagcttgaatctttactttggcataatgatgaaaacatcaataaaataactcatacagagttcatggaattgcttcctccacttttgctttccaccaaagatgtctatgttggcagtgcatatggtccaccaagagaaagtgagaaagttatttcactagagttaggtgccttggatgttttaatatcagcatgtgaaaatgctaaaccaatgaacatccaggtataccttgactctcatcgaaggaaaatgcaagttctaactgtggcagctggcatggttggatcggttaccaccaatgaggggaaaaaatcaagtgatatagagtttatggaaacaatgaataggaatcgactggaaagtgttgtagaagcagtcaaagatgtttctcgaaatgctagtaaagcgaaagcctttaaacactcgtgtactggaacctcctatcaggctgaccagttggagagttcctgccttgttgatgcagccatcgcattttgcaaacttcagcatcttgatcctatgatatctatcaaaattcaggttgacttgattgtggcagtgcatgatttgcttgctgaatatgggctctgctgtgctgggcgtgatggtgaaggggaggaagggacattcctcaagttcactatcaagcatctcatggcactagatgtgaaactaaaatcccaacttagtaggtgtttcctagcaaatttattatggtatcatgtttctgtcccaattaattactagaatttgtttattatctctatcttattgttagatccaaatgggatggaagaagatgcagcagaaaatgacagagcagaagatgttacgactgatgaggcatctgtttgtgacaataaacataattctgaggatgaggaagaatctgtaccattgaccctgaaattctctgtttttgcagaattggatgaaatacagtcagcattgacagtgccttggaccaggcctttttctgcttatatggtttgaagataaaccctgattcttgcagtgaagatgatttagcagtacacaaaaatacaagccgtggtgattatcagacaaaagaacaatgtgctgatgtgtttcaatatgtcctgccatatgcaaaagctctatctaaaactggcttggttaaattacgaagagtgctgcgagctatacgtaaacactttccacagccaccttatgacttattggtcaataatcctcttgacaatttcttggatggacctgattcatgcgaaaagattctctctgaaatttacgaaactaatggatctaaggaagctgtcctgaatgtactgttcccagatcactacatagcgcaagttgaagatataagtgcctctgacaagtatacaggttttgtgttaaaaaaagaagggggtgaatttgttcaacagagtgctaaccttttcaagtacgatctactgtataacccattgcggttcgaaagctggcagaagcttgctaatctgtatgatgaggtatgtttatttgggttgacttgttgctgaacgatggtagtaaacatattagcattttggactggcgaacaaatacaactttaatccaaagagttgagatgggtcgtagacatagtcgacgctgcctattgatgagtttagcattggctaaaaccgcttctgataaggcccaaatgcatgaaatgttggccctagtttattatgatagcctgcaaaatgtggtacccttttatgatcaaagggctactttgccagtgaaggattcaacatgggagacattttgtcgaaattctatgaagcactttcagaaggctttccttcacagggctgagtggctctatgcattttaccttgggaagttgtgtgagaaactggggcattcccctgctgaagcattttcatactacaacaaagctgttgtgttgaatccaacggcagtcgacccggtttacaggatgcatgcatcacgcatgaagttactttatacccaaggaaagcagaatctggatgctatacaggttgttgctgattatacatacaaacagtcaaccaaggaagatgtcttgagcatgctacagtccataaataatgtcaagaattcaccctctgatcataatgataaatgtgtccttgatagcacagcggagaataagtttgttgaccctgatctacttgataaagtgtggcacatcctatatgatgattgcctgtgtgcccttggtacttgtgtggaaggtgagctgaagcatttccataaggcgagatacaagcttgcacaaggattgtatagaaggggtgaagcaggggacctagagcgagctaaagaagagctttcattttgtttcaaatctactcgttcttcctttacggtgaacatgtgggaaattgatggttctgttagaaaaggaaggaggaaaaatccaaatattggtggatccaaaaagaatctggaggtcagcttgtcagaaagttcacggaaattcattacatgcatcaggaagtacatgatactttacttgaaccttttggagaaaaacagggatttgtggaccctagagagggcgtacacttatctgcgaactgataagaggtttgctctatgcttgggcgatatcgttcctgttggtcttgggaagtaccttcaagttctaacttcagcaatccgcaatcctgagattcgtagagtttctggcgatgcttccgttgagaacctacttgagaaaatgtttggtgtgttcatggaccatgcaaacttatgggctgatataagcactattccagaggtcaatagtcccgagctatcagaaagcaatctttacagttatatccaccaatacatccatttgcttgagagtgatgtccgactggatgttcttgaaggactaaatgagaagataagaaagcgttttaaaacacccaaactgtcaaacagcaatttcgccaagatatgcaagcacgcttctctggcatggtgccgttgtattctcatcaaacttgcatccatcactccactgcctgaatccatggaaacaactgatcagcctgctccactatccagcggtctagtgctttacatcgacttgcaacctgatgagcttctcatctcgtctcctgatgggcctgctcaattcaaaggcctcgatatgaactggtttgagacttttaacagaattaagaacattccgatcaggcaaacatccgaagataacatggagactgctgttactgtcatgaagagcacctacaacttctatcgggagagctcttgcggaacattcccatcgggtattaatctgtacacagtcaccccatcgcagccacctgttgaaggcctacagcaagccccagacgcaattgagaaccttgacctcagtattccaaggaagctccttctatgggtttataccttggtccacggccgttactccaatatatcagccgttgtaaagtactgcgatgagcgcaccaaggcggcgtggagcctcccgctc

SEQ ID NO: 51702 - DNA, 357 bp, Oryza sativa
  Clone ID: PAT_MRT4530_5406C.1
cccacgcgtccgaaaaaaaaaaaaagaaaaaaaaaaaagaaaaaaaaaaaaaaggagaaagagaaaaaaaaagaagaagaaaaaaagacaatgaacagggtgaagcaaggacacttaaccaagcgcaatgaggaagaatggtgctgatgaccaagggacacatggggggatatgcaacagaagagacccctgaaagatgcccctcaaccataatcatgctaccaagctggaagatcatcttacggaggggcggaagaaagaaacctgggcaaggataaagactgacgggaagaaaaaaatgactggtgagtacaacaatcagagcggtgcaagggtgcatgtacaagaacacaccga

SEQ ID NO: 51703 - DNA, 5738 bp, Oryza sativa
  Clone ID: PAT_MRT4530_54070C.1
gtttcttacattgaaaaaccttgcgtctgtttttcttcaacaagggtcagcattttatgataatgctcttcgttgttacctacaagctgtagagcttgatgcaaatgattcagttgtatggaaccatctgggaacactttcctgctctatggggaactgcatggagaaactcttggaggtgcttatagctatctgtgatgaagttgcatgcctttctgtagcaaagttaatacttaggagttggccatcacatcatcgggctttacatgtaaagaagaccattgaggatgcagaaccagtaccctttgcacctcgaggtatcgacatacttgaacccaagcatgcaaaactcaaattttgtaacaaaagaaaatctggagatgatgaaacgcatcatgaaacagtgacaaagaagagtaggcagaatgctaaattgcagttgactgaagccaaatggatggcccttttagatggtatcctaagcttcttaagttcaaacaacacaaaatctaatgaagatcacggtgccaatacagagagtcaatgtgatactaagaggagtatcaatgggtttgcttataacatgatggatgtctccttatctacggaaacattgaaaactatggaatctgcaggtgggaatgaacatgatttgtaccatgatggtgaaagtgtgctgtctcatgactgcagaactgcagttaaagagaaggacaccaattcagatagagaacatcctcatgaaaggagaagcacacgtcttgagaggctgcgaagtcgtaaatctggtaaagatgaacatgaatccaatggaaaagatatatcacatgctataactcaatttctagattcatttatcttgaagcgcacaagtattccagaaaagatcgattgttctggaaatggtgatgcttctacccctgaagctctaacatatacacctgatcgtgaggcaagtgatgtgaagcaatttctttccaaaatatcaaaaaattgtggacctcttcatattggctatatgttacttgaggaaatagctcagaccaacataccttttcaagattactttgttaagttcattgaactagacaaaattactagaggctgggctcaagatagatctgcacaatgcagcttatttcttgctgaattatactatgatcaagctctttgttctggaagcccattagcatcctcagagttgtccaattcatcttaccatctttgtaaggtcatccaatcagtagctttggaattgccattcagaacctctgatggagcagcaaagtccaccaatttggatttgaatatggaaagccatatggaagaggtgtgttcaagcgataaaactgagaagaatgcctcaaatatgtccagaaactctgtaaattctgtcaactcggtttccagtaacattctttgtgatgaaacatctgaatgtgattcttcttcaaacactaattgtgttttctggattcgcttcttctggctgagtggttgtctgtccctttcatcagactgcaaagaaaaagcttacaaggagttcaacattgccctgtcacttatgagaagtagcaacgaagccaaaatcaatagagagtttgtccttctacctcacaataagcttgtaaaattgcttacagctgataggattcttcgtgaaattaacttggtcaagcttgaatctttactttggcataatgatgaaaacatcaataaaataactcatacagagttcatggaattgcttcctccacttttgctttccaccaaagatgtctatgttggcagtgcatatggtccaccaagagaaagtgagaaagttatttcactagagttaggtgccttggatgttttaatatcagcatgtgaaaatgctaaaccaatgaacatccaggtataccttgactctcatcgaaggaaaatgcaagttctaactgtggcagctggcatggttggatcggttaccaccaatgaggggaaaaaatcaagtgatatagagtttatggaaacaatgaataggaatcgactggaaagtgttgtagaagcagtcaaagatgtttctcgaaatgctagtaaagcgaaagcctttgttgatcagtgtgataaccctgatgggcaagacggtttcagttcactagtttctattgttggtgattttcaatcattgctcctcacaatcatgtgtgctgctgttaagatgatcctatccagaaaacactcgtgtactggaacctcctatcaggctgaccagttggagagttcctgccttgttgatgcagccatcgcattttgcaaacttcagcatcttgatcctatgatatctatcaaaattcaggcactgcatgatttgcttgctgaatatgggctctgctgtgctgggcgtgatggtgaaggggaggaagggacattcctcaagttcactatcaagcatctcatggcactagatgtgaaactaaaatcccaacttaatccaaatgggatggaagaagatgcagcagaaaatgacagagcagaagatgttacgactgatgaggcatctgtttgtgacaataaacataattctgaggatgaggaagaatctgaattggatgaaatacagtcaagcattgacagtgccttggaccaggcctttttctgcttatatggtttgaagataaaccctgattcttgcagtgaagatgatttagcagtacacaaaaatacaagccgtggtgattatcagacaaaagaacaatgtgctgatgtgtttcaatatgtcctgccatatgcaaaagctctatcttttggtaagaagcatcaattgcagcgcatagtgccttggtcattctttattcattttcttcagaaaactggcttggttaaattacgaagagtgctgcgagctatacgtaaacactttccacagccaccttatgacttattggtcaataatcctcttgacaatttcttggatggacctgattcatgcgaaaagattctctctgaaatttacgaaactaatggatctaaggaagctgtcctgaatgtactgttcccaggtgaaaatggctacgaagcattcaagaaactgtccaatgctagctcagagccatactcagaagtttatgggaacctgtatcactacatagcgcaagttgaagatataagtgcctctgacaagtatacaggttttgtgttaaaaaaagaagggggtgaatttgttcaacagagtgctaaccttttcaagtacgatctactgtataacccattgcggttcgaaagctggcagaagcttgctaatctgtatgatgaggaggttgacttgttgctgaacgatggtagtaaacatattagcattttggactggcgaacaaatacaactttaatccaaagagttgagatgggtcgtagacatagtcgacgctgcctattgatgagtttagcattggctaaaaccgcttctgataaggcccaaatgcatgaaatgttggccctagtttattatgatagcctgcaaaatgtggtacccttttatgatcaaagggctactttgccagtgaaggattcaacatgggagacattttgtcgaaattctatgaagcactttcagaaggcgtttgaactgaaggctgagtggctctatgcattttaccttgggaagttgtgtgagaaactggggcattcccctgctgaagcattttcatactacaacaaagctgttgtgttgaatccaacggcagtcgacccggtttacaggatgcatgcatcacgcatgaagttactttatacccaaggaaagcagaatctggatgctatacaggttgttgctgattatacatacaaacagtcaaccaaggaagatgtcttgagcatgctacagtccataaataatgtcaagaattcaccctctgatcataatgataaatgtgtccttgatagcacagcggagaataagtttgttgaccctgatctacttgataaagtgtggcacatcctatatgatgattgcctgtgtgcccttggtacttgtgtggaaggtgagctgaagcatttccataaggcgagatacaagcttgcacaaggattgtatagaaggggtgaagcaggggacctagagcgagctaaagaagagctttcattttgtttcaaatctactcgttcttcctttacggtgaacatgtgggaaattgatggttctgttagaaaaggaaggaggaaaaatccaaatattggtggatccaaaaagaatctggaggtcagcttgtcagaaagttcacggaaattcattacatgcatcaggaagtacatgatactttacttgaaccttttggagaaaaacagggatttgtggaccctagagagggcgtacacttatctgcgaactgataagaggtttgctctatgcttgggcgatatcgttcctgttggtcttgggaagtaccttcaagttctaacttcagcaatccgcaatcctgagattcgtagagtttctggcgatgcttccgttgagaacctacttgagaaaatgtttggtgtgttcatggaccatgcaaacttatgggctgatataagcactattccagaggtcaatagtcccgagctatcagaaagcaatctttacagttatatccaccaatacatccatttgcttgagagtgatgtccgactggatgttcttgaaggactaaatgagaagataagaaagcgttttaaaacacccaaactgtcaaacagcaatttcgccaagatatgcaagcacgcttctctggcatggtgccgttgtattctcatcaaacttgcatccatcactccactgcctgaatccatggaaacaactgatcagcctgctccactatccagcggtctagtgctttacatcgacttgcaacctgatgagcttctcatctcgtctcctgatgggcctgctcaattcaaaggcctcgatatgaactggtttgagacttttaacagaattaagaacattccgatcaggcaaacatccgaagataacatggagactgctgttactgtcatgaagagcacctacaacttctatcgggagagctcttgcggaacattcccatcgggtattaatctgtacacagtcaccccatcgcagccacctgttgaaggcctacagcaagccccagacgcaattgagaaccttgacctcagtattccaaggaagctccttctatgggtttataccttggtccacggccgttactccaatatatcagccgttgtaaagtactgcgatgagatgaagtcaagaagtaaaagaggagccccgacatcgacagcgacagcttcacagcaaaccacagtttctccccaagttggctccaaagagaagagcacccacattgaccctagcgaagctcaagaagcagcagcccctactccagctccagcagcggcgattgctccttcccagcaagaggcaggtgttgcagttgcaagcagccctcatgaggcccagaaaaccgccgccgcggcggcggcttctcaactcacccgtagcagctcatcgagggcgatggagagcactggtcaggatggcggtagaggaaacgacggcacggcttagctttgccccaccctctactggctgctagtaggctaatttctgcagtgtgtgtgtgtgtgtccatgtgaatatgtgtgacctgtgtggctgtgtgactgaccccctcctaatgttgatgtctcacaacgctgatgattaccgtcgcaggaaaatatcctgtacagtt

SEQ ID NO: 51704 - DNA, 804 bp, Oryza sativa
  unsure (1)..(804): unsure at all n locations
  Clone ID: PAT_MRT4530_54071C.1
attatagttatttttttaactcagaatagttgtatatattatatatttgagttttgagattgcaaagcaaagcacgggtacaatactaatgtttgtatagggaaaaaaaatgaaaattcagctcaaacgaattaccaggtctaaactctaaacactgggaataatgcctttctgatgttccagaatcagatgtccaccggtgaaagtatttttcacaacaattccgtcaaatggcttgcttgctagcttggatccatccatccacacatacatatagcacctaccggtctgtaactaacaaaaattatgcacaaacagattaaacaaatcctccggagacagcacttacttcaaacggacctagcgccttcatgccaactccgatttaggtggtcttggacttcatagaaagtttatctcgctacctttcaaatgcatccggtgtcatgtccaaattcatctcgagtcaacgggaattgccaaaataagacagtgctgttgttgaaaccgaacttaggccttgggccttgtaatagactaggcccatctcggaagtgtctccctccacctccatgaattagcacttaaccctagctttattttcccctataaatagctntgtacatcgtcaaaacaattgggttttgtttagttgaattttgccaagtgccattcaccttgtctctagtcctcgctcgattagtcgacgactatagattcagagcccccatagttgggtgtgttgattcagagccacctcaatcgcaactattcctttgtgcttaattacctattcgcatattt

SEQ ID NO: 51705 - DNA, 110 bp, Oryza sativa
  Clone ID: PAT_MRT4530_54072C.1
atccggccttcgaggtgccggatccgcctgtcacacctctggccgcggtgagggactttgtcggcttcaccccgtcgatgtcgcgccggggtgggagacgccaagaatag

SEQ ID NO: 51706 - DNA, 581 bp, Oryza sativa
  Clone ID: PAT_MRT4530_54073C.1
caatattagcattagatcaattccttcattagccacataaaagcctatgatccttctgagtagaagaagcaatcacaaccatcatccaccaatctgtagccaattcaagcatcagatcgatcaacaagaaataatcgtcttcaccgatcctacttcgctggttatcttcatcaacatggtaacacgccaccgctgactcgtccacatatatggacaccacgcttcatcatcgacgacatcaaccgcatcctctacaacggcaacgaccgcgtcaccgatgacggcatcgatcacgtcatctacaacgacaacgactgcttcaactcggcatcactattgtgatgactgctacgcgatgcagaaggaccaaccaaagtggtggcctcaaagccaatgacgtcctctcacatatacaagacgttcccaatggcatcctttgatatctacaaggtgcaagatgctaacaattgcagttttcgtcttgacaccacggcataaatatttttttccccttcggctatttgcggctacaccaactaccatgactactatgaccacggctactacatgatcggctacat

SEQ ID NO: 51707 - DNA, 431 bp, Oryza sativa
  Clone ID: PAT_MRT4530_54074C.1
tcgtttctaatagaatactatggacgggtcggagggatatcttacgacaactatgaaacaacatggaaagccacgtttgatgatgcacgattatggcccgaacatcgtatgatggatgatatggtggcctatgccctcaagagtgaaggtggatgtgattgggctactatgaactatcacgaagatttgccacgtgacctaatggactcaaggcttttgatcgatcggactaacagacactatttctgcagagccctgatcggcagaaccattgaagctgaagctgatcatgggacagacacacgccattatagagaacacctgccacgaagcaaatcttgagcctatagcattgctggagtgaatgctcggacagccggactcgtacatctggctaaggtcgatgacaattaatgactgttcgatcttgt

SEQ ID NO: 51708 - DNA, 234 bp, Oryza sativa
  Clone ID: PAT_MRT4530_54075C.1
gaatccaactctccttatttatttggggcgaggattattatcatcacattcactggaaaagctacatccaaacatgatagatcctactagcaaatatcgatacttaagtatccagcaacccggataactaattaaataattaattaagcaaaggcctaattaattaattactaacgaagttaacccattccacccctaaacatgcgtcaggtttaagaaaccagtgtgctgcat

SEQ ID NO: 51709 - DNA, 440 bp, Oryza sativa
  Clone ID: PAT_MRT4530_54076C.1
gccgatgataaccttattttcttttgttgatttggaacattctagaaattacaggaccaaaatatatccgatgggtactctctgatgaggcggcgattgttgaacgaccgtcttctacttgctgaaagaagctttctgcaagctgatggacttcagggaagaggatggttcaagcatctgatgtactcgcctccggaggactacgaaagcaagctctcgtttttccctggggtggcggacgccatctcccggtcgagcaatcgaagcgcgaaagaacagcaggcggcggtgcggcatgaggtgcggaaaatctctagggcaatccaaagagcagctgatgttcttagaggcgaattcagtaataggaacgaatctttatactctagcctttctgtggctccataaaaactgtgtataaataaaatcgattggggtttgag

SEQ ID NO: 51710 - DNA, 252 bp, Oryza sativa
  Clone ID: PAT_MRT4530_54077C.1
gctgacagtccacttgatattttcctgaaatctcttggacttgagaagtactcgattaccttccaggcagaagaggttgacatggcagccctaagacacatgactgacagtgatcttaaagctttgggcattccgatggatataggtggcaccaaactaatatggaaacttaaggtgggtgttctttcagggtccccggaagaagatcatgcttgccttggaatcgagagcgtagggagggctggcgtgtaa

SEQ ID NO: 51711 - DNA, 1434 bp, Oryza sativa
  Clone ID: PAT_MRT4530_54078C.1
aaaccgagccactgctccggcggcggcggcggcggcggcgagttgagatggctgacgacgcggcgagtgagcaagccacggacgtggccgcggccggggccgcggatgaagggcagcctccggcgatgtcgaaaagcgcgaggaagaagctgctgaagcaggagaggcaggcggcgcagaaggcggcacggaaggcggcggagaaggagcgccggcgcgccgacatagagaggcgaaggcgcgagtgggaggaggcgctggccgcggcgccctcggaggaggcccgcgccgagatggtggaggcgcggcggcagacgcggcgcgagcgggtggggcggcgcgcggaggagcgcggcgcacgcgccgagcggctccgccgcgcggccgagggcgccgggcagaaggtggtgctggacctcgagttcggagatctcatgcggcccaacgagattcacagcctcacgcagcagatcatgtactgttatgcagttaatgggaggtctacgaaccctgctcatctatggttgacaggttgcaatggagaaatggcaacccatcttcaaaggattcctgggtatgataagtggatgattgaaaaggaggccaagtcttatcttgaagcatttgaagatcgtaaagaaaaccttgtgtaccttacagccgatgctgaaactgtgcttgatgatctagacatgtcaaaaatatacatcatcggtggcctagtggaccggaacagatggaaaggtattacactgaaaaaggcggttgatcaggggattcaatgtgccaagctccctattggaaattatttaaagatgtcaagttctcaggttctgacagttaaccaagtgttcgagataatgctaaagtttgtggaaacaagggactggaagacttcgttctttcatgtgatcccacagaggaaaagaggagaagctgaagctggaaatgatggggtcgatataagcatgaacaatgttgatgccgccgaaggggctgagaatcaaggtgaccttaccaaggtttttgatgaggatgtagatgatgacgatgttgttgatgaagaactacaagaggaagacaccgatatggctaagaaaaagcagtgtattagacatgaaaatggtgaggcagaggatgcctccaccaggccagctgaggatcactctcccggtgcagcagcagagacgacgacacccaccggaggcgctctcccccaggctgagcagagtaaagaaagcaatggtgccgatgactgaagaagactggactgcaggtgtatgatcactgttctgtagaactgcttttctttaacccggggttttaactcgggcgtacattgtttggagcgctctcttttcgtgtatctcagtcgtgtttgacagcctactcttgtcattgatgactataacaaggtagccctgaacccgttgc

SEQ ID NO: 51712 - DNA, 1328 bp, Oryza sativa
  Clone ID: PAT_MRT4530_54079C.1
ttttttttttttttttgatttgggtttttttttttttaaataaatcatacaaccaacaaaagtcgatggctgagtcaaaggacttcaataaacaaatattcagtcaagtacatggcattttaacataagatcctctgtttttctcttttcttctagtagtataaaatagctctgggtgaggagttcaacttaaaagtcggtagggtatttgtcgggtttaaaccacaaggagaaatcaattcctttcttcttaagatcttctgtggcagggccaatccgatccaaaagctgatcatgtacaacaccattggaaacaaggacagaacgatcaaagacggtaaactccccaccatccatgcgtgacaccatcccaccagcttcttcaactatcagaacaccagcagccatatcccaaggcttaagtcggtattcccagtaggcttctgtaatgcctagggcaacgtgggacatgtcagcagcagcagaacctagtcttcgtactcccctgctaatgtctgtgtattccttgaacaaatttatgttggtcacccatgcatcatcatgttcataaccaaaaccagttaccagaagtgattgttccaccttgtctgtcttactgacatgaatcttttgcccattacaataagcaccaccaccagatgatgctgaaaccgtacgagtgctccagcacataggaccaccacaaaattcgaccacagtggaagcagcaggctttccgcgaaacagaactccaatggatacagaaaagctagggtaaccatgcgcaaagtttgttgttccatctaaaggatcaatgcaccagagatactccgacaaggcatctccaataagtccaccttcctccccaagtatgaggtggtctgggaaggtcttcctcacaacttccagaatgaccgactcactcaatttgtctgtgtctgtgaccaggtctgcaactcccttgtagtgaatattgcgtggcttattaacagcttccattataacctcggctccggccctggctgcgtcctggatgacgccgaggagctccgcggccggaatcgggccggtggtgggggcggccaccttggggcacttgcccctcgcggcgggctgctccgacgccaccgccatcacggggcgagctttgccggccctggaggcaagcgcccggaggccaagaaccggtccccgccgcgaggttgtgccattcctgcggtgtgaagaggcggcggcagcggcggcggcggcggcggtgggaggacggagaagataccgtgccattggtgctcaggccttcgagaagatgtctctgctttttttttttc

SEQ ID NO: 51713 - DNA, 698 bp, Oryza sativa
  Clone ID: PAT_MRT4530_5407C.1
gtcagcctttgatgttattttagcggatccaattcctgctaaaggtgaaatcttgacgcaaatctccaatttttggtttaaaaaacttgagcatattatgccaaatcattttacgggtgattctgttttcgatgtgttagctaaagaagaagctgaggctattcaacatcgcgcagtggtttgtaaacgtttaacacctgtgaaaattgaatccattgtgcggggttatttgaccggttcaggcttaaaagattatcaacaaaccggtagtatttgtggtttagcattacctgccgggttagttgaggcgagtaaattaccacaacctatttttacgccgtctagtaaagctgaagtgggtgatcacgatgtgaatatttcatacgaagagtgtgaacgtgaaatatgccttaacaaaaggaattattatttgtgatactaaatttgaatttggattagatgagaatggtgtattaacgttgatggatgaagtgctaacgccagattcaagccgtttttggtcggtcgaaacttatcaagaagggataaatccaccatcattcgataaacaatttgtccgtgattggctcgcaaatagtggttggaataaacaggcactttcattttaaaactcctattgatgtaattgagaaaaccccacatccattgatgatattgtgactgatagcgtaagtcgc

SEQ ID NO: 51714 - DNA, 369 bp, Oryza sativa
  Clone ID: PAT_MRT4530_54080C.1
acgtgcactgcaccgtaacgtaagcatcgctattactgtaggagcggcctgtggtgtactacttttaccaccacaggtgtgcccggaaccgagggccttatcggtgcgcggatggcatgaaaaaactgtaccaattgcttgcaggttacctgattatcatatagaacgacaattggaaatggacaatggcttatgagagcgatcaacgatgggaatccagcatctaggattacagaatcacatagaaactgaacatattgtgaactttgtaacaattcgtagaacaaggatggctagacacgcgactagcggtgcatgactcacagctggtttagcccgtcaagcaagcatgagctgaaccgagccatg

SEQ ID NO: 51715 - DNA, 337 bp, Oryza sativa
  Clone ID: PAT_MRT4530_54081C.1
aaaaaaaatgatcttatgattattgggggtgttataaataagcgggtgtcaacatcaggaataatacacctacaatacaagctcttaacagcagattaccaatcttcttttccacagcatataagccacgtgtacattcgcttaatcatactggaattcttttactacacaaaaacattttactagccaaaggagtggcttgggcctattcctatgcctttgcctttgcctataccccctcttcatatgcaggccaccatgcaagacgaccaccaccttcttctttaatgctttcctacgaaagcattaggcaggcttgttacccatcaaaagacac

SEQ ID NO: 51716 - DNA, 549 bp, Oryza sativa
  Clone ID: PAT_MRT4530_54082C.1
atggcgcggccatgtttggataacgggaatgctacataccggaatcccgtccggacgggactcttgcttattcaaagaggagcgatacctgaccatggacgtcccgagcagcagcagcagctgcctgtgcaggacacggtgccgctccaacatgcacgcatgcatggccgacatgggtggcggcgctgtggcgcccacgcccacaccgttgacgcactatcccgcaaccgcgagctcctcgccggtggcgccggctgtggcacccacgcccgcaccatcgacgcactgcgccacgaccgcgagcctctcgccggcggcaccggcgccggcgtaggagaggaggatcccaacacggacacggcggcagatgaggaagtagagcacgaaggtgctgccctcgctgccgtcatcggcgcgagcacgacgagcacgtacctggctagctcgtcgaggcagcagaggatgtggccgccggcgacaagctccgacgtggcgtggacggtggaggatgcggctattggtgatgagctccggcctgggagtggatga

SEQ ID NO: 51717 - DNA, 145 bp, Oryza sativa
  Clone ID: PAT_MRT4530_54083C.1
tatatataaagggagacaattcagaacacacggggccaaataaaatcgacagggggatcgctcactcaccaacattcgacctcgcatgtcgccagtgcaggtcagcgcagatgctacagcggctctgagctgatctgcccaagga

SEQ ID NO: 51718 - DNA, 1470 bp, Oryza sativa
  Clone ID: PAT_MRT4530_54084C.1
atgagcaacagcgccgccacctccacctacgcggagagcgtcgcgtcctgccgcgctcccgctcccgccacccccagggcccccccacgccgccgtgaggcgccacttcgacttcgccgccggcgacggcgttatatgttggattttctggatgcatgtgtatattttctcaagcatgcgagagtacatgaggaaagaaatgcaaatattctgtttggtgtggagaagctgatatttgtccaaatgccacagcctgcttatatgagccatcctaaaccaaatcctcatgtttttagcagcccatgcagtcctgttgtgttcaacagtcctagcaatcatttagctggttctacaactcctacaccgaacaatctccaagtttttaatggtccaagaaaccctcatgtgtccaacagtcctagcaatcatttagctggttctacaactcctacaccaaacaatctccaagtttttaatgctccaggaaaccttcatgtgtcccacagtccaaacaatcatcgatctggtgctacaactccagttaacgctaatccccctgcagcccgtgtagtgttcaacagtcctagcaatcatttagctggttctacaactccatagacggaacaatctccaagtttttaatggtccaagaaaccctcatgtgtccaacagtcctagcaatcatttagctggttctacaactcctacaccaaataatctccaagtttttaatgctccaggaaaccttcatgtgtccaacagtccagacaatcatcgatctggtgctacaactccagttaacgctaatccccgtggttacctgaatacgatgagtggccatttgacatcgtcaacaatgatgttgtatgcagtggcttcttgccaactgctgagcctacactaagagatggtatagttgctggggaatcaccaagtacgcagcacctgtcaaatgctacgactgaagcgaaaacaccaacaaaatcgcccattatgccgccacctcatggtagcgggagccccttcactcctcggtcgaacccctgctaccgatgtggtgaagacgggcactggtccaggaactgccctaagccggcttcgagcccacttaactctccttgctacaactgcggcaagcttgggcactggagagcaagaggtgggctcctacggtgtttgtccatcatctgctttgttaatcacttcttacatgaatgcaaagtgcagacctgttactgctacaactgctactttgctcctttcttcttcagtatgatgaactggaaggcgatcggctgccgttctctgaatctttctctgaaatttttcctcgagagtttctttcagagatggtccagccctctgccgttcattcggtcagaaactgaaacctgggatgatgatcgttgcagagacttgaccaggacatacgaggacaagaagaagaacaccaatcgatggatggattga

SEQ ID NO: 51719 - DNA, 388 bp, Oryza sativa
  unsure (1)..(388): unsure at all n locations
  Clone ID: PAT_MRT4530_54085C.1
cgcccacgcgngcacccgggggaaacaacataaacaccaaatcgaggagggagagcaccgaagagggggacaaccaagggggggaggggtaggaaaagaccaccctaccccgcgggcacaggaacggcagaaagcgaaacacgcatgttccccacgaggcactcatacggaagaactacacaagtggcgagcgcgacagcggctgccacatagaaccaggcgcagcgcacttacagacaacagagaaacagggcaacggacgcagagaacccagagggggaatggacaaaaagcaaccggacgaaacacaaacccagatagagaaataaaggcgagagaagtaccgacgcaagcacaaggagaaaggcccagcacgagtcacagaaac

SEQ ID NO: 51720 - DNA, 513 bp, Oryza sativa
  Clone ID: PAT_MRT4530_54086C.1
atggggtcgtcacggcagaaggccttccacatggtccggaagcgtggcaggcggcagcatgtcgatttccggtacccggcggccatgtcaatcgaggaagtctgtgatcccgacgaggaacgcgtcgtcgccgtgttccacgattgcctcgccgcgcacggcctgctcctggacaaccacgatgactaccatattatgctaaaggagttctgctatgttcttatggtcaggagttccgaacagggataccatgctgttgatcaggaaggccagccgatgtacatcaagaagcttggcaagatcaatcgaaacaagctgatgcagatcaccacagtggacagttacaacttacatcaattagcatgttgtagagatttaattgcagattttttgctacctacagttcagttgacatgctttcttacagctaatgttcagactacaaccactaccagttcaactagcctgtttcttgcttcttttcataaagttacacatatctacatggattaa

SEQ ID NO: 51721 - DNA, 803 bp, Oryza sativa
  Clone ID: PAT_MRT4530_54087C.1
gcagaggctgtcatggcgggcatagtggatttcgaagagggatggcgcctcctggcaaccagcctcgccaagcaaaggagcatcatcgatggtagcatgagcaagagctcttcagaggatgacaacatgcagctctacatgatggtgtacaacatgtgcacgcagaagccacctcataactaagcacaacagctctatgaacgctacaagacggatattgatggctacaacagctctatggtgttgccgtcaatgagacagataaatggcgagactctattgaaagggttggttgacaggtggcggaaccacaagaaaattgtcataagtgagacgaggttcttcttctacctcgaccgttactacatcttacggaagtcacttgtcccacttgaacaactgaacttatgttcttttcgtgatcaggtatacagtgagctcaaagataaaataacaaggactgtggttgacatgattaatgatgagagggatggcaaggttatagaccgtgatcttttgaaggatgtccttgatgtgtatgtccagattgggcttggcatggagtgttacgaagttgattttgaaaatgcgtttcgcgagagcacaagaaattactactcaaacaaagcccaaacttcgattttggagtgcaatggcgctgattctcctgaatacatgcttaaggctgtggaatgcttgcaagccgagctggaacgagtgtcacattacttgcattcttcaactgaaccaaagttgatgcaggtaagtgttgagtaccgccccaaccaagccgctgctcgctt

SEQ ID NO: 51722 - DNA, 198 bp, Oryza sativa
  Clone ID: PAT_MRT4530_54088C.1
atgtggagtgacctcgccggagggttgttgtcattgcagccgccgttgtcgctcgcggtcgagagaaaaaggaagagtgtaaaacttgagataaaaacgatcgaggaagatcgcccatcgatcatcatcgcgactgttaaaatgaagattaaatccagtgaattaaaactgaatcgaaaggggaaatcatttagaaaa

SEQ ID NO: 51723 - DNA, 1150 bp, Oryza sativa
  Clone ID: PAT_MRT4530_54089C.1
acgcgtccgcaaagcaaccaccgtaccgcaaccgcaaccgcgagagccgagagagaagcctttttccccgatcgattcccttctctccgctccgcatcgccatggcctcctcagcaccgacgccgccgccgctcctcccggtgaccaacccggcagccgcggggtcgtccccggccgccaccgccgtgggatctgacgcgccgatcgcaaccccggcgttccggctcttcctgagcaagctctccgactcggcgcggcgctcgctgtccgaccggcggccgtggacggagctggtcgaccgctcggcgttctcgcggccggactccctctccgacgccacctcccgcctccgccgcaacctcgcctacttccgcgtcaactacgccgccgtggtggccttcgcgctcggggcgtccctcctcgcgcaccccttctcgctcctcgtcctcctcggcctcctcgccgcctggtgcttcctctacctcttccgcggctccgaccagcccgtcgtcctcttcggtcgcaccttctccgaccgcgagacgctgctcggcctcgtcgtcgcgtcgttcgtggccttcttcttcacctccgtcgcgtcgctcatcatctccgggctgctcgtcggcggggccatcgtcgccgtccacggcgcgtgccgcatgcccgaggacctcttcctcgacgacgctgacgccgccagcggcaacagcgcggcccagggtctcctgtccttcctcggggcgcccggatctagggtttgaggcggcggcgggcgacgagatctggtaggcttctttggctcgagtgtttcgcgttactctgtaattgatctggatctgatctcgttggatctatatcacatttgttctctaattcatcattctgcaatccgtagctacagatctactacttgtttacctatattttggatcgatgtatcactttgcgaagttgtgctgaatatattgagtctcttgacgagatttagtgttaaaaaaaaaaccttatattgttttgaattaaaaaaaaatgaatgtatgaagagtatgtcgacttatcactgtttaaatagtagagaagaatatatgatggttcagctgtgcattgtcacttttcattcaaaaaaaaaaaaaaaaaaaaaaaaaaa

SEQ ID NO: 51724 - DNA, 5643 bp, Oryza sativa
  Clone ID: PAT_MRT4530_5408C.1
atgatgagcgggaatgagatcatgccgatctcattggatgatttcgaaggagaagaccgcaagtccatggaggagtacatcaaggagatgacacaggaagcgttgatgagggcgtgcactaggactcgtcaaggcgtgatcattaagcccgagccacttcctaagctcgctcccgacttggtaagtaatgatgaggtaatacaatctacccaacaacaaatagcatctacaatagattcatctatgattgtttttaaaaataagttagatgcaacttttaagggtaaatctgatgagtttttaaggattaaattcggccctcttatggacgattacacgttaaaggataaagcctctaccactgctaaccaacctcctatagatcaaacgggtagtaaaaccgatggagcggcgcacacggtcgatctgaccaggcctgacggccggtcaaactgggacttagccgtcggtccgaccggccaaacggccgccgaaccaagtgttggttcggattgtgttactagtttagacaacgatggaatagccgaaccaaatggtggttcggattgtgttgctagcttggatgatagcatcattgaagatatagccgaactagatgacggttcggattgtattacaagagaaaatgaaatagcattgtcacctaagaccgaatcacaaatcggtcatgtagatgttggaaaagataatgacaatgtcttgcgggatagtagtgaaataggatccaaagaagctatgcatacatatcaaaggccgtatcctgaacacgtagattcggtcccatacccgcaaggatttgaggtgcccaacttcacaaaatttacaggtgaggatgctagaacaacaatggagcatatcggccaatttattgatcaatgtggtaaggccggtagtaatgatttgcttaagttaaagttgtttcctctttctttgtcaaactttgcatctacatggtatagtttacttgctcctaattcaatttctacatggtcacaaatggagcatgagtttcatgattattttaaagatgcaagcttgatggagcaaagaccgattgatacttcatcggtcacttgtgaaactatttcggttacatctatgcctaagaccggaattattagtgatgttctccctaagaataggatcaaaaatgcgatggccaaagatcataaagttgcaaagggtgagtcatctagttctcaaaagaccaaaaagccgaagctcatttttgagatgtttatggctaagtacaagaaaggattagccggtcaacgatttaataatcaaactagtgattcaaaaagaccaagatcgtctcgtaggaagagatttggtcaaacaccaaagcaatcggagccatcaactataccaactccatacaaacctccggttgtgatgccatggtatccatatccaatgtcactatatggttatccttttatgtattacatgccatggatgtctcaattctctacgccgtttcatcaaggatgggaggaatcacctaggacagtgccaaatcattcatctaattcaagacaagaccgtttcccacaaaagaatcggtccggtggatcaaaggtgaaaaagtttaagaagatgtgggcaaaggagatcgaagccgacgccatgactgccaacattgggggtctaatcgagacagctggcctgtctaaccgccagtctacagccggtctgaccgaccttactggccagtctgaccgacggcttgtggccggtctgaccgggctcagaggccggtctgaccggggggcatttgagaagagtaggaaaattgagagcaacataggagcttccacttcgaccaaaaatatgaagaatcattgtttagctcctggaaaacaaccacagccgaagtgcataccttccggcttatctcgctctcaaaagaggaggctacaacgtcttcgggccataggtcaaaaggaaaaggaggccgaagatgtggagaacaaaacatgtaataatttagagcctcgaaaagcacctaggcaagtgtggagatccaaagaggtaaaagttaagataccggtgatttcccatagtagagataaatccaatttgatgggagaagaatcatcggtcattagagataagtctccttcacatgatgctatgactgttagtgcggtatccgtcttgccttcgaaatcgcgcaatctagaaagccgattttgcttggggggcaagacattaatatgttcattagggaaccaagagaagatgaacggcgatggatacaacatcacatctttgagccgccgtttgttggatgctaaggcaagatatttgaaagatcctacacttaagggtgatcggaaaattcagcggcaagcattcaaatatacattgcttgatggagatttgtatcgccaaaacatagatggtgtcttgttgaagtgcttagataaagatcaatctaaagtggctatgggggaggggcataggttcgtgctagttgctacggattacttcaccaagtgggccgaagctgtgcctttgaataatatgactcatacggaggctaatggacaggccgagtcgagtaataagacgttgttgaagttagtgaagaaaaagattgaggaatacccaaagtggcatgaggtgctttccgaagcattgtgggtgcataggatatctaaacatagtgctactaaagtcactccttttgagttggtttatggtcaagaagccgttttaccggaggaggtaaatcttggttctcttcgttatatcaagcaagatgatttgtccagtgaagattacaagacgttgatgggagataaccttgatgaagtcatcgacaggcgcttgaaggcattcgaagagatagagaaagagaagaaaagggtggccaaggtatacaacaagaggatgaaagcaaagttgtttcaggttagagacttggtttggaagacaattttgcctttgggtactcgatccaaggagttcgctatgagctatatggccgaaattaatcaaggaatttcttcatcaaccatgatgagcgggaatgagatcatgccgatctcattggatgatttcgaaggagaagaccgcaagtccatggaggagtacatcaaggagatgacacaggaagcgttgatgagggcgtgcactatgactcgtcaaggcgtgatgaccaagcccgggccacgtcctaagttcgcttccgattttaccgggtattatcccggcagtcagaccgggactcaggccggtctgaccgcgcctctggatgtcgctcagaccgggccctagaccggtcagaccgacgcaatcataccgattcaggggatagatccaatgaccaattctagttatttgtatcatcttagaacatttaatcctcctgtatctactgctgcgactaatccccaagttcccccacatgttcctaatgcttataatgatgttgctagggggtatcatcccgatactaggcaaggccaatataatcatattgcgccgcaaacacaacctattaggccaccaaatccaccaccaaatcaacataggcctgataatatggaggaaataactagtgggattattagggataaattcgggattgaaactaggaattgtgctaaggtttaccaaaagccgtatcctgactattatgataatgtgccatttcctcgtaattatagagttcccgaatttaccaagtttagtggtgaagatagtaggaccacatgggagcatgaaagccgggtggatgataatagcttaaatgctagtttagatgatagtgcaatatcatgtgtagccgaaccaagcgacggttcgaattgtgttaataatttttgcaatgatgccatagcgattatagccgaaccaaatgttggttcggattgtcttactagcgaaagtgaaatagcattgtcacctaagaccgaatcacaaatcagtcatgtggatgttggaaaagataatgataatgtcttgcgggatagtagtgagatagaatctaaaatagttatgcatgtatcttgaacatgtagattcggtcccatatccgtaaggatttgaggtgcccaacttcatgaaattcacaggtgagaatgctatgactacaatggagcatatcggccaatttattgatcaatgtggtaaggtcggtagtaatgatttgcttaagttaaaattgtttcctctttctttgtcaaactttgcatctacatggtatagtttacttgctcctaattcaatttctacatggtcataaatggagcatgagtttcatgattattttaaagatgcaagcttgatggagcaaagaccgattgatacttcatcggtcacttgtgaaactatttcggttacatctatgcctaagaccggaattgttagtgatcctctccctgttagttttattgatgttggcaaaaagaaagggaaaagtgttattattggggatcctcggcccaagaataggataaaaaatgcgaaggccgaagatcataaagttgcaaagggtgagtcatctagttcccaaaagaccaaaaagccgaagctcacttttgagatgcttatggctaagtacaataaaggattagccggtcaatgatttgataatcaaactagtgattcaaaaagaccaagatcatcttgtagaaaaagatttggtcaaacaccaaagcaatcggagccatcaactataccaactccatacaaacctccggtatccggtggatcaaaggtgaaaaaggtaaagaaggtgtgggtgagaaaagaagccaaagctccggaggtcgtcactattaaggaggaatctcaagatgttcaagtacctactggcgatgcggcgaaaactatacaagcggagaagattgaagccgataccgttactgtccacatcggcggtctgaccgaggcgtctggccggtctgatcgccagactacggccggtctgaccaaccctcctggccggtctaaccgacggcttgcagccggtctgaccgggcccagaggccgatcagaccgaggggcattaaaggtgagcgggaaaattgagagcaacacaggagcttctacttcgcccaaaactattaagaatcattgtttagctcctggaaaacaaccacagccgaagtggataccttctggcttatctcgctctcaaaagaggaggctacagcgtcttcgagccataggtcaaaaagaaaaagacgccgaagatgtagagaataaaacatgtaataatttagagcctcgaacgacacctaagcgagtgtggagacctaaagaaccgatgcttgatttcaaaagtttggacgaaattagcaaagtcatagaccaggggcggtctgaccggcattgcacggccggtctgaccggtggtaccggcggtctgaccagctctgcatgaccggtctgaccgggtagatagggcggtctgaccggtattgtgtggccgttgaggtaaatcttggctttcttcagtatttcaagcaagacgacttgttgattgaagattacaatacctttgatagaaggcaattttgaagacgtcatcaacaagcgtttgaagactttgaggagatgaagatacttcaagacggtgttttcagagagcaatcaatgggaaatact

SEQ ID NO: 51725 - DNA, 350 bp, Oryza sativa
  Clone ID: PAT_MRT4530_54090C.1
ggggatagcccatatctttattttatattattattaacaaaaacttgtcatgcccagctttgggttgggggcgatttggttccccgaacaaagggaaaaccttaaagggggaaattttttattgcaagggttaagccggcctgtttaaaaggggtaaagggagttggcgtcgtcccttcttgccggtggggcgaagtttttgggaacagggggggggcaacctttcgggacagggagggtacctggttggtggggtccttggcctcctcctcctatggggggcggctacgatgcattggggggatgcgaatagctagagattttttattcacctggatcggacccgtggg

SEQ ID NO: 51726 - DNA, 2350 bp, Oryza sativa
  Clone ID: PAT_MRT4530_54091C.1
atctttatattaggcactaggcacagcagctgagccagcagccatggcggccggggcacgagctctcgtgccctcgcccttcatcgtcgtcgtcttcctcctgctcgccgccgcggcgagagacgcttccgcgctcacccggcatgacttccccgagggcttcgtcttcggcgcaggcacctccgctttccaggtggaaggggcagctgcagaggatgggaggaagcctagcatctgggatactttcacccatcaagggtactcgcctggcggtgccattgcagatgtctcagcagatcaatatcaccattacaaggaggatgtaaagcttatgtatgacatgggcctggatgcgtacagattctccattgcttggcctcgtcttattccagatggaagaggagagatcaaccccaagggcttggaatactacaacaatctgatagacgaattgataatgcacggaatacaacctcatgtcaccatctaccactttgatctccctcaggcccttcaggatgagtacggtggaatactcagccaatcccaggtatgacttccaggttatttccacgacgccctaatctccctcttgccgaagaaggacgaggctgttgatgttaaggatttcaggccgattagcattattcacagctttgggaagctgttctccaagatcttggcctctcgtctctcccctcgcctggacgagcttgtggcgcctaaccagagcgctttcatcaagggccgctctctccatgacaacttccgctatgtccagattgaggcaagggcgctccacgccaaacgcgttccccgacttcttctcaaggtggatatcgcgaaggcctttgacatggtcagctagcctttcttgcttgaggtgctagcccagcttggcttcagtcaacgttggcgtgattggatctccctcattctcagtgcctcctcttcccgggtactggttaatggggtgccaggtccatggttcccccatcggagaggtctttgccaaggagatcctctttcccccatgcttttcattctagtcatggatgtgctcaatgcgatgctccgcaaagcctctgattcgggtggttttcttcccctcaatgaccgtgctattcgacatcgtgcatccctctacgccgatgatctagttctcttcctttcccccgttcggcaagaccttgagttcatccaaggcatcctctctgtcttcggtgccgcttccgggcttcggaccaacttcaccaagtgctcggttactccgatccgctgctcggttcttgacctggagctggttcagtcctcttttccttgctcgatctcggagtttccctgcacctacctcggcattccactggatctcggtggactgggcattccggatctcagggtggctggctttgccttgagagttcgctggctctggcttcagcgctcgggacacccctactggtctgatctgaaggcccctattgagtggagtgtctccgacatgttcgcagcatccaccttctctatcctgggagatggtcagtccacgctcttctggactgatcggtggatcgatggtcgctcgatagcttctatagctcctgacctcctccacgccgtgcctccacgcttccggggatcgcgcacagttgctgctgggttagcgaacaactcctgggttggtgacatacgtggcgccctcactgtcccggtcatctctcagttcctgttagtctgggacgcggtgcttcctacccagctctcgccgggtgttgaggatcacctcgtctggcgttggacgggtgaccagtgctactcagcgcgatcggcgtatcaggcgttcttccttggccagcactcttttgcctgtgccgacttactctggcacgcgaagggccctgctaaatgcaagttcttcctttggtttgcatttcagcggcgctgctggactgccgatcttctccaaaagcgtggtatcgatagccactctgcttgccccttttgtgctcaggagcttgagacagcgaaccacatcctcatcgattgcgtgttcgctcggcaggtctggctccgtgtgttgtcccctcctggctgggctgccctctctccccctcgtggcagctggctccaggattggtggtcatcctccagggtatgtttacctgagcacctccgcagcggcttcgactccttggtactcctagtctcctggcagctgtggaaggaacgaaactccagggttttcgactctgtgctcgcttcggtcgcagtggttctggagtccatccgctcggagggccagctgtggtctttagccggtgttactttttttggggatttcttaggagtg

SEQ ID NO: 51727 - DNA, 490 bp, Oryza sativa
  Clone ID: PAT_MRT4530_54092C.1
agctcaattccatccaccttcggagccggccgtcgtcgtcccttgcgccgcagccgtttctttcttgtccgacaagaacttgtatcaacccacgggtataaatatgtacacccggggtcattgtaatgaatcaatctatcgatcaatacaactactctcggcgcatcgccaccctctttaccgaggtttttacttatcatccgattgaacctggcacctgacgcggggctgcatcggctttcgatctccggcgaagggtacgtcctgcgttccgtcggcccaggcaattgtatcgtttacatcgacgtcgttcaaggctgcatcagtacattcgacctcttggattgctgtggtttggatggtatatttgctaacctatttatcttatgtctttgttaatctagtcttagcatatcgatttagctctatcgactgcttctcgttttagggtttctgccgatatcggctaaatcgcgttgctagattagat

SEQ ID NO: 51728 - DNA, 517 bp, Oryza sativa
  unsure (1)..(517): unsure at all n locations
  Clone ID: PAT_MRT4530_54093C.1
gtgagatcgagggagctaattaatcaactagctagcttgcacaaattaatggcgtccaacaaggctttcgttgtgttcactctcctgatgctggtggctgcatctgccgtcgtcgacgtcgcctctgccggtgatgatcactatctacactacatatatacatatgcatttataattcagtttaattataacatcaaggaatatataattaatcgatcgatactcattaatacttcccccatcctaaaatataaagaattttagatagatgtgtgatacattctagtacaatgaatctagatatactgtatatccagatccattgtactaagatgtgtcacatccatccaaaatctcttatattatcatatgaggggaggtacgtatatctttcgtgttcgatatcagcttctacttgcattgcttaacacctgctgacgattgtgtttttgtttggtcttcttacgagctngcatanattaacgaatatatatatataggagtatatcccatataa

SEQ ID NO: 51729 - DNA, 431 bp, Oryza sativa
  Clone ID: PAT_MRT4530_54094C.1
gccacggcgtacaccgtggcgctcctcggtgccaccggcgcgcgcgtacccgtcgctccacggctccggcgcgctcatgccgcgcccgggtgaggggctcacaaccgttggagatccagtactagctgcgactgttcatggtgcaggacagggccaggtacaacgacaccttgatctgggccaggggggagcagctcctcgagtacatcaaggcaaaatgggaggacagcgaggacaacacatccttcctattctacaatggcggggactggaccatgctgtagctgaccatcgtcgggtgcagtgacatcaactacgtgctgatggtgctcagagaaggtcgagatggcgggccttggatgcatcggccggatcatctactgctacatcctcttgcaggtgcagatgataaagttgatcgcctacaagcc

SEQ ID NO: 51730 - DNA, 498 bp, Oryza sativa
  Clone ID: PAT_MRT4530_54095C.1
atggcgctcgtcaccgtccacgcgcgcctcgccgccgccgcctcctccgcctcgccgccgcttcgctccgccgcctcctgcacccgcctccgtgccctcagtacagtcaccggaacccgcctcagcattcggcaccaacagcgccggcgctggcggcggccgaggcgcgccgccgccatcgccgcgtcgctcgacctcaacgaggacaacgtccgcctcgccatcgacgaagccaaggccgaggcaagcttgagtcctcccctcctcttcttcttccctcgcctcgtccccaattggaatttggaacgccattggcaagttgatctcgcggagctggacgggccgttcgtgaagctccggctcaagggcaagttctggcacacccgcgccaccgtgctcgcgcggatcggcaactacctcaagaaccgcatcccggaaatcttggaagtggagatagaagatgagaagcagcttgatgatagccctgcagccttctga

SEQ ID NO: 51731 - DNA, 494 bp, Oryza sativa
  Clone ID: PAT_MRT4530_54096C.1
aaatcaacagagaatgtatctattagcatacatatcatagagatcccagaggtccagctcatcctcatcaacatcattcaaaacggccaacatcgccaacgcaatatacttgtctgacaaggtgcacaggacactcgcgtgtatgaaaaacggatgaatgaataccgttcggatctacatgtgcatacagacgtaaatggaattaggagcattctacgggcttgatctgtgtgtcccatgatgatcgatatatcttccagctgtgacttccgtaacctgctcattacacacgactggatctatctctgtacgggcagatagctacaggtctagcctgtggactaaggaacacctcttgtacatcaaagcgggatcctcattcaacatcgcgctgagctgcgtcttctccttgcttgccacatgagcatagaaacgggtcagcatgttgctttttgactgcttcacttgacagtgcaccacagcttgcggaatgg

SEQ ID NO: 51732 - DNA, 498 bp, Oryza sativa
  Clone ID: PAT_MRT4530_54097C.1
tattgaccacgttccccctgctgatctgtgactccaccggaaatctaccacgtgaggttctatgtctcaactgacgataggcacaaccctcacacattggctggacttcattcctcgaaggagcaggaatcgatgtgggcacgacttgtgtgtttcagttgtacgatagggatggtcagctcgaactttgtgttcacaacctgtaggtgccttcctgttatgtagtatggcatatgtggcacgcatgtagtgccttccagatatgtagaatggcatgtgtggcacgccagtcctgttttgtccagtgtcccctatgatgcctcatgatatgtaatggtgcatgctgaactcgtagagcaataacctatgctcactgcaccctattttccatgcaatgtgttatcaatgctgttttatcaatgctgcaatgtgtatatagcacatcttctaagctattcagtgcaccctattttccttcaaaaaaaaaaaaaaaaaaaa

SEQ ID NO: 51733 - DNA, 1495 bp, Oryza sativa
  Clone ID: PAT_MRT4530_54098C.1
ggggggattgcgcggcccccaggcacgcgggggccaccccgggttgcccccccgttgccgctgccccggcctgcacgacgtcggcgcggccgccgtccaatcccaatcccaatcctaccttgtctttgttctttcttcctccgacgaggaggggagatggggggtcagctctctgtcttccttccttccttctttcttcctggttggaggatggatcaaatcctgcaaaggattaggttttcttgggattggtgggtggtagtcttgtcctcctccccccaaatcgtttttgatttgatttgatttgggttgggttggggttcatcgaatcaatcatttcaagaacagagttattcgcggcggatttcttccaccgccgtcagttcttgtgtggattgtgtctcttccgttctgtttcggttttagaatctgcagttcgtcgtcggaccggttgtttcctgagtcccatctgaggataggttcaaaataaattcagaatccaagcctggttgtctccgagttggagcgatggctgcgcggccgacgacgtcggacgccgcgagcacgatgaccgacgacgacgtgcacctttcgccgaccagcatctgcagcggcggcggaggtggggcctgcgtcgtcgtcggcggcagccgcatcaagatactctgcagcttcggcggccgcatcatgccccggccgtccgacggtgccctcaagtacatcggcggcgagacccgcgtcctcgccgtgccccgctccatccccttctccgatttgaagaagaaggtggaggagatgttcaggacggaggtggcggccatcaagtaccagctcgtcgccgaggacctcgacgtgctcgtctccgtcacctgcgacgaggacctaacccacatgctcgacgagtacgaccgcttcgaggcgaagcggtcgccgtcggcgtcgccgcggttccgcgtctacgtcttctcctcgcagccgccggtggccgccgccgtcccgtccacctcccgccacgccggctacgcgccgccggcgtcccaccaccacctcctccagcaccacctccaccacttccagccggaccactacgtcgccacgcccgacgggagcccgccgtacgccggacactcgcacggcgccgtgtcggcgggcaactccccgcgcgccgacgccgtgggccccgaccaccccgccgtgttcgggctcaagatgcagcgcgtccggagcacgccgaacctcggcagcctggacgcgtcgccgcagcactaccaccagcacgccgcggacgtcggtggcggcggcggcggcatggcgggatacatgggcggcagctcgcctgtgcacgccggcgccggccacctcgtctcgcagggcggcttccacagctactaccacccgcacgggcagtacgccccggcgcccgtgccggtgccgcaccacgccggcgtggggaggtacgacacgcgtggtggtggtggctacgtgcgaggcagca

SEQ ID NO: 51734 - DNA, 495 bp, Oryza sativa
  Clone ID: PAT_MRT4530_54099C.1
atggcgggcaagagcggcggcggcagccgaagcagccggagagacgccgccgtcgcctcggccctccaccgctggccgctccgcccctctctcggtcatcctctcccccatctaacaccggcgcagctggtcgcctctcccctcgtcggctgctccacgcgccgccgcggcctcgaccttgctagcgggacgacggcgagcgagcgcgacagcgggcggcgggagacgtggagaggtggtggtcggtacgacggcgagctcgacgaggggagagcgcgcggcgtggtggcagagagaggagagcagtggcgtgtgtggtgcgtcgacggggaagaggagcggtgcgacgcccgcctcctccctctccgagcgctcgccggcatcccaatcaccttcctctacgccggcgctgacctcctcgcagccaccgccggccaccacgacagctgtgcgtgggcaagagaaatgggcggcacacctccaccagcacactaa

SEQ ID NO: 51735 - DNA, 268 bp, Oryza sativa
  unsure (1)..(268): unsure at all n locations
  Clone ID: PAT_MRT4530_5409C.1
agcgtccgaaacgttacaatgattaatggaatgaggtatagagaagatcgtgctctatggcatagtgctcgccgtgctagacgtcgtaggaggacaggtgtgtgaatacaagcgacttgtgttagtactgatttgagtggaaagcgttgtaccctaacttggaatattcctattagtgctacttagtgggggggaggctcaacaaatttataatcatccaatcacannttcatntagagaatgnttaaacttatcaaggtggattttt

SEQ ID NO: 51736 - DNA, 348 bp, Oryza sativa
  Clone ID: PAT_MRT4530_540C.1
atggagatggaaccgccgctgccaccgccggcgttggtgaagatccagcaaccactaattaagctccagatggccgaatctagtggtcatcgacctccacatagccgctgctgccgcctacaaatcaagttgtcatcgagctccaagcgaccaaatccgccgcctcctattttgtgcattgtcctcccagagagaggaagagagccgagagtggaggatacactatcggtgaggaggaggactggcgacggtggtggcagagaggatgcagcgcaacgagtggggcggaggaccgacaacggcgcagataacgagggtgagggagggacacaacaagcgagaggctga

SEQ ID NO: 51737 - DNA, 247 bp, Oryza sativa
  Clone ID: PAT_MRT4530_54100C.1
gagccgcgccgtcgtcgcgtcgccgctgccgcgccgcgccaacgtcgccgtcgctgcctcgcgccgcgcgccgccgctgagaccgagggagccgcggatccgggtgaaggccaagacccgcaagaccttgagcaaggcaagtcatcactattctttgatcacgttgatcccaattatgaaattaattttgtttacaaataagattgcatgtaatgatgaacatcctatttgtgattatgccatgcct

SEQ ID NO: 51738 - DNA, 348 bp, Oryza sativa
  unsure (1)..(348): unsure at all n locations
  Clone ID: PAT_MRT4530_54101C.1
agagcatctccggtaagccccttgccccccagagaatgccatccaaaaggccgtaatactaatacacaccatgatgttccccccatgcctaaaccccaagctacagattatccttagaaccctaattgatccccaaaattttntcccacgtctcgtacgtgtgtcctacccttcacacggacgcgcctactgtccggacgccccagaacacttgcttatatacatactcctacgtcgaggcatgatgctgctgctgcggctgcggagtacgtagtagtcngtacatggcgngcggcgagcaaggtcgtcgtngacgtacgggtcacttgaacgncgtctncagagacg

SEQ ID NO: 51739 - DNA, 799 bp, Oryza sativa
  Clone ID: PAT_MRT4530_54102C.1
ggtgcttccatcgtccgtaaaaaagaccgggcaaaaaaccggcgaaaaaaacaaaatttatccaataaaaaaccgggtaaagaaaaacgtgtgcgaaaaaagaaaagaaaaaccgatccaaagaaaaagcggtaaaaggaatccgatccaaaaaaggggcaaaaaaaatggacgaaaaaacaaatctgtctgatccaaaaaaagggaaaaaaggaaaaaaaattgaaacgaatccgactttgttgacgcggtaaaaaaagggcaaaaagataattaaaaaaccgtccaattcaaaagaaaaaggaactatatatgacacggtaaaaaaattcgaccgggcaaaaaaaaactagcgaaaaaactgggcaaaaaaacaggaaaaaaaaagtccgataaaaaaaacagggagaaaaaaaaccgggtggaaaaaaaaatctgtccgataaaaaaaagggcaaaaaaggaaaaaaaaagtgcttctgtcatccgtcaaaaaacagggtgaaaaaaaccgagcgaaaaaaagtccgatcaaaaaagggcgaaaaaaacaaatctgtccgataaaaaaaacaaggtgaaaaagggaaaaaatcgaaacaatccgactccaatgcagtaaaaaaagggcgaaaaaaattaataaaaaaactgtccgattccaaattatatatgatacggtaaaaaaaatcgaccgggcgaaaaaaaccaggtgaaaaaaagaaaaaaatttctgataaaaaaacggggcgaaaaaaaatctgtactatccaaaaaaaggaaaaaaatcgaaacgaat

SEQ ID NO: 51740 - DNA, 123 bp, Oryza sativa
  Clone ID: PAT_MRT4530_54103C.1
atggaggtgaggctgctagaaccagaaggagcggggtgcggcatgaaggcgagactctttccaaatgttattcttcttgttgcggtgccttaccgccacaagatgaccacgttagcaagctag

SEQ ID NO: 51741 - DNA, 404 bp, Oryza sativa
  unsure (1)..(404): unsure at all n locations
  Clone ID: PAT_MRT4530_54104C.1
cccnttggttgcagggattcggcacgagctcgtgccgaattcggcacgagctctcgccggagagatggccgccgccgcgaagcccaccctcccttcgtctgcttcaagtggccatggccttgcggcgacctcgagctcccctggctcttcnagtccntccgcacattggcgcanggccgcctcgtcgccggggacctcccctccccctcgtcggacagaagaagcggcggtgggggtgaggaagaagatgaagaagatccccgggtatgcggtggangtggancaaccggggctcgcgagctgganggaccngntgtncnggagttccattccccaatctgcctcccgtgcgcgtcctgttngggncgtttttattttgaaggttgcccagctggttgacccct

SEQ ID NO: 51742 - DNA, 279 bp, Oryza sativa
  Clone ID: PAT_MRT4530_54105C.1
atgcccaagatcataagccagccctccctgccacttcctgaatcagctgaccaatcagatgctctggggctggggatcaacgacgacagcagcaaactcctggtgagagttggggagggcaccttgaagggtgaaatccgcccggggggttcgcccttcccaaggggcctcgatgttggtcccctgaggctggaacatctccagcctgaagtcgacatcatgaaggtgcgccatggtggaaggcagaacaatcgcaagtggggttttgcagcttggtga

SEQ ID NO: 51743 - DNA, 1377 bp, Oryza sativa
  Clone ID: PAT_MRT4530_54106C.1
gtgatcgccgccgccgccgcctcgggcgatggcctccgcttccggcctcgtcaacgccgccctcccggacgacctgctcgcggaggtgttccgccgcgtcgccgccgcggggggcaaggccgacctcgacagctgcgcgctcgtgtgccgccgctggcgcggcgtcgagcgcgcgtcccgccgcgccgccagggtccccgtcgacgggcccgacggcgacgccgtcgtccgctgcgtcgccgaccggttcccgggcctcgccgatgtcttcctcgacgaagctttagaagctattggttcatcttgctctgctttagaaaatttgtcacttgacaaccttaataagtgctcagacaggagccttttttccatagcaaatggatgcaagcagctgaaaagtctaattatcaaatcatcggtcaaattcacagatagaagtattgaacgtgtttcccagaactgtaaaatgctacaacacatggaaattaacatgtgccatattatggaaagtgctgcattggagcatattggacagcgatgcataaatcttctagggcttactctaaacagtctgtggattgacaataatgcatttctcggatttggtcgatgttgcttccttctcaagtctgtctgtttggccaactgttgtaaaataagcgatgaggccatatctcacatagctcaaggctgcaagaacttgagagagctttctatcatctcttgtcctcagatcggggatgaagcattactatctgtaggtgagaattgtaaagaacttagagagttgaccctccatggtcttgggaggttaaatgataccgggcttgctacggttgatcaatgtcgtttccttgagaagttagatatatgtgggtgcaatcaaattactgattatgggcttactaccattataagagagtgccatgatctagtccatctgaatataagtgataccaagaaaattggtgacaccacactagcaaaggttggtgaaggattccgaaaattgaaacatctcatgatgcttcgctgtgatgcgattagcgacgttggcctagaagatattgcaagaggatgcttgcagctggaggcgtgtggggtgttccgctgctctcaggtaactccagcaggcgtggcagccctagctggaggcagctccagattgcagaggatcattgttgagaagtgtaaggtgccagaggaggccacagggaagtgcaggatgatcaatgatcccatccttatttcttattattaagacgtgaaattgatgtcttccgggcatagctgtgaaggaaatcctttgctcgtttgagcttacatacatttaaaatgtgagaatattttaaacaatgatttcctggatgatggttg

SEQ ID NO: 51744 - DNA, 2027 bp, Oryza sativa
  Clone ID: PAT_MRT4530_54107C.1
gcgcgaggtggaaccctacctccggtgatcgccgccgccgccgcctcgggcgatggcctccgcttccggcctcgtcaacgccgccctcccggacgacctgctcgcggaggtgttccgccgcgtcgccgccgcggggggcaaggccgaccttgacagctgcgcgctcgtgtgccgccgctggcgcggcgtcgagcgcgcgtcccgccgcgccgccagggtccccgtcgacgggcccgacggcgacgccgtcgtccgctgcgtcgccgaccggttcccgggcctcgccgatgtcttcctcgaccacggcctctacattgccgccggcgcctccgccgccgccgcggagcggagcagggcacagggttgggataacgaaaaccccaagttagatgagcaacatatgcagtgttccacactaagcgaagatacgcaaaaagaaaatggcagtgatggtgtcaacccaacctcatttactgatgctgggctacttcatctcattgagggttgcaaagggcttgaaaagctgactctaaactggtttttgcacatttctgaaaaggggctggtgggaattgcaaatcgttgccggaatctgcaatcgttagcgctttcgggtggctatgttcaaaaccatgggttgattactctggcagagggatgcaatcttagtgaattaaagctgtgtggtgttcaagagttgacggacgaaggactggttgaatttgtaaagatacgtagtaaatcattggtctctcttgatatttctttctgcaatggttgcataacatacagatccctgtatgcaattggtacctactgccataacttggaagtcctatccgtggagtccaagcatgttaatgaaaacaaaggaatgatctctgttgcaaaaggatgccaatatttgaaatccttaaagatggtatggcttggtgtcggcgatgaagctttagaagctattggttcatcttgctctgctttagaaaatttgtcacttgacaaccttaataagtgctcagacagttcgcacaagccagctagaagcacaaaatctaagaaaaagttggacggtggaaggcaggtggtagggaatgagggtaatcttgcagatagaagtattgaacgtgtttcccagaactgtaaaatgctacaacacatggaaattaacatgtgccatattatggaaagtgctgcattggagcatattggacagcgatgcataaatcttctagggctcactctaaacagtctgtggattgacaataatgcatttctcggatttggtcgatgttgcttccttctcaagtctgtctgtttggccaactgttgtaaaataagcgatgaggccatatctcacatagctcaaggctgcaagaacttgagagagctttctatcatctcttgtcctcagatcggggatgaagcattactatctgtaggtgagaattgtaaagaacttagagagttgaccctccatggtcttgggaggttaaatgataccgggcttgctacggttgatcaatgtcgtttccttgagaggttagatatatgtgggtgcaatcaaattactgattatgggcttactaccattataagagagtgccatgatctagtccatctgaatataagtgataccaagaaaattggtgacaccacactagcaaaggttggtgaaggattccgaaaattgaaacatctcatgatgcttcgctgtgatgcgattagcgacgttggcctagaagatattgcaagaggatgcttgcagctggaggcgtgtggggtgttccgctgctctcaggtaactccagcaggcgtggcagccctagctggaggcagctccagattgcagaggatcattgttgagaagtgtaaggtgccagaggaggccacagggaagtgcaggatgatcaatgatcccatccttatttcttattattaagacgtgaaattgatgtcttccgggcatagctggaaggaaatcctttgctcgtttgagcttacatacatttaaaatgtgagaatatttt

SEQ ID NO: 51745 - DNA, 550 bp, Oryza sativa
  Clone ID: PAT_MRT4530_54108C.1
gcacgaggggcttcccctcaacacattctgcgcactcttcgatatcctcagccagttacggtgcggacggttactacggtggagagggctctgtgactgattacagttccgcctctgagtcagttgacctcacacattctcgcactcttcctcgacctagtgctcttctaggtgccaacatgccacctgcgccccagtccatgatgggtcaggtcagctccaaggtgtcatcaagctcccagaagaaacacaaatgcaagatttgcgataagcgtttcactcgtcccagttctctccaaacacacatgtatagtcacactggagagaagccttttgcgtgcgaggttgagggatgtggccgccacttctccgttgtgtccaacttgaggagacaccgcaaagtgcacaagaatgacggaggtgcagatcatccatcaccagaagatgcataagctgcctaagctgcctgagaggtcgattcctcaccctctctagacatttcgtaactggattctctacgtcatggtagttatacctttatcctcttgca

SEQ ID NO: 51746 - DNA, 912 bp, Oryza sativa
  Clone ID: PAT_MRT4530_54109C.1
actagtggatccccgggctgcaggtttttttttttttacgtgaactggtaaatacccagataaactatgatgaaacaggacaccttttacaaggttaacgatacagatctcaaccatttcacctcaatttacaattcattaacaacattgacataggctacactggttttgcttccttctactaactcatctttggacaaaaagaaaaagaaagaagtaatcaatggttgcacagcgttcctaccctaacagcctaatcctatcatcaaagaatctacaatccctcgtcctccatctccatgaacactcagtactaattttcagttcaaagcatcatttaggctagtcttaatccaaatctttggcaagtattgtttgattgcgtcagtactcctgatacttgagtgcgttctgaacatctgagatgttgatgcaacaacggctgatgtcataggagtctctcaagcagttaagaacaagaccatactcgaagtcgagctcttttgcatcttttgtccagaaatctggcaaagattgatcattcatggtatcatctattgtgatatcctcattgatgtttatagcatccctttgtaatcctctgccaggatttctttcataggcaatgatttcttcatatgccttctgtaagatgtcttttgctgctttatacacagcctttgatgcagatcctttgtcagcacatctgatggcatcagcacacaggacattgtaacggcttgtaatggattgacaagtagcatctttgtggttattgctgttgtcttccaacaattcatcatgtctggggtcattggcttgcttcttcttcagataatcaagaagaccctggccgtcaccggtctccccaaggaaattctgcctaagagaggcggtcccgtcagagcccat

SEQ ID NO: 51747 - DNA, 2946 bp, Oryza sativa
  Clone ID: PAT_MRT4530_5410C.1
atggccggatttaatcaagaaatgtcttcatcaactattacgagcgggaacgggttaaacaatgttactacacaatacttcaggaccgatcaaggcgtcgtgagaggaaacgtcccgctacctcaagttgtaatttcaccaaaggtaaccttcgtttcgcctaacccgtcctttgctattcaaaacgttaataatcattgtgtagatgcatatgctacttctagttttgctcctatacaatatgcttataatgctacgggggagtcaatggatgattatacggccaattacacagaaatcggctataggcaaaacctagataacggtatgactggtcatggtaccggtttaaccacatcttatgccggtcagaccgtgcccaccatggccgatcagaccgtgtactacgccggtcagaccgtgcccaccatagccggtcagaccgtgatctatcctggccagatcgcgcctcatgtggccggtgtgaccggttccctggaaatttctccaggttttcataccatgactagcagtattgattttaattattattcatcacctgttaatactgttagtcatactactccacatatccctaatgcttacaatgattctaatagaagatattctcctgatactaggtatggccaatataacaatattgcgccacaaacacaacctattaggccaccaagtccaccaccagatccaccaaggcctgaaactgtggagaattggtttagaaatattatcagggagaatttagcaaagctaaggaatcgctctagggactaccgaaagccgtatcctgattattatgacattttcccatatcctcgtgattataaaattcctgaatttaccaagtttagtggtgaggatagtaggactacatgcgagcatgtagatcaattcttagcacaatgtgccgaactaagtgacggttcggattgtattacaagcggaagtgaaatagcattgtcacctaagaccgaatcacaaatcggtcatgtggatattggaaaagataatgacaatgtcttgtgggatagtggtgaaatagaatccaaagtagctatgcatacatatcaaaggccgtatcctgaacatgtagattcggtcccatacccgcaaggatttgaggtgcccaacttcacgaaattcacagccggtagcgatgatttgcttaagttgaagttgtttcccctttctttgtcaaactttgcatctacatggtatagtttacttgctcctaattcaatttctacatggtcacaaatggagcatgagtttcatgattatttcaaagatgcaagcttgatggagcaaagaccgattgatacttcatcggtcacttgtgaaacgatttcggttacatctatgtctaagatcggaattgttagtaatcctctccctattagtcctattgatgttaacaaaaagaaagggaaaagtgttattattggggatcctcggcccaagactaggatcaataatgcgaaggccgaagatcataaagttgcaaaggatgagtcatctagtttgcaaaggaccaaaaagccgaagctcacttttgagatgcttatggctaagtacgagaaaggattagcgggtcaacgatttgataatcaaactagtgattcaaaaataccaagatcatctcgtaggaagagatttggtcaaacaccaaagcaattggagccatcaactataccaactccatgcaaacctccgattgtgatgccatggtatccatatccaatgtcactatatggttatccttttatgtattatatgccatggatgcctcaaccacctatgctgtgtcatcaaggatggaagcaatcacctaggacggtaccaagtcattctaactcaagacaagaccgtttcccacgaaagaatcggtccggtggatcaaaggtgaaaaaggtgaagaaggtgtgggtgagaaaagaagacaaagctccggaggtcgttgctatcaaggagaaatctcaggatattcaagtacctactgaagatgcggcgaaaactatacaagcggagaagactgaagccgacgccgttgctgtcgacattggcagtctgaccgagccagccggccggtctaaccgccagactacggccggtctgaccgacccttctagccggtctgaccgacggcttgtggccggtctgatcgggcccaaaggccggtttgaccgggcggcattggataagagtgggaaaattgagagcaacataggagcttccacttcgaccaaaaatatgaagaataattgcttagctcctggaaaacaactacagccgaagtggataccttctggcttatctcgctctcaaaagaggaggctacaacgtcttcgggccataggtaagaaagaaaaggaggccgaagatgtggagaacaagacatgcaataatttagagtctcgaacagcacctagacaagtgtggagacccaaagaggttcacgtctgttcaccaaaaaagcaggggggcatgtgtttacacccaaatttggcatctatggacgaaatagggaaaaattgccaaagtttggaaagtgacgggtttccttactcgggaaggcaggtcgccgcgttgttccatatgcttcagatcattacgtgcttccagtgtatctttcgactttccatatacacatcggaagccaagaaggtttacgcaaaggttcttagtgaggtgcatcacgtcgattgcgtggtggacgtccaagaattcccaataggaacggaagagaggtggaagagaggggttgctaaagataagacattaaaccacttgactactgatctactgtgcagagtatatgggcatcagccgcatcacgtgaagttggagaaaaatacggaaaaagctgcagaacttgtgattcgaacccaaaacctccgtgcttccatggagagcctcaaccactag

SEQ ID NO: 51748 - DNA, 3861 bp, Oryza sativa
  Clone ID: PAT_MRT4530_54110C.1
atggccacccctacccccaccccctccacctccgcccccgccgcgccgccctcctccgccttccccctcactgccgccgcgcgcttcccccgcgcgcgcgcggcctccgcctccacctccagcacgcgcgcgtccgcgctcgccgagcggcgccgcacgcggcggcgccggctgcccgaggggagcggcggcggcggcgaccgctcggcggccgcgggggcggtggagaagggcctgcgcctcgccttcctggagcagctcgcggagcgcgcgcgcgccgcggacgccgcgggggtcgcggatgccatctacgacatggtcgccgcggggctctcccccggcccgcgctccttccacggcctcgtcgccgcccacgttctcgccggcgacgcggaaggcgccatgcaatctcttagaagggagctaagttctggggtgcgccctttacatgaaacatttgtggctttagtccgtgtttttgccaagaagggtcttgctaccaggggcatggagattctggctgctatggaaagatataagtatgatattcgcaaggcttggctaattcttgtagaggaactagtcaataataactatctggaggacgccaatacagtatttctgaaaggaacagaaggtggtttgcaagggactgatgaaatttatgatcttttgattgaagaagattgtaaagctggagatcactccaatgctctaacagttgcatacaaaatggaagcttctggaagaatggcaaccacattccatttcaattgcctcctaagtgtgcaggctacttgtggaattcctgagattgcttttgcaacattcgaaaacatggaatatggaggtgaaggttatatgaaaccagataccgagtcctacaattgggtcatacaggcatttactagggctacatcctatgacagggcaggagatgtggccgaattactagggatgatggtggaagaccacaaacgaagagctgatgagttgcttgaggcattagaggcaatgtctaatgatggtcagactattgcacctagagcaatgatcttaaacagaaaatatcgcacgttggtgagcacctggatagaaccattacaagaagaagctgatgttggttttgaaattgattatgttgccagatatattgaagaaggaggtcttactgggccaaagaaaaatgttgttaagcccaaggcagctagcaaaatggtagtatctgagttgaagactgagctagaggcacaagggttgcctacagatggaactaggcaggtactttaccagagagttcaaaaggctaggagaatcaatcgttcacgtggtataccactttgggttcctcctgtggaagatgaggaagaggttgatgaagagttagatgaattgatttcacgaatcaagctagaagatgggaatacagagttttggaagcggcgtttcctgggagaaactcggaattatctttgtgaagaagttaatgatgaagaagatgcagatttagatgacgatgagttggatgatgatgacgacgaagatgacgacgacgatgataccacaaaaggagaagaagatgagatcgatgaggaggatgctgttgaacaaacggaaaatcaagccggagatgaaactaaagacaaaccatcgaaaggacccaagcagcatcttcaaatgataggagtccagttattaaaggatctagaaaagacatctgtttcatcaaagaagtcaaaaagggtacctgagattgatgatgatgaagattggtttcctgaagacccaattgaagcttttaaggtgatagatcttggtggtaccccaacgattggagattgtgccattatattgcgggctgcaatgagagtgccgctcccgtctgcatttatgacaatattgcaaacaacgcatagccttggctacaaatttggaagccctctgtacgacgaggcgatcttgctgtgccttgatctggaggagatcgacgcggccattgcggtggtagcagaaatggagacaaatggaatcaaggtacccgacgagaccttggacaaggtgctcgcagctaaacaatctggtggaaactctgcgctccaaccgccacctgcagaggagtcgctgctcggctccgccatgtaccgcgcggccgccagcctcgcctccaaggctcggcaagccgggagcagcgctcgccaggttggaagcaggcttgccttgagcaggaactatgctgccaaggatatcaagtttggagttgaggcccgtgctttgatgctgaggggtgttgaggagttggcagatgcagtcaaagtgacaatgggtcctaagggacgcaatgtggttattgagcagagctatggttcaccgaaagtcacaaaggacggtgtgactgttgccaagagcattgagttcaaggatagagtcaagaatgttggtgcaagccttgtaaagcaggttgctaatgcgaccaatgatactgctggagatggtaccacttgtgctactgtattgactaaagcaatatttactgaggggtgcaagtctgttgctgctggcatgaatgcaatggatttaaggcgtggtatttcaatggctgttgatgctgttgtaactaacctaaagggcatggctagaatgatcagcacatcagaggaaatagctcaggtgggcacaatatcagcaaatggggaaagggaaattggtgagcttattgcaaaggctatggagaaggttggcaaggagggtgtaatcaccattgcggatggtaacaccctttacaatgagcttgaagttgtggaaggcatgaaacttgacagaggctacatctctccttactttgttaccaacccaaagacccagaaatgtgaactggatgaccccttgatcctgatacatgacaagaaggtttcgaacctgcatgcagtagttaaagtcttggagttggctctgaagaagcaaaggcctctgctgattgttgctgaagatgtagagagcgaggcattgggtactctgattattaacaagcttcgtgcaggcatcaaggtctgtgctgttaaagctcctgggtttggggagaacaggaaagcaaacttacaggaccttgcgatccttactggaggagaagtcataactgaagagctaggaatgaatcttgagaagttcgagcctcagatgttgggtacatgcaagaaggtaactgtatctaaggacgacactgttattcttgatggagctggagacaagaaatccattgaagagagggctgagcagattagatctgcaattgagctaagcacttctgattatgacaaggaaaagctacaggagcggttggcaaagctctccggaggtgttgctgttctaaagatcggaggagccagtgaagctgaagttggtgagaagaaggatagagtgacagatgcattgaatgccactaaagctgctgtggaagagggtattgtaccaggtggaggtgttgcacttctttatgcatcaaaggagctggataaattgccgactgctaactttgatcaaaagattggtgtacaaatcattcagaatgctttgaagacaccggtgcacactattgcttccaacgcaggtgtagaaggggctgttgttgtcggtaagcttttggaacaagataacaccgaccttggctatgatgcggctaaaggtgaatatgtggacatggtgaaggctggtatcattgacccactaaaagtgatcagaactgccttggtggatgctgcaagcgtatcatctctgatgacaaccacggaatccatcatcgtagagatcccaaaggaagagaaggaggcgccagcgatgggaggcatgggtggaatggattactaa

SEQ ID NO: 51749 - DNA, 4825 bp, Oryza sativa
  Clone ID: PAT_MRT4530_54111C.1
atggcgctgcgcctcgctgccgtaccagagagcgccgccgccgacctgagcgccgccgccaataccctgccgtgcatctcctaccgcgactcgatccggagcgtcgccgccgtcgtctccggcggccgagggcctctcttccagtccgaagattccgcctccacctggtcgtcttcctcctacgcgtccgactgctccggccactcctccggcgtctccgccgccgcggccgctggcttcagggcactcacggcgcacgagctcagggaggtcgcgcgtcgcatggtcgccgacggctacgcccagcgcatggtccaagcgttcgacgacgcggcgacggtcgaggtcctcgagggggagatgttagccgattgtaggttagatgacgatattgccaaagattatgaggcgcgagcggctgtgcgggaagcgcgcgcggcgcgtgaggaagcagaggcgcggctgcaggtagccacgagggcggcacgtctcgtggcagcagaagctgaagcagcacgcaccgcggaggccgccaggcaggctgcagctgctgctgctactttgcgagctgaggaggaggaggagcgacgtgacctggagctgacagacgcggcccgcgtgcgacgcgacgcggaccgggatcgacacataggccgacgtgatcgcgacttcagcccccatcgcagaggatcagatctccaccgcggtgaggaggagcggcgcgatccatggcgcgatcctcgaatcaaccgcgctctggagacccagcgactccgggagcaggcagcggcgattgaggcacaactggacttcgaccgggagcagggtggacgagacgttggcgcacggagccctcgcaggcagcgcgcctccccttccccggaccggcgccgtggtcgccgtggacgctccggctctcctcccgttgtgcagatcgtcgtcaaggatgttggcggcgcatggcccatgctcaccaagactaactacgccgagtgggcgatggtgatgaaggtgaagttgcaggcgcgccacatgtgggacgcggttcgatacggcgacgtcgactacggggaagatcggcgggcgttggagcggttggcgcagctcggcgacaccaccatcgatgaggagagagccgtggagaagctcctttgcgtcgtccccgagaagtacacgcagctggctctgtcgatcgagacgctgctggacttcaccgagctcacgaacgaagaggtgacaggtcgcctcaaggccgtcgacaaccgcaagcagctacctccctcagagccgatcaccattggtggcaagcttttcttcaccaaggagaagtggctcgcccgccaacaagagcggaagaagggggaggccacaagctcttcggcttcgggatcgtcgagcagccgcaagcgtcgaccacgcaagtgggagaaggcgcgtagtggcgctcttggcggcgccgatggcgagcgcaagggcagccgcaacgacacctgccacaactgcgggaagaccggccactgggccaaggactgccggcaggcgaagcacggcggtcaagcacacgtcgctcaagcgcaggagggtgatgaggtggctctgtttttcgtacacggaagcatcgagccacacttcactcccacaccggacgctaccgcgcccctccacctcgacgagctgtgggcccacgtcttcctcagcaacggatcctgcgacgacaagatcgacgggtggtgcctcgacactggtgccactcaccacatgaccgggcgacgggaattcttctccaagcttgactccagtgttcaaggctccgtcaagtttgaggacgcctcagccgtggagatcaagggcgtcggctccatcctcttcaccaccaagaccggcgagcaccggctgctcaccggtgtctactacatccccgcgctgaggaactccatcatcagtttgggacaactggatgagaacggcttgctcgtggagatagaggacggggtcttgcgggtttgggatcgccatcgtcgccttctcgtcaaggtgaacaggggtgccaaccgcctctatgttctccatgtacaggtggcgcagcccgtgtgccttgcagcccgccgcgacgatgatgcatggcggtggcacgagcgctttgggcacctcaacttcgaggccttgaagcagctcagcaacaaggagatggtgcagggcatgccacgagtcgagcacgtggagcagttttgcgacacctgcgtcctcaccaagcagcggcgactcccctttccccgccaagcaagtttctgcgccaaggagaagttggagctcgtgcacggcgacctctgcggtcccgtgactccggccacacctggaggccggcgcttcttcctgctgctcgtcgacgacgtgtcctgctacatgtgggtggtcctgctcgactccaaggcagtggctgcagacgccatcaagcaccatcaagttgctgcggagaaggagtgcggccgcaagcttcgggtgctacacaccgacaacggtggcgagttcacgacggctgagttcgcagcgtactgcgccgacgagaggatccagcgccacttctccgcgccatacaccccgcagcagaacggcgttgtggagcgccgcaaccagacagtggtggccactgcccgcgccctcctcaagcaaagagggatgccggcaatctactggggggaggcggtgatgactgccgtccatctcctcaaccgctcgcccaccaaggcccttgatggcaagacgtcgtacgaggcctggcacgggcgcaagccggtggtgagccacctccgcgtctttggctgtctcgccttcgccaaggagctcaaccacgtcggcaagctcaacgaccggagctcgccgggagtcttcatcggctatgcggagggtgtcaaggcctaccgcatcctcgacccttcgacgcagcacgtccgcatttctcgggacgtcgtgttcgacgaagggcgaggttgggcttcgtacaaggcggtggacgacggctcgacttcgactctcagagacttcgtcgtcgactacgtccactttagggcagccgggggagctagcagctcatcttcaccgagctcgtccacctcggcacccggctcgccatcagctccggcgagtcctctaccacctacaccaccagcaactcctccatcaccagctacgccccgctctcctacaccggcgcccacaccaccggtggagttcgccactccgttgtccaacgacgaggatcgtgttgatgcgtaccacgacgacgagcctctgcgctaccgcaccatggacaacatcttcggtgatcagcccgtccctggactggagacgcgcgacttcgaggccgagttgcacctggcgcatgaggacggcgagccctgctccttcgcagaggcgaatggagatgtggcatggcgcactgcgatgcagcacgagatggacgcggtcgagcggaactggacgtgggtgttggcagatcttcctgccagccaccgcgccatcacccttaagtgggtctacaagctcaagaaggatgaggccggggcggtgatcaagcacaaggcacgtctagtggcgcgcggcttcgttcagcaggagggagtcgactttgacgacgccttcgcgcccgttgcgcgaatggagtctgttcgtctgctcctcgcgctggcagcccaggaaggatggcgtgtgcaccacatggatgtcaagtccgccttcctcaacggagacctgaaggaggaggtctacgtccaccagccgccgggattcgtcatccccggcaaggagaacaaggttctccgcctgcgcaaggccctctacggcttgcggcaggccctctacgccaagctggactccactctcaagcaaatggggttccagcagaactctcacgaagctgctgtctaccagcggggcaaggacggcaatgccctgttggtaggcgtctacgtcgacgacttggtgatcaccggcaccaaggaggctgaggtggaggcgtttaaggaggagatgaaggcgactttccagatgagcgatttgggccttctctctttctacctggggatcgaggtccaccaggacagctctggcatctcccttcgccaaaccgcctacgccaagtgcatcgtcgagttgggcgggctcaccggctgcaacccagcctacactcccatggaggaaaggttgaagctgagccgcgacagcacggctgagggaggtcgacgccacgcagtaccggcatattgtgggcagccttcgctacctcgtccacacgcggccagacttggcatttgctgttggctatgtcagccggttcatgcagcgaccgacgacagagcaccagcaggctgtcacgtcgagggcaccaccgactacggctttcactacccgaggtgtcccgtgcctgatcagctggcagtcggtcaagcaacaagtggtggccctgtctagttgcgaggcagagtacatcgctaccacaaccgcctcaactcaagctctctggttggctcggctgctgggtgatctcttgggcagaaacactgaagcagtggagctcaggatggacagcaagtccgctttggccttggcaaagaatcccgtcttccatgagcgcagcaagcacatccgcatcaagtatcatttcattcggagctgcttggaggaggggagcatcaaggccagctacattaacacccaggatcagctcgccgatcttctcaccaagtcccttgggcgggtcaagttccaggagtttcgcgccaggattggaatggttcaaattccccaaaaggcgccacacatgacttag

SEQ ID NO: 51750 - DNA, 129 bp, Oryza sativa
  Clone ID: PAT_MRT4530_54112C.1
atggggtcgtcggctcggacacaaatgtttgtcatcgtcagtgtctcagtctggcgtacgtccaacgtggtcaacacggttcacaacgccggcgccaccaaggtctccaaggcaaccaggggagactaa

SEQ ID NO: 51751 - DNA, 468 bp, Oryza sativa
  Clone ID: PAT_MRT4530_54113C.1
atgccggaggatgtggccggcggcatcaatggcgacattaatttgaatgaacttcaaatcctggcgattggggacgggattagagggggaaaattaggatttatggttgaagtgctgaactgtgagtctgtaacgggtaaacgggcatgcccatgggtagtgttccttacctgtcatgtagtaatgggtatgcccgcgggcatgaattacctcgcgggcacgggcatgggtagtgcctgtcgtgcccgactgccatccctaggtgagggggaggggcgccaggtgctgggcggctcagcttgggctaggcggccgagtggcatggaccaggtgggccgggaggagggggaggcccgagagagaagagaaagggagggagaaaggaaggacttcggctgcgagccgaggaagagagaggaagactttgggccagacttggcccaaaggaggaaggaggattatttttaa

SEQ ID NO: 51752 - DNA, 4368 bp, Oryza sativa
  Clone ID: PAT_MRT4530_54114C.1
atgtctctccactccattcgttccccctctctctcgtcccatgcctcaagcacttccagtggacgaggcagcaggcggtcggcggctgacgctgagggcgacggcgatgcgactgctgctgcgcgggtcgcgcaggaggcgcaagcggctgcgcgggaagcacgcgcggcgtgtgaggaagcggaggcgcggctgcaggcagccacaagggcggcgcgtctcgcggcggcagaagctgaagcagcgcgcaccgcggaggcagccaggcaggctgcagctgctgctgctgttttgcgagctgaggaggaggaggagtggcgtgacctggagcgggcagacgcggcccgcgtgcgacgcgacgcggaccgggatcgacacgcaggtcgacgcgaccgcgacttcagcccccatcgcggaggagcagatctccaccgcggtgaggaggagcggcgcgatccatggcgcgatcctcggatagaccgcgccctggaggcccagcgactccgggagcaggcagcggcgattgaggcacaactggacttcgaccgggagcagggtggacgggacgttggcgcacggagccctcgcaggcagcgcgcctccccttccccggacaggcgccgtggtcgccgtggaccctccggctctcctcccgttgtgcagaccgtcgtcaaggatgttggcggcgcatggcccatgctcaccaagactaactacgtcgagtgggcgatggtgatgaaggtgaaattgcaggcgcgccacatgtgggacgcggtctggtacggcgacgtcgactacggggaagattggcgggcgctggaggcgctccttgcggctgttccgacggagatgcagtcctccattgtgaacaagcggatcgccaaggacgcctgggatgccatcgcttcggcacgcatcggcagcgaccgcgcccgcaggtccacgcttcagaagctgcgtcaggattgggagaacctggccttcaagccgggtgaggacatcgacgacttcgttctccgcttcaactccttgcagcagcggttggcgcagctcgtcgacaccaccatcgacaaggagagagccgtggagaagctccttcgcgtcgtccccgagaagtacacgcagctggctctgtcgatcgagacgctgctggacttcaccgagctcacgatcgaagaggtgacgggtcgcctcaaggccgtcgacaaccgcaagcagctacctccctcagagccgatcaccattggtggcaagcttttcttcaccaaggagcagtggctcgcccgccagcaggagcagaagaagggggaggccacaggctcttcggcttcaggatcgtcgagtagccgcaagcgtcgaccacgcaagtgggagaaggcgcgtagtggcactcttggcggcgccgatggcgagcgcaagggcagccgcgacaacacctgccacaactgcgggaagaccggccactgggccaaggactgccggcaggcgacgcacggcggtcaagcacacgtcgctcaagcgctggagggtgacgaggtggctctgtttttcgtacacagaagcatcgagccgcacttcactcccgcacaggacgctaccacgcccctccaactcgacgagccgcgggcccacgtcttcctcagcaacggatcctgcggcgacaagatcgacggatggtgcctcgacaccggtgccactcaccacatgaccgggcggcgggaattcttctccgagcttgactccagcgttcaaggctccgtcaagtttagggacgcctccgccgtggagatcaagggcgtcggctccatcctcttcaccgccaagaccggcgagcaccggctgctcaccggtgtctactacatccccgcgctgaggaactccaccatcagtttgggacaactggatgagaacggctcgcgcgtggagatagaggacggggtcttgcgggtttgggatcgccatcgtcgccttcttgtcaagcgctttgggcacctcaacttcgaggccctgaagcagctcggcaacaaggagatggtgcagggcatgccgcgagtcgagcacgtggagcagttttgcaacacctgcatcctcaccaagcagcggcgactcccctttccccgccaagcaagtttccgcgccaaggagaagctggagctcgtgcacggcgacctctgcggccccgtgactccggccacacctggaggccggcgcttctttctgctgctcgttgacgacgtgtcctgctacatgtgggtggtcctgctcgactccaaggcagcggctgcagacaccatcaagcgccatcaagttgctgcggagaaggaatgcggccgcaagcttcgggtgctacgcaccgacaacgggatccaacgccacttctccgtgccatacaccccgcagcagaacagcgttgtggagcgccgcaaccagacagtggtggccactgcccgcgccctcctcaagcaaagagggatgccagcaatctactggggggaggcggtgatgactgccgtccatctcctcaaccgctcgcccaccaaggcccttgacggcaagacgccgtacgaggcctggcatgggcgcaagccggtggtgagccacctccgcatctttggctgtctcgccttcgccaaggagctcaaccacatcgggaagctcgacgaccggagctcgccgggagtcttcatcggctatgcggagggcgtcaaggcctaccgcatcctcgaccctgcgacgcagcgcgtccgcatttctcgggacgtcgtgttcgacgaagggcgaggttgggcttgggacaaggcggtggacgacggctcgacttcgacgctcagagacttcgtcgtcgactacgtccactttgggggagccagaggagctagcagctcatcttcaccgagctcatccacctcggcacccggctcgccatcagctccggcgagtcctccaccacctacaccaccagcgactcctccatcaccggctacgccccgctctcctacaccggcgcccacaccaccggtggagttcgccactccgttgtccaacgacgaggatcgtgttgatgcgtaccacgacgacgagcctctgcgctaccgcaccgtggacagcatcttcagtgatcagcctgtccttggactggtgacgcgcgacttcgaggccgagctgcacctagcgcatgaggacggcgagccctgctccttcgcagaggcgaatggagatgtggcatggcgcactgcaatgcagcacgagatgaacgcggtcgagcggaaccggacgtggccgccgggattcgtcatccccggcaaggagaacaaggttctccgcctgcgcaaggccctctacggcttgcggcaggcgccccgagcttggaacgccaagctggactccactctcaagcaactggggttccagcagagctctcacgaagctattgtctaccggcggggcaaggacaacaatgccctgttggtaggcgtctacgtcaacgacttggtgatcaccggcaccaaggaggctgaggtggaggcgttcaaggaggagatgaaggcgacttttcagatgagcgatttgggccttctctctttctacctggggatcgaggttcaccaggacagctctgacatctcccttcgccagactgcctacgccaagcgcatcgtcgagttgggcgggctcaccggctgcaacccagcctacactcccatggaggaaaggttgaagctgagccgcgacaacacggctgaggaggtcgatgccacgcagtaccggcgtattgtgggcagccttcgctacctcgtccacacgcggccagacttggcatttgctgttggctatgtcagccggttcatgcagcgaccgacgacagagcaccagcaggctgtcaagaggatcctccgttacgtcgagggcaccaccgactacggcttgcactacccgaggtgtcccgctagcagtcggtcaagcaacaagtggtggcagtcagtcaagcaacaagtggtggccctgtccagttgcgaggcggagtacatcactaccacaaccgcctcaactcaagctctctggttggctcggctgctgggtgatctcttgggcagagacgctgaagcagtggagctcagggtggatagcaagtccgctttggccatggcaaagaatcccgtcttccatgagcgcagcaagcacatccgcatcaagtatcatttcattcggagctgcttggaggaggggagcatcaaggccagctacattaacacccaggatcagctcgccgatcttctcaccaagtccctcgggcgggtcaagttccaggagtttcgcgccaggattggaatggttcaaattccccaaaaggcgccacacaagacttag

SEQ ID NO: 51753 - DNA, 3006 bp, Oryza sativa
  Clone ID: PAT_MRT4530_54115C.1
ttctccaagcttgactccagtgttcaaggctccgtcaagtttgaggacgcctcagccgtggagatcaagggcgtcggctccatcctcttcaccaccaagaccggcgagcaccggctgctcaccggtgtctactacatccccgcgctgaggaactccatcatcagtttgggacaactggatgagaacggcttgctcgtggagatagaggacggggtcttgcgggtttgggatcgccatcgtcgccttctcgtcaaggtggcgcagcccgtgtgccttgcagcccgccgcgacgatgatgcatggcggtggcacgagcgctttgggcacctcaacttcgaggccttgaagcagctcagcaacaaggagatggtgcagggcatgccacgagtcgagcacgtggagcagttttgcgacacctgcgtcctcaccaagcagcggcgactcccctttccccgccaagcaagtttctgcgccaaggagaagttggagctcgtgcacggcgacctctgcggtcccgtgactccggccacacctggaggccggcgcttcttcctgctgctcgtcgacgacgtgtcctgctacatgtgggtggtcctgctcgactccaaggcagtggctgcagacgccatcaagcaccatcaagttgctgcggagaaggagtgcggccgcaagcttcgggtgctacacaccgacaacggtggcgagttcacgacggctgagttcgcagcgtactgcgccgacgagaggatccagcgccacttctccgcgccatacaccccgcagcagaacggcgttgtggagcgccgcaaccagacagtggtggccactgcccgcgccctcctcaagcaaagagggatgccggcaatctactggggggaggcggtgatgactgccgtccatctcctcaaccgctcgcccaccaaggcccttgatggcaagacgtcgtacgaggcctggcacgggcgcaagccggtggtgagccacctccgcgtctttggctgtctcgccttcgccaaggagctcaaccacgtcggcaagctcaacgaccggagctcgccgggagtcttcatcggctatgcggagggtgtcaaggcctaccgcatcctcgacccttcgacgcagcacgtccgcatttctcgggacgtcgtgttcgacgaagggcgaggttgggcttcgtacaaggcggtggacgacggctcgacttcgactctcagagacttcgtcgtcgactacgtccactttagggcagccgggggagctagcagctcatcttcaccgagctcgtccacctcggcacccggctcgccatcagctccggcgagtcctctaccacctacaccaccagcaactcctccatcaccagctacgccccgctctcctacaccggcgcccacaccaccggtggagttcgccactccgttgtccaacgacgaggatcgtgttgatgcgtaccacgacgacgagcctctgcgctaccgcaccatggacaacatcttcggtgatcagcccgtccctggactggagacgcgcgacttcgaggccgagttgcacctggcgcatgaggacggcgagccctgctccttcgcagaggcgaatggagatgtggcatggcgcactgcgatgcagcacgagatggacgcggtcgagcggaactggacgtgggtgttggcagatcttcctgccagccaccgcgccatcacccttaagtgggtctacaagctcaagaaggatgaggccggggcggtgatcaagcacaaggcacgtctagtggcgcgcggcttcgttcagcaggagggagtcgactttgacgacgccttcgcgcccgttgcgcgaatggagtctgttcgtctgctcctcgcgctggcagcccaggaaggatggcgtgtgcaccacatggatgtcaagtccgccttcctcaacggagacctgaaggaggaggtctacgtccaccagccgccgggattcgtcatccccggcaaggagaacaaggttctccgcctgcgcaaggccctctacggcttgcggcaggccctctacgccaagctggactccactctcaagcaaatggggttccagcagaactctcacgaagctgctgtctaccagcggggcaaggacggcaatgccctgttggtaggcgtctacgtcgacgacttggtgatcaccggcaccaaggaggctgaggtggaggcgtttaaggaggagatgaaggcgactttccagatgagcgatttgggccttctctctttctacctggggatcgaggtccaccaggacagctctggcatctcccttcgccaaaccgcctacgccaagtgcatcgtcgagttgggcgggctcaccggctgcaacccagcctacactcccatggaggaaaggttgaagctgagccgcgacagcacggctgaggagccggttcatgcagcgaccgacgacagagcaccagcaggctgtcacgtcgagggcaccaccgactacggctttcactacccgaggtgtcccggtgcgcagcacttcatcgggtacagcgacagcgacctcgccggcgacagcgacacgagcaagagcaccagtggcacgctgttcttcctcggcaagtgcctgatcagctggcagtcggtcaagcaacaagtggtggccctgtctagttgcgaggcagagtacatcgctaccacaaccgcctcaactcaagctctctggttggctcggctgctgggtgatctcttgggcagaaacactgaagcagtggagctcaggatggacagcaagtccgctttggccttggcaaagaatcccgtcttccatgagcgcagcaagcacatccgcatcaagtatcatttcattcggagctgcttggaggaggggagcatcaaggccagctacattaacacccaggatcagctcgccgatcttctcaccaagtcccttgggcgggtcaagttccaggagtttcgcgccaggattggaatggttcaaattccccaaaaggcgccacacatgacttag

SEQ ID NO: 51754 - DNA, 414 bp, Oryza sativa
  Clone ID: PAT_MRT4530_54116C.1
atggctggaacggagccacgggagacctccggcgaggaaagaggcagttgggacgccgccgcctcgccgtcgccggcggccggaggaactagggaaagcgtcggccgtggatggatctcaacgagtggaggggaggcggcaggctcgtgtggccggcggctgctcggcgaaggcacccatcttacagatccagcgagaggggaggcagcgggctcccacggccagcgggtggccgacagaggtagcagtagcggccacacccttccctctgtcccctcccgccagatcaggcgagagggaaggtggcgggtttcccacgacgttgggctcagcctcctctccgccgctggccaccgtgacggtggggagctagatcgaagacgtgacgatggggaggccgggggatttcaatga

SEQ ID NO: 51755 - DNA, 6813 bp, Oryza sativa
  Clone ID: PAT_MRT4530_54117C.1
atggccgacccgagccgcacttcctcgggtggctttccccctccacaagtagctctctccccgcctgtccccgggtcgccgccctccgctctctagccgaccccacgaaacaaaaaggcttcatagctcaacctcctcgccgccggccacgctcacctcccctcccctccccccccatccctcctcctcctcctagccccaggtcgctgctcggctccgccatgtaccgcgcggccgccagcctcgcctccaaggctcggcaagccgggagcagcgctcgccaggttggaagcaggcttgccttgagcaggaactatgctgccaaggatatcaagtttggagttgaggcccgtgctttgatgctgaggggtgttgaggagttggcagatgcagtcaaagtgacaatgggtcctaagggacgcaatgtggttattgagcagagctatggttcaccgaaagtcacaaaggacggtgtgactgttgccaagagcattgagttcaaggatagagtcaagaatgttggtgcaagccttgtaaagcaggttgctaatgcgaccaatgatactgctggagatggtaccacttgtgctactgtattgactaaagcaatatttactgaggggtgcaagtctgttgctgctggcatgaatgcaatggatttaaggcgtggtatttcaatggctgttgatgctgttgtaactaacctaaagggcatggctagaatgatcagcacatcagaggaaatagctcaggtgggcacaatatcagcaaatggggaaagggaaattggtgagcttattgcaaaggctatggagaaggttggcaagaagggtgtaatcaccatggcgcatggttcctccctttacaaaaggacgtgaagttagtcgatgctatgatgcttgacatggagttggtccctgccaaactttggtaccagacccaaatacccaaagatgtgaactggaagacctcttgaaccttattcatgacaaggctgtgtcgaaccttcatggagtagttagagacttggcgttggctttgaagaagcagaggcctctgctgattgttgctgaagatgtagagagcgaggcattgggtactctgattattaacaagcttcgtgcaggcatcaaggtctgtgctgttaaagctcctgggtttggggagaacaggaaagcaaacttacaggaccttgcgatccttactggaggagaagtcataactgaagagctaggaatgaatcttgagaagttcgagcctcagatgttgggtacatgcaagaaggtaactgtatctaaggacgacactgttattcttgatggagctggagacaagaaatccattgaagagagggctgagcagattagatctgcaattgagctaagcacttctgattatgacaaggaaaagctacaggagcggttggcaaagctctccggaggtgttgctgttctaaagatcggaggagccagtgaagctgaagttggtgagaagaaggatagagtgacagatgcattgaatgccactaaagctgctgtggaagagggtattgtaccaggtggaggtgttgcacttctttatgcatcaaaggagctggataaattgccgactgctaactttgatcaaaagattggtgtacaaatcattcagaatgctttgaagacaccggtgcacactattgcttccaacgcaggtgtagaaggggctgttgttgtcggtaagcttttggaacaagataacaccgaccttggctatgatgcggctaaaggtgaatatgtggacatggtgaaggctggtatcattgacccactaaaagtgatcagaactgccttggtggatgctgcaagcgtatcatctctgatgacaaccacggaatccatcatcgtagagatcccaaaggaagagaaggaggcgccagcgatgggaggcatgggtggaatggattactaatcaacacccattaaagtaaactaaaaacatactcctgggatttaggattttttttgcggtgcaagttcatcgtcgatgtattttttgttcttgttgatgaggtggttgtcagacaattttgattccactggcggtaggacgggttggaacgaataaaattttagttcagagctaggagttcttgagagctgaggactgcacttcgatcaaaattgaatctgacaccttgtgccggaacatttttatgagctgatctgaaagattacgccttttggcctgaaaaagtgagaagatatacaaaaaaaaaagcacgatcattgaaacgaccgagatatggaaacacagcgactctgggagcaggcagcggcgattgaggcacaactggacttcgaccgggagcagggtggacgggacattggcgcacgaagccctcgcaggcagcgcgcctccccttcctcggaccggcaccgtggtcgccgtggacgctccggctctcctcccgttgtgcagaccatcgtcaaggatgttggcggcgcatggcccatgctcaccaagactaactacgccgaatgggcgatggtgatgaaggtgaagttgcaggcgcgccacttgcagaaatggagacaaatggaatcaaggtacccgacgagaccttggacaaggtgctcgcagctaaacaatctggtggaaactctgcgctccaaccgccacctgcagaggcgtaatctgattggaacaagaagcccctttgtagccatacgcatcggcagcgaccgcgcccgcaggtccacgcttcagaagctgcgtcaggattgggagaacctggccttcaagccgggtgaggacatcgatgacttcgttctccgcctcaactccttgcagcagcggttggcgcagctcggcgacaccaccattgacgaggagagagccgtggagaagctccttcgcgtcgtccccgagaagtacacgcagctggctctgtcgatcgagacgctgctggacttcaccgagctcacaatcgaagaggtgatgggtcgcctcaaggccgtcgacaaccgcaagcagctacctccctcagagccgatcaccattggtggcaagcttttcttcaccaaggagcagtggctcgcccgccagcaggagtggaagaagggggaggccacaggctcttcggcttcgggatcgtcgagcagccgcaagcgtcgaccacgcaagtgggagaaggcgcgtagtggcgctcttggcgacgccaatggcgagcacaagggcagccgcgacgacacctgccacaactgcgggaagaccggctactgggccaaggactgccggcaggcgaagcacggcggtcaagcacacgtcgctcaagcacaggaggccgcggcccacgtcttcctcagcaacggatcatgcggcgacaagatcgacggatggtgcctcgacaccggtgccactcaccacatgaccgggcggcgggaattcttctccgagcttgactccagcgttcaaggctccgtcaagtttggggacgcctccaccgtggtgatcaagggcgtcggctccatcctcttcactgccaagaccggcgagcaccggctgctcaccggtgtctactacatccccgcgctaaggaactccatcatcagtttgggacaactggatgagaacggctcgcgcgtggagatagaggacggggtcttgcgggtttgggatcgccatcgtcgccttctcgtcaaggtagcgcagcctgtgtgccttgcagcccgccgcgacgatgatgcatggcggtggcacgagcgctttgggcacctcaacttcggagccttgaagcagctcggcaacaaggagatggtgcagggcatgccgcgagtcgagcacgtggagcagttttgcgacacctgcgtcctcaccaagcagcggcgactcccctttccccgccaagcaagtttccgcgccgaggagaagctggagctcgtgcacggtgacctctgcggccctgtgactccggccacacctggaggccggcgcttcttcctgctgctcgtcgacgacgtgtcccgctacatgtgggtggtcctgcacgactccaaggcagctgctgcagacgccatcaagcaccatcaagttgctgcggagaaggagtgcggccgcaagcttcgggtgctacgcaccaacaacggtggcgagttcacggcggctgagttcgcggcgtactgcgccgacgaggggatccagcgccacttctccgcgccatacaccccgcagcagaacggcgttgtggagcgccgcaaccagacagtggtggccactgcccgcgccctcctcaagcaaagagggatgccggcaatctactgggaggaggcggtgatgactgccgtccatctcctcaaccgcttgcccaccaaggcccttgacggcaagacgccgtacgaggcctggcacgggcgcaagccggtggtgagccacctccgcgtctttggctgtctcgccttcgccaaggagctcaaccacgtcggcaagctcgacgaccggagctcgccgggagtcttcatcggctatgcggagggcgtcaaggcctaccgcatcctcgaccctgcgacgcagcgtgtccgcatttctcgggacgtcgtgttcgacgaagggcgaggttgggcttgggacaaggcggtggacgacggctcgacttcgactctccgagacttcgtcgtcgactacgtccactttgggggagccgggggagctagcagctcatcttcaccgagctcgtccacctcggcacccggctcgccatcagctccggcgagtcctccaccacctacaccaccagcgactcctccatcaccggctacgccctgctctcctacaccagcgcccacaccaccggtggagttcgccactccgttgtccaacgacgaggatcgtgttgatgcgtaccacgacgacgagcctctgcgctaccacaccgtggacaacatcttcggtgatcagcccgtccttggactggcgacgcacgacttcgaggccgagctgcacctggcgcatgaggacggcgagccctgctccttcgcagaggcgaatggagatgtggcatggcgcactgcgatgcagcacgagatggacgcggtcgagcgaaaccggacgtgggtgctggcagatcttcctgtcggccaccgcgccatcacccttaagtgggtctacaagctcaagaaggatgaggccggggcggtgatcaagcacaaggcgcgtctggtggcgcgcggcttcgttcagcaggagggagtcgactttgacgacgccttcgcgcccgttgcgcgaatggagtctgttcgtctcctcctcgcgctggcggcccaggaaggatggcgtgtgcaccacatggatgtcaagtccgccttcctcaacggagacctgaagaaggaggtctacgcccaccagccgccaggattcgtcatccccagcaaggagaacaaggttcttcgcctgcgcaaggccctctacggcttgtggcaggcgccccgagcttggaacgccaagctggactccactctcaagcaaatggggttccagcagagctctcacgaagctgctgtctaccggcggggcaaggacggcaatgccctgttggtaggcgtctacgtcgacgacttggtgatcaccggcaccaaggaggctgaggtggaggcgttcaaggaggagatgaaggcgactttccagatgagcgatttgggccttctctctttctacctggggatcgaggtccaccaggacagctctggcatctctcttcgccagaccgcctacgccaagcgcatcgtcgagttgggcgggctcaccggctgcaacctagcctacactcccatggaggaaaggttgaagctgagccgcgacagcacggctgaggagatttggcattcgctgttggctgttagccggttcatgcagcgaccaacgacagagcaccagcaggctgtcaagaggatcctccgttacgtcgagggcaccaccaactacggcttgcactacccgaggtgtcccggtgcgcagcacttcattgggtacagcgacagtgacctcgccggcgacagcgacacgagcaagagcaccagtggcatgctgttcttcctcagcaagtgcctgatcagctggcagtcggtcaagcaacaagtggtggccctgtccagttgcgaggcggagtacatcgctaccacaaccgcctcaactcaagctctctggttggttcggctgctgggagatctcttgggaagagacgctgaagcagtggagctcagggtggacagcaagtctgctttggccttggcaaagaatcccgtcttccatgagcgcagcaagcacatccgcatcaagtatcatttcattcggagctgcttggaggagaggagcatcaaggccagctacattaacacccaggatcagctcgtcgatcttctcaccaagtccctcgggcgggtcaagttccaggagtttcgcgccaggattggaatggacgagtcatgtggcaaggtcaatgacagaaaggctgagctaaaatcacatggagaaaaagcagttaagagaaatgactaccttgctgcgtcaaagatctactccgaggcacttgagctagattattttgatgcaaccttgtattcaaacagaagcctttgcaacctacaaattggagaagcacaaaaggctttgcttgacgcagatagatgtgtagaactgcggcctaagtgggtgaaaggtcactaccgggaaggagctgctttgatggtgctaaaggagcacaagaaagcatttgaggcattcttgaacgcgctgaaactggatcctgctaatgccgagattgagaaagtgatgtggtaa

SEQ ID NO: 51756 - DNA, 231 bp, Oryza sativa
  Clone ID: PAT_MRT4530_54119C.1
gcgcccacgcgtccgggctcggcgacgacagcgtctccagtgcctagctcaccgagtctactacgttcgacaagcaagggatcgcgagcatgcatgctctattcattttcatgcccaaggatttccgctctgctacttgtgacataatcatgggtaggggctctttcttcatcaatatagtcattgataggtgttgatacttctttccttatcattaagcggttctttaac

SEQ ID NO: 51757 - DNA, 2268 bp, Oryza sativa
  Clone ID: PAT_MRT4530_5411C.1
atgggtgtttatacagccgattacataggaatcggctatatgcaaagtcgaactgacggtatgaccagtcgtgacaccggtctaaccgcaccctatgccggtcagaccgtgcccaccatagccggtcagaccgtaccctatcctggctagatcaggcctcctatggctagcctgaccgcaccactgacctccggtcagaccgggccatgggccggtcagacgggctatctatagtcggtcagaccggttccctaggaatttctccaggttttcataccacgactagcagtactgattttaattattattcatcacctgttaatactgttagtcatgctactccacatgtccctaatacttacaatgatcctaatggaggatattctcacgatactaggtatggccaatataacaatattgtgccacaacaaccgctctttaggccaccaaatccaccaaggcctgaaatcatggaggtaaggaatcgtgctagggagaaccaaaagccgtattctgatttttatgacgttgtcccatatcctcctaattataaaattcctgaatttaccaaatttagtggtgagtatagtaggactacatacgagcatgtagatcaattcttagcgcaatgtgccgaactaaatgatggttcggattgtatcacatgcgaaagtgaaatagcattgtcacctaagaccgagtcacaaatcggtcatgtggatgttggaaaagatgataacaatgtcttgcgggatagtagtgaaatagaatccaaagttgccatacatacatatcaaaggccgtatcctgaacatgtagattcagttccatacccgcaaagatttgaagtgtccaacttcacgaaattcacaggtgaggatgctataacaacaatagagcatatcggccaatttattgaacaatgtgaaagaccgattgatacttcatcggtcacttgtgaaactatttcggttacatctattcctaagaccggaattgttagtgatcctcttcctgttagttctattgatgttgacaaaaagaaagggaaaagtgttatttggggatcctcggcccaagaataggatcaaaaatacgaaggccgaagatcataaagttgcaaaggatgagtcatctatttcccaaaagaccaaaaagccgaagctcacttttgagatgcttatcgctaagttcaagaaaggattagccggtcagcgatttgataatcaaattagtgattcaaaaagaccaagatcatctcgtaggaagagatttggtcaaacatcaaagcaatcggagccatcaactataccaactccatacaaacctccggttgtgatgccatggtatccatattcaatgtcactatatggttatccttttatgtattatatgctatggatgcctcaaccacctatgccgtattatcaaggatggaaggaatcacctaggacagtgtcaaatcattcatctaacccaagacaagaccgtttcccacaaaagaatcggtccggtggatcaaaggtgaaaaaagtgtaaaaggtgtgggtgaggaaagaagccaaaactccggaggtcgttgctatcaaagaggagtctcaagatgttcatgtacctactggagatgcggtggaaaccacgcaagcaaaggagatcgaagccgacgccgtgactgtcaaaattggtggtctaaccgagacagctggccggtctaatcgccagtctacggccggcctgaccgaccttactggccggtctgaccgacggcttatggccggtctgaccgggcctagaggccggtctgaccgaggggcattagagaagagtgggaaaattgaaagcaatacatgagcttccacttcgacaaaaaatatcaagaatcattgcttagctcctggaaaacaaccacagccgaagtggataccttatggcttatctcgctctcaaaagaggaggctacagcgtcttcgggccataggtcaaaaagaaaaggaggccgaagatgcggagaacaagacatgcaataatttagagcctcaaacagcacctaggcaagtatggagacctaaagaagtaaaagttaagagaccggtgatttcccatagtagtagtgataaatccaatttgatgagagaagaatcatcggtcattagagataagtctccttcacatgatgctatggatgttggtgcggtgttcgtcttgccttcaaaatcgtgcagtcgagaaagccgattttgcttggggggcaagacattactatgctcg

SEQ ID NO: 51758 - DNA, 2244 bp, Oryza sativa
  Clone ID: PAT_MRT4530_54120C.1
ctagagtcgacctgcaggcatgcaagcttcaattgggtcttcaggaaaccaatcttcatcatcatcaatctcaggtaccctttttgacttctttgatgaaacagatgtcttttctagatcctttaataactggactcctatcatttgaagatgctgcttgggtcctttcgatggtttgtctttagtttcatctccggcttgattttccgtttgttcaacagcatcctcctcatcgatctcatcttcttctccttttgtggtatcatcgtcgtcgtcatcttcgtcgtcatcatcatccaactcatcgtcatctaaatctgcatcttcttcatcattaacttcttcacaaagataattccgagtttctcccaggaaacgccgcttccaaaactctgtattcccatcttctagcttgattcgtgaaatcaattcatctaactcttcatcaacctcttcctcatcttccacaggaggaacccaaagtggtataccacgtgaacgattgattctcctagccttttgaactctctggtaaagtacctgcctagttccatctgtaggcaacccttgtgcctctagctcagtcttcaactcagatactaccattttgctagctgccttgggcttaacaacatttttctttggccctacaactaacttttttagtctttcaataactcttcgtacatcatcttcagatacatcacctaaaataccagggccttcatttctcaatgttattagaagtttgcgatgatataacttcaattcctcaaagcagcgctgtttaaatgatgtctctattggatttgaataggcaaacccaaactcatctggatctaagggagttttgcctcttcgaggcacccagcgtttgcgctcaccagtaagacctccttcttcaatatatctggcaacataatcaatttcaaaaccaacatcagcttcttcttgtaatggttctatccaggtgctcaccaacgtgcgatattttctgtttaagatcattgctctaggtgcaatagtctgaccatcattagacattgcctctaatgcctcaagcaactcatcagctcttccatcaaggcatagagatcgcagatagagagaaagcggatcaccacaatttccttcattatataaaacttttgttcctccggggattctccgtaaggcacggaaatgccttattgcttcattaaccatagagtactttgtgaagcattccactaacaacgcatatgttcttgcattaggctgaatacgtttgtggtcttccaccatcatccctagtaattcggccacatctcctgccctgtcataggatgtagccctagtaaatgcctgtatgacccaattgtaggactcggtatctggtttcatataaccttcacctccatattccatgttttcgaatgttgcaaaagcaatctcaggaattccacaagtagcctgcacacttaggaggcaattgaaatggaatgtggttgccattcttccagaagcttccattttgtatgcaactgttagagcattggagtgatctccagctttacaatcttcttcaatcaaaagatcataaatttcatcagtcccttgcaaaccaccttctgttcctttcagaaatactgtattggcgtcctccagatagttattattgactagttcctctacaagaattagccaagccttgcgaatatcatacttatatctttccatagcagccagaatctccatgcccctggtagcaagacccttcttggcaaaaacacggactaaagccacaaatgtttcatgtaaagggcgcaccccagaacttagctcccttctaagagattgcatggcgccttccgcgtcgccggcgagaacgtgggcggcgacgaggccgtggaaggagcgcgggccgggggagagccccgcggcgaccatgtcgtagatggcatccgcgacccccgcggcgtccgcggcgcgcgcgcgctccgcgagctgctccaggaaggcgaggcgcaggcccttctccaccgcccccgcggccgccgagcggtcgccgccgccgccgctcccctcgggcagccggcgccgccgcgtgcggcgccgctcggcgagcgcggacgcgcgcgtgctggaggtggaggcggaggccgcgcgcgcgcgggggaagcgcgcggcggcagtgagggggaaggcggaggagggcggcgcggcgggggcggaggtggagggggtgggggtaggggtggccat

SEQ ID NO: 51759 - DNA, 1485 bp, Oryza sativa
  Clone ID: PAT_MRT4530_54121C.1
tgcaggaattcacgcgtccgctctctccccgtctcgattccccaccagcggcgaaaccctaaccctagagcggccaccgccatggagaagcgcgcgaccaccaccagggcggtggtgctccgcctcgacgacctctcccttccgccgcgccgcctcaccgtgccgtcccgcctcccggtctcccacctcctccgcgcgctgccgcagccgctgctcgagtcgtcgtcgttctacctcaccgccgatggccgcccgctcctgctgtccgcgcccgtggcgtcgcttccgccgtcgggttcggtccagctccgcctccgcgcgctccgcggcggtggcggcgacggcggcgccacgggcgccgagtcccgcgactgctacctctccatgtacctcgcgaagaagcccgacaaggccgaccccaacgaggcgcggctctcccgcttcacctgctgcgcgctctccggcgagccgcttgccgcgcccgccgtcgccgatcgcctgggtaacctcttcaacaaggaggccctcgtcgaggcgctcctccacaagcgcctccccaaggcgctctcacacatcaggggtctcaaggacatgatccccatccacctgcatcctaagcctgatgccgatgcggctggtgaggaggtccggttccagtgcccggtcaccgggctcgatttcaatgggaagtaccaattcctcgcgcttcgcaagtgtggccatgtgctcagcgtgaaggctctcaaggaggtgaagacctcggcgtgcttggtatgccataaggagtttgatgaggcggacaagatgccgctcaacggaactgaggacgaggttgcggcattgaggctgaggatggaggaggagagggggaaggtgaaggaaaagaaggagaagaaggtgggaaatgggctaagtgggagtaagcatgctgccgctgccgtgatggcagggggtgctgagaagcttgaaaatgggaagaagggggaggctccctctttgaagcggttcaaggctggagaccatgcaccagcatatgcaaacaaagaagtgtatgcatcgatttttacttcttccaagaagtcagatttcaaggagacatactcatgccggtcacttccccttggaaggaactgaagcgatcttctattgagagatggtaatggcttggaggtgaacatcctgcactgatttgcttcatagcatggttcacctgcaagtttcttcattgtaattttagttgtcggtgttcttcatgctttgattactgatgtggggctctgtgtttccattgtcaaggaagcaaagtgtcggagtatttgaaagatgtgtgaaatatgtaatagtttgataccattaacaagcaataccagctctgaaatcttctgtagcagcttgttggaataaagttgcttatttgtataaaaaaaaagaattaacaaaaaaaaaaaaaaaaaaaagacgaaaaaaaaaaaaaaacacacacca

SEQ ID NO: 51760 - DNA, 1107 bp, Oryza sativa
  Clone ID: PAT_MRT4530_54122C.1
atggccggatcttgtagtgtcgccagtagcaacaaatccaagctcgccgatgaagagttcagtccggtgggcatgagggtactcctcatcgatgagagcaccacctacctcaagataatcaccaaactgctgcttaactgcggttataaaggtctgactgtaacaaattttgagattacgtacgtttggcgtgtggatgaagtgacgcccaagacggcggcgcgagatgctgtggaggagcttcacgagaacccttggagctacgacatggtcctcaccgaggtgcacgcgccggctgggatagacggcttcaacctcctccagtacgccggcaccgacatggatctaccagtcgtcgtgttctctgcggacgacgacaagaggacggtgttgaagtgtgtcaacagcggcgcgtgcgactacctggtgaagcccctgcggcacgaggaactgaagaacatatggcagcatgtgtacaggaggaagctgcgcagcggtggtcgtcgcgctgcagctgcaggaaacagcagcaagggggagatcaagaagaggtttaggtggcctaaggagctgcacgagaggtttgtcagcgtcgtccttcagctcggagttgataaggctactccaaaccagatactaccacttctgaatcgggaagatttaactcgggatcagagattcagaatagctctaactaaatcaaaagccctgccaagctgctccacaataccgataggggaaactgttcatgggataccgcttgctcttcaagctattggaacaggaaacaatcaacatctcattgtccctttcaatcggataacttttgtgagaccccgaggagttgaaattggtcaaaatggagtggtgggaggactggttacgggtaataataatgttgttgtgcccacagctacaagtattatagccagagcatttgggcgagagatagttaatggtgctgatctttttgatcacgggaccctgattagagattcatcttccacaagtcatgatggggcgcaaaatgaacttggcgaaactaatcttgcatttgaactaatggcgaaaaagggaagcgatgtggagccaagaattggtggctag

SEQ ID NO: 51761 - DNA, 124 bp, Oryza sativa
  Clone ID: PAT_MRT4530_54123C.1
ggggggaaaatccatataatttaacccgaaaagaatccagtcgaacataatttgatccagtgagaccacccatgaccacagaaataacagtcgcagagaccaaaccatttcatttggcaaacat

SEQ ID NO: 51762 - DNA, 2063 bp, Oryza sativa
  Clone ID: PAT_MRT4530_54124C.1
atgccatcacctccacttgatcctcaccacgttgccagacctgcacgcgccaacaacagaacaaattcaaaagctttcagttttagaaagtggcaccatggcactcaagttcttggttcctttatcacaaaattggcaaattatctaccaccatctgtaccttcatatgcatccaccaagatgttatatgaagctctgtcacaatcacccctcaccaaatgctgcatcaaggagagatccctcaagcgccttgcagcaatcctgtatggctgtggtgcattgatatatacaatgtatattactccaaacttaaagaaaagtaaaaaattccatccagatgtcgcatgtacaagaaaccaacataacagtgggaaagcttatcaagatggagttaacgaggcagtaaagcgacatggcaagagattggaatggattggaagaagaagaagaggaggaggaggagatgggagaatttaccatgaaacaggtcttgccgatctagcaatcgccgagcaggctgaccttgaggctgcgtccttgacatccggcgccttgcggtcggcggcggcgccaccgtcgtccctggggagcagggacagaacggccccgttggctatgcgctgcggtggcgtcgaggaaactggggtgggggtatggggagtgggagcggcgacggcggcgaggaggcggggaatcgccgtgatgggatggaccacgaaggagagggagaaggcggcggcgtcgcgtggcagttggagtgttggacggaggcggtggcgtcgaggaaagtggcgccgtgggttggggggtgtggggcgacggacggaggaggcatggattccgctgcaggcggggcagggcggtcgccggtggcagggcgcgatggcgacggtcgtcggcggcagggcgatgcgcgacggagtgtgggcggagtgggcggcagacgcggagaaaaaggagtgggggaggcgccgctcgataagggcaaccacaatgtgcttaaaaagcagcttccacggttttcagcagcaagcacattggttacactctacaccagtgagttttcaaggttttcgtcctccggaaaattgggtgtactcacctaatcaaattactgggtctgcttcttcccacggatcagaatcagcctctcagtgccctgcaagatatgaagagaacaatgtggttgatatcgaagagtcaagtgacaacagtcaagaggcagggaggagaggaacacgagtcaactggactgaagaggaaaacataagactccttagctcttggctgaataattcagtggatcctataaatggtaatgataagaaggcagaatactattggaaggctgtagctgtagagtttaatagcaatacatctagaagtaaccgcaaaaggacagttgtgcaatgcaagacacattggggtggtgttaagaaggaaattggaaaattttgtggagcttattctcgagctagaagcaccttcagtagtggatattctgatgatatgatcatggagaaagctcatattatgtttaagtcagaaaacaatgaaaaacctttcacattggagtatatgtggagagaactgaaagatcaaccaaaatggcgaagggtcttagaagaagatagtaagaataagaggactaagatctctgaatcaggtgcatacacatcatcgtccaaccaagacacggaggaggagaacagacgcaaaaaggagaacagacgcaaaaagaagcgccctgagggacagaaaaaaagccaaagccaagttaaaagggagaggtaaaaatgtcgcaccttctcctttgggggaccagccatgtcaagactttgttccttactatgaagctataaaagtgaaagcagaagcgatgctgaaatctgcagaagcaacatcgaaatcagctgaaagcaaagaaggagcacacaagaatggagaagtatcacacacacttaaaattgttggacaaagacacttcaaattttagtgatgcaaaactgaaggggcatgaagctgtcctcgaatagctagctacagaacttgctgaagaataa

SEQ ID NO: 51763 - DNA, 553 bp, Oryza sativa
  Clone ID: PAT_MRT4530_54125C.1
aaaaaacctttggaaaaaatcccccttttgaagggggcccccccggaaaaaaacccaaaaaggaaggggaaaaaaaacccaaggggcccccattttgggggccggccccccaacccggcccattaaacaaaacaaaaaaaacaaggggcccccaaaaaaaaaatgggggggccccaataaaaggggaaaaagtccccccaaaaatttgaaaccccttgggggggggggggacccttaaatggccgaaaaaaaagggggaaccccccggccccccggggaattaataaaccccctttggccggggggctaaaacccctgggggcccccgggggccccaaaaaacttttgggggggggggggttaaaacaaccccccgcccccggggcaataaaataactggccccccccgggccaataaattggcggggggcccccgggccaataaaataattttccgtggccgcccccggggcaatagattcccggggaatccccgaggcggtggattaactccccgccggggaaaacccccttgttttcccggcgggggggg

SEQ ID NO: 51764 - DNA, 2671 bp, Oryza sativa
  Clone ID: PAT_MRT4530_54126C.1
atcattttttgcttcctcagctgcttcttcctccttcctcttcacacgacgctcccatttttatttatatatatcagcatcgtttctcctggcgtcactgcacccataactgccaagaattggagctgtctcttctccctctctctctctctctctctctctctctctctctctctctctctctctttctctctgcatctgagagagagccggaagaattggagttggagcaggagaagcgtggagcttctgaggattgattttggaaatttggagcttgaggatcggattgagtagtttctgaggattgggaacaggagagatcgaagcaggagctaggagaagcgtctggaactgaaggggaaagcgagaaaccaaaaaaaacaaaagatagacatcgagcttgatcggttagcacctgccggatacaccttttgctgcatgcgagtgatgttctgtggccttgtcggctcatggcaatctcagacgccagagtggttcgccatgtgaggtgtcccaaatgcttcagtgttcttcaggagcccaccggcgcgccggtgtaccaatgcggtggatgcggcactaccctccgagcgaaaaaccgcaccggcaactcacaggaggtgatcagtgctccctcctctttggggagtggcctgcctcctcacagcaagcacctgggctccagtgatgttgcaagcaccagtggatccactcctgaagctcaaatcagcagtgggcagcaaggagctgacatgacaagccgacgcgagactgatgatctcgtgtcggcgaggaacaatgctcctgagccagagcgagtggtgccagctgagaaggaggaagagcatgttcagagtaccagtcagcaagctgttggcaattctgaagatctcacaagaggagatgcagctactgcagctgatgcacagtgcagtgacagagcatctgaaggcaaggtgcaattttcagagagtagagaagacagtaacaccgaactgcaagatgttcaacgaagcgaccagactgaatctgatgctgaaggcaagaaaagttcagaggaaacatcccaatctccacgccgcgatgtcgtcgagcttccaccaagttcagttcaaaccccagactcacaacctgcaccggctgtgttgaaacgggaggatgatccggcgacgagtcctcctcatggccatgcgcgtcgatcaccagaaagcttggcgccgcttcagaagaggatcctgaagacagtggacaacctgaaagacgacctctctgaacttttcagtaaatctcctgaactgaacaagccgaggacgcacgcgcgccctcctcgtcttcccaggcaagaaggctacgctcctcgcgacgcggccatggcggcggcggcgagcatccaagccatcagagcgcgtcacgcagctgtccaccgtcccggctacatagctcgtgcaggcaagcctggtcagctcgctgctccacctccaccacgtggcttgccgtcgcggcgctaccgccggtgcagggctgatcacccgtgctgccacgacgcgcgccatgggccgtcatgccatcacggttgctgcccccctcaccatggcaagcaagcgtgcaccagctgccggggacaacattgctgcaggccaagaacgcaagaatctcctgcgccgcggcggccggcggcggcggcggcaaaggaggtcgtcaagcggcgggcgccacccaggaaccattgccggccggtgctcaagggcgcgccgttcatcatctgctccagctgcttcaagctggtccaggtgcccgccgacttcgccgtctcgaccaagacggtgcgcaagctgcgttgcggctcgtgctccgccgtcctcagctactcctaccgggaccccgacaggaagaagcacggcgatcagtacagcgccgacggctcaccggcggcgccgcgcggccacgggcggcgaggcgacaagttcgcgttcctggacgacttcggccacgtcgacgtgagctactccacggaggacgagcagccgctgcacgtgtcgaggaactcgtcgttcaacaccgtcgacgagatggcggcggcggcgacgcagcagcatggctccagcctgcaccggctgatggggtacggctcggcgagcgacctgctgttccggcagcactcgcctgacctgtacgagagcttctccgagaggacgacgccggaggccgccgcgctgtacgaccggaaagggaaaggcgtctgcgtcgacctcgacgacgacggcggcgacgatgactcagacgaggattgcagcggcgcgctgaagaggtcgaggctgagagggtccggttggccattgccggggatactcaacagcaaggggacgactggaatgggagcaatcaggatcaagtcatagtagtgtagagaactagagatagattcaggtgctggaattttgacagaattttcagtcgttggaattcttataggtagagtgaatttcattcggattcatttaggtaggtttcatattggtggatcaacaggttgtttgttttgttcattttcgggtgtaatggtgctgcatctaaatgtaaatacaacactttacgatcccggtgaaaagaaactttcttttggtaaaaaaaaaaaaaaaaaaaaaaaaaaaaaaaaaaaaaaaaaaaa

SEQ ID NO: 51765 - DNA, 171 bp, Oryza sativa
  Clone ID: PAT_MRT4530_54127C.1
atggcgaaaaatcccgcgaaaaatgagtttaaattgactggatttgaggtggagaggcgcggcccacagaggagaggcgcgccatccatgctggcgccgtcgtatgaggggcggcgtcaaggtggctggcgcccctcttctgccaagtccgcatcgctacgacagccctag

SEQ ID NO: 51766 - DNA, 270 bp, Oryza sativa
  Clone ID: PAT_MRT4530_54128C.1
cgcccagcgtccgactcctggcggttcgcccgactgctcgcggtcgagcgcgtcacccggcatgccgcagctgcaggccgcagcgacagccggcaacatggcgcgtcgcgcggcggcctccgcatgctccgcccgcgacgacggtgccgacagagagagaggggccaacccgcgcgccgcggaacggacgacaggccgctgttgagaagctccgagaacgtcccgcccgagaagccgacctctacacccccaaggcggcgtctagagacc

SEQ ID NO: 51767 - DNA, 580 bp, Oryza sativa
  Clone ID: PAT_MRT4530_54129C.1
atggctgttgcttcacctcagattgtgaggctaggtccccgtgccgtgatgcagaccctggtcgtggctattggtcaaagatgcgaggatagcgtccaggaagataaagtggaggccctagggcctcccgaccgagcacatgcggccgaccaaactgttgaggcaagtagctccgatgggaaggcaatgcgcagccgaacggtgaaggaaaccctggggaagaagaaaaaaaaagggagaaatcactggattagactgctactcagcaggaagaaagaggaaaaagaaaggaggagaaatcgccggcgacctcaccaagaaaaccgaagaggagagaatggggagaggagggatgtgcgcagcagccgagaagagacttcaccaagcatcctccactaccacgtacggcggcaggagacggtggccaatccggcgtgcgcttacacggcaagcggtgtttctagcgccgctccgtgtggaacagaagcacggaaacacggaaatagaacgtgggctgagcaatgagaaaggtaaaagcccatgtgtaaggaagggccggcacaggaaaatggcccaatag

SEQ ID NO: 51768 - DNA, 498 bp, Oryza sativa
  Clone ID: PAT_MRT4530_5412C.1
atgaaggcgctaggtccgtttgaagtcagtgctgtctccggaggccgagctggacttggacttggaattatcattggagcgtcgccggtcgccgccgagcggccgccccccgcagccaccgcctccgcgcggcccccggcgccgccgcacggcctcccgcgccgccgcgccggccgccgcgcaggccgcctccgcgccgtcccccgcgtcgccgcctccgcgccggccgcctgcaccactgtggtgaaggaaaaaaggaaggagaggaggggagttagagataaggaaagagataagaagttagagaggaaaaaaagagatagagggaggagccgttttgagaccactgccatggtccatggacgagctcgccgcatcagcgctggacaagctcactggcgttatggagcttgtgcgtggatctgtctgctccatttgtctgctccgctcgtcgtggacaagctcacggttggattcttccaccacccgcgtggatga

SEQ ID NO: 51769 - DNA, 336 bp, Oryza sativa
  Clone ID: PAT_MRT4530_54130C.1
atggtgtgcagcgggcggcgcccggtgacaggcgggagaggagttggcggcctctgcagtgggcggtgggcggcggaaagaagggcggcgcccggcgggaaaggagtcggtggcctccgcgcatttgtctctggcctgtacggcgcacgatggggtacaaggcccttctttaaccctcgaccacgccggcgagatgacgcctcctccctcaaaaggggccagcccatccccatcaccggcgccaccacccgccaccctgcaccaccgccgcctgtcgagcccccgccaccccaagtaaaacatctcaccatcactcgccactgtagcgtcatctga

SEQ ID NO: 51770 - DNA, 582 bp, Oryza sativa
  Clone ID: PAT_MRT4530_54131C.1
ccggccgggaccctcgattactatgacatactgcctctcgaaacaaccactaccattccaagtctttgtttttttctacattactcgactaattctaataaccttcctcttgataaccatcgacatgcgtttcacatccctcctcgctgacgcatctttcgccttcatgaagatctgattatacctcgaacgcctctatgtcatctgctcaggattcccagatggactgactcactacactgagtatgtgtccatgtccttcgtcagacttattgtatcacagatccttctcccaacgagcaggacatatgagaataccaccaagagtgttgccgcctgccccaacgataagtcgtccgaggccgatacccacaggtacatcacctgcatgaactactggatcacctacatctactggtagtccgttgaggcatccccccgtgcgaccgacgtcaccgatgtcaagagccaattcttctatgctgcctcctccgcctctgacaaggccaccgctaccggtaccgctgcctagactgatgctaccgtcactgctgacgataccaactccgagtctggatctga

SEQ ID NO: 51771 - DNA, 153 bp, Oryza sativa
  Clone ID: PAT_MRT4530_54132C.1
atgctccgggcaccaccaccatcggcttcgggcgccgccgccaccatatggtgtgccgccgcggcgatccgctccgaccgccaccgccacatgctccaagcgccctcatccataggaccgcagcggcgacgacaagctgtcgtcatcgtctag

SEQ ID NO: 51772 - DNA, 392 bp, Oryza sativa
  unsure (1)..(392): unsure at all n locations
  Clone ID: PAT_MRT4530_54133C.1
attgataggatgttcaaggatgcaatcacagctggaaagcgtgttcgctgtgagactaacatatcagctggtgctgtttctgtcagttcagctgcagttgaactggccctgatgaagcttccaaagtccgaatgcttgtcagctaggatgcttttgattggtgctggcaaaatgggcaaactagtggtcaaacatttgattgccaaaggatgcacgaaggttgtggtggtgaaccgctcagtggaaagggtggatgccattcgcgaagagatgaaagacattgagattgtgtacaggcctcttacagagatgtatgaagctgccgctgaagctgatgtcgtgttttcaagcacagcgtctgaatctttattnntcacgnnnnngcatgcaga

SEQ ID NO: 51773 - DNA, 853 bp, Oryza sativa
  Clone ID: PAT_MRT4530_54134C.1
ccaccgcggcggcgactccagatcggcggcgaagcccaggatctccggcgagggcaggagaatgtcgagataaaggtggagtagtcgagtatcgcgtaaaagaaagagaaatctctccccgtctcgttgtctcctccgctcctcgcgccgccgccaagacgagtcgcgggggaggggcggcgatcgagcagagcaggggaggggaggggatcctgggaggaggcaccggggggaatgcaagacccaagaggtatgccacgagatgaattcgcaaccccgaagacgcacaagagaaaggtcgtttcccgccccttgcctcccagccaaataaaagctgaacctgagctgctgcggagggaggttccactcacatccggcaagaccaagaaagcccctaagataaccttcaagaatgaacctcgccattcggctccgcaatctgattggggaacccccgattcggtgccagagttcggtccagctgatgaatacagagcgttacggaagaagtacctgctgctggaggatgagaacggtgagctggacaagcaattgagccaggctgaagaggaagccagcgttctcgaggatgaaaagtttgcgctgctggatcagcttgttgtgttggaaggccttgtggatccttcacagatgcagccaccgagaaggctgtgagattctatgcgtgttcgttgcctgttcatagtccaattaagttacctgttactgcttcctgctagatatgtaaccaattgtaatggaagagcaaagacatattatatcgtttattatggaagtttgaacatttagagcccttgtttggagttctttttgtgcaaaaaaaaaaaaaaaa

SEQ ID NO: 51774 - DNA, 339 bp, Oryza sativa
  Clone ID: PAT_MRT4530_54135C.1
atggaggcagcggcgggtgcagggagggagggagagggagagggagagtaccttgtcgatatcgacgggatctgccattccatcggcggcctccggtcatcatggagctggtcgtcgggcgctcatgaatgcctccaaggctggcttccaacacagcgactcagaaaagaaaggaaaagaaaagaaaaagaaagaatagtggcgccgaaatggaaggaagccaaggttgaagaatggaggagacaaggtgcagatatagaaaagagttatagagatcgaggagagagcgacgtggccgtgtggggtggagaaagaaagcgttacatgaatgcatcatga

SEQ ID NO: 51775 - DNA, 170 bp, Oryza sativa
  unsure (1)..(170): unsure at all n locations
  Clone ID: PAT_MRT4530_54136C.1
tgctgtncnnnatagtcagatcgcaggggaaggcctggattcttcgtgctctacccgttgagcgttggtcgccaatgctgtatggtctttcaaggggaggactcatgacgtctgtgtaaagttcaagtcgtgtgtgcgtcgtatgagatgtgtctgcttttagctgctca

SEQ ID NO: 51776 - DNA, 730 bp, Oryza sativa
  Clone ID: PAT_MRT4530_54137C.1
cccgggctgcaggctaggtctcaccgggagcgtgaagcccgaaacggcacgcggaagcgcgaagcggcggccgccgccgccggtcgagcgggacggcggcggcgctgcgcggcgcgcccaaccccccatctcctagatcgtgtcgtgcgccactcctcccctcctggctccgccgccgcggcgcccggtgaactcgtcgtgtgtctgggacctcacctctagggatccgacgagcgacgatggctactcctcccctccgccgcggcgccccctccagattacatgcatgtgcaaattgctggaatgttcggtgtataactaattaatgatcaattaaacacgataaacatagtggaggtggctatcttttggatgacaatattaatgagagccggtttatattttcgggggcagttcctttcgtcgccgtgcttcgccgtcaccccttgccgctcctgttccgctcctctccagcctcccgtccatgaccatgtggtcggtggctccccgtccgtccctagattacccttatgctcacggctatgctttaattggaagatatacaaaatagttaaccctctccggctcttccatatagttttaaacaaactaattaaaaacaaatttagaaaagaaaaaaagaagtctacttagacatattcgtgtatataaattttatacatagtgtatacgcctttactttatacactttttttacaaattttatgca

SEQ ID NO: 51777 - DNA, 1335 bp, Oryza sativa
  Clone ID: PAT_MRT4530_54138C.1
tcagcgatgctgctctgctgcggctgccgtggcgtcggcttgggccttgtcggcgccggcgattctgcggtcgaaggtgcgcatctcctcaaactgccgggatctcaccttggcactgctcccttcttgttctccgttgccctggcttacgagcgttgggacgccgcgatggactacgaactgcgcatccacgacgcctatatgctcttcaggctcgtcgacgcatctccagaaattgtggtcgagaccccagccgtggaccaagtcattctcgacgaacctgccggaggtgtgcatgtcgccggcgggcctcctggcggtggccgggtaccgtgatctcctccctttggtgccgtcgagccccggctgcgagatccccaggccgtgcttcctggcgatgctgatgtactcctccgcgctgaagttgtccactcccagatcctcatcccacacgaacacgtactcgtacgccgccacgatgctcgggtgcaggaacctcttcgcaaaccaccatttggcctgcttcctggcgctgacatgaacaaccttcttggaccactcgaactcctcccattcactcgtccgcccgtcgtaatggaacagcactatgtcaaacttgtccgataacttgtgaacagttgcattgacgttggctttctcggtgtaccccaccgtcagcgtcacaaggtactgcttgccactcgccacgtcggatgttgggtttccccagaggcggcggagatgaagatcagattcccggacgacgatgcccggaggcagcctctcctctgctgctttcttcctcgacacctgtactgcttctgcttctatcttgctcttctccttcggccctgaaatagtggcgtttgacgaaaagttggcagtggtgctgttacggacggaaaatggtgccgcccacaacgacatgtacttgttgagtatgttgatgttgctggccgaggagctggagtttgtgtttgtaccgcaagggattagaaaggcgcaatattcaagtggaccacccacagcttgttgaattggcaaataaatactccctccatccttaaaaattacaacaatgtataacatcatataaacttcttgtactttatactccgaggatgtttggtagaggctcaagatatttctcgatgcccatgtagccaatcttgtgtggaagaatggagagtcacgcattaaatccaagaaagttattaagatgataggttgttggattgaaatatgcctggtggtgtcggagggggcaactcgaggaggtggagatggaggcggcgacgagactgggccttggaagtcctggttggcaaccgccat

SEQ ID NO: 51778 - DNA, 914 bp, Oryza sativa
  Clone ID: PAT_MRT4530_54139C.1
ttttgagttaattgctagaagaatgctatgatgtccttccctcccttgcaaggccatgtaacagcatacaattatacttctgttgcaggtactggctgtctgttggtgctcagccatcagatcctgtgcagcgcatcctttttcgagctgggcttctgcctccacctccaatgctagctatggctcgaaagggtggacctcgtgataggcgcccaattcatccgatgactgggcgccccttggatcttgagggtgtcacggttgttgatgactccaatgttcccgaaggtggtgctgaggaacctgtgtcagaagagtgatgctgcagtaggtctccacttgtttgttgtgcctctgataagatcatgagtactgtacaatatggatctaaaaggcaatgtgcagtgcacaacaagagcagcaactgctcgtcagtggccaagccatgcagatggtactgggcggcgctcgcggccgagctgggccagccttcccgctcgcgccgcgcacgcctacgggataaagaccgcgccgctgctggccttctacgcctcggccagtctggcgctcgtggcgctgagcgtcggtgtttgctcgccggagaagaagctggtggtgccggagagcgtgtgcgggcggccgaccggccgctggggctgtagttccaccacgcctccggcgacctgtacgtggctgacgcgtacctgggcctcctgagggcgccggtgcgaggcgggctagccgaggtggtgacgacggaggccgccggcgtgccgttcaacttcctaatcatgtaatcttccattgggttctaataatttacaaggtcgtagtgctgcactatgagttagctgttctcaaccctttctgaaatggatttttttctgagttctcatggactagcttacagttca

SEQ ID NO: 51779 - DNA, 915 bp, Oryza sativa
  Clone ID: PAT_MRT4530_5413C.1
atgcttgccagggatctccccatcccgtgctccggcgccggcggccgccgtgcaccggcggctgctgccgatggccgcctcgccggaggggtactgaggccaccgtggggaggagtagctgccggcgtgaggctcgtcgcagcggcgaggccaatgagcgtcgtgacggcggcggcggccggaagcagctgggacaggaaggctggccggtcggaggcggccgtgccggcggcggcgccggtcgacgggaaggacgacgacgatgtgttgccagttttaaacaagctcatgacctcaactgtcggtaaatcaacaaacatccgatggcatgactgcccagtaaaccagcttgacagacaaaagttgctgaaccagaagggctgtgttgtttggatcactggcctaagtggttcaggaaaaagcacccttgcatgtgcactgagccgtgagctgcactcaagagggcatctgacctatgttcttgacggcgacaatctccggcacggcctgaacaaagatctcagcttcaaagccaaggatcgtgccgaaaatatacgcagagttggagaagtggcaaagctgtttgcagatgctggattgatctgcattactagtttgatatcaccctataagagtgatcgaagcgcctgccgcaaattactacccaattcttcgttcattgaggtgttcctgaatgtcccacttgaagtatgtgaagaaagggatccaaaaggcctgtacaagcttgctcgtgccggcaaaatcaaaggctttacgggaatagatgatccttatgaaacaccttcagattgtgagattgtgatacagtgcaaagttggggactgcccttcacctaaatcaatggctgatcaagtagtgtcatatcttgaagccaatggattctttcagaactag

SEQ ID NO: 51780 - DNA, 222 bp, Oryza sativa
  Clone ID: PAT_MRT4530_54140C.1
ggggacaggaggatcgggagaggcggatacggcggggccgacgcgtcgctgtctcggcgcgggaaaaaaagcggtggctctgctctctctgcccgcgcgggctccggcgtgattggaccgacggtcaggatcgtggggggagaagaaatgggcggccggaaacggttttactgggcgccgcggtcgccgtctccacgtcggtctgatcgcgacactggctaa

SEQ ID NO: 51781 - DNA, 412 bp, Oryza sativa
  unsure (1)..(412): unsure at all n locations
  Clone ID: PAT_MRT4530_54141C.1
atgtccctttacgccgtctggacaaggcctccgaggaacctaagggatcttcggctggaaatgcccagaaccgataaggccttgtcagatcctgtagagacgaaagaccatataagatctggtcgtgtaagagttctcgccgtgcgtattaaccaagctgtgaaatcggaaatcaactttccaacttcacggctgggggctaggatcagagcttattcaaccaagccagggtacgagtactaccaagagggccaacaccagtccatagactggaagatcttctcggccaacggcgacattgaccttgcaagatggtctatctctgccggagtctccgagaacagagcaaatccctcccgaagatattctaggtctaggtncgggtnntnnggtcgtgcagaaggaatcacca

SEQ ID NO: 51782 - DNA, 699 bp, Oryza sativa
  Clone ID: PAT_MRT4530_54142C.1
tccagtcgccggcgtccggatccggcctccacctctcactccgcctccgcctccggctccctctctcgccgcccctccccccgcgccgccgccccccgccccccctcccccccgcctccgccccgcccccccccgcctcccccgcctcccgccccagaccaccggatccgccccatcctccccatccctgtcctgtgcctgcccagttgggggttaggggtcgccgcttccccgacggccacgacatggtggtggattcgagcgtgtgggggcagcgtcggggctgcgcgtcgaggagaagtgtagcagcggcgcccgagcgtgatgggggtggccgtcgccgccgcccagcccgccgttgccgaggtctacctccgcctccgaaaccaaacccctttgccgaggtctacctccgcctccgccctccgctccttgcgcctctcttgtttaatttgtccacaatctccagtacaattcctcttctggattttgcattgccttttttttttctagggtctttctctccttaggccaatattagactgattcggtggtttcttcggttttagtaatctagggtttgacggtgaatagaggttcaaatttgggcgttttcccaatctataatctttgagttattccaggtctgataatctagagttttgatgccttttcttaccaacgatttcaatggatctc

SEQ ID NO: 51783 - DNA, 3024 bp, Oryza sativa
  Clone ID: PAT_MRT4530_54143C.1
atgcggcctagcatggccggtgtcttcacccatctcgcgtggccgctgcttgtgcttgtgctgtgctcatggcggattatcgcagctgctcaggctcagccgcgaactgatccagtcgaagcggcggcgttgaacacgatcctggggagatggggcaagacggcgtcgccggagtggaacatcagcggcgagctctgcagcggcgtcgcctccgacctgtccaactgggacgactacccaaatctcaacccgttcatcaagtgcgactgcaagtacaacaacgggaccctctgccacatcaacaaactgtgctcgacgcattgccttgcctgcctaaaagaatccatggcacagtcgactgaaagcttgtgcgatatgataaatctgacaagtgatggtgtttggattactatttgcatagtggtttgtttggggtgggtggctactcgggccaacaacagcgcattaactgtgacaggttgcatcttgctgattgctgccatcgaaaaagtgtaccgaaggagggtgactaagttggatgttgttggtccaataccttcagagctgcagaatctcacctatctagaggacctgaacctgggttataattacttgactggtgccatgccatcattcatgggaaaattcacttccatgaaatatttggccttgcctttcaatccactgtaaaaaaaacttccgaaggaacttggcaacctgaccaatcttttgtcactgggcatcagctattgtaatttttctggggaacttcctgatgaacttggcaatatgactagtcttaagcaattgagggcatcagacaatgaattcacagggaaaataccagattattttgggcgcatgactaatttggtggatgtggctttccaaggaaattcttttgaaggaccaattcccgcaggtttctctaatctgacgaaattaacaaacttacggattggtgatattgtaaatggaagctcttcattgggatttatcagtaatatgacatctctgagcaacctaatattaaggaactgcaaattatccggcaatcttgaagcaatagatttttctaagtttgcaacattaaccttactggacttgagttttaacagtatcacaggacaagttcctcagtccatcctgaatctgggaatgcttgaattcctgtttcttgggaacaatagccttacaggaaatttgccagatgttataagcccctcattgaaaacaattctgtttgcagagatttttcctataatcagctcactggaagctttccttcttgggatagtcagaacaatttgcaattattattcctttgctgttgactgtggaagtaatagctcgacgagaggctcagataatactatttacgaagcagatcctatgaaccttggggctggatcatattttgttactggtgaaaaaagatggggtatcagtaatgtaggaaaatttgaccaggccacaaatggaattgacataatatatagctccgaccattttcagaatacagttgattcaaaattattcgaaactgcaagaatgtcagcatcatcgctgagatactatggtcttggacttgagaatggaaattataccgttctgcttcaatttgcagaattcgcatttccagattctcaaggttggcaaagcttaggaaagaggattttcgacatatatgtccagggtgctctaaaagaaaaggatttcaatataaagaagacggcaggtggaaaatcttttaccgtagttaataggaattacacggcaactgtatcaaaaaacttccttgaaattcatctcttttgggccggcaagggcacttgttgcgtacctactcaaggttactatggcccaatgatatcagcattaagcgtcactcctaattttactcctactgtgcgaaatggtatacccaaaaggggaaatagaacaggtgtaattgccggagtactgattggttcattagttcttggattagcaaccttctttggaatatttattgtggtaaagaagcgaagagcaatggcacagcagaaagaagaattgtacaacctggttggacggcctgatgtttttagtaacgttgaactcaagctagctactgacaatttcagttccaaaaacattcttggggaaggtggatatgggccagtgtacaaggggaaaagtcaatttataaccgaggttacaacaatttcttctgtgcaacacaagaatcttgtgaaattgcatggcttctgcattgacaacaatgcacccttgctagtttatgagtaccttgaaaatggaagcctagatcaagcactcttcagagacaacaacttaaacctagactgggcaatgcgctttgagattattttaggcattgcaaggggcataacttatcttcacgaggagtcgaatgtgcgcatcgtgcatagggacataaaagccagcaatgtcctacttgatacggatctcaccccaaaaatctctgattttggactcgctaaactctatgatgagaagcagactcatgtgagcacaagaattgcaggcacatttggctatctagctccggagtatgcaatgagaggtcgtttgacagaaaaggtagatatttttgcattcggggtggtcatgttggagactgttgctggtcgatcgaataccaacaactccctcatggaaagtgagatatatctctttgagtgggcctgggacctgtatgaaaaagagcaacctctcggaatcgttgacccaagtcttatggaatatgataaggatgaagctctcagagtcatacgggttgcactcctctgcacacagggctcgccgcaccagcgaccaccaatgtcgaaggtcgtggcaatgctcaccggagaagttgaagtagctgaggttgtcacgaagccgagttacatcacggagtggcagctaagggatgggaatagaagctatgtcaccaccagctactcaggatctactacccatgagttcaacagtaaggacgagattaagcctttcacctag

SEQ ID NO: 51784 - DNA, 896 bp, Oryza sativa
  Clone ID: PAT_MRT4530_54144C.1
ccctatttcttccttgtgatcacgagctaaccttgcatctctcattgtctttggcaaggatcgatgggccaggctgctgccaaggcgaagcaaggtggcgatcaggcagagaacaagactggcaaggacgagaaggttgcgaaacctaaggatgccaaggatctcaccgacttcatggaaaaaaactacgactcgatcaaggacgtgacaagcttcgaagatttctaccatgccttctacgagctcatcgaaaaattctgtgaggaacgtgggcaattgcagtacaggataccggaaaaagcggaacttcagaagcagtacgagagggtgaacaagagcccccagaaggggcagaacctgagcaggaagcagttcatggagctggccgggcaggtgatcaaggtgaacagcttcaccttcggcaaggccaccatggacgtgctggtcgtcctcttcggcgcccccgtctgcgccctcctcgccaagagggtcgtcccgggcctcaagtccttctccgacgacgtcgtcatccccgtcgccacctccggcgccgtcgtctacctcgccaagaccaacaagctgtgatcgaggtgaatcgatcgttccagaatcatatccagactatggctaacaaattatcgcgagaataaaggtgagggagaaaaaacgtacgtggtgtcatgtcgtataaagtttgcgttgtggccttggttaaatttcgcccaaattgtaaagattatttgagagtggatttttatattcactctcttttatatgtcttcactgttcacacctgtgaaatctaggagaaatctgtataataatattcgtaaaatctgatatgtgcacatgcacgaatcctagttcgtccccaaaaaaaaaaaaaaaaaaaaaaa

SEQ ID NO: 51785 - DNA, 306 bp, Oryza sativa
  Clone ID: PAT_MRT4530_54145C.1
atgtggtggagcgttgggtttgaacaggaagcagaagcgcacgatggggatcgggtgcggacggagtgcgacggcgacgccggcgggggatcgcgtgtggcgttcggatctggcttgggggtgggggtggggtggaaacgcgtgggtggtcccggcctccagggtatggtggggtcgtggagtcagtggggagttggtggtggggttgcggagtcagtggggagttggtgggtgggtgcggtcgcggttgtcgatggagattcgctgttcctctgctcgcgggccgcggcgggtggtgacgactag

SEQ ID NO: 51786 - DNA, 1980 bp, Oryza sativa
  Clone ID: PAT_MRT4530_54146C.1
atgatgcccaccaagtgctcgacgccggtaccaagctgtggcatcaccaagtctgatgccgagagcacacctaccacactggaacatgtgttcctggccaccatgaatccgtctacaccctcagccgcatcagcagcagcggtgccaccggtttccctcaccgcgaccaaggaggatgaggttgacatgggcaaggttgaggacaaatcagataagaccttgcatgatttgtgtgtagagataaaggagatgatcaatcaaatgcttgagacatgccgcaacagtaaagtggaaccaattgtgggcgatgattccaccggagtggcagtagtgccatgctctgttactaattcagttcccattgcattggaggccagtcaagaaattgttgccgatgagagtgatggcaacaacttggccagggaagaggattgtgtggagaagaccacagagggaccaggctttggagaacacttaactttttgtctgagcccaaaggttgatgttcccattcttgacttgattgctaatcagggcatgtcaagatttattcacaaggtggatttggaaccttggccaaatccagggccttgtcaaggtaacggaggcatggtggtgaagatctcacgatatgggccacctcatcctcgagctaattacaaagatgtttgtgctaagcagcaacttgaaccctgggctgatctatggttgaatcatggcaacgaaggtgtggtggtgaaactcttacagccctggccaccacctattcaagcagaagctaaagttgaggttggagtactactattattcggtgagtcccacaaaatctccttggactacagattcaccaagttcatgagtagaacgattattgtcagtgctggcttgttgcaaattctggttcctggatggtgtattggctatgcgctgcatctttctagcacattttggaattcctaccagcatatgcagcttttagcctatggttggtcatttgatgatcatgttttgttcctcccactaatgctagttttctggccaattcatgacacctggagtgaatgcttgcttggttatactaatgaagatcacgatgtccaaaaggttttgatctgtgacaagaatttgcggggagtgctaattcctacagagctcaaaattccatggccaccaccaaacttgactgttcaaaaatatggagtgttggctaaaatactgttaccaacaggattgatcaagttgaaggttttggataacatattgcgtgcacaacaatggtattgcagctccttgggagaatcactagaagatagcaccaatggtttcaccaagttgcagagtgttgaattggttcagtacaaggttgattttgctagtagctccttgcttgatattgtagtattgcaaggggatgattctctgccatttctacttcctggaagagcggttttagaatatcaagaatttgtgactcatgttaagatgacagaacaatcagtttcgaaaggtgaaacggatgtgccgaagctttgtgttctcaagttcagtttggacaaattttcaaattattcagttggagatacaatgattgctgtgttgcttacgcaaacttgtgtacaattagttccaagctacaatcagtctttatctgggagcaaaaatcactacaaactcttgatgacacaacatatgtcagtcattgcaaactatgaaatgatttggtggaagtcagagcttggtgggggcaagattagcttgtgtgcatcatggaatttctgggatctgtgtttttgttgcaagcaaatgtctacagaaattatggctgttggattatctggtgtgaaggtatggctgttgtttgctatatcagagctgtggttacaaagaaaacagctaaaacttgcattattagaggaacatatcaaggtgctctgcaattctactatgttattcttcctgcaagcgacaatacaagcatga

SEQ ID NO: 51787 - DNA, 554 bp, Oryza sativa
  Clone ID: PAT_MRT4530_54147C.1
agagaagaagataaaagactgacgggtcttgaggattcttctgacacattagataatatcagtcaatctcaggacatcgagcaagatttgggtcaagaggaagacccctatgactattattatgatgaccctgatagcttagaaaatccctagaggttataccttcctagtcagaatgtactagaacttccgctgtgtaatattagtacctatgtttaattaggtgagtacctacccttgtaaaacccctagaattgtaaactttaacatatgcaatgaagaaccagttgtattacatgtatcaatatttactgatccagggattgatacattaatttcagtcggatccaagttattagttttgggctccgacaggactggtatcagagcatatgttttgactataggacaaaccctaaggattattaaccaatttaagtttgagtttacttcaaacttaatgttttaaggggggtagatttgacttgcgaacacacaatatatattctatttatgtatttcaggaaaaaaaaaaaaaaaagcgggccgttttt

SEQ ID NO: 51788 - DNA, 717 bp, Oryza sativa
  Clone ID: PAT_MRT4530_54148C.1
atgttcctcggcacggtctacaccgccgccgtgctgggctacgccgtcgcggagcgccgccgccaccaccactccgccatcgccgaggcgacgccggcgtacgagtccgaggcggagagggcccaccgcgagtcatccaagaggtgcctcctctccctcatcgtcgccgggacggccgcgttcgcggggatcgtcaccatgatgatgctgccggagttcccgccgccggcggggttggtggtgtttgacgcggcggtgttctccggcccgtacttcctgtgcttggtctccttcgtgaacgggacgctgctgcgcggggaactcgtcgccgacggcgccaagtcggcgatggccgtgacgggattgggcatgtggtgggtgatcttcccggtgatcgccggcgtcgtcctccacagcctcgtcgtcgccctcttcgtctactggctcaccggcttagccatggccggcgtcctcggctacaccctcgccgtctatgaccactacaatgagctcatgtgcaccataaggagccaacctcggacagcagccgacgcttccggcttgctggtggggcgggaaacttgtgatgcttgccctgctcaaatcgacgaaaatgccagcgtcagactctcccatcaagaaggttgcttcagcgtttcaggccattgcccatcttgccgttgctctaggggtcatgggcctctgattcgattttga

SEQ ID NO: 51789 - DNA, 3251 bp, Oryza sativa
  unsure (1)..(3251): unsure at all n locations
  Clone ID: PAT_MRT4530_54149C.1
tcacagcgcgcccgcgtcgacaccacgccgcgggcgtatcccccgccccaaaacgggggcgaacttactcaccggcggtgcgaccgcgcgcgtccaaagtgacccagcatctaccagaggctgacggtgcccgggggtgcgcggactggttggtgcagcgaggcgtggaggcgtcaggcgagaagcgggggtggtcgtgcatccgctgtgtaggctccgctgcagccgcagtgtagctgatttttgcggctgagccttcctcgtctttattgctgcccagggccatcccttcgtcctaattgggtgccctactacctccgtccctgttcgtgcactctccctgtctgtgtgcacccaagaaaaaccaacctccagctctcgctctcactctcacagcctctctctggctgtgtcaaatccagagctgggatctgccgcatggaccatgagagcgttggggaaccggtttagagccatcgtagccaatggaatgctcctgtggctggtgttcgcaaacaagcccgatgttgacgacttcataactattaccataacgccaaagccatagatattactcatatcctttacctggtagcactgattgtagggtgagttaccataccgtggtttccccggtgcaacagctcttacattgttgagagcaagccggaacggatgcgctagtccaaactccgcgactttgacatgaacactgtcaccaagcaatattttcttggttttaacatcacggtgtctgaatccccctgcacgctggaatgccagtgtcccagaggattctattgcaattctcattctgtcaggacatgggaggcctcgccctcctgcagggcgtccatgtagatggtcttcaactgtcacatttggaatgtactcatagaccaagagaagggcacggctagcttgagacgggcagccatataggataacaaggatctggtgcattaggtggcgccgaatgactcactcatttagccaatgctgtgcttgtctgtagttgttcttgtaaaggcgcttcactgcaactactctcccatcccggagctttcctttgtaaacagttccaaaaccaccatcaccaagttccctcgaggcactaaatccagcagtagcctcttcaagttcctcgtaagtgaatatatggggagaaccacccaactcaaggtctttgttgtcagggtgcatcccgtcggggcaattgcaggcgaactccaggtcgtcgctgtacgtgcaattcccgccgcttacttgacatttgggacaatcccctgaaaccaccgcccactctagtagaaacccactcctcatgctggcaatatagccggccatactcccattgtgacgctgaacgatcggcacaaccgtgaagttacagcccggtggaatcccatcctcgtgtaaatggtggtcgctgacgagccggacggaggagttttggtcatcacaaggcaggctatggaagccgggaggagcagccgccgccggaagtgacttgttacacgagaggaagcgcagctctgcgttggcttcgctgatgacgaacggcgcctgccagatgccatcggagatgttgaacggcggcgccgggcagccggtggcgagcgggagattctcgtccaccacatggacggtgtggtttccggtgaagatatcaacaacgcgatacgcctcgtagatggtgtgcgtgaggtatgcgccggtggcgttgcacttgagctggaagggcggcgacccgcacggcggccggccgggctcctccagccagaacgggtaggagatggtcagcttgccgcatggcgtgggcaagcagccaggactagacgagctcgccggtgccggcaactcgaggaaggaagcagatgacggcgtctcttgccatgtcaagaggaagccgtcgcggatgagctgctcatagctcctcgcgtccgtgcccagcaccggcacgacggtagcattgcagccttccatgtaaaacgccgggtagtcgcccgaatcactgtaattccctcctacgcgagcaaacgtcttgttgccgcacctcgtctccacgaggtcgtcgtctccgtcccgcggcacaagcgccttattgcaactgtacaggaagaggttgagattggtggtgctgatggagaacgggaggccgaccttggaggaggtgttggtcctcggaacatggcaggagtattctttgctgacgccggagaagacaatgaagtcaccgagcttgtggatgtcagagacgagcaatgaattgttgccgtagaagatgtcgaggatctggatccgatatctgggcttgtagtagccgaggtatggagtgtcgttgtggcagataacctggaatccaagccagccgcatttgctctccgttgcctgctccggcacgacggcgaacggcgacgagatggtcaccttgccacatacagtactggccgcgcagccttcttgtggacgattgtcagaagatgtcactggcggtggcaggttcccccatgttatgaggaagcctccacgcacgagctccacatacctgctggcgttcgccttgccatcaggcggcttcagcaccggcgagaagacggtgctgtttctgctgcagccttccaaatagtacttgtcgtagtcgccctccccgtcgtaacgccctcccagccgagcaaacgtgttgttaccgcatctcgtctccacgagccccagtttttgctgctgctccgccggcggcgccttggtgcagttgtagaagacgaggttgtgattggaagggctgattgtaaacgtgacgggcagcttggcgaaggtgttaaacactgggatactgcagccggtggagctattcaggcgagctagcttatggacatcaaagacgagcatagtacggtccccatatgatatgttgatgatatcaaacccggtgtccgtagagcttcgaagagttgcgacgccggtggagtagttgcaatatacctggaaatccagacgaccacacggcttatccgcctggccctgggtgatccagaacggagaggagatattcaggtggccgcatttctggctgcccaggcagcctcctcctccttcctcctcggctcccctcgccgccgcggcgagcatcagcgctagcgaccaggccgagacgacgacaaagaagaagctcggggacatcgagacagaaagaggaggaggggataagcgnacgcgtggcgnacgcgtggcgnacgcgtggcgcacgcccc

SEQ ID NO: 51790 - DNA, 266 bp, Oryza sativa
  Clone ID: PAT_MRT4530_5414C.1
attgttattcatttttttttttggcaaaccaaggacttttgagatttttacattgcaaacgtttaatattttaaataccgcctttgggtttcattgataccgaaattttacacgtgctacgacgttgactccgggggcccatttgttttgcacaataaccgcacccaaagggggggggagggaggcctccatccctttttagtcttccacaattgtgacacccggggggggggggaatatttttttcgaaacaccggacccgtggg

SEQ ID NO: 51791 - DNA, 246 bp, Oryza sativa
  unsure (1)..(246): unsure at all n locations
  Clone ID: PAT_MRT4530_54150C.1
aaaaggactcatctcaacatccataacaagcaaacgntaggtgtttccgacancaacattagnccatatcgngtcaactgtcaaccatagactagnccaaaaatacggcggtctgcatagntaaaacatcagtgtcgagcagaaggaacctttcagtacttgacctccttcngnccatgcgagaagtaaaggaaggttnnggccggtggttccctntccnttagtngngcaancancatggtcgcc

SEQ ID NO: 51792 - DNA, 156 bp, Oryza sativa
  unsure (1)..(156): unsure at all n locations
  Clone ID: PAT_MRT4530_54151C.1
tcgtcactacgacttattaaggctgactagagggtcgatcgcggaccgctggcggcacggcgcaggacgcgcggctaagggcgggttacaacaancggcggacggccctggcagcacaggtttctgctgggtgtcagcggggggaggcaggtccag

SEQ ID NO: 51793 - DNA, 567 bp, Oryza sativa
  Clone ID: PAT_MRT4530_54152C.1
ctacctcactcttctcccccaaatcatcagagccagtggccaccgtcgtccccatcgctgtcgccccaccactcgtcggagccggtggccgccgtcgtccccgttgccctcgccccacccctcgtcggagccggcggccaccgccgcgggggaggcggcgacgacgaggagcttggcgacgggtgcggtgaacaagagggagagcgggagcggtggcgcggaggccgctgccggcgccggggaagccgctgctggctcaggaccccggccgccgaggaggacgacgacggcgcggcctcggcaagggtcgtcctcaagctcgcctcccttgcagcgccgctctggctccccgcccttgtcggtcttctcatcggctgccccgcctcgccgaccaccggattcgccgctgcctcctccacgcttcgcctcgccgaccaccggattcgcgcgcctcctccttctcctgctccacgcggctgcctccttctctctctcttccgacgccgtgacgtcgtcatccatggccgccggagacgatgacgaccccttcctcctgtccagcttcat

SEQ ID NO: 51794 - DNA, 1372 bp, Oryza sativa
  Clone ID: PAT_MRT4530_54153C.1
gccgccagatctgcggctcatatacccagcagccaccggatccaccgcttgcacaccgccatggcctgagctccaccaccaccgttgctcctcctcgtcatcgagctcaccgtcgccgccacgacagctcggcgccaccgcccccacagctcggcgttgccgctcccacaaatcggcgccgccccgcgccccatcagaccgccgccgccgcctcctcagctcgccgccgccgcccccacagatcgttgccgccgccccctcagatcggcgccgactcggaccccctcagatcgccgccgccgccgccctccaccacaacgagtgggcgctggcggggcagtgcttgacgccgccgccgccgccccctcagctcgccgccgccgcccccttagctagccgccgccacacgcgtaggtcgtcgccgccgctgcacgcacgaagccagtggccaccgtcgtccccatcgctgtcgccccaccactcgtcggagccggtggccgccgtcgtccccgttgccctcgccccacccctcgtcggagccggcggccaccgccgcgggggaggcggcgacgacgaggagcttggcgacgggtgcggtgaacaagagggagagcgggagcggtggcgcggaggccgctgccggcgccggggaagccgctgctggctcaggaccccggccgccgaggaggacgacgacggcgcggcctcggcaagggtcgtcctcaagctcgcctcccttgcagcgccgctctggctccccgcccttgtcggtcttctcatcggctgccccgcctcgccgaccaccggattcgccgctgcctcctccacgcttcgcctcgccgaccaccggattcgcgcgcctcctccttctcctgctccacgcggctgcctccttctctctctcttcctgctccaggcaccagggtaccaggtaccaggcaccaagcaccagggtaccaggtaccaggtatcacgggtatcaggtaccaggtatcagagtggagaggaggagaccgccggcttcttctgcttctgtggcggcggaggaggagccacctgcgctcaccggcaaggaggcggcgggagtagcggacaaggacgacggcgaccttggcgaggagcgcgagggaggaggggagaggccccggcgccggcagcgacgagagcgctagtggaagaagcagcgccacagcgtgtggaggcggcgccgcagcgggcggaggacgacgtcgtggaggtgcggcgagatcaccctcgacgccgcccctacctcaccgacgccgtgacgtcgtcatccatggccgccggagacgatgacgaccccttcctcctgtccagcttcatctccgcgctctcgttttcttctcctgtg

SEQ ID NO: 51795 - DNA, 307 bp, Oryza sativa
  Clone ID: PAT_MRT4530_54154C.1
ctcctccattatttatgcttcgatcctccatgctttcctctactgctcattggcaacattcggtcaattggacaggcgagctcagtattaaattttaatgtagcactatggtgtgctatttttgctctcgtaaaagagatttccgctttctcgttattttgagaagtgattttccttgccggtcttatcttctttatacgtttctgtttctttagccattgttttctacttttctctgtataccacgggtaatatcctttttttttgtaactattgttatttagctttgcctttctatttcaagggt

SEQ ID NO: 51796 - DNA, 245 bp, Oryza sativa
  Clone ID: PAT_MRT4530_54155C.1
attcattgcccacctttattattagcatcttgggcgggactattatgcatgggggagctcgttcaattcaccggcccatgccgatgccgcccggcaaatgttgccattatatttattatttcatctcggcgacaatttacacttcttcggcaacccaacctacgagcccgttttgaaccgccttttgttgtaacaattcaagtttacacccgtgccgattcccaacgcgccacaatagcccttgt

SEQ ID NO: 51797 - DNA, 2542 bp, Oryza sativa
  Clone ID: PAT_MRT4530_54156C.1
cggcagtcattaaaagctttactgtagccaagagactgcgtgagctttttgtacagggacaccacattttacacgacatacatgtaacatcttagtacagctcttactatatatcttacacagcagaatgcgtccctcttgactgcaaagaacagaaagtccgcagctgttggatttcccacaaacagcttcacttggacaatgcataccctcctctacagcgagatgcatccttggtagaactttactagccaatatagtaagcgacgagagcaatgaacggcgcccataattcacaagcctacatgacggatgggattgagatattcttatctgccatgaagaatgacaggtttcgaaacgcatccaggctattcaccatcatgcgattccaactattctgactgtctcctaagagtaagtgctcagcttggtatctcacggatggtatctctaagtccagaggtccatgtgaatgagcccaatataagtcatggcgccgaaacgtgaaagggctttcccggttttaaagaagagagcaaggggagggaaagcagatgaggctgacctgcttcaacacgtgtcagattgctccaattcagtcctatctgaaaggttggaggaggttgttggagactctgagaaagaaatccaaattatgccttcgccttcgcacctcgccggcgcgctggacgcggcgcgccccttcctgcgcggcgaggaggagcaggtggacccggcgctccccaagctggccgccgtgctgcgcgccgccggcgccggcgagtgctggcacaagcacggcaccttcctcgcccacctcctcgacgtccaccgcatcctccgcctctggggcgcccccgacgccgtcgcgcgctgcggcctctaccactccgcctactccaactcctacgtcaacctcgccatcttcgaacccgacgtcgcccgcgaccacgtgcgccccatcgtcggcgccgccgccgagcgcctcgtccacctcttctgcgtcgtcccgcgccaccagctcatccacgacgacctgctcttccactacgccgaccaggacctcgtcgccgacctcgccgcctccgaggcgtcactgcaggacgcgcggcgcgggctgttccaccacgacggcgaggcctggcggctcaagatccagcgcctcctcccgccccacggaatcactgtcaaacacatcagtgaccgagacaccgagatcgccagattcttctgcttctgtagcggcggaggaggagccacctacgctcaccggcaaggaggcggcgggagcagcgggcaaggacgacggcgaccttggcaaggagcgcgagggaggaggggagaggccccggcgccggcagcgacgagagcgccagtggaagaagcagtgccacagcgcgcggaggcggcgccgcagcgggcggaggacgacgtcgtggaggtgcggcgagatcaccctcgatgccgccccgacctcgccgacgccgtgccgtcgtcatccacggccgccggagacgacgacgaccccttcctcctggccaacttcatctccgcctctcgttttcttctcctgtgtgagagagttcgcggagtcaaagtcaaggacaccaggactggcgaggatgtggcactgtcgaggcgcatcgcggcaaccttccttctcatgacaatggcggacttcagcgaccagctcttcgactggcaggatcgcctcttcgacaacaccaatggccgcctcgagttcagtggcaatacctggacttcgctctggccaggcaccggcaagcccggcctctggactgcctccatatcccgcatgggcgcgctctacagcctcatcgttcgcgaggaagagatacacatagctcaacgaaagcatagcaacaatggccaagaagacgatcgtgacgaggacattgagctggtgatcccaccggtgttcaatggctgcacccaggtgctcaccgccgacgaccagaaggcggcacgggacctctactgggatgcagtttgcagcggcggcgaggacgagacggattggcgcaaggtggaggagatcctgcgacggtgcattggcaggaacccgtttgtaggagagcctcacctggttcttgctcaggtgcttctgaacatggagatgtatgaggaggcagaggagcagatagaggcaggggtgaagctgttgctggagtgggggagcagctgggacaagaggatgccatgggaggcttgggtgtcatggggcagggcgatgctgatcaaggccaaggacaaggattggccgcacacctccttcggcatcctcagcatagggcttgtcaagtgagtgaacccattcacctccactctctgatggtaaattaagctgcacctgtactgtacatgtcataacatcacctgataattgctgtatcctctccatcggtatatatatgcttagctcgatggaggaaatcaaacatgatggatatgaaataaatcgctccacaaatatcaaaataatttgacgcatccatataaaaaaaaaaaaaaagggcgg

SEQ ID NO: 51798 - DNA, 581 bp, Oryza sativa
  Clone ID: PAT_MRT4530_54157C.1
ctccgctcctcgaaccccgcgcccccatccacacgcccccagtaaccaccaccgttttccttcctcggagtccgcggtgacaggagcccaccgtcgccatgggtgaggagaagaaggataaggcgagcggcaaggacgccggcgagaagaaggacgccgccggcggcggcgagaaggcggcggcggcggcgccggggcctatcgtgctcaaggtcgagttgcattgcgccggctgcgccagcaaggtcaagaaggccatcaagcgcgcccccggtgtggagacggttgtgacggacacggcggggaacaaggtggtggtcaccggcgcggcggacgcggcggagctgaaggagcgcatcgaggcgcggaccaagaaggccgtgcagatcgtctccgccggcgccggcccgccgcccaagaaggataaggaggagaagaaggacaaggacaagaagggcgccgccgcgtaccagccctacccgtacaacgtccatgccccccagatgttcagcgacgagaaccccaacgcctgctccgtcatgtgagctgctcctccgccgccgccgcctccgctcccctac

SEQ ID NO: 51799 - DNA, 1197 bp, Oryza sativa
  Clone ID: PAT_MRT4530_54158C.1
cggacgcgtgggcggacgcgtgggcggacgcgtgggcgcgcccccatccacacgcccccagtaaccaccaccgttttccttcctcggagtccgcggtgacaggagcccaccgtcgccatgggtgaggagaagaaggataaggcgagcggcaaggacgccggcgagaagaaggacgccgccggcggcggcgagaaggcggcggcggcggcgccggggcctatcgtgctcaaggtcgagttgcattgcgccggctgcgccagcaaggtcaagaaggccatcaagcgcgcccccggtgtggagacggttgtgacggacacggcggggaacaaggtggtggtcaccggcgcggcggacgcggcggagctgaaggagcgcatcgaggcgcggaccaagaaggccgtgcagatcgtctccgccggcgccggcccgccgcccaagaaggataaggaggagaagaaggacaaggacaagaagggcggcggcgacgacaagaaggccgagaaggagaagggcggcggcggcggcgataagaaggcggagaaggagaagggcggcggcgacaagcccaaggaggagaagaaagccaaggagcccaaagaggagacggtgacgctcaagatccgcctccactgcgagggatgcatcgaccgcatcaagcgccgcatctacaagatcaaaggggtgaaggatgtggcggtggacgccgccaaggacctggtcaaggtgaccggcaccatggacgccgccgcgctcccgggctacctcaaggacaagctcagccggcaagtcgaggtcgtcgcgccaggcaagaaggacggcgccggcggcggtgacaagaaggacggcggcggcggcgacaagaaggacaaaaaggagggcggcggtggcggcggcgacaagaaggacgccggcggcgagaagacggacaaggacaagtcggcggccgcctcggcgtccgtggcgccggtgcccctcgccgacgcgggcatgttccagatgccgccgcagtacggcttcaacccgtaccacgtccaccccggcgccgcctactacggcggcgccccgccgcccaaccccgccgccttctaccaccaccccaacgccgccgccgccgccgcgtaccagccctacccgtacaacgtccatgccccccagatgttcagcgacgagaaccccaacgcctgctccgtcatgtga

SEQ ID NO: 51800 - DNA, 231 bp, Oryza sativa
  Clone ID: PAT_MRT4530_54159C.1
atggggctagccggcgtccacgcgctcccgttccacccacggagtacagcttcccagccggcgtcgagctccatcgtgctcccctgcgctcggaggcggaggggcgcggtctggtggtgtggtgttgggcacgccaccagcggaggagcgccgctgtggatgtggccaaggctgatgtcgcccaagggagaagcgagaaaagaggaagagagaggaagagataaggggtaa

SEQ ID NO: 51801 - DNA, 3147 bp, Oryza sativa
  Clone ID: PAT_MRT4530_5415C.1
atggccgccgccatcgccgccgcagccgatgactccatcgtctacaagctctccgctctcctcgaggaggtgcggccgagcgccgccgcactccgcgccgcgagcgaggccgcggatgccgtcgcgggcctcgtcaagaggatcccgacgcagcaggcgactcacgaggctgtcgctgggttcgtgagggacctggggctcgcgggggagaagctcgcgttcacgttccggccgccggaggtcgttcgggtcgctgggagccacgcggccggcggcgccgtcgcgaggcccgacgtctccgctgacctcctcgtgcgcttgcctaagtttgccccctatatggctatatctcagtttcgtttactttgtttcccattagttaaatcattgtgcaacctgccatacattaagatacacatgttttattttagaggaattctacaggaatgcttccatgaaaaagattttctaaaccacagataccatgcaaagaggtgtctttacctccatgtcattgagaaaagcttgaggtcttctccattaattcagaagatttcatggtctaccttcctagacgaggcacggaaacctatccttcattactttactgttgcagcaaaagaaatcgcagaacttcctgggttctatgtcaggataataccaactgcaagctttttgttcaatgtttcaaagatgaatttatcaacaagaaacaatgttcgtgcatacacaaaagatggcataaacctgcccacaccaaagtacaattgtagcatattggaggatatgttcttggaggaaaatgtagaatttatcagcagttcagttgcagattggaaagccttgcaagaggcattggttttgctaaaattcttgggtacatctgagcaacagaaatttattgaattaaaaccatttaccaatgttattatattgaatcacttctattttcttgtagcaacttcgaagatgtggacgaagggcttggtgattcagccaactaagaagcgtacaatcaccaaagaggatatggtttgtttcctgaaaacatttgatgttgtcatctgtgatgtatctggacatgtaaacttggcatctcgaatgacgaagtcagcattcatagagcttcaagatgaggcagcttgtgcgcttaattgccttgataaatgcaaagatggtggatttgaagagctttttatgaccaaggttgatttaggtgctaaattcgattcatgcttgaggataaacttgaagggaaacttgaaaattactacatcaagcttttgcttggatgatttggcttggagaaaacttgagaaggatgtccagtctttgctgcaacaaggtcttacagatagaacaaagatgatccgtgtcctgtggagaagcacaccttctgaatggaatataatggatgctatcaaatttaggaaattttggggagagaaagctgaacttaggagatttaaagatggaactattgctgaaagcacagtgtgggaatctgaatcttgggagaagcacacgattatcaaaaaaattgctgatcatgtgcttaccaagcatttgtcgttgcagaaggaagacttgattcatgttgttgatcagttagacttttgcctcctggttggtggccaagatccggtctcgtcgtctggagctttgttcgaagcctttgattctttagcgaagaaattgcgcctattgggtgatgttcctcttaaaatatcaaccgtgcaacctctagatccagcttttagacacacgtctgtgtttcctcctgagcctcatcctttggcatatgaaaaaaggtcttctcagaggctgccaaattttacagctacttgcatgcgatcattagaagtaatgattcagctagagggatctggtaactggcccttggatcctatagccatggagaagacgaagtctgcatttcttttaaaaatgggtgaaagtctggaggatcaaggaatgtttgttactgccagtgaagatgaggtcaatgttcttacatctggatattcattcttgcttaagatatttcacgaaagagatggagacggtaaagctcaaaatgttccatcagaagacaaggaactctttcttcggagccagcactcaagtatgatcaatggtctgcatggtcgttaccaggtgtatgggccggtagtaaggtttttgcgattactgtctagttttgactggaccttttcacctatgatcatagacataaacaatgacttcaacctgaaggatgagaaggagataaatgttcttaaacggatggcttcttacgctaaaagcagtgcagagcttttaacaaatcttataatccaaggtcaatcaggccaatatacatgggagtgtgtcttccgaacacctttaagcaattatgatgctgttgttctcctccaccaagagaagctttgtcgtcctcaccaagtacttttccctgctgagacccctaatggcaagctggtaatttgtggcaaaccatgtaaagatttccacccttatatgccactcaataaaggagttgtgaaaagcttgcatgattcaagagagaaaattttggtaaattttgacccaaccacatactttctgcgggatttgaagagtgcatttcctaaaactttcaagctgtggtatgattcaatcggaggagacgcaatcggtcttacatgggagaactcaaagaagcgtggcagagacgaggccgatgaaaccatgctggatccagcttctatcctaaaggaggttggaaatgttggcaaaggtttgagagaggcttgtgctgtttgtgcaattaacacaacttctaaccgatattcttacactggcaagagcaagacggtggtttccatggcactgattggacatggtaagggatcaacatctggcaatgtactgattagaagcagattaggtactgaaataagagtagggcatttgcctgacttcactagtatgagcgtctatgcgagcgtcgcctgcaaagcatctgatacaggacccattaggtgtgaagacaaagtggtggcatcgtggtcactgtcgccgtccttgaaggccgccaggagcagatcagccgccaagtccaccacccaagaagatccggtgatgccgctgttgcgagcagattga

SEQ ID NO: 51802 - DNA, 453 bp, Oryza sativa
  Clone ID: PAT_MRT4530_54160C.1
ctccgccttcctccccagcccacctcgtcccctcgcccacaacttgtcttttactatcttggagcaacttcatgtacagaagcttgtagctgttgtgaaagagaagttatcaaatcggcaagaggtctcctggtccaatgatatcaaaaggcacctgcatgatgttatgtctctaggtgttggcacagaactcttgattacaccagataccactttgctactggagctgtacaatctgaagaagggggatcggggcaaagcaatatttcgacacaagcttcctcatcaaaatattacattagaagcatcttggcctggattattcattgataaaaacggggtttactgggatgtgccattgtcattatcagctgacctggcttcagttggctccgagtctggattgagttatcatgtactattgcagcagaatagtggagaccaaaagttttg

SEQ ID NO: 51803 - DNA, 1311 bp, Oryza sativa
  Clone ID: PAT_MRT4530_54161C.1
atggagggcgcggcgcgccccgtccccggcgacccgctgccgctcggcctctcgcgggggccccgggtcacccgcacgaagcagctcgacttcctccaccgcttcatggcctcgccgctcgtcccctccttctccgcctccggcgccggcctctccgtccaccacgcccacctcgtccacctcgcccacaacttgtcttttactatcttggagcaacttcatgtacagaagcttgtagctgttgtgaaagagaagttatcaaatcggcaagaggtctcctggtccaatgatatcaaaaggcacctgcatgatgttatgtctctaggtgttggcacagaactcttgattacaccagataccactttgctactggagctgtacaatctgaagaagggggatcggggcaaagcaatatttcgacacaaggcaaattatctggatactttttatgctatttggtatctagttatgaagcttcctcatcaaaatattacattagaagcatcttggcctggattattcattgataaaaacggggtttactgggatgtgccattgtcattatcagctgacctggcttcagttggctccgagtctggattgagttatcatgtactattgcagcagaatagtggagaaccaaaatgttttggtggtggtgaagaaaccagtgatgttcctgttgctctgttaccagggttatgtgctaaggcagctgtttcgattaagaaaagcattgatgtttggaggaaaaaagaagataagctaaaaaatgtccagccgtatgatgtatttctctcagaacctcatgtttcgttcaccgggatcattggtgcagtagccagtggttcttttggggattgctcaaaaagaatgtccatgcaaaatgaaatactaaaatccaatgcctttaaatattttgatgagaggaacaagtttgctgcctttgcagacctctttgcgtctgttaattttacagctcaacacgggaattttcagaggcttctcctggatttgacaaggcttgcacaagatttcttcttctctcgacgccctgatttagagacattctgtgatgtttgtcctgatgtgattgtttctcttcaacaacagatagttggacccttcagctttcgtgttgaatccacagttaccattgaccctaaaaaacaagaccatttcgttcgtgtggacgactcagtttttgcaatcgactgggctctgaaggtcctgggttccgcaaaggccactgcttggtattctcctaagcatcaggaggcaatggtggagcttcggttctttgagacctga

SEQ ID NO: 51804 - DNA, 243 bp, Oryza sativa
  unsure (1)..(243): unsure at all n locations
  Clone ID: PAT_MRT4530_54162C.1
tcctcctcgtctaccttacctagcagcagcagctagctagcttaattagctatagagccatggcgcnacggactgagcagcaggtccggttgccgatgtccctgcggtggcgacgngcggcggcggttgtcggtgctgccggcgagcaacaagctgggagcaggctgcggatcagcgacgtacaacgtgaagctgataaccgacgcgaggtngactgcaggtgcgacgcgtgtnatctngaca

SEQ ID NO: 51805 - DNA, 1263 bp, Oryza sativa
  Clone ID: PAT_MRT4530_54163C.1
atggaggagcaggagaccagtatcggggacctgcacacggatgccttcgtggagatcctgcggcgcgtcgcgccgagcgcgcgccgccgcctccgcctcgtctgccggcgctggcgcaacgtcatcaactcccgcgcgccggtgtggcggggccacgcgaagacgctcgccttcgtctaccatcgccccggtccagccaccgccgcgtacgccatcgacggcctggaggaggacgacgaagggtgctaccggaagctatgggacgccgccgccgacccgagtcttccggccatctactcccgcctgaggatgatcggcagctgcaacggcctgctctgcctgtacgacgagggggtcaccggcgacatcgcgctgctcaacccggtcaccggcgagacgctggacgtcgccgggccgccgggccaccggctcaggcgccaggagccgtacggccacgtcccgtacggcgaggcgttcagcttcacgtaccacgaggcgacggagaggtacaagatcgtgcacctcgccgtcagcgacgggcggctggaggcggtggaggtgctcacgctcgtggacggcgcgccgtcgccgtcgtggcggagggtggcggcgcccgccggatcgagctgctggctgccggccggcgtcgtcagcgacggccaagccacgtactggatcaaccacggcggcggcgacaggctcatgtcgtttgacctcacggatgagcgtgtcgcgacgatcacgtcgctgccggtggcggccaagaacttgaacgccggttgcttgaggaaggcgcgtgggaggctgtgcgtgggcaaccgtatccatcacgactatcaaaacaacaccgaaatcgatgagatgtggttactggagcgtgatggatgtgaaagcttggagaggtggtattgccggttctacttgactacgcgactgtgcatggaggtgcaacaagttgtagggccacactttacccagggcgaacatatcttggcccatcgccatggatccttgtatgtgcatcggtgcgtgagcagtgcgacaaggccacagtgcagtgtagcgcagatacacgagcactggccttaccatgaacccatgttcacgtgtggtcatgcaagtaatattcgggccttctcctacatcgagactacggagccattgaacgtataccaatgcaatggtggatctaagattggaagtgtggttaataacgatgaggagatggctacaggtatgacctatgtctctttggttctataa

SEQ ID NO: 51806 - DNA, 554 bp, Oryza sativa
  Clone ID: PAT_MRT4530_54164C.1
tgtcttttttgtttttctttctcctgttttttttgttttttccttcccacttatctgtcattgtgtccatggtgcggggcccaacaggggctaacttaagaaaattccaactatggcagacggggcctgatctccacccactaagaagtaaagtcccccctttttcgtctgagcggggccctattgggcccccgcaactgataaaaaggggtgaggcgcttacgggcagcctcatgcggtgacaggggaaaaaccttccccattttgggtttattaggtaaaaccaaagacggggtgaacccccctttgggtttacccctaaatcgcccaaaagaggggggaataaaacccttgtgggggggccttaatgttttggccaccccatttggggggattccctttaaaggggatgcaaaaacaaaggccccccgaaaaaaaggtttttttacggcccccatatttctataaaaagagggtgggggctgccccaaccttttgaaaatcctgaaaaacgggtccctggtgaaaaaaacctttttaaagggttggggggg

SEQ ID NO: 51807 - DNA, 181 bp, Oryza sativa
  Clone ID: PAT_MRT4530_54165C.1
acgcgcgtttttgcttgccttcctcgcatgcctcctcctgttccttctctgtctccgctagggtgtccgcgccgccaacggcccgaaccgagatgccgccggccgccatggctacccctcccccgccgcagggttcctacacaggggatccgatctacgacgagctgaggcacgcctgctc

SEQ ID NO: 51808 - DNA, 345 bp, Oryza sativa
  Clone ID: PAT_MRT4530_54166C.1
atggacaaaaccccggtcgatgacaatgccaccgacaagtctgaagtgcctaaagtgctcagaagtcacaactccaagtctaaggatgatcaaaaggagaagtggatgtttgaaaagcactttggccagatttatgcacttgatgagggtccatgggagatgagaaagctacgtaaatggtacatagacgccagcaagaaaggcctaatgtctttaactgttcgattaccgcctgatgctttcatggccaacaaaggttccttgtggttagatttctctgatctccacgccatctatcatcggaaaaagatggatgtaaactttttcggtgcatggtgcctgtga

SEQ ID NO: 51809 - DNA, 360 bp, Oryza sativa
  Clone ID: PAT_MRT4530_54167C.1
atgcgggtgcggcggcggcggcgatcgtggtcaccgacgatcgcctcacgcatagccgtcggcggcgtctcactggcttcgatcgagccgaagctagaggacttcctcggcatcatctccttctcggagcaacagcagcatcatggcaagggcagcaccggtgccacttgctacgcaagctccggcagcagcgtcggctacatgtaccctcctagctcctcctcgctccacttcgctgactccgtcatggtagccacctcctcacagctcgtcatccacgatggcgtcagcagtgatatggtgagtgccactacagccaacggcaacggcggcattgtgctggccatgatcaagaactga

SEQ ID NO: 51810 - DNA, 178 bp, Oryza sativa
  Clone ID: PAT_MRT4530_54168C.1
caatcacatcagcccacggtcgttgctgagctgctccttgtggctgttgctgcatgggctcgaactaaccatattgagatgcaaaccgaggttcagccaatccccctggctgatactgggcttgcggggaaggaggctgatattgataactcaagttacccccttggtaattatgaag

SEQ ID NO: 51811 - DNA, 936 bp, Oryza sativa
  Clone ID: PAT_MRT4530_54169C.1
atggctctgcactgccactgcaatcctccctgccgccacccactgaaggtcagcaatatgacagccagtggtttccggtgcgctcgctgccggtcgcgttcgttcatcaacatcggcgacattcttgaggtcctcaccaacgaaaattaccggagcagggagcactgggacaaggatgccccatgcctcccgctactgcttcctgcgcctgctcaacacgaccagcctgctgctgctgccgcgagctgctacgctgctgccgcttgccgcgagcgctcgtgctgctgccgcttccgggagctgctgttgctgccttgtgctgttgccgcttgccgcgagctgctgctgccgctgccagcctacccactagttgctggctgctgcgctgtcctgagctgctgctgcttgccgcgcattgccgccgacgaagtacctaccgctaccctaggtcctgcccgtctgcacccaggtgtctgcgaaaatcaatattttcgcatccaggcggttgcgccaccgctcctcccgccgccactgccgctcgcgatcgtcgctgtcctcgtcgtcgccgtcgtcgcaccgccgccactcccgtcgtcgtcaccgtcggtgcgccgccgccgctcgtggtcgtcgtcgtcgcgctaccgctcgtggtcaccgtcgtcctcgtcgtcgctggtcgttgcaccgcggccgctcccggcctctgccgtgaccatccgccgtcgccgccacgccgcctccaccaacagccgccgctccgccgcctctgccagcagccactgcgcctcctcccgcgccatcagcggtggtggtggcgacgccccgtacttcatcgaccaacccggcaccggtcgcccggtttttccagacggtgccacttacaacccgtctggaatctaccgggacgggcatccagaaaaatcatttctgtaa

SEQ ID NO: 51812 - DNA, 732 bp, Oryza sativa
  Clone ID: PAT_MRT4530_5416C.1
cgaacacctttaagcaattatgatgctgttgttctcctccaccaagagaagctttgtcgtcctcaccaagtacttttccctgctgagacccctaatggcaagctggtaatttgtggcaaaccatgtaaagatttccacccttatatgccactcaataaaggagttgtgaaaagcttgcatgattcaagagagaaaattttggtaaattttgacccaaccacatactttctgcgggatttgaagagtgcatttcctaaaactttcaagctgtggtatgattcaatcggaggagacgcaatcggtcttacatgggagaactcaaagaagcgtggcagagacgaggccgatgaaaccatgctggatccagcttctatcctaaaggaggttggaaatgttggcaaaggtttggtaaggggcgtgtatctcctcaaagcaccaaagcttcagtaaactattgaaaactcgctgaaagttgtgtggaagagagaggcttgtgctgtttgtgcaattaacacaacttctaaccgatattcttacactggcaagagcaagacggtggtttccatggcactgattggacatggtaagggatcaacatctggcaatgtactgattagaagtaagcaaggaatgttgtgtttagactcaagttgattagggtataaaagtttgtatccaaattttgattctgaggtacagaaaagtatagcaatgtaattttgatccttccct

SEQ ID NO: 51813 - DNA, 176 bp, Oryza sativa
  Clone ID: PAT_MRT4530_54170C.1
gtttgccacatccctggcagttaactttgtcatgctggtatcttcggtgtccgtatggtttttcttcggtgtccgtatgggttgtgttgattcggtgtccatatgggttgtgttgccggttttccagttagctatacatacctgcactagttcccatgtcaaaaaaaaaaaaaaaa

SEQ ID NO: 51814 - DNA, 666 bp, Oryza sativa
  Clone ID: PAT_MRT4530_54171C.1
atggatcaagctgtgggtcccaagatctgccacgtcatcgacatccagcttcaaggcgacgccgccggcgccgccgccgccgccgccgctacaagcagcaactgcgtggtgtgcagcacggagccatcgccggagtgggtggccatcggctcgccggccaccgccgccgccggcggcgacctgctcacgcccgacgccctcgccgagctggcggcggcggcggccgcggcgcccgaggccgacgacgactgggcggactgccgctctcgcgtggtcctgtaccacgttgcgagggcaagaaccttcttcgccggcgttctgcgtcgacgtcccgccgccgccgccgatcgccggcgaagcgccggcgacgtcctcgccgagctcacggcggcggcggcgacgacctcggatggccgcgtcggcaggttctggtaccacgcttgcacggggaccttcttcgccctcaagaagcattacaaggcaatgagggttgaatgcaatcaagaaggcccttgctatccaatttggatcagctggataacgtttttcttccttatgatgcttttcggagcattgatcgcaagcgctggtgcagaccagacgagcaataaaaggtggatagtgaaacgattattacattctaggacagatgaagttatattgtaa

SEQ ID NO: 51815 - DNA, 502 bp, Oryza sativa
  unsure (1)..(502): unsure at all n locations
  Clone ID: PAT_MRT4530_54172C.1
atgcgtccattacncaattccggaggattattcagttcttcacggtataatggctcggacgccagatgatattcttctgatgtgtggtcatatcctgattgttggcgttcttggtgccagtctaatcctggaaacgccacatatatttttttttattgctacattcattgatgatcacattgctcaccactctcaatttctgaagagtgcctgactaccaagccacatgtaattgaagcaatggagagacaggggaggctttcaatctttctacttactatgccctagcattatttctcagcccggacaatgtcaggtgcctttgatagcctgagtcgaacagtatctccagctggatataagatgaatgatttggttttgcaggctattcaagtacagtataattggatcttgataccgccttcgctgtcttttactctgtagatttgttgaccctggtgaacgatttgttaagcttagaaatgtggatcaactcgtctat

SEQ ID NO: 51816 - DNA, 186 bp, Oryza sativa
  Clone ID: PAT_MRT4530_54173C.1
atggaggactggagagcaatgatgatagcaatggtcctaggtccgtgcgtgggtgctggagacccacgcgaagctaggggcaagggcaagctcggctcccaggctcacctccccccccaccgcagggcggtcctgactttttatggccccgtttatcacaagcgtctagatgcacacggcaagtga

SEQ ID NO: 51817 - DNA, 155 bp, Oryza sativa
  Clone ID: PAT_MRT4530_54174C.1
ttttggtataagtttcatgaaggatgtttatgttctttatccatttggggaatctgatgggtcttattggctcatgaaaatatcgaatgggtgaagatttggtgatgacctggatgccctaactttgcaagaaaggaatcatccttcatttattt

SEQ ID NO: 51818 - DNA, 2313 bp, Oryza sativa
  Clone ID: PAT_MRT4530_54175C.1
atggcacagctcggtgatccggccacgcgccctgaggaagatttctgcttcatccccacgtcatatgccattgacgaggagctgagagagtgggggaacactgcagctgtttcatgggcaatccgtgcgccaccttccacaggggccctggaaattgaggaggtaatccgggaggagttcaagcttcatcaaggtgaggtggctgtctccctgcaccacccagaagccttcttgatcaagttccagcatcgccgccactgtgaagacgtggtgaagaagggcttcgccaagcgccgcggcatcgaggtgcacttcatcaagtggcgtagcctccaaaacgcccttggcgttgctctgatgttcagagtgcgtctatgtctggatggcatgcctatgcatgcgtgggcggcggacatcaccgagcggctcattggacgcacctgcgccctggagcaaatcgagactgaccttgtgcacccggtggagtccggcaacacccgcacgatcaatctctgggcatggactgtgaatccgagcacaatccccaagcgaatgtggctcgggtttaccaaacgtgcaaaagacaagcaagcagagattctgttcgtggaagagaagccgcctaagcattggcagaaaggcgtccaccaccctgtccccttccacctcgaggagatccacgactacacgtcggcgggtgttatcctcacggatgaaaccacttgccagccgacgcggcgccgacttccaccctggaacctgggggtgctcgatggtgagccggtgccagctcgcgccttcgagacgttcccgcatcacccgcagccgccacgctcggtccatgaacgcttgggccgcaacaaggagcgagatgatgacgaccgtgtcggtcgagatgacaggaggagccgcgataaccgcggcaagggcggtcgcgatcgcagccgcgaggagcgcaacggacgcgacgaaaatgatgaccgcggcggccgcgatgaccgcggcgaccgcgatgaacgcggtgaacgaagcgtccgagatggcaggcgaggccgtggggggcgtcgtaacgagcggccatggcgacgccgcgagtacaacgacgaccaccctagcttcttcgacaaccagcgccggcgggaccacgatggcgacgacgacaacgacggccgtggacgccgtgacctcgcgcgtggccgcgagtcttggaagcacggagaagcgaagtatcgccgtgagcgcacgcgctcaccgcggccacgcgataaggagaacagcaaccgctacagggggtggcgcaaccgaggtgtggaaggcgatggcgagcctacagaacctgagctgacattgccgcaccagagggaaaatgacgctatggtaagcaaatttcaatttctcctagccatgcattcccctgtcttgaaggacaacctggcggctgaggagttcaaccagaccaccactctgatggagaagattcaagaaccggcgagggaaggggatgaagcctggtccctgctagaaccaatcccggtgagccgggttttggcgcgtatcaagtgtgacctgccggcaaacgtctccccacaggagaccacacggcaggagattgaagaagcacttgccagaatggaagtggcggtggcggcggcgactgaggagccgttgctgagcccgcaatcaccgtgttggacggcggtgcatctccctgctgcgaacaaggcagacaccatcgtcctgcagtcgccgggccagaatatcgtggctgaagccgccgcgacgaacacgccaagaggctcgccgaaacagaatgtcgtgggtaaggccgccgtgacgaacacgccaagcggtgcgacgacgacaacaacgacgtcagtgacgccagcacagctcgccctggacagcctgtttgcaacaccaccaatggcggtcatccccatgccgccgccaataagaaaggtggcagtcggccgccgtgtcaagctccgcaagcagtacaacactggcgccaaacgtcggagtgcccgcatcgctaagcagccggcattgccgacgatggaacgatgccagcgcgtcctcttcaagcgaatgggatggctgcctggcggtgacggcgccgcttcgatggaggaggtgcttgctcaatatgtcgcaatgttcgagggaccgctcctgcagcacaccatcgcggcgctcacggcggtgttcggcatcgacattgaagacgacgacaaccccacggactcccttgtcgagatggtgggagaaggggtggatgaagctgccgcggagattaaggagatcatcgcttga

SEQ ID NO: 51819 - DNA, 223 bp, Oryza sativa
  unsure (1)..(223): unsure at all n locations
  Clone ID: PAT_MRT4530_54176C.1
gcatgagggagaaaaaactgggaaataaattagngtgttctatgctaaggatgcccgncctttgcatnagatgcgctagataacntncaccgtngtcncatacagtttcgnncacatgncgncatgancanctctaaaatctgacgnaangtanatatactganggncatnattctcggacctgntaaanccaantcggntacagngtttcagtcatgcacgg

SEQ ID NO: 51820 - DNA, 1353 bp, Oryza sativa
  Clone ID: PAT_MRT4530_54177C.1
atggcccgcggcggccggaggcacaagccgccgtcgtctgcccccgaggccgagcagccggaggcgctctcccgcatcctccgcaccgaggccgccgtctccggcgtctcccgcaaggcggcggcggcgtcgcggcagcattccacccgcctctggccccgcgccgtgctcgaggccctcgactccgccgtcgcctcatgccgctgggagcccgctctcgagatcttcgagctgttgcgtaagcagcaatggtacaagccgaggtcgcagacctacgccaggttgctgatgatgctcggcaagtgccagcagcccggcgcggccactgccctcttcaaggtgatgctctcggagcgtctcaagccgacggtggatgtctacacggccctcgtcggcgcgtacggctacagtgggctgctggaccaggcgttggccaccgtcgaacagatgaaaggtgtcgcggattgcaagccagatgagtacacattctctgttctcatcaattgctgtagcaaattgcgccgctttgatcggatacctgcgattcttgatgagatgtcctacttggggctacaatgcaatgctgttatccataatgcgataattgatgggtacgggaaagccggcatgttggaggagatggagaatgcactgactagtatgcttgaagatggggacagtgtgccggacatatacacgatgaattctatcatttgggcttatgggaatcatggtaacaggatacatgaaatggagaggtggtacagtgagtttcagttgatgggtgttgagccagatacgcaaacatttaatatcatgatcaaatcatatggtaatgctaagatgcatgacaaaatgatgtcggtgctgaaatatatgaagaaacacttcttctcaccaactgttgttaccttcaacataataatagaaagttttggacgggcgggaaacatcgagaagatggagtactatttccgattgatgaaaattcagggtgttaaacccaaccccatcacttactgctcactggtcaatgggtacagcaaagctgggtttctcgacaaggttcctgggatcattcgacaaacagagaatactgatgtggttttagatactccattttttaattgtgtgatcgatgcatatgccaagtctggggatatcaaaattatggaggaaatgctgcagcttatgaaggaaaagaaatgtaagcccgataaagtaacttacaccaccatgatccaggcatacaatgtacatgggatggatgaagctgctaatttgttaaagatggaagtgggcatggttgatggcaagctgctggaatcagtttcagaggttgataaaaaataa

SEQ ID NO: 51821 - DNA, 723 bp, Oryza sativa
  Clone ID: PAT_MRT4530_54178C.1
tagtggatcccccgggctgcaggccaaatgaaggaccttggtttgacaccctcagagttcacatataattcattgttctatggcatttgtaggagaaaatatccaaaggctgctctggatttactaagggagatgcagacaaatgggcatcccccatggataaagaactgcacggagatggtgcaacagctttgcttcagtggcagagtaacagaagcagtgcaatttttagatggaatgcgtcaaattggttttcttcctgacattgtcacatactctgcagccatgaatggaatgtgtaacactggagaggtggacgatgcgttacacctcttccgtgacatttcctgtaagtattatcttcctgatgtggtagcacataatatcttgataaatgggtttcgaaaatcaagtaaattggatgaagcacaaaaaattatggaagagatgttagagaagggtctgtttccttctgttgttacctacaaccttatgattgatgtttgttgcaagactggcaggattgagaaagcaatttcttacttagataaaatggtttatgaagaaaagcaaccaacagtaattacatatacaagtttgatagatggattctgcagtgctggaagacctgatgaagccattaagttgtggtgcgaaatgagggagaaaggttgtgctccaaacaatatagcatatactgcttttataaacgggttgcgcaaa

SEQ ID NO: 51822 - DNA, 246 bp, Oryza sativa
  Clone ID: PAT_MRT4530_54179C.1
ggacgacgacgaccacacaccatggaggccgcgccggcgaggccgtcatccgcgtcgcgcatctgcgccctccgaagcctccatcaacggcggcctcctccgcgccgcgcggggtgtgcgaggagtccatcccgggcctgcgcgtcgaccacgtcagtatctccggcctgccgtgctgaacaccagcctcagagcgcagtagtctccctcccgccgtcgaggccttccgcagaaggtccgcagcag

SEQ ID NO: 51823 - DNA, 424 bp, Oryza sativa
  unsure (1)..(424): unsure at all n locations
  Clone ID: PAT_MRT4530_5417C.1
ggaattcttccaggaacgcggtgaggctatcagatgttgcgtgggctacacctgaagatggctcctgcacgggctttggccacactaaacccgcttcatctgattaagctgggactgccctcgaattgcatggctgggatccgcatgccacaccagcgcgacttgacttgcctcatggaccaggtgcctacaccactaacagcaggcctcatgctggatcattgcatacacaaaacaaacggtccagccagactatacaggtcaagggcatcgattcatctctggaggacagcatgatccgagaatctacnnnaggacatttatctgcttgcgagaagatcacacaagccnnaaaaaagcatggatcgagaaactcgcgccagccaagggatggcacacatacatcctaaggatcacgcttcct

SEQ ID NO: 51824 - DNA, 321 bp, Oryza sativa
  Clone ID: PAT_MRT4530_54180C.1
aaaaacccaaaatattcgccgtataattaattggggccttaagcccattaaattttggggggccccaaagattgggggacccgacccaaacgtacctacctggtttggactggacagggccccttatccccccccggtttatttggccccaaattcccaatttaacggcaacacaccggggaaaaacgggacttttcccctccaggaaaaaatacgcttttgaccgcgtttataaattcaaagggagggtgattttttttaaccgggggggggccttaattaaaacacagtggggggggcccttattttaagcccccgggg

SEQ ID NO: 51825 - DNA, 445 bp, Oryza sativa
  Clone ID: PAT_MRT4530_54181C.1
ttttgttcaagtcactgtattgagcttgcaggcgacagctacagcagccagctaccaccaggcttgatcttgtcggttcctcaagctcgggaacagagcagagagagaaggaatcctggtgctttgtttgatcatccctcagatccatggcgcagctgcttaatagagaagaggaggaaagattgatggagaagaagggtggtccaatttgaaacttttataaatttattagtccaaagttgctcttagccaccagcgccgttccaagcctcgttcagtcgttcctgcgagccctaccgtgtgctcacgacgccaccagtgctcacgacgcgcgcgcgttcgcatatggccaccgttttcggcaccgaccgtcttcgtgacctccacgccttcgacgacaccaaggccggtgtcaagggcctcgttgacgccggcgttaccaccg

SEQ ID NO: 51826 - DNA, 431 bp, Oryza sativa
  unsure (1)..(431): unsure at all n locations
  Clone ID: PAT_MRT4530_54182C.1
ggcggtggtgagctgggagcagcgggtgcggatcgcgctggacgcggcgcgcgggctggagtacctgcacgagaaggtgcagccggcggtgacgcacaaggacgtgcgttccaccaacgtgctgctgttcgaggggttcagggccaagatcgccgactacaacatgttcagccaggccgccgacatggctcgcctcaaccgctccactcacaccctcggctccttcggataccaggcgccggagtatgccatgactggtcacatgaacgataagagcgacgtttacagttttgggattgttctgctggagctcttgacggngaggaagccgctggaccggacgttgccgcagggtcagagaagcctggttaactgggtaagcatttttcttttctgggtttcacatttcctttttttttgtcttaatcact

SEQ ID NO: 51827 - DNA, 3551 bp, Oryza sativa
  Clone ID: PAT_MRT4530_54183C.1
acgccccgccttcgccgtcctcctgctcctctccctcttccaccttcctcccgccggaacttgacgaaatctgggaagcgagccaaggaggagggggaggagaaccccgccgccaccgcccgatctccccgtgcggcgccgggcgggggggtgcggagcgggagcctcgaccgcgccgatccggacaggggccaccagattcgccccgcgcgtgtgccggcgccgagcgcccaggcggcgttagatcccgccgcccggcccccccaccctcccccgtggcatgcaaagggatcagaggccacggctatagagtgatacatatatcttgctgctgtgcttttggggcctccggtcctgcttagttagaggagatgcagaggaacggagtgatggaatgcagtgtatgccactccaaggtggtggctccgagccccaggagtgtgtcgagggcatatgacaagcaccgcagcaagatatcgtccaagtaccgcgcgcttaacttccttcttgtgtcaggggactgcattttggttggcctccagcctattctagtatttatgtccaaggttgatgggaagtttcagttcagtcctatcagtgtcaactttttgacagaggttacaaaagttatatttgctattgtaatgctaataatccagtctagaaaacaaaaggttggggagaagccacttctgtcactttcaacctttgtacaggcagcacgtaataatgcactcttagctgttcctgctctcctatatgccatcaacaactacctaaagttcatcatgcagttatacttcagccctgcaactgtgaagatgctaagcaacctgaaggtactcgtcatagctatcctcctaaaattcataatgagaaggaaattctctataattcagtgggaagcccttgctctgttgcttattggaatcagtgtcaatcaactaagctccatacctgatggaaccaaatcttttggtcttgcagtcaccactattgcatacatatatacacttatatttgttactgtcccatcacttgcctcagtctacaatgagtatgctttgaaaagccagttcgacacaagcatctatcttcagaatttgtttctatatggttatggtgcaattttcaacttccttggcatcctggggactgtcatatttcaagggccagagagttttgacatccttcgaggtcattcaagggccacaatgtttctcatttgtaacaatgctgcacaaggcattctctcttcattcttctttaagtatgcagacacaattttgaagaagtattcatcaaccgtggccacaatatttaccggtctagcatctgctgcatttttgggacataccttgacagttaactttctcctaggcatctcaatagtgtttatttcgatgcaccagtttttctccccactggcaaaggtcaaagatgacaaaccagctggagcattagaaccggaagatgcacagaatcataggtcatccgactcttcttttgtaaatatgactgctggcgctgctgatgatgcaagccatcttactgcaaccgatgagagaaaaccattgttgcctatttagccttctgtttgaggtaggtatagaagaaattctttttgccatgaatcacacagaatttatgtagcatgatgagtaaaataaacagttgtaaactatagaatgaaacgaaatattcatagctccgtttcaggttatcctattttctcttctcttttttttaccccaacatttttggggcaaacattcggatggcaagacttccgaccctatacaaatacactcatactatacaaagttccctttgttcttttggcaaaatcgatgtatgttaacgggacacaattgtactgaacattcgtaccatttatactactgaactgtttttttcctaacaagctcagtgttctgctcagtacattttttttccttagatgatgcatcttcaggagaaaaaaaaagaagagaaacaactccatccaaaattgagcgatttactgtactactagcatactcttgcacgtctaactagcttgcacacatggccttaataaggccttctgttctgtttttttccccctgtggactcctaagctttgggaaagttttaccggtaccagtttatatcaaccagaggctttttggatatagtctctcttcaactattactgcaagaattgtatctcttgcatgtctaactagcctgcacaacgcaaggcatatacacggttgattcacacgaacaaatcaaaatgaacaagtgcaaaaaaaaaaaaaaatcctcgtggatcatcagaccacgccttgctggtctcgcacgacggcgtagttgatgacgcgggcaacggtgcccatcgatggccggaacgtagggtcgtactgcaggcactgcaccgcgattctccccagcttgagagctccggtaggaggatacttgtcgccaagattggggtcgatgcagtcctggaccctgtcttcagtcaaaattggagttgcccagttaaccaggcttctctgaccctgcggcaacgtccggtccagcggcttcctccccgtcaagagctccagcagaacaatcccaaaactgtaaacgtcgctcttatcgttcatctgaccagtcatggcatacctggaacatccccaaaccaacgaaaatttcagcaaaatcgttcgacgacccaatccaacaacaagaaagccatgacgagatcgatcagccatggccagacagagatcagctgggcttgtgtgtgtgcgtgcgtgcacgtactccggcgcctggtatccgaaggagccgagggtgtgagtggagcggttgaggcgagccatgtcggcggcctggctgaacatgttgtagtcggcgatcttggccctgaacccctcgaacagcagcacgttggtggaacgcacgtccttgtgcgtcaccgccggctgcaccttctcgtgcaggtactccagcccgcgcgccgcgtccagcgcgatccgcacccgctgctcccagctcaccaccgccttcgcctccccgccccacccctgtccgtccctcggcccgtgcaggacgtcgtggagggtgcccatggcggcgtactcgtagaccagcacgcggaggtcgccgctgatcgtgtaccccaacagcctgacgaagttctcgtgcttcagccgcgacgccaccgacagctgcttgaggaagacgacgttggacgcgtgcttggacggcttctcgagcttcttgacgacggcgggcctcgcgccgcgcatgaggaccctgtacaccttcgcgtaggagccctgcccgatgaggttctcgttcgagaaggagttggtgatctcgttcagctcgcgcacgggcacctccggcacctccactgtcaccacctcctccgcggccgcacggtccgctcctttccgtttatcatgatccactggataagagtaaagatcctcggactctttcttcccaatccgaggtaggcagccgttgcctccctccccgaacaagctcctcacgctctcccacaaccccat

SEQ ID NO: 51828 - DNA, 1470 bp, Oryza sativa
  Clone ID: PAT_MRT4530_54184C.1
atgtcttattctatgagtacggttatcgtcgtcaagagggaaaaagtacaacgccctgtgtactacgtcagcgaggccctccatgacgcaaaagccagatatccacagatccaaaagctactctacgtggtgatcatgacatcaagaaaactacgccactactttcaagcctacaaggttacagttgtttcctcttttcccttgggagaagttgtcagaaacaaggacgttgtcggccgcattgcgaaatgggtagtcgagcttagtcaatttgatgttcacttcgtgccgagaatagccatcaaatcccaagttctcgctgacttcgtagctgactggactattccagagaatagaccagacagtcaaatggataaagagacatggactatggcatttgatggcgcattcaacagccaaggagcaggtgcagggttcattttgacagctccgactggagaccagttcaaacacgcaatccacctcgacttccgggcaaccaataacacagctgagtacgaaggactcctcgtgggactaagagcagctattgcactgggtgtcaagcgattaattgtgaaaagggactcagaattagtcacgaaccaagtgcacaaagactacaagtgctccaaccccaagttaaccaagtacctcgccgaagtcaggaaactagagcggaaatttgacggccttgaggtacgacatgtctatcgaaaagacagcgtcgaacccgatgccctagcacggtgtgcttctagaagagaacctcttgagctaggaacttttctggatatcctgacaaaaccatctgtgaaagagtcacacgacgaaaataccacagccgattccgatatcaacttaagggctagagaggtcaacaacgtcatggcggacatcgagacaaaagacgactggcgaatcaagcttatcaaatttttgagcaccgatgagctacccgaggacgacgttgaggcagaaaagatatcccgccaggccagaatctattgtttgatcgacaaagatctatataaaatgggcccgaacgagatcctcaaatacgtttcgtccgacgacggcaaagcactgctcctcgacatccatgaaggtatatgcgggtcacacgccagcgggcgtactatggttggaaaagcttttcgacaagtgtttttctggccgaccgccctcaaagatgcttgcgacatggtgcaacgatatgaagcctgtcagttcttcagcaaacacacgaagttgccaacccaagcactccagaccatccctctcacttggccattgtcatgctgggggctcgacatactcggaccgttcccacgaggactgggcggctacaaattcttgttcgtggcaaacaacaaattcacgaagtggattgaagcagagcccacacgagaaattaaagccgacaacgccatcaagttcatgaaaggggtgttctgcagatacggatag

SEQ ID NO: 51829 - DNA, 208 bp, Oryza sativa
  Clone ID: PAT_MRT4530_54185C.1
aaaaaccaaaataccaaatcctttactttattttgggggataaaaaaataaaaaattaaaattgcacatgcaaatttgcaaggaccccttttatatttgaaacactcaaacactgaacctataaacttcaagttttcaactagccccttgttggggaaatgacccaattatttatttgaaactactcaaacgcgcacctaaacattga

SEQ ID NO: 51830 - DNA, 1771 bp, Oryza sativa
  Clone ID: PAT_MRT4530_54186C.1
atggcgacttggattcttggatggttgctatggcttcccgtgtttctcatctccctctacctcgtcgacatccttgcacactcctgccgccgcctcccgcctggaccccgcccacttccgttcatcggcagcctccacctgctcggcgaccagccacaccgctcgctcgccggcctcgccaagaagtacggccctctcatgtcgctccgcctgggtgcagtcaccacggtggtcgtctcctcgccggaggtcgcccgcgagttcgtgcagaagcacgacgccgtcttcgcggaccggtccatcccggactccatcggcgaccacaccaagaactccgtcatctggctgaaccccggcccgcggtggcgcgcgctccgcaggatcatggcgacggagctgttctcgccgcaccagctcgacgcgctccagcagctccggcaggagaaggtggcggagctcgtcgaccacgtcgcgcggctggcgcgcgagggcgccgcggtggacgtcggccgcgtggcgttcgccacgagcctgaacctcctctcgcgcaccatcttctcgcgcgacctgaccagcctcgacgaccgtggcgcgtccagggagttcaagcaggtgatcacagacatcatggaggcagcggggagccccaacctgtccgacttctacccggcgatcgccgccgtcgacctgcagggctggcgccggcggtgcgcacggctgttcacgcagctgcaccggctgttcgacgatgagatggaccatcgtaagctgcatagccgccatggtggccctggagagaatgggaaggagaaggacgacttcctggaggtgctcctgaggctcggcgcgcgggacgacgacatagcagggcttgacggtgacacgctccgctcgctcttcattgacttgtttgctgctgggagtgacacaagctctagcacaatagaatgggcaatggtggaattgcttaaaaacacattatcaatgggtaaagcctgtgatgagcttgcccaggttgttggatcaagaagaagaattgaagagtctgaaattggtcaattgccatatttgcaagctgtcataaaagagacattgagattacatccaccggttccactgttaccacatcgagctaagatggcgatgcaaataatgggttatacaatacctaatggtacaaaaatattgataaatgtgtgggccataggtagagataaaaacatttggacagaacctgagaagttcatgccagagagattccttgatagaacaattgacttcagaggtggagatttagagctcatcccatttggtgcaggccgtcgaatctgccctggaatgccattagctatttggatggtgcatgtggttcttgcatcactattaattcatttcaaatggagactaccggttgaggtggaaagaaatggaattgatatgacagagaagtttggattgactctagtaaaagctattccgctatgtgctttggccacaccaacttaagtcaacgagcccctgtttgagttagaataatggactgctttttgtcaactcaagcattgtatcatgcccggtattattgatgtgaaaataaaaatacatcatcaatgaaatttgtgggtatttactacttcccaatgtttatcaatagtcctgagaaaattacccagctatatatttgtattagaataaaccctcgtggggaaaaatgtagaaatgttagatgtcaaagtatacatgaagtgaagtgatatgtatgtctttcctc

SEQ ID NO: 51831 - DNA, 300 bp, Oryza sativa
  Clone ID: PAT_MRT4530_54187C.1
atgcgcatacctctggagttggggcatcagcctcgcagacggcacgcgcgatcgccggagctcaaggcagtcggggagcccgttgatctggtcatcttcttcgtcatcttccccttgccatcttgctcgcttcgtgctggtgctggtgctggtgctggtgctgctatgttgctgagtttgctcgcgccgcgtggggcgtggccgcatccaatccctctcaccaccccagaggacggattggttgcggcgctcgccggagggcatgggagggaggcggcgccggcggcgcctaagagttga

SEQ ID NO: 51832 - DNA, 1002 bp, Oryza sativa
  unsure (1)..(1002): unsure at all n locations
  Clone ID: PAT_MRT4530_54188C.1
attcggctcgagttcttggtgtccgttgagcgcctgtccatactccctttttgtgtncgncnagggtttctcaaatttaccaattttcgacacccattgtgtgatttgcgctcagtgtccttgtttatctgttcagatgtggtgggtcgtctattttttcattttcattgtgcaatctgtggaagaaagagatcgtggtctgcaatcgcattgtgtgaatagttgtgtcagatctaaagccttttttcaatgattgtttaccggtcatttgaaagatggagaattcttcgtcttcgcagtcgagcaaggtgacagtgttaatgaatatcaatgacatcttgtgtcgttgcggtgcaccttgtcgtattcacacttcatgaaatacacaaaagcctagaaggaagtttgttagttgcagcaaatatgatggacacactaagtattgttgcttttttttcctggtgtgaattggtagatgaagtggagtagaaggaagaattgaatgctttagttgcagcccagttggcagacattaaggaattgcaggataaagttgagaaaatgaaggatgatttgaatgaagctagtaggaaggttgaattggggaatgaaatgttagtgttgtgaggaacaagagtgacgaaaatggtgttgaatgtaggaaaattaggttttttgtatgcataatgttgcttttgttggttgcaagattgatgtatagttcctgaggacatgttatggtgtattttggttctggtcatgtagttggtacttatgttttgtatcattgtctgctagggtttttgtccatggctttgtttactttatttaaggacaaagttttaggagattatgatttttgttatttaattattgggtttagtttgtataactgttggtattgtgatgtaaaagaccttgttttgttcaattgtgattaaaatgttgttgtgtagtaaaaaaaaaaaaaaanaaaggacaactctgcagagaagtgagctc

SEQ ID NO: 51833 - DNA, 705 bp, Oryza sativa
  Clone ID: PAT_MRT4530_54189C.1
ctaaaatgaggcagttagtggcaagttgtcaatcttggtacccttggtaagtgggatatcatagtcgaaagcatttggtggtaagctggaaggaaacgccaagcatggtattctcatgatgacaagcatggtatccccggccaccttccatggccgccggccgccttttccgccgccgttccgccctctcccgtggccggctccctccccgcgcctccagccgcctctgctgtcgtgcccgtgcgccggccggccgcgccgtctccttcctcggcgtcgcagctgcttcccctccacctgcatcgcctccgtttcgcgcggagaccaccggaggcgtgttcccaccggcgtccagtggcatcgccgccactgcaccgcctcctgtcggccgttcgccgcgcctaaagcgttggccgacgctgctgtcccctccctcggcacggtgacgtcgccatcaaccccgaccgctgcccgtcttcgtccggagaccgccgccgccgcgccggcctctccttcctcctcgtcgacgtcgccttcggcagcccctaccgccgtgcctgtgcgccggccgacgtcgccatctccacctccggcatcgcagcggcaaggtcgccctcggcctcgcctccccttcgaccgaaccccgccggtgtttgtcgtcgtcgtctccgtccgacgtcgccatcccctcctccggtcggccat

SEQ ID NO: 51834 - DNA, 464 bp, Oryza sativa
  unsure (1)..(464): unsure at all n locations
  Clone ID: PAT_MRT4530_5418C.1
tcgccggngtaactagccgggcgcgagcggggggtggggcccacggcggcgaccggcggggcgacgccggccggccgccatcgatccagatgcctacgtgctttgcaacttgcaagtggcgggtgccggttgaaagcttgcgccggtagctgtgtgcaatcgtgacgttgaccggcaattatagngggtcaacgctgttggacgccagccagccgtgcgtgcatgacgattattagtagagttaattaattaagcacctgacgctggcagctagctgtcacgtactagtactactggtagattagctagactgaatattagtagtaactagtgctattgttttctttagataatggattaattagtggttaattactagtactactacacatttcaacacatatgtactggtagtagttattatatggagtaacattggtagctctcttaaaaaaaaaaaaaaa

SEQ ID NO: 51835 - DNA, 123 bp, Oryza sativa
  Clone ID: PAT_MRT4530_54190C.1
ctccgtctctcctcgtcaccacaccactcctctcgccatggccgcgcactccgtggccgccgagcacgccaccattgccgtgcgcgcggttgcagacgtgccagcgcccagcgccgacggagc

SEQ ID NO: 51836 - DNA, 561 bp, Oryza sativa
  Clone ID: PAT_MRT4530_54191C.1
atggcgacggtggatggcccctttcctcgtcgagccatccccgtggagccgatgcggcttgcgcgggcagcggatccagccggcggattcagtcacgggacaagcgcgggcggtggagggaagcgtgcggatggcggattcggccgcggcgatggtcgaccggccgccagatggctgcgggagcggcgcgggcagcggattcagccgcggcgattgatcctccaaccccctcccctctcccgacgatgcagcagttcggggccacctgacgaccgtggctcggcgggaggcaactgcggctccgcggacggtgacaattgcaaccgcggcagccacagcgacatctgcagcgagctccctcctttgccgtcgcagctcgacgacagcaaccggcgattggggattggggatttcgccagcgctggtggtagacatcgtgatgtagaggagaataccttggtgaacaagatgcagtaccgcgagcagtcatgcggagaacgtgctcccaaaaacttgatcgactgcctacctatacatgtactcaagcagacggagttctag

SEQ ID NO: 51837 - DNA, 559 bp, Oryza sativa
  Clone ID: PAT_MRT4530_54192C.1
acaccccttctcctttgatacaaatattgaatataccctcgaacttccagaggaaacaggatatgaagctaatatcgcaatggagaagatatgaatgattgttgttaatataactctcactatacagttacacttgagacaaagaaacaaagttaagcattgaactggcacttcctagtggaatatgaaaactccccggctatatctactcggagataagagaggtgaatatatatagttgatcgcattcattttgcagactgggactctacgatctcgtgcaattgcaagatatgctttctaattgagaacacaacttatttctctttgtagtttcagaatagtccatgacttcatgttctctgaaaaccttcaatgtagtattttacaattcttttacatccttcggtgttaattaacatacaagaacttcaagtgcttctaaaacatatcaactagctagctcatttttcaagttcagtatgggtagtttgcaacccgtaatgtgtggggacagctccaccatcactgtttgatgtaaaaaaaaaaaaaaaaaaaa

SEQ ID NO: 51838 - DNA, 264 bp, Oryza sativa
  Clone ID: PAT_MRT4530_54193C.1
atggggcggggcggcagccgggtggaggaagggaataatgatgtggagaacctgcagcagccggagggagaggaacggtcggagaaggaggagaacagcataggagccggcggctggagagcgtggaagagcgccgaccgccgctgcttgatggtgcgggaccaactcgcgaggcgtgatttgtggaggggcgggtacccgacgggtcccgcccccaacggggaaattgccatccctaccctaaacaaaatcccggggggttaa

SEQ ID NO: 51839 - DNA, 603 bp, Oryza sativa
  Clone ID: PAT_MRT4530_54194C.1
atggcgacggtggatggcccctttcctcgtcgagccatccccgtggagccgatgcggcttgcgcgggcagcggatccagccggcggattcagtcacgggacaagcgcgggcggtggagggaagcgtgcggatggcggattcggccgcggcgatggtcgaccggccgccagatggctgcgggagcggcgcgggcagcggattcagccgcggcgattgatcctccaaccccctcccctctcccgacgatgcagcagttcggggccacctgacgaccgtggctcggcgggaggcaactgcggctccgcggacggtgacaattgcaaccgcggcagccacagcgacatctgcagcgagctccctcctttgccgtcgcagctcgacgacagcaaccggcgattggggattggggattttttcgcctcctccagtactaatgttccctcctcctccagtagcgccagcgctggtggtagacatcgtgatgtagaggagaataccttggtgaacaagatgcagtaccgcgagcagtcatgcggagaacgtgctcccaaaaacttgatcgactgcctacctatacatgtactcaagcagacggagttctag

SEQ ID NO: 51840 - DNA, 1035 bp, Oryza sativa
  Clone ID: PAT_MRT4530_54195C.1
atggcatcgtctcgccccatctcggagagcaccatcacgaggtcgacgtgcgcgacgcggacggcgcgcgccacgcaccagttcgagatcgtcgggtacagcctcaagaggtgcctcgccgccggcgagttcgtccggtcctccgccttcgccgcctgcggctacaggtggtccgtccgcgtctaccccggcgggttcgggccggcgcaccgggagttcgtgtcggtgttcgtcaagatgatgaccaacaggggcaaggcggcggcgcggttcgacctccggctgatcgaccgcgccaccgggctgccccgctcggtgttccgggcggcgcagccagtggtgttcgactactccgtcaagcacaagaagtgcaagggcaagcggggcacccgcgcgttcatgcggcggcgcgacctcgagtcgtcggcgttcgtccgcgacgaccgcctcatcgtcgagtgcgtcatcgacgtcgtcgtcgccaacggcggcgacgacgacacggcggccgcggcgtcccccctcgccggcgtgccggcgccggacctgtcgaggcacctcggcgagctgctggagcgggcggacggcgtgggcgcggacgtcacgttcgacgtcagggggcaacccttcgccgcccaccggatcgtgctcgccatgcgctcgccggtgttcatggcatcgctgtacgggtcgatgagggagcaccgcgcgccgcggatcgccgtcgacgacatggagccggaggtgttcgacgcgctcctccgcttcgtctacagcgacacgctggcgctccccggcgacctcggggaaggcgagtacaaggagatggtgcggcagctgctggaggcggccgaccggtacgccatggacaggctcagggtgatctgcgagctcatcctctccaggagcctcgacgccaagaccgtcgcggcgacgctcgccatggctgaccagcacagcactactgcgacgcgctcaaggatgtttgtgttcagttcatggccgttgggttggatgaccacaattaatgattga

SEQ ID NO: 51841 - DNA, 200 bp, Oryza sativa
  Clone ID: PAT_MRT4530_54196C.1
ctccctccgctcgctcgcccatcgcgccaggtgggctctctggacaccagccgttggatgactgtggcgttctctgctgtgcgcactgtcaagaaggccattgcagtcctgattagtcgtcttgactcgtgctggttccacggacaagcttgttgccatggatactcccagggctccaatcctatatgcggctgtgcccg

SEQ ID NO: 51842 - DNA, 384 bp, Oryza sativa
  Clone ID: PAT_MRT4530_54197C.1
atgcccatggcgagggccatgtatggcaactgggcagggcaaattgtggtacaactatcaatcttccaggcaatagtgtggctcacctcactcgtggtggtcctggaagtaaggaaagctttcgtctccgacgctcatgacgagtctaacagacatgaagaagggtccttcatagatgatgatacggttgtcggtggctcgggtaccagcgaagatatgcaaagcctcgaagagggggtttcagatgccacgaaccaagatctcaagggggaggaggcagtgacagtggcaggggtcgcacctcactttgccaccagctttggaggggtcggtgcaaataatgtcaagatcagggctggggctggctatgttcagtatgggtag

SEQ ID NO: 51843 - DNA, 228 bp, Oryza sativa
  Clone ID: PAT_MRT4530_54198C.1
atgccgcatgcgcggctgacccgcgggactgcagtgccgcacggccaagccatggaccaatgcaacacggtaccgttcgtccacgacaccggattgtcccagcagacggatatatgccccgcgagcctcaccaccgccggatccactgccttcgtcgctgtcacatatgccatcgccatcgccatcgccgccgtggcaccattgctgagagcactgcggtggaggtag

SEQ ID NO: 51844 - DNA, 1812 bp, Oryza sativa
  Clone ID: PAT_MRT4530_54199C.1
atggctgaaattccatacggcctagggtcacacatgatagggtgggtggacattggaaaaatcttgtccgcgatagcaccgctctatttcgcccttgtattggggtactgctcttccaagcggtggtggcgaatcttcacggcagaagattccgaagcaataatggtcgcttggtttgctcttccctttttcacctttgaatttacgctccaccttgatccctacaatgtgaggtacagccttatagcagctgatagcatatcgaagttaattatagtcatcgtaatcggcattggtgttgggttaatattccggaaagagggattatgcaccgctgtcatcgactggtgtataagcggcttttctcttgcgtcactcaccaattctctggttgtgggcgtgcccatggcgagggccatgtatggcaactgggcagggcaagtcgtggtacaactatcaatcttccaggcaatagtgtggctcacctcactcatggtggtcctggaagtaaggaaagctttcgtctccgacgctcatgacgagtctaatagacatgaagaagggtcctacatagatgatgatacggttgtcggtggctcgggtaccagcgaagatatgcaaagcctcgaagagggggtttcagatgccacgaaccaagatctcaagggggaggaggcagtgacagtggcaggggtgaatggtgctaggttaccgctcttcaagtcggtggcacgcaagttagcctgtaatcccaatctacacgccagtgtaatcggcatctcctgggcttgcatctccaataggtcgcacctcactttgccaccagctttggaggggtcggtgcaaataatgtcaagatcagggctggggctggctatgttcagtatgggctgcaatacctcagtctatttcatccttcatatttgccaaggaatatggattgcatgcagacgtcctgagtacagcaaaactgggggtgcacgtgtaccagtcaggttgatctgccggcatggtactgcgtggagaggggcgacgaaggggcacgtgcgagagcgtgatctcatgatagggtgggtggacattggaaaaatattgtccgcgataacactgctttatttcgcccttgcattggggtactgctcttccaggcgatggtggcaaatcttcacggcagaagattccgaagcaataaatagaatggtcgtttggtttgcttttccatttttcacctttgaatttaccctccaccttgatccctacaatgtgaggtgcagccttatagcggctgatagcatagcaaagttaattatagtcgccgcaatcagcattggtgttatgttgaaattccggaaagagggattatgcgccgctgtcaccgactggtgtataagcggcttttctcttgcgtcactcaccaattctttggttgtgggcatgcccatggcgagggccatgtatggcaactgggcagggcaaattgtggtacaactatcaatcttccaggcaatagtgtggctcacctcactcgtggtggtcctggaagtaaggaaagctttcgtctccgacgctcatgacgagtctaacagttatgaagaaggatccttcatagatgatgatacggtcgtcggtagctcgggtaccagcgaagatatgcaaagcctcgaagagggggtttcagatgccacgaaccaagatctcaggggggaggaggcagtgtcagtggcagtggtgaatggtgccaggttaccgctcttcaagtcggtggcacgtcgcacctcactttgccaccagctttggaggggtcggtgctaa

SEQ ID NO: 51845 - DNA, 156 bp, Oryza sativa
  Clone ID: PAT_MRT4530_5419C.1
atggccatggccacaccatggccttggcccggccagccggcgcacgcgctcgcgcgacagtctgctcactatgtcaaccggaggcggcattggcactcgcagggagtaggcggaggtagtgagccgtcgtcgttctgcccggatccggcaccctag

SEQ ID NO: 51846 - DNA, 1716 bp, Oryza sativa
  Clone ID: PAT_MRT4530_541C.1
atgataggacaaccatatgaaggagctgatcagactcctgcagcatcaggagtaaactatacttctcctgtggccacaaaagggcaagagcgccaatataatgaggaaaatgtggaagtggtgaacattgacttgtcttccaatttcttgaccggcggaattcctgaagacatagtctctcttggtggattagtaaatctaaatctatcaaggaatcacttgagtggacaaattccatataagattggggccatgagaatgttggcatcgcttgacctatcagagaacaagctctatggcgaaatcccagcaagcctatccagtttgacatttctaagttatttgaacttgtcatataatagtctcacaggaaggataccatcagggtcacaacttgagaccatctacaatcaacaccctgacatatacaatggcaacagtggtctctgcgggccgccacttcaaaagaattgttcgagtaataatgtaccaaagcaaggttctcagcctgtacaattgctcacacacacacacataaacctcacaaaacttgagcaccttggtctatcaaggaactactttggccatccaattgcttcaagttggttttggaaagtaagaaccataaaggaacttggtcttagtgaaacctatcttcatggtccatttcctgatgcactagggggaatcacatccctccaacagctagattttaccaataatggtaatgcagccacaatgacaataaacttgaaaaacctttgtgaattggcagcactatggcttgatgggagtctatcgtctgggaacataacagagtttgtggaaaagttaccgcgatgttctagtccattgaatatattgagtttgcaaggcaataacatgaccggaatgctgccggatgtgatggggcacataaacaacttatccatccttgatctttctaacaacagcattagtggatctataccaagggggatacaaaatctgactcagttgatttcacttactcttagttctaaccaactcactggacacataccagtgctaccaacaagcctcacaaatttcgacgtcgccatgaacttcttgtcaggaaatttgccgtcacaatttggcgctccatttcttagagtaattatcctatcgtacaatcgcattacggatattctgtcgctagtgatgaaacatcaagaacttaactatcatgcagaaggaagttttgatctggtgggcattgacttgtcacaaaaccaattaactggtggaattccagatcaagtaacttgtctcgatggattggtgaatttaaatttatcatcgaatcacttgaaagggaaaattccagacaatgtcggggacatgaaatcagtagaatcacttgatttctcaagaaacaatctttctggtgaaatcccactgagcttatccgacttgacatatttaagctccttggatttgtcacataacaaatttgttggaagaataccacggggaagtcaacttgacaccctatatgcaaacaacccatccatgtatgatggcaacagtggtctatgtggacctcctcttcaaaggaattgttcaagcgttaatgcaccaaagcatgggaaacaaaacataagtgtggaggatactgaggctgtgatgttcttttattttgggcttgtgtcagggtttgtgattggtctctgggtggtgttctgcgccatatag

SEQ ID NO: 51847 - DNA, 239 bp, Oryza sativa
  Clone ID: PAT_MRT4530_54200C.1
cgtttgaattagtcagctagaattgataattgtccattcgacaacaggagatgtctctttcagagaagctgttgattgaaaacaatttattggacttgagaaaagcaagatagctgactaaactggtgtaaagtaaggactgaatggagtaaatctagaccatacatggtctatttctcttgcggaatctcttttagaaagtgaattaggctatagctgttaaattgcgagtcgaagca

SEQ ID NO: 51848 - DNA, 203 bp, Oryza sativa
  unsure (1)..(203): unsure at all n locations
  Clone ID: PAT_MRT4530_54201C.1
cnttctctccccgtggtcccgagtcccgacggctgctgcnaggttgcctcaaatntccccaaggccatcgcacgatcccccacacactctaagcttgaagtgtctttccttcctttccatggccgcnatgtatcgtcccgatccggcgaacccngcngcccgcggcccgcgcctngtcgtgctcctcctcgttgccttcttcg

SEQ ID NO: 51849 - DNA, 300 bp, Oryza sativa
  Clone ID: PAT_MRT4530_54202C.1
atggaagaagggcaaacaacacagacaggcagacacagtacccttgggaggaagaagcactgcggtatttatgcatgtgaatttgtgaagggctactactactcaacacatggtattccgtgcaatctttggtactccaaatcggagaggaggagaccagtggctctaggagtgttcgattccaatgtggtggactggtcgttgcctcttcggctgctgctagattttgtgctcttgtacggcgaagagaatattgtttttatgctcgtggtacgctcataccacctttctgggtactaa

SEQ ID NO: 51850 - DNA, 126 bp, Oryza sativa
  Clone ID: PAT_MRT4530_54203C.1
atggctgacatggggcttgaggcgtgcagctggaggagtgacgacgtctccggtcgtggaggcaagtgcgtgttctgcttgctgccgctctaccttaggaaaatgaggctgcatcgcctgctctag

SEQ ID NO: 51851 - DNA, 244 bp, Oryza sativa
  Clone ID: PAT_MRT4530_54204C.1
ttatttggagaaagattttttaggggtaaaaccaagccaaacctggtcttaaggtggggctgcatttaaaaacaagggggggcgccttttgggttttgggggggggtttaatggtttccaaaaaagcgggcgttaaaaaaaagttagggcgcctccctttgagggggaaaatttggggggggggggttatttccaaaggggggggccatgggcaggaaaatgccctcaaacctttttggggttt

SEQ ID NO: 51852 - DNA, 853 bp, Oryza sativa
  Clone ID: PAT_MRT4530_54205C.1
caccccccaatcgctggcgcctttgactcccgccgcgggcggcgcagcgcagccgatggggatccccgccgcctcagtcgcggcccggacagccgtcggcgcggcgctggccgccgtcatcgccgcgcgcgccgtccgccgccgctcgctggacggctccggcggggcagccgggttcgtcgtcatggcgatccacctcgcctgcgggtacaggtacggcgcgctcgtgctggccttcttcttcacctcgtccaaggcgaccaagatcggcgcggacaggaagcgccgcatcgaggacgacttcaaggagggcggccagcgcaactggatccaagtcctagcaaatagcttaatagctactatattggtcatcatattggcaacaatgaccggaggacaagatcaatgcctggactcccatgagtcaaaggttataactggtattattggtggcatcattggtcactattgctgctgcaatggagatacttggtcatccgaacttggtgtgcttagtgatgaacagccacgtcttattactactctgaagcctgtcaggaaaggtacaaacggtggagtgaccttacaaggccttcttgctgccacagcaggtggcctaatcataggtctgacttttgtttttgttggactgttgactgtggagtgctcatttgacgtggctcttcgacagcttctagtaatacccatctctgctactgctggtttgcttggcagtctgattgattcagtgttgggtgccacactccagttcagtggatactgcagtgttcggaagaaggtacttccacttatagctcaaagatttgatccacaactttgtttctatgattga

SEQ ID NO: 51853 - DNA, 261 bp, Oryza sativa
  Clone ID: PAT_MRT4530_54206C.1
catcaaaaaaagattttattagcaaagaacgggggataaatgattccacatgccgactcgatgaatgatgctaattattaccaggggtaaacggactaaagttggcgtaaacaaaattctagctgaaacaacaccagcatgaactggaatgcacaattggtagaacagcatgccttatgtctattttacatggtgacacgagaatactcactttcggctgttgcttgaggatagattcctctagtggttctaccagtttaa

SEQ ID NO: 51854 - DNA, 903 bp, Oryza sativa
  Clone ID: PAT_MRT4530_54207C.1
atgatgctagtcgtcctagctcttctcggcgtcgcgacggcggcggcggcggcggccggcgacgttgtgtcgtacagctacccggccttcaacgcgacgacgacacgcgacgacagcctcgtcgccgccaccaacgcgtcaatcctcaccaccgcccgcctcctcttcgaccccgatttcccccacggcttcaacgtctccgagggcttcctgctcctctccggcgacatcgacgtctggcgcgacggcgtcggctccgccggggcgccggctcgcgaggcatccttcaacacgacgttcaccgtcgtcgccgccgcctctcccgtcgcgttcgtcgtcctcctcgacaggtatccaccgctccttgaccagagtggcctccgtgggagcaacgtctcatccgccgccgatggcgacgacggcaacgccacgaacagcctcgtcgccgtcgaggtcggcacggtgaagtcctacggcagagagtcccccgacgtcggcctcaacgtcaccgtcacgccaaaccgcactacggcgccgagcggcagcacggtgtggatccagtacgacgccgtcgagcaccgcctgtcggtgcacgtcgccgccgccggcgagccacggccatctaatgccctcctcgacgtgccgctatacctcgccggcgggcgcaccacccagaccgcgctcgtcggcttctttggcgggacgatcggggatatcatcgtcggcgtccgtggctgggagctgaccgtggagaggttgcgcggcgatgacggcggcggggggaagaagaggacgtcgtgggtggtgatactgctggcggtggtcgggtcggtggcgggcgtggcggccatggtgtccgtgctgggggtgaagaaatgcctcctgctgcttctgcagcagtag

SEQ ID NO: 51855 - DNA, 411 bp, Oryza sativa
  Clone ID: PAT_MRT4530_54208C.1
atgcagagcgtaccgcggacatggagtcatcagcggtctgattcgaccatcaacgatgtcgcgataacccaggcagtgatcgggaagctcgtcaccggtgtgggctacctgtcgctgacgtggtcgacggtggtcctcctcggcggcttcgtctccacggtgcccattaacgagttttggttcctcacagctatcagcctagtgcttgcatccacgcaaaacaagtacttcctccgtttcacaatgaaaaataaagcaagactgagtaccaaccaccgtactcaacaagtcataccaacgggaagaggtgtacaattttatccacaagacacgattccacacatgttaccatgcgctgaagactaccgcgatactgcaaagggagaaaccgtgacaaaacccttcatataa

SEQ ID NO: 51856 - DNA, 547 bp, Oryza sativa
  unsure (1)..(547): unsure at all n locations
  Clone ID: PAT_MRT4530_54209C.1
cggtccgaaatcaccgatcgacccagcgcgtacgatgacgagcgggcgaccttttttttttttttttcacataacatgcttaaatgagtgcatcgttgatgcggggtttgatcttgtaggtcgaacacatatatcttgtctctatcatgcacaggtgctgtataatcagccgagctatatcagatgcaaatcgtttaccaggcataccatttgcatagagtccacccatttgtgaagcctagtacgttacaattgattaacaaccacgacatgtatcaacaagggtgctaacagctgatgctggtcatngacagctgttactgcaagtgcattactctcaatcacgtgattgtgctcatactacgggtgagcgaggtcgctgtcgcttactacgatatgacttaagtgtaacctaaatctttgatagcgtaaatctagccctccatatggagcatctatgctaactactacattgatatgaggaacattctcagcggtgtttgtttctggttctcaataaaaatattataatcgtttaaatgtaaaa

SEQ ID NO: 51857 - DNA, 267 bp, Oryza sativa
  Clone ID: PAT_MRT4530_5420C.1
atggatgagctcaaggattggatatggcaaaggtggcagagactgcttacgcccgaggacatcatcactacgccaagaaggatgggttacgttgaggacgacaagggttacatcgaggaggaatcagcccatgcccaagcagcagctgtctacgccaacaagaagatgatttatgctacaaaggctcaacttctaaggcttgtgcgacccaaccagtcaagatacgggttgcatggaatacatggttggaaagaggggcacgtctag

SEQ ID NO: 51858 - DNA, 437 bp, Oryza sativa
  unsure (1)..(437): unsure at all n locations
  Clone ID: PAT_MRT4530_54210C.1
cccactcgtnctctgactcttagtcggacccatctctattacatagccttcttcatgtgcgggggcatttaatctgggaggtaaactgtaaaatacattcattatccattatgttccactctcaagtttgacttaagcttcactcctagcctactatcaaaacacaccacactcatcattatattgtacaaccaacaactgcatttacttaaaaacactatctgtgatcaaacaacaacaagccattaacctttattattatctttgacccgaattcttcaccattttttacactaatttaccattttaaagtaatattgctatcctttattcgagttataaaccattttaataaatcttcacgttgtttaatatacaaccgatcatattaaaataacatacattttatattttacatgaacttaaatattcctcaa

SEQ ID NO: 51859 - DNA, 207 bp, Oryza sativa
  Clone ID: PAT_MRT4530_54211C.1
atggttgacaagtggaagggttgcaaaatggaaggcactttagacaaaataattggtgatgatagtccactgaaggaatcatctgtcatgacccgaggccatgacgagataaacatcgtcgggagaatagccgggcagcatcagctcctagagaagggatgcattggcctacggcccaatgcccatgacatcatcactgggaagaca

SEQ ID NO: 51860 - DNA, 774 bp, Oryza sativa
  Clone ID: PAT_MRT4530_54212C.1
atgtcagcccctctcttcctctctctcctcttcttctctccctctcctcagttcggcagtaggcagggtagccagccggtggggaaggtgggagttcggcggccggcgacgggtgacgaggcggcggcggatctcaacgcgacgtcccccgccccgacgcggcatccgcccaccacatcgccggcgcattctcgtctgcaatgcaacatacacatcggggcaaaatcaatcaagaaaacgtcaaacgccattaatggcggcgtgttcgtgctgttgctgtttggtgttgcgtttgtgtcattgggtggtggtggtgctgtactgaccgtggaggttggcggagacggagccgcggccggagaagtggaagacgaggccaccgacgtcaggatcaagaccgcgtgcggctcgttccagagtgctgcaggggcgttcgcgtggatgagggagagtggcgttgatgccaaggccgtcgcggccggggccaccaccgtcgacgtcctctccttgctctcccccgcctcgccgccgaaccaccttgccctcctccccgccctgcgcgacccagctcccggccttgcgctcccgcgctgccgccacggcgcccccacccctgcctccgccgccgcccccgcccccgcctccaccgctgtcgtcgccgcggagcccccaccgccgcgtccagctcctcccccgccagctgccggccgcgcccatctccgccctcgccggccgtgccccgctcttcccccgccggtcgccagtcgggcctag

SEQ ID NO: 51861 - DNA, 164 bp, Oryza sativa
  Clone ID: PAT_MRT4530_54213C.1
aggcaagccccatccaacttatatcaacccatcatgttgcatgattaacatggacaatcaacaacagaggtaatggttaacaaaaaaaaaccaaaatggggctcttggtacgccttaacaaagggatttttggcatagaattatgcttggagcaatagattcta

SEQ ID NO: 51862 - DNA, 1014 bp, Oryza sativa
  Clone ID: PAT_MRT4530_54214C.1
atgagcgcggtggttcggcagtgggcaggacagcaagccggtgggggaggcgagagttcggcggccggcgacgggcgacgaggcgacggcggatctcaacacgacatcccccgccccgacgcgccgaagcaatccaccccaccgcccaccacatcgccggcgccttctcgtctgcaatgcaacatacacatcggggcaaaatcgatcaagaaaacgtcaaacgccattaatggcggcgtgttcgtgctgttactgtttggtgttacgtttgtgtcattgggtggtggtggtggtgtactgatcgtggaggttggcggagacggagccgcggccagagaagatgaagacgagccgtcgctcccggacccctccctcgagcagaggtgggacgtgctccttgcctatgcccagatcgcgctcgccgtggaccgggccaccgacgtcgggatcaagaccgcgtgcggctcgttccagagcgctgcaggggcgttcgcgtggatgagggagagcggcgtcgatgccacggccgtcgcggccggggccaccaccatcgacgtcctctccttgctctcccccgcctcgccgccaaaccaccttgtcgtcctccccgccctgcggaacctagctcccggccttgcgctcccgcgccgccgccgcggcgcccccgcccctgcctccgccgccgcccccgcctccaccgctgccgtcgccgcggcgtccccaccgccgcctccagctcctccccgtcggctgccggccgcgcccatctccgccctcaccggccgtgccccgctctttccccgccggtcgccggtcgggcccagctcctcccccaccgaacgtcgtctactcccagatcgctgctctccatcaccgtcgccgtggaaagggatgagagaggaagagaagagagaggaggggaagaagaggctgacatgtgggacccatatgggtcccacgctgagtcagctgccacgtcggacaaaaccagagtcaaaaccgccaaggacttag

SEQ ID NO: 51863 - DNA, 667 bp, Oryza sativa
  unsure (1)..(667): unsure at all n locations
  Clone ID: PAT_MRT4530_54215C.1
gcacgaggcctcgtgccgaattcggcacgaggcttcctagttgcaagcctgcaaccagcaaacttctcatgttaatagatctgaggaaccaagcaatatggagtaagcatcacaagatcaaagaatctgaatgtcaattgttgatgccgccatccaaggtaaagtggctaggcttgctcagctggagagagaagtgaactgatacccaaatcaccccattctgcgaatggtggaggaacgaagtgatcatgacctgatggaagcaacggatcccctccctgagcaggagggagagagctcgcaggtgatcacgttgacgacgaatgacagcgaagagataagcacactctcaagctggttttatcaagtgatgatctcctcctccattggcatctcagttcgtccctgcttctgccgctgtgcacacctcgctgctccgaggaggggtgctgatctaaggaagctcccactttcttcaattgcgtctcacgctctcgattcttccctctcagggagttttctagggttgatatgtggacnatcgaatgcagctatgctgttcaaaccactgtcaaaagatgcaggacaggatgggcagatgtttattcagtgttcttgttcaaatgaaacatatactattctggaagagaattgttttctgaagctc

SEQ ID NO: 51864 - DNA, 1203 bp, Oryza sativa
  Clone ID: PAT_MRT4530_54216C.1
atgaagttgttattaactgcttttgaaaaaattatctggcctaaagataaattttcacaagagtgaattattttgctttggtcaagcaaaacaatgttatgagcaatattcaaatattttttgatctaaaatataatagtttcctgttagatatcttggtatccctatgtattatagaaagcttagtaataatgattggttaacaattgagcaaagaattaagaaaaaaaactcattagttggaaaggtaaacatatgtctgttggagggagtttggttttgattaattatgtgttatcaagtttagttctgtttatgatatctttttttgagattcctaaaggggttcttcaaaaaaatgattttatagatcccgcttcttttggcaaggtgataaacacaaaaggaaatttagactaacaagataggacattatatgtcagccaaaatattagggtggagttggtgttcataatttagaaatccaaaaccggtgtttattgagcaaatggttgtttaaataaataaatgaacaatgtgtgtggtaagacttattgaagtggaaatatcttaggagtaaatcaataacccaggtcgaaagaaaaacaaggggattcccattattgtctggcctgatgaaggttaagagttccttaataagtatgggttcttggataattaataatggtgagcaaatcagattctaagaggataagtggttaggaaatttttctttaaatgacaaatagtcgtcgttgtcttctatagttagaaggaaaagttcttcaattgcaagtgttatgggttttgttccgcttaatgtttccttctagagagctttagttggtcataatttggtcaactgtcacaatttgtgtgcttcaattgtgcatattaatttaacagaggatgatgatatatttagatggaagtttcatcaaaatggtcatttttctgttagatcaatgtatttagccttaattaataatggatatagagagtggaataagatcatttggaagcttaagatgccccttaggttaatatttttatgtggtatctctttaaaggaattgtgctaacaaaagataatttggctaagaagaattgcaatggtagtttgagatgttgttttttatgaaaaatgaaacaatttaccatcttttcctggattgtcatttacagcagttcttgctgccataa

SEQ ID NO: 51865 - DNA, 401 bp, Oryza sativa
  Clone ID: PAT_MRT4530_54217C.1
gcctttttgcgtcagtgggcccactatcccttttgggggaagtttagctcaaagggggggacaataagagcgaagttcccctgacaaactgctgactagtgaggacatgaagtcccacattgaaagtatgctattatacggactatccaaccaagcagcataggatccatctcagaactaccactactatctgactgcacttaatggataccaaatgacatcaccccagactaactgctagcctttcttaacttatataatgcagcttctcagttatccatgtgcgtatggcttgttcacagctgctgatgtgcaatgactcagcacgacatcacgaacggtacatgcaagcataatggctgtacataatgtaataaggcattatatgattatacactgtc

SEQ ID NO: 51866 - DNA, 189 bp, Oryza sativa
  unsure (1)..(189): unsure at all n locations
  Clone ID: PAT_MRT4530_54218C.1
gtccgatcgagttggccggccaaccagttcctgaacaattatgaacagtgaacagtgaataattaagaacatgttgttatgtattgcatgctataccgaatttactagtgttttcaatgtatgtttgtatgaacctagctactggntcattgaaaaaaaaaaaaaaaaaaaaaaaaaaanaaaaaaaaa

SEQ ID NO: 51867 - DNA, 1466 bp, Oryza sativa
  Clone ID: PAT_MRT4530_54219C.1
cgggctgcaggtgtgcttctctacagcactcacatgtgtgtccaatctccatgatgttcacatcacatcgccacaacttgctgaggccaaagcagctgagcccatgcagcagtgaagaaggctcctcattcatctctgttgcttccgagctgagaacagctcgttcatacagcctcatgcagtgacttttgttgttgttctctgttgccctttttggagagatgactctgcctgccattcacatgatccaaccagtccccattgattggggccaatgtactttctttttccatgcaatcctgcccaactgcttgctcatcgagacacctgtgcttcttctacagcactcacatgattgcaagatgcatactaccatggttgcactctacattacaatctgctctatcctgttcatcgtgtccaagatgctcatctccttcctgctctacaagaagtgggctcgcaagaaacggatcatcgagaacagcctgacaggtggcaagatggtgatgttcaggtcggcggcgatgcagtcgctgagccccaagtcgttcctgaccatgatcatggggctctcgaacaaggacatcatcggctccggcgggtacggcacggtgtacaggctaagcgtcggcgagaaggcggcgttcgcggtgaagaagctgagccgcggcagcgccgagatggaccgggggttcgagcgcgagctggacaccatgggcgacatcaagcaccgcaacatcgtcccgctctgcggctactacgccgccccgcacttcaacctcctcatctacgagctcatgcccaacggcagcctcgacaccatcctccacgggaaggaggagacgaggagggcgctggggtgggaggcgaggcacaagatcgcggcgggggtggcgagggggctcgcgtacctgcaccacgactgcatcccgcacgtgatccaccgcgacatcaagtccagcaacatcctcctcgaccacaacatggaggccagggtctccgacttcggcctcgccacgctcatgaagcccaaccatagccacgtcaccaccgtcgtcgccggcaccttcggctacctcgccccagagtacttcgagaccgggagggcgacgacgaagggcgacgtgtacagctacggcgtggtgctgctggagctcctcaccgggatgaggccgacggacgagtcgtttcttgagaacggcacgaggctagtgacctggtgttttgttgctgagactgatcattcattagcagtgaccaatcatcaccaggtgaaggagacgatggaggagaagagggaggagcacgcggtcgacagcgcgctggagtcgtcgttcccggcggaggaggtgaagctggtgttcaaagtggcagacaagtgcctcgagtctgagccctgcaacaggccaaccatggctgaagttgtcaagctgctggagcaagccaagaacactactgcatga

SEQ ID NO: 51868 - DNA, 364 bp, Oryza sativa
  unsure (1)..(364): unsure at all n locations
  Clone ID: PAT_MRT4530_5421C.1
gctcctttgagtcttcgaccatttcactgatcccaagtagtagccataattggactcgaacatctgagaagctgcggcgagattgcatcaagcagtaggattcttgttgctagtagcttggctggcagtggtggcatgggggcgaggaggtggctggatgctgctgtcacctctgggctgctgcaacgctcctcttccacttggcaacgtcgcagtcgttcatcggagtgaactatgggacgatagccgacaacctcccgccgccgggtccgacggccaacctngctgaagtcgacgtccatcggcaaagtccgctctacgagccccagccggacttcgttgccgggttngggggttccaaaat

SEQ ID NO: 51869 - DNA, 564 bp, Oryza sativa
  Clone ID: PAT_MRT4530_54220C.1
atgacccttttacctgtgaagcaaccaatcaaccatagctctccctccccagctgagcaccccctgagtggcccccatgtcctctcgggccccgagcgccagaggccgcttcctccaccccaagcgacgaccgtcgccgtcgccgtcgtcacatcgacctcgagtgtcagcgagctcgcttctccgcatttgagctccatccgtcaccgccataacgtcctcatcacgtcgacccccaagcaccggcaagcttgcctatctgccctgagctttggctggtactgtcgtcatctcctcatatcgtccattcccaagcttcggctgttgcctcctctacccttcgccctaaggttgtcagcggccgcctctccgctgccaacaaacaatgggacgccagatctggtatccaacaagttggagaccaccggatctaaattccctagagcttcggccgccacctcctccaccctctcctgcatggtagccattgtctgcctcttcaccgcctccgagctacgagacaccagatttggtctccaggaggttggggaccactggatctga

SEQ ID NO: 51870 - DNA, 360 bp, Oryza sativa
  unsure (1)..(360): unsure at all n locations
  Clone ID: PAT_MRT4530_54221C.1
cacgaataggaggtanccgtcactcangggctgatcttaactgatttggcagtgcttgatgatcgatgaagaacaaccaacagattgcatatactcatacaagcaccgtatatacacaaataatcatattgagaaaggaagtctgtgtgttgtcgtgtatctttctgtaaatacatgtttgggagcagcaacgaacctagatatgtagggttgtttaatttcttcatgtggttcattagccattaaataagatgtattcgatttgttcattggtttattactgatcggtcagtgatcagttgtatatttggaatatcaaaacaatgaaccttattttgggttaaaaaaaaaaaaaaaaaa

SEQ ID NO: 51871 - DNA, 290 bp, Oryza sativa
  unsure (1)..(290): unsure at all n locations
  Clone ID: PAT_MRT4530_54222C.1
tcgtccacgcgtncgaagagagagagagagaggccgcttctctagtctagaccaaaggaaggaaaccaaccgagaggcgaggctaggagaggagaggagaggagaggaggaggaggagggagganaatatgnnagatatcatcaatcttggcgtacgaggggctaacaacagtttagcacagtacaaatagtaaactctactaacaggaatatgcaatgtaacggaacgggagtttactgacaaaccaatcattagacagagaactacttattaaccagctactattagt

SEQ ID NO: 51872 - DNA, 240 bp, Oryza sativa
  Clone ID: PAT_MRT4530_54223C.1
atggccatgccgggacggacaagatcttgcattcaaggtgggtcggaaccactgcggatggatgaactctacgttaccccgtcgcccgtgcacgcctcctcaggggcgacgcggggcctggccgccgccgtcctccacctcctccccttcgcctcgctgccacccgaccagcccatggcaaacggctgcctacaaggacggtggcgacggggcttcttccaccggtggcatcgtggttag

SEQ ID NO: 51873 - DNA, 1406 bp, Oryza sativa
  Clone ID: PAT_MRT4530_54224C.1
acgccgccaccgccacgggggttgggagtttctttcccctcctccaagccaagccggacgcggacgccaccgccctcgccttcacctccatttatacctccggcgagcgccgcggcggcggcgacgcacgcatccttccttcctcctcccgcaccaccggcgaccggtaaaacggagagacccgtgggcgagcttgttcgaggcggggcaccaccaccatgtcggcccccgcggcggtggagcagcggctgcaggcgctgcggcagaagctggggaggaagcagcacttcgaggaggccgtcgccgacctcgccgccgcggtccgggaccaccacgccgccgcctcccccgccctccgcgatctgatgtattctacagtttgccgtgtggcaactgtccttcagactagatatacagcacctggattctggcgtgctggtctgaacctcttcttaggtacagagaagctggtaactaatccttcagaaaaggagcaactgaagactttcattctgagggcccgggagcatcttgatgagaaagagaacgaggaatccatgccaaacaacagggaaacagatacaagatttctttttgaagggcatcttacagtgggacctgaacctccacctcctgcctggcttgttgcccagaatttagcacgagaacttagcattttagctgaaccttctggagatcaaggtgcgaacaacaacggagagtccagggctgaggagatggcacctgctgctgctataatgaatttcttaaacaccatgacagtggatggagacctagaagccgctttggaagaatctctgcagaatgtgatggcgaatcctaaggtgcctccagcttcaaaggaagtcgttgcgaatctaccagttgtaaccgtgacagaagaaatcatagctagattgggcaaagagactcagtgtgctgtttgccgggagagcttgctggtggacgacaagatgcaggagctaccgtgcaagcatcttttccaccctccatgcctcaagccatggctggacgagaacaactcctgcccgatctgccggcacgagctgaggacggacgaccatgtgtacgagagccggaaggagcgggagcgagaagaggaggaagacaggaagggcgccgcgaatgctgtcaggggtggggagttcatgtatgtctgaacatctgaatttcaaccgaacgtgattatctctctgtaacgatttcctgaaattcagagtgcactggagttgaaaattcatgtacaaacaacgtttgcttcggttcaccaccgtatcttcgttgaatgatactaccactatacagccagcttattacagcatcattgttcgttgatgtgcatgtgatgaagtacttgagttgagacatcgctaaaaaaaaaaaaa

SEQ ID NO: 51874 - DNA, 299 bp, Oryza sativa
  Clone ID: PAT_MRT4530_54225C.1
cggacgcgtgggcgccgtccgccactagagaggagagggagaaggaggaggaggcaaatcccagcaaaagaagatgcatatctttttgaataccctgacggtgaataccatcacccttgaggtggtgagcagtgaccccatcgacaacgttaaggccaaaatccaggacaaggaatgggatcctacagaatcaacagtgtttgatatttgccggcaagcaactggaagatgggcgcacactggtcgacttcaacattcagaaggagttaactttttacttggtccttaggcttaggggt

SEQ ID NO: 51875 - DNA, 1536 bp, Oryza sativa
  unsure (1)..(1536): unsure at all n locations
  Clone ID: PAT_MRT4530_54226C.1
cattcattcattctctcctcctccgttcctgactccaccactcacattcattcccttctctctcctccctccctcccccgcccctctgctcccctcgccggcgagcccaatggcggcgtccgccctcgactccgcctgggagggcctcaccggcagcttcaccgagttccagctcgccaccgtcgtcaccttcctcctccacgagaccgtcttcttcctctccggcctcccctccctcctcttcgagcgcttcggcctcttcgccaagtacaagatccagaagaagagcaataccccttcttaccagaatagatgtgtgctgcgtctcattctgtaccatgtctgtgtgaacttgcctgtaatggttttatcctaccctgccttcaaattcatgggcctgaggagctctcttcctctgccacactggacggttattgtttctcaagttcttttttactttgtactcgaggattttatattttattggggacatagggcactgcacaccaaatggctatacaagcatgttcacagcgttcaccatgaatatgctacaccctttggcttgacttcagaatatgcccaccctgctgaaattttgttccttgggttcgccacaattgttggtccggccctcactggtccgcacttgttcactctatggctgtggatggtgttgagggtattggagacagttgaagctcacagtggataccatttcccatggagcccatcaaatttcttgccactgtatggaggctccgactttcatgactatcatcaccgtgtgctctacaccaaatcaggaaactacgcctctacttttgtttacatggactggctgtttggcacggacaaggattaccgcaatgccaaggctatcgaggagaaagacgggaagcatttgtaaattgtgggggctactctctttctctttgtccaaatcatcgaaacaagggtttgacatctcgcagtggtgatagcattgtgttcatgggaggaaataggtgtcctagccacaggtatctatctcctgagatgatcctacagtttagattttctttccccaaattcactatactatcatcatgagacctttgtgtttctggaggccaccatgatgtaatttgtcataagcttaatttgatgcgtgctattttgtggtttgcttggacgggggtacatgccatgacagaagtgaactattcgaatcagaaagttgtcagattagtgagttaacgttgagatgaggtttactggttaaaggaaacaaatgcccgaggcgattaggctctctaataagttttagccggcttaaaaaaaaaaaaaaaactatggggggcgcggacccattgaactatatggaaaaattcctcctctgctgactagtgtacacgatcgctgggaacgcttagggtccatagcttgtgtcaacaaggatcatccttattatatcgaatgccttttgtcttcatagtgggagtgactgtcggctccgaaactcggcataagttatcgtcccctatccgtcgcctn

SEQ ID NO: 51876 - DNA, 368 bp, Oryza sativa
  unsure (1)..(368): unsure at all n locations
  Clone ID: PAT_MRT4530_54227C.1
aactgaaaatgttaacgtcgaacaactgcatctcttgctntatttatgcatacatgcatacattcccgagcctttggtttggtaacctgacaccataaaaggggcggaccaatttggtaggggcaacgcgtaattgagaccgcctggcccgttccttccttcatttttaagccgggtgaattgccagcgggccttgccaaaggggccggtacacccggtttaactgtacccaggactggaacaatacggcttggatacataacgcagggacaaaaggatcgaacattttaaaaaatctcatatttgttggggacaaaataacccattttggcttttggtgtgcataactacactaaaaacatttcctt

SEQ ID NO: 51877 - DNA, 882 bp, Oryza sativa
  Clone ID: PAT_MRT4530_54228C.1
atggcggcgtccgccctcgactccgcctgggagggcctcaccggcagcttcaccgagttccagctcgccaccgtcgtcaccttcctcctccacgagaccgtcttcttcctctccggcctcccctccctcctcttcgagcgcttcggcctcttcgccaagtacaagatccagaagaagagcaataccccttcttaccagaatagatgtgtgctgcgtctcattctgtaccatgtctgtgtgaacttgcctgtaatggttttatcctaccctgccttcaaattcatgggcctgaggagctctcttcctctgccacactggacggttattgtttctcaagttcttttttactttgtactcgaggattttatattttattggggacatagggcactgcacaccaaatggctatacaagcatgttcacagcgttcaccatgagtacgtaatgctacatcttggcctcatacttttacattttgttattgttccagttcttttaaataacaatttcctgggcagatatgctacaccctttggcttgacttcagaatatgcccaccctgctgaaattttgttccttgggttcgccacaattgttggtccggccctcactggtccgcacttgttcactctatggctgtggatggtgttgagggtattggagacagttgaagctcacagtggataccatttcccatggagcccatcaaatttcttgccactgtatggaggctccgactttcatgactatcatcaccgtgtgctctacaccaaatcaggaaactacgcctctacttttgtttacatggactggctgtttggcacggacaaggattaccgcaatgccaaggctatcgaggagaaagacgggaagcatttgtaa

SEQ ID NO: 51878 - DNA, 1914 bp, Oryza sativa
  Clone ID: PAT_MRT4530_54229C.1
atgggcacgggggggcgggcgcgcggcggcctgccgccatccacgcgggtcaacccgtgctcctccaagccctcggccccagacacttcggagatgggcgccgcgtcactggagtccatggcgtgggcgcaggccggggaggagcccgtggcgtccgcgccgctggtgcgcgccgccgcgccacaatagccggcgccgactcggcgccacgaaatgccggggcccaggctcttggtggcgtggccttcgaacaaaagggtggcctcgccagctacgcatctccttgcagccccacgttcgagggccggaggtttgacaaggtcaagattctgcgagattcgatgaaccggatgctcgaggcagggaacgagatcccgggatgctgcagaggaccaatgctcctccggtgcgccaccggcatcgcactctcaacgacgatcttctcttgcagggagtgcaagtgatgggcgatatccggttgcatcgtcgaccaggaggaatagtctacctgccagcaagtcccctcccccccatgcctcaccccgcctccaacaaaactgcatagctattcatcagctaagaaacaagaagcaattcacctccttccatatcgcaacgcgggacgacaccgcctctgtcccgtgcctccgcgacacaatcgccagcgacgactgggcggcgagaaaggccgcggccgaggctcttgctgcattggccttagaacataaggatcttctcgtcagctacaaatcttcttgcatcaccatgttcgaggccaggaggtttgacaaggtcaagattgtgcgagattcgatgaacaggatgatcgaggcatggaaggagatcccggatgttgaagaggacgaatgctcctccgggagtgcaagtgatgggcgatatccggttgcatcgtcgaccaggaggaatagtctacctgcaagcaggtcgcctcctcctgatgcctcacccagtgtcaacaaaaggcatagctcttcatcagctagaaacaagaagcaatcacctccttcatatcgcaaggcgggccaagcgaagaaccgtgattacaaggttgacattgctgttacaccagatgccaccccaatcaaagtggtgacagaggagaagcttctgaaaggaggcaatgtgagatcaagattggaagcaaggaggatgcttttccaggatggcgatgacagggcgaccaaggtggctggactgaaagcaggatcacgagtcgttccatatgaggagggtggtaacatggaagaaatttctgagattggtggcggatcagagaggtttcagacaggttacaaagacgagggattgtcagagattcggtcacaactgcttcagattgaaaatcagcagagcagtttactagatcttatccagtacatgttcattaacaagaaaggtgcatttgctataaatacagaggcatgttttttttcagtacagttcgatttttggcctttcaaaaacatgctgagtcttgttgcatatgccagacagaaatttatggggaaatctgagaatggcatgaattctttggagacaagggtacatggacttgagatggcattggatgaaatctcccgagatttagctgcctcgtcaggaaggacatcaaacagcgaagctcatgtcaactcatgctgcattctgaacccaaaattctggaggcgtcatgatgctagtagatactcttctagtttttctgtctctgatggtcgaaacagttcggaggggagcagaacttcttacaagtggggaaggcaaaagtttggagttcagggtggttttgtcaccaacccgttagctgagccgaacatttcgtctgctgcgagaacagcgactgctcaggaaggcagaagaaaggatttgactttaccaaagtcaaggatgggctag

SEQ ID NO: 51879 - DNA, 1395 bp, Oryza sativa
  Clone ID: PAT_MRT4530_5422C.1
aaaggtcaatcaatccctatgtatgtatggctgtatagttaatcttaccgaaaagaatcgaaagaatcaatagtctatggtccaggttccagcttgatggacatgccaaacaaatttgtaagtaaacatgcatgtatagggattaatcccccagaaaaaaattaagaagaagaagtgaaaaaaatgatcaattgatcagtgttaatcacgaaaagaattcttgagcttagctttgctcatgtcatgtcaataatggcagccgaccagcgcggcggaggcggtgagctgcagaattggcttcttgccgtcgttgaactgcccgccgagagccaggagcaccggcggcggcggcggcggcggaggagacacggactcctcgtcggacggcgccggcaggttgaggtcgagctccaggttgatgctcgtgcttccctctttcttggtgtccggggcggtggcggtggcggcggtggtggcggccgtggtcgccgcgcgctccggcggcgcgtgcagcggccggtggcgccgcatgtggccgcccagcgcctgcccggagccgaactcggcgccgcatatcgagcactcgtgcaccctcagcttgttgattatgctgccggcggcggccacgttgttcaggctcagcacggtggtgacgtccgggaccacgacggcgtccgcctgaggcggcggtggagacggtgccgacggcgtcgtcgtcgtcgtcagcggcggcttggacttgacgacgatggcgttggtgttggtgacgttgttaacgttgtcgtcgtcggcgccggggaggcgaggcttcttgtggctggcgcggtggccgccgagggcttggaaggtggggaagcacttgttgcacgtcttgcactcgtagacgtagaacccggccctgacgccgtccgccgtggtggccgcctccgtgtacttgcggctcgtgtacctctcgctcttcaccaccaccaccggcggctgcggcggcggcggcgcgggcgcgggcgcggcgagcaccggagggacggcggcgccctgagcaagcaggatgaggcagtgcgccatgtcctcctcctcggtggtggtgctctcggaggaggaggccggcgccgcgtggtggcgcggcctcttggtgcgcttgcgcttgacgaccccggcgtgcttgtcctccacggacatggcgacgaacgccagagcgcgctctgtgtcggcgtgatcggtggcttgcatggcgatcgatcgaaagcaagaaacgatggatggaatcgaagtggagaatgaatagcaagtttcgatctctttgcctccttatcaatggaggagaggaaagaggagtaggaatggcaaaaacctagcctagctccctagctgcctttgcttcttcttcgtcttaaa

SEQ ID NO: 51880 - DNA, 1755 bp, Oryza sativa
  Clone ID: PAT_MRT4530_54230C.1
atggagcggtcgacgacgacgacgacggagcagcagcagcagcagcagcaggggcggaggagaggcgcaggatggcggcgttgggcggtgctggtggcgacggtgtggatacaggcggtgacggggacaaacttcgacttctcggcctactcgtcggcgctcaaggcgtccctgggtgtctcgcaggaggcgctcaactacctggccaccgcctccgacctgggcaaggcgctgggctggtcgtcgggcctcgccctcatccacctccccctccccgccgtcctcctcctctccgccgcctccggcctcgccgcatacgccctccagtacgccctcatcctcgactacctccacctcccctacccgctcgtgttcttgatctgcctggtagcaggttgcagtatctgctggttcaacacagtatgctttgtgctctgcattcgcagtttctcctcgagcaatcgcccactggccctctccctctccataagtttcaatgggctaagtgctgcattctacaccctctttgccaatgccctctcccccttttccccatctgtatacctccttctcaatgcaattgtccctctcgttgtatctcttgttgcactgccagcaatactcctctgccacccacatgacggccacctccacgttgtgcccaagcatgacaaacatatctttcttggtctctacctcctcgcgttcatcactggcatatatctagtgatcttcggctctttcaacacaaccaactccactgcatgggtggtccttacaggtgccatggtcctcctcgccctccctctcatcatccctgcctcctccagttgttctcatgtggacacacatgaccctgaacctactgttcaactcaaccacgaagattcaagaaaaccacttttgctcaatagtgaccacagcacagagtccaatgccatgatgcagaaaacagtggaacacccaatgcaggattgttgcttggggacaatactggagaagggacacatgttggttctttgtgaggagcatagtgcaaagaagcttatccagtgcgtcgacttctggctatactacatagcctacttctgtggtgccactgttgggctagtgtacagcaacaacttggggcaaattgcacaatcatttcaccgggaatctcagctcaccatgcttcttgccgtctactcctcctgttccttctttggccgccttctctctgcacttccagacttccttcacaggaaggtttcatttgctcggacagggtggcttgcagctgcgttggttcccatgccaatggcgttcttcctaatgtggaaattgcatgatgtaaacactctggtagcaggaacagcgctaattggcctaagctcaggcttcatctttgctgcagcagtgtcagtgacctctgagctctttggaccaaacagcattggcatgaaccataacatcctcatcaccaacatccctcttggatcacttctctatggtcagattgctgccctagtgtatgatgcaaatggcctaaagatgtcagtaatagacaaccacaatggcatgattgacactatggtggtttgcatggggccaaagtgctactcaaccacattcttcgtgtggggttgtatcacattcctagggttggtgtcaagcataatcctattcttgagaacaagaacagcttacagtgctgctaatggtcagcaagttataaacaccacagccaagtttcgagttgacagaactccttga

SEQ ID NO: 51881 - DNA, 1878 bp, Oryza sativa
  Clone ID: PAT_MRT4530_54231C.1
atggagcggtcgacgacgacgacgacggagcagcagcagcagcagcagcaggggcggaggagaggcgcaggatggcggcgttgggcggtgctggtggcgacggtgtggatacaggcggtgacggggacaaacttcgacttctcggcctactcgtcggcgctcaaggcgtccctgggtgtctcgcaggaggcgctcaactacctggccaccgcctccgacctgggcaaggcgctgggctggtcgtcgggcctcgccctcatccacctccccctccccgccgtcctcctcctctccgccgcctccggcctcgccgcatacgccctccagtacgccctcatcctcgactacctccacctcccctacccgctcgtagctctgtgtcctgaattacagttaataaaactcgctatcaaaatacccatgccagtgttcttgatctgcctggtagcaggttgcagtatctgctggttcaacacagtatgctttgtgctctgcattcgcagtttctcctcgagcaatcgcccactggccctctccctctccataagcttcaatgggctaagtgctgcattctacaccctctttgccaatgccctctcccccttttccccatctgtctacctccttctcaatgccattgtccctctcgtcgtatctcttgttgcactgccagcaatactcctctgccacccacatgacggccacctccacgttgtgcccaagcatgacaaacgtatctttcttggtctctacctcctcgcgttcatcactggcatatatctagtgatcttcggctctttcaacacaaccaactccactgcatgggtggtccttacaggtgccatggtcctcctcgccctccctctcatcatccctgcctcctccagttgttctcatgtggacacacatgaccctgaacctactgttcaactcaaccacgaagattcaagaaaaccacttttgctcaatagtgaccacagcacagagtccaatgccatgatgcagaaaacagtggaacacccaatgcaggattgttgcttgggaacagtactggagaagggacgcatgttggttctttgtgaggagcatagtgcaaagaagcttatccagtgcgtcgacttctggctatactacatagcctacttctgtggtgccactgttgggctagtgtacagcaacaacttggggcagattgcacaatcatttcaccgggaatctcagctcaccatgcttcttgccgtctactcctcctgttccttctttggtcgccttctctctgcacttccagacttccttcgcaggaaggtttcgtttgctcggacagggtggcttgcagctgcgttggttcccatgccaatggcgttcttcctaatgtggaaattgcatgatgtaaacactctggtagcaggaacagcactaattggtctaagctcaggcttcatctttgctgcagcagtgtcagtgacctctgagctctttggaccaaacagcattggcatgaaccataacatcctcatcaccaacatccctcttggatcacttctctacggtcagattgctgccctagtgtatgatgcaaatggcctaaagatgtcagtaatagacaaccgcaatggcatggttgacactatggtgctggggttggagcagggacacacagaagccggtgtggatcatgaagagctccatgctggcacctatggcggcgccgcctaccgcgatcttgagattgtgaagggtacaggggttgaggggaagcaaaaggggtcctacatattacaacatgtgagaaatttgttcccccaatctactactagacattgtgaggcaaaactatctgtgctgggaggtgatcaagacttgttcgatgacgagtga

SEQ ID NO: 51882 - DNA, 366 bp, Oryza sativa
  Clone ID: PAT_MRT4530_54232C.1
tcataacgacgacgacggcgaccggaggcagacggggcagctggggacggtgccgccgaaggagcggacgccggagtcgatgcgtcggctggacagacgcgcgttctgtggcgggttccgcggcgcgttccggaggcaggcgaagcggcggtggagcatcgacggcctgcccatccgcccgccgtggctccggatggggagaggcgcgcgccggccgccgctcccgccgtcgcgggcggtcgcgccggccgcctctctccccttctctggcgccggccgcctcctctccccctcccccgcttcttccccgcgcgccgcagcgcccgctgcgccggcaaccgcgcccgctccgccgtcggccgccat

SEQ ID NO: 51883 - DNA, 305 bp, Oryza sativa
  Clone ID: PAT_MRT4530_54233C.1
tggttttttttttttttttttggggttttttttcgaaaccaaagtatggggaaaagtttttccaaaccacactttacctttagaaattaagacctttccccatatttgagtttagcttgatcaaactatttatttatttgtcggcaagccaacatttatcactttcacttattgagccggcatggggagaagttgagagcagttttaatgggggccaccatggtgaccgccggggggaccgccataaaagccgccgtgggggccctattgttcctgatgaccgccataaaagcccacatgggggt

SEQ ID NO: 51884 - DNA, 403 bp, Oryza sativa
  Clone ID: PAT_MRT4530_54234C.1
tggaggcggagttagacaaagctcattaaagccacgctgtttggattgactacccatctgacgcaactgagggtgatataaaagaggggagatgcccaattactattcttgacacggaagtagaccgtatgtcccaaccagacgtggggaaacaattggagcaggtcatggtctacaagtcaggggtcggacgacactgcaagacattgcctggacccgaacatggatggactgtgtgatacaaaaagggttatccagctcgctagcaagagcgccactgtagccctatacgacatgattgactgaccaaacatgaacctggagtgaatgggacatatccgttgtccacaatctagacgggcatcgccaacagtcgatggtaagcatacctgatctacagatg

SEQ ID NO: 51885 - DNA, 397 bp, Oryza sativa
  unsure (1)..(397): unsure at all n locations
  Clone ID: PAT_MRT4530_54235C.1
cagcccatcatattatattcatttatattagtatcaaataacaagtgtgctaagcccatataggcccaacaatcaaacacaataacaacccatatagcacaacccgacaaacattccaatacaacacaatttcttacatacctataactaggttcacgtccgggtggagcaataacattaacatgttaccacccattatcctagtataggcaataacccaaagtttctaccattcactgaccatnattctaccaagagtccaattcattatctttgccctttcttgttgcacggatttatcaattgaactttccattcttcagcaattaacatttcttttacagnngctcattaaaactcgtatttgctgtcttgcaatggccacattctttgaaaa

SEQ ID NO: 51886 - DNA, 672 bp, Oryza sativa
  Clone ID: PAT_MRT4530_54236C.1
agatcccgcggcgctgcggcggctgggcgcgcgccaccgccgcggccacctccctcagcgcctcgtcgtcgggctccatggcgatcggtggttggggttgggggcgtgggggggaatgggaatggggagagataagatggaaatggtcaaggagaagggcgcggcgagggaggggggtcggacgaatggacgaccatcggagcgcgccacccgtggccggcggagtcggggccgcacgaggtgatgagagaaagaggagaaagaggagagagagcgggtgagccgggcttactgccaagtgccaacggcggtggaggcgagggcggagcagcgcggcgatccggcggcgaggtcgcaggcgcggggtcgggctcgggggcgtggtcgaagagctcggcgggaacagggcgatccatcagaatcgcctcggccaagccctcgaacaggaggccgacatgccgcacggcgccgccgccgagtcgctggtggcggatcgcggcgccggcgtcggaggagcctggaggcgtggcggcgaagcgtggcgtcggggaggtcgtggaggcgcggcctggcgctggcgccgttgcggatgacgaccgggcggttgcggaccaccacctgggcgggcgcgagcgggaggacggcgactcaccggcgcggggggcgagggcg

SEQ ID NO: 51887 - DNA, 320 bp, Oryza sativa
  Clone ID: PAT_MRT4530_54237C.1
caatattcaatatttggtttgaacactatctcggtgcatgcaacacaacaacggggggaccccaccagctttgaggcaagcccgctaaacctagtactggccgggggggaaaaagctgcactggtggggctcaaccccgcacattgacgggaggtgccccccgtactgccccgccctgggcagcctcacccgggtcatccccgggtgctgttgctgctcgccctaataaccctcctccgaagaccccccgccgtagtacccctggtccgacaacgaccccttgccggcgtagtacttcgacaacaacccccacccctccg

SEQ ID NO: 51888 - DNA, 175 bp, Oryza sativa
  Clone ID: PAT_MRT4530_54238C.1
cggttacgggaggggcagattcggcgaactcttctcatcccacactgatcccgtcatctctccgcctccctatcgcacggattcgctatcggtgtgcgacgtgaggagtggattcgacgacctcttcccctcccgcatggatcacgtcgactctctgcatcgagaggaaggataa

SEQ ID NO: 51889 - DNA, 522 bp, Oryza sativa
  Clone ID: PAT_MRT4530_54239C.1
atggaggcgactgacgatgaaagcaaccccgccgcctacgagcagtggcggtggggacaggagagcgaccggccgaccgccgatgcgccgctgtcaactcgccatcgacggtcgaccgtcgtcggcggcagcgcatcgccctcgcccatcgcaccgtcggctgttgcccgtcgcgcggtagccgagttgcgccgcaccgcctcggcgcctccccgggccgcgacgccgcccggagctccagacgaagcctgtggcctacgccacacaaatccactctcgctcaatgtcgtgacgctgccatcggcttcggcgtgggaactcgagatgccagctgagagccgagatggcgagaccaagatcccgtggctggctggcttgctggcactcactgccatgcgcccgtgccggtgccacattgctgagaaaaaggtcacaaggacccggcttatattgaaagccaatgagggcagtcttctggggcaggccaactttacaagcaatgcaacctgtgattgctactag

SEQ ID NO: 51890 - DNA, 638 bp, Oryza sativa
  Clone ID: PAT_MRT4530_5423C.1
attcattcccttctgtcttgcgtctgtctaatatttagatcttcaaaatctctctgcgaccatgaacaaaagatcctgcccaacgcaattatactaaactacgttgggctcctagattcactgcctatcatttctcacaatcttaaagccttgggccgggatctagattcatcgtctttgtatctaatagcttatgatcgtcacttgtttcacactgatcgacccgataaacttcacgcctctgcccaagccaagacctggggcatgccacatctgaataaaacatcgtcaatcgagaacgtcaaacagacatcacatttacagacggaatgagtaccaagtcatcaccagcggagcttaagacccgcaaaagacacgactatcgtttctttcttgagtatcgcacgcgatggaacgataatgacatgtatgaccacatgaacaattcagtctacaactttttattcgactccatcatcaacgcatacctcatagacaattggcggtctccatcctccatcagcatctcagtttggcatgtgtgtacacacccacaccgacttcttctcatccattgcataccctgccgttgctgacttggcttgcgtgtgaacagcttggtcgatctagtgtccata

SEQ ID NO: 51891 - DNA, 414 bp, Oryza sativa
  Clone ID: PAT_MRT4530_54240C.1
atgccactggatatcgacatcagagataagtctagacaaacctaatatggtgtctgcggaggctaaaaagagggatctagcgctatctctgatctcgctgagtgcggattcgaggaggaagactaccctgtcatcgactatgagttgatgagtagaggagcaacaccggcttcaaccaacaagagtagggctattacctgataggtaaggggctcgaacctttataaaaatccttgtctccatcttttttacctcaatatcgcatataccctggtaccaatgatccccgtactattcaaataccgtagtcgcgatctcaaacgtcgacggtattccaaggtatcatatttatttaatttcgaagggaagatttataagccgaagactccgagaactccgagagctattctattc

SEQ ID NO: 51892 - DNA, 495 bp, Oryza sativa
  Clone ID: PAT_MRT4530_54241C.1
ccacacatccgctttttgctgctatcatctgtctctcaccgacggggaggcacggagcgggagcggcggctgctgcacggcgcggcagcgtggcagcggcgggctcggcaccggcagccgaggcctttctctacctcgcatccagcgcggcagcggcgggctcggcaacggcggtggccttccttgaccaacctaccatgcacaggactccctttctcgacagcagcgggcacagcgacgacgacggggggcacggggacaacaacagtggatctggactgcagccgcacatcagtaacggtgacagcagcagctgctgcggccgcgcatctggacggcagtggcgctcttggctctactttccaccgagcgtcgtcgacaaccctagatccgtcttgatcttcttcgctcctgcagccaacagcgacggatgttccgtcatctggccatacactccactgatgacgagcgcgtggtgtcacatgaacgttggct

SEQ ID NO: 51893 - DNA, 744 bp, Oryza sativa
  Clone ID: PAT_MRT4530_54242C.1
atgaacacttgttcggtcgccgctggtcccgccgcggcttgggcttgtagcagtgtcaatacttgcgccaggaattcctaccctgttgaattggagccggagccggtaaaagagagagagaaaggctatgtcgacttgttggtggatgcatctcttctgttggtcagcaatgatttccctcctgaggtccagcgtcatggtgctaggatgcttcagcatcttctaaaattcaggcgtgaggaattgagcagttttgattgcagtagtttgatccatcaagatgacactgatagtactaacatgtcaaataaattcgatgatataattcacccaagaatgcggtgcaacaatggtgcagtaccttgccatcaagttaagggctgtctacttcttgcagaatataatattttatgtgaagcatttgatgttgtaacatcctgtttaaggtctgaacagtataagggggtacttcactatcttcttaagcccctcaacaaaatatgggtccaatcagagtggagaagtacatttctgcactctgcatttggcctaacctgtctattctctgatcatttcttggagatggtttataaagttgtgaagttctgcgaaaatgatctccgacaaagcacattggagtctattgagatgcaattctgcgatcttcattctcttttaagattgatgcttccctttctattgcagaattgggcctccaattcaattccagagggaattgtataa

SEQ ID NO: 51894 - DNA, 916 bp, Oryza sativa
  unsure (1)..(916): unsure at all n locations
  Clone ID: PAT_MRT4530_54243C.1
ctgcaggaatcggcagaggggatgaatggcctgatgatataattgttggtcattctgtagagagaagcatagattgatttcggccagaattaaacagcatggcgccttgttacaccgcgtcagtgttacctgtctcctggcacatcctcctggcacatcttaatttccgaattacagtgttgttcgtcagtcacattgtaattttcaaacacgactagtgtgtatttttggttgatttatttgatgtggctttcggtcttgtttgggggagtttctagctgctgcagcttcttccaggataaacagtccagcttttggtctagattcagattagttgttgaatccagaaaatgaactagaagccagaagctgttaaacccaacttttctagattcttagaagctggttgccaacaagctgctgcttcttagaatcttccccaaataggctctttgacacgttactgctgcataacaaccggatagacgtgtcaatgtgaagacgtttcgtactaacgtgctcagctgcttcactgaatattttaatgacatgctagcagaaattattcctagagattttagaatacgtatatcaaggaatcaaatatcatggattcgttttgacttcaattcagtaaataagaagcacgttcctccaaaagaactcttgtttttcttttaaatatgcagaggagagcattggatgcaaatctcatgccgtcacatagtcgcatacaaagcctactgaactggtatgccttttgccttcaccgattgtaactctgcgttcctgcaaatatgaactgtttattcttaaagagctctttgtaatatcgtgtaaataatgtagcgaatatttatcagttatgggtctgctaaagcctacacgcttcatccggcnnnaaaaannnnnnant

SEQ ID NO: 51895 - DNA, 308 bp, Oryza sativa
  unsure (1)..(308): unsure at all n locations
  Clone ID: PAT_MRT4530_54244C.1
cctgagcagtgaatccgcggcgcgcggcgggcgtcggcgtcggcgtcggcggcggcggcgagggcgtagagatcgcgcgcgcgcgcgcgcggaggcgtagccgcggagtcgctctctcctcgtcctgcctcgcgactcggttgcgcgaagcttcgaggaggaggagggggaggaggagtggggggggggggantcgctgttggtcgcgctctgcgtngtggtgtttttcgccgtcggatcggagtgcgacgggcttgaggactttggcggggggaacattgtggtgatggcggggatggtttcttttt

SEQ ID NO: 51896 - DNA, 1946 bp, Oryza sativa
  Clone ID: PAT_MRT4530_54245C.1
atggccaaggagatggccgtgcggcaccacctccttccggggtctcctcgccgccgcaccgcacacaacctctcatcttcctccctctgcaaaagctccgtcgcctccctcctccactaggttcccggcgctgcttcttgctccctccatgcctctatcatctcccatcggcggtccccgaggatccgacctctctttccatccagcagctgggccgttaccacgagtgacattcctggcagttcagcgtgcatgtccgtgtccacaactattccagcctttccatcgcctgctccatttggtcccccccctcacctgccgccgtctatcataggaccaacagtgtgacccttgctgacagcagcatttaggaaggtgacggaggtgataatcgcgctgttggcgctgcgagaaggaaagattgaggtggtgaaatgctccctgctgggatccatcctctccaacctgctgcttgtcctcggcacctccctcttcctcgccggcatcgccaacctccgcgcccaccagccgtacgacaccaagcaagctcacgtcaacaccgccctcctcatgctcgccgtcctctgccactccctgccgctcatgctcaggtacgccgtcacctccggcgaccacgccatcgtctccggcgacgccgccctccacctgtcgcgtgcctgcagcatccgcagctgtacggcctaccatccaggtacagggactcgatgaggcccatcaggccaggcctccccccccgtccgtacaactactccacccaccagcttcacggcatcttcgaggccaccagcttcggcggatccaacatcgatcccggcgcttgggaggacagcaagtgccccggcggcgagtccaggttcccagcgcaggttcgggtggccacgcgcaagatctgtgagccgctggaggaggacgccttcaggcccgtgctgcaccactacgacggccccaagttccgcctcgagctcaccgtcgccgaggccctatcccttcttgacatcttcgccgagaagctcttcgcctgaccatccatcctacctcttccatctcaattatactactgtaacacaccatccatccatcgcccttgttaaatttatagtactagtaactggagtactacttacaacttacttactgctatatggagtagctaatagaggacggaacagaagcttattgctgtttcttacgcatagtacgctcctatggctgtaagaacaagttacataatataggcgaggaaaaataatatggcttttgttcaaaagaaaaacttcaacaagtccgtcggcaggccggccaacaacaacttcaacttcaactacaacagcaacagcgtcgtcgtagatgcgttcaacgggaagaagaaggccgctgtcgacgctcctgctggaggaggaggaggaggcaggaacaacaacaagaagaacagcagcagcaacgacaacaagatgagcagcaggttgaagaagagccagctgccggcgtcggagtcggtgccaaaggaggaggcgatcgggggatacatattcgtgtgcaacaacgagacgatggaggagaatctcaagaggcagctgttcggcctgccatccaggtacagggactcggtgagggccatcaggcccggcctcccgctcttcctctacaactactccacccaccagcttcacggcatcttcgaggccaccagcttcggcggatccaacatcgatcccggcgcttgggaggacagcaagtgccccggcggcgagtccaggttcccagcgcaggttcgggtggccacgcgcaagatctgtgagccgctggaggaggacgccttcaggcccgtgctgcaccactacgacggccccaagttccgcctcgagctcaccgtcgccgaggccctatcccttcttgacatcttcgccgagaagctcttcgcctga

SEQ ID NO: 51897 - DNA, 253 bp, Oryza sativa
  Clone ID: PAT_MRT4530_54246C.1
tttcttggttgatatctccgggtagctcgcccaatcagtcccaaatccgattttctgggctctgatttggagatatatttttctttagctgtgattattggttcttcgctcctgtaccaaagctcccgtttttggttcttgtggggatcaaagagggagggagttcgatcttggaaagagtttaagtgtcaagattcgaagtggcattctgatttggattatgcaagctcatgttcttggattatctcttcga

SEQ ID NO: 51898 - DNA, 340 bp, Oryza sativa
  Clone ID: PAT_MRT4530_54247C.1
ccagtccgaagagggaacagagagatcgtaggacacaagttgtagcgagagaatgactcacaaattaaagaaacgaagaagaagaagcatcttttactgtactaacaataattaacctgcctgcagacgatgaggatccatgcatcagcagcaccgcagcagcagcagcttagattaggataggagtttagagccttgagctggctgtatgactgtatctcccatttttttttgtctgcattctagtttgatgatttcttccttggattggagggagggttttggtgatcagtttggtgtatgaaatgaaagattgcaaagtgtacaaaaaaaaaaaaaa

SEQ ID NO: 51899 - DNA, 510 bp, Oryza sativa
  Clone ID: PAT_MRT4530_54248C.1
atggcggcgagccggcgatgcttggggaagggggttttggggcggctttacggtgcgagccggacaccgtgggggaaaaagtacaccaaaggaccctcaacttgtcatcgagttacaaaatcatctcataaccgcaaaaccagatacatgacatctctcaactttaggtccttcggtggttttgaccccgatttgtctgacgtggcggtgcactgcaaggagggaggggacgaggcccatgagacggcggaggatgagaagcaggcgagcgcgactatgggactatggcaagtatatggggacctagatgcagttctgcaagtctatgggactatgctgacacggctcggctcggctcggctgggacgccacgcgcgacggcaacaagcaccatcgatcggcatcgcgtccggcagaggccagtggccgacgatccttggattcccggggacgcttgactggcacggaaagggagctgaaactacagtagaagacgagtattgtaattaa

SEQ ID NO: 51900 - DNA, 873 bp, Oryza sativa
  Clone ID: PAT_MRT4530_54249C.1
tccatagccagccagaagacaccgacgaggcgtgaccggaccgccaccgccatcacctccgcatggagcggcttggcggcgtgccactagtggttcccctacgtggagcacctccctcatctcttgcccctggttaatttgcctccctgttcgacatggcgggggtcctcgccggggtctcctggccacggccccagctcgggtcagccccgtttggtgaccagatggatcagcccattggcctacccggtgttgtacagcaccctctcctccgcaccgacggccttgccgacgcatcgccacggatgatgggccggggctgctagtgctgcgaggtggcagggtggccttctcctcctcctcatcgtcgttctcgcccgatgccgagctcctccaggatgatgaaactcgagcatcgccggggaaggcagcgggcggcgtcaagctggacccctcccccgtagtcgccggcatggccatgcagctggacacctgagcaccgacgacgactcctacttcttcagcaccccttacgccatgtcgttcagatatagcccttcggccttcaaaaagatgtcgatgtccctcacgaaggaagaagctgtcgtcgctcctccgccaaaacttgtcggctagctcaaggacaagccgaggcagtactcttttagctcgatatgctaaccaagccatgaaccaatcccaagctcggcttggcttgtttccatccctaggtctaggtgtgccaactcctgccagacagtggggtggctcgaaatcgagctcgcctgctttatattcacgatggtcgccattgccaacaccatgggcgctttttttctctttttcttttttaaaatactgtgatatgttcat

SEQ ID NO: 51901 - DNA, 2901 bp, Oryza sativa
  Clone ID: PAT_MRT4530_5424C.1
atgaccccaactttgattgatatcaccatgatcaccggtctggatgtgacctcatcggctaatcctatgagtctgaacaccaagaatcaatatgacttcaggaccaagagcataggtggttggtctggttatgtggcggaatacatgggcacagggtggaccatggtggctactgcagacttgactgaatctggcagtcatgaaagcagtcaatcggccatctcaagaggaatattcctctcagatccgggaccaatcggtccggccaaaactggcggacgaactcgtcccacatgggacaagcgacggcgtgaaaccgctggtttgctcgtgcgctcttcctcgggagacggcggcgggctcggcgacggcggcggtgggctcggcaacggcggcggtggggggctcgccaacggcggcgggcggcggcggcggatccggcgatggggaaggttgtggcgacggatccggaggcggggaactcggcggagggccgaccgtgtgtggtcgagcttctccgcccgcccgaccacgatggtggccgtgctcgccctcctctccaccggcctctccctctccctctcccgcgcggacctcgccgccgtcatcgtcgctgagccgcggctgctctacgcgaaggccgaccgtgcgtcgtcgcgcttctccgcccgcccgaccgcgatggtggtcgtgctcgccctcctctccaccggcctctcccactccctctccctctcccgcgcggacctcgccgccgtcgtcgtcgccgagccgcggctgctctacgcgaaggccgaccgtgagtcgtcgcgcttctccgcccgcccgaccacgatggtggtcgtgctcgccctcctctccactggtctctccctctccctctcccgcgcggacctcgccgccgtcgtcgtcgccgagccgcggctgctttgcgcgaaggccgacaccatcgccgtcagcgctcggttagtgcagagattagccaatctgcaggttgcaatccaagttccgacagaaggacgaaaatggattaaaatctggcctctacatccacaatggatgtacacagccctcaaggaaatactactgtatcgagacaatatgataaatgagatgtgtaccagaatacaaagttatcgtgttactagtaagtatgatgaacagacaatccaatcccccaaaatttctcgcacccacggcgatttccattccaaaccaccacggccaatcaacagaacctgcggccagccggccaagaacccaggatcatccaagaatcgcttcgctaggcacgcaatgcgcgagcaaggggtggaggagagagaggaggggaggctcacattcgtggttgaagagtcaaatggtgatgattttgattgtaaagggaaggaggaaactcaagtcgcaaatgtggaaaggggtggtgatttgctgaaaaggagggcacctaggaagccgaaagctaccaccgttggaacaagtcttgcaggtgctagttctagtacccaacctgaggtacaagaggagataccgacaatgggtggggaatgtagggagaagggtgctctcatcagtcctttgttcgtgcacctccccgctcgaagtgctgaacatgttcgcaaccccatagattggagtgccaagactaagaaggtgcagatgataagagtggagatcccaaagaatggatgccgctcagccaccgatcctcgtttttggactcttttccagcaagacttctatgaggcggttatcatgaataagtccaacatgcagtggattaattggagagctgctgcctcttatggcgaccccgtgatgaatgagtttggtaccaaaggaaataagaaaaagaccatgcactggatgacacagggggaatggcattgcatcaactacagtcaattcgctgctcttttggatctcacctttgatgatgatgaagacagggattggttgcatgatgacaaggtcttggagcctcatgaggttgacttcatgtacaatcataaggtggagtacgaccctgggacaacaaagggtatgcttcctttctttgcctatctcaacaagatgattcgcaaaacactcactcccaaggatgacgatgacaacaatgtccaatcttacactcacaacattcttgcaaggatgagggcttctccgaagaaatttgatgtgtttgagttcatttgggaggagattcgcctcacatctttcactcctgagtggagtcttggctatgctcccatattgatgaaaatgattgagcaagtcaccaaacttcgattctacaaggaggtgcaccacactggactcaaagtgaggctagagaaacccatgaccactcctaggaggccaaggtctaccactaaagctgcacgtactcaagctccctccactccgactctctcttcttcactgttgtggaaaattctcaagtctatctataatgtgtgcaagtccaacgccatcgaagccaggaaggggcgagcggaattgaagaagcagactacaaatttccttgctcccccgatggctccgaggtcaatgaaagtgatgaagaagtgttcgatgatccctttgccgacgaagctagtagtggtgttgttcaggagaaggaaggtgtgggacatggtgatagtggtgatgatgggcatgatgattgactccatatggcattaggttctctctccaattttaatttatctctttttggtcctcgatgccaaagggggaagagccacatctcttttccatctatcattgttgttggtcggacaaatttgggcttgcttgtatgagacaatgtgtgtttttatttccttaagatttgttcaacttaatgcatatgtggtgtatgaaactatgtgatgtaatgttatttatcgtttctagccc

SEQ ID NO: 51902 - DNA, 165 bp, Oryza sativa
  Clone ID: PAT_MRT4530_54250C.1
ggaaaggtgaacacatctttgttgaatccaaaatgtcagtgaattttggcaggtgtaaaaatgggctggataaccaaaatgtaatgggattctgtacagtcaaactgaagaaaagcatcacttgcctcactggaattttgccggcccccttggtcttctagaagg

SEQ ID NO: 51903 - DNA, 993 bp, Oryza sativa
  Clone ID: PAT_MRT4530_54251C.1
atgggctccttcttctcgacgatgttcacgccgccgcccgccgccgacgacggcggcgactcgcgcgtggtggccgtccactccacggccacctgggacgagcagtggggcgcccacaagagcaaccccaacaagctgatcgtgatcgacttctccgccacctggtgcgggccctgccgcttcatcgagccggccttcaaggacatggccggacgcttcgccgacgccgtcttcttcaagatcgatgtcgacgaactttcggaagtggcgaggcaatggaaagtggaggccatgccgacctttgtgttaatcaagggcgggaaggagtccaaagtggcaggctcaatccgatccgcgagaggcctcctcctcctcctcctcgatccagatggccatggcggcggcgtcggttctcgccgcctcgtcctcctcctcccctcctccgctcgcgctcgcgtcgtggagatggaggcctccgccgccgccgcctcttctggcagttgcaggtgcagctcgcggagcgacaaatcccaggctcgctctccgcctgagcgctgcggcgtctcctccggttaccggcgaatctcgcgccatcgcggggacggggcggtgtctggtggcgccgatgggtggggacagacggagcgggatgcgacggctgcgacggcgccagactggggcgcgctcgcgaggcggctggctctgggcgcgctggggtgcgccgtgctctgctgcggcggtgcggcggtggcggcggaggactcgatcaaggcgtccggcttcgggctgcgtgtggcggcgtcgctgcggaggctcgggtgggcggacgaggccgtcgtgttcacgctcgctacgctaccggtgatcgagctgcgcggggccattccggttgggtactggatgcgcctcgaccccatccgcctcaccgtcctatccgttctcgggtttgtctctcttgcttacctttttccttttggcgagctttgcccatga

SEQ ID NO: 51904 - DNA, 1258 bp, Oryza sativa
  Clone ID: PAT_MRT4530_54252C.1
tttttttttttttttgaagctaagattgcttagattctgaaaatcatatcgatccgctcacggcattttacaagccagctcggtaaaattaaaatttttgccaaccagtactgcagtactcataaggttctacagtattcataaaagggtcaactaaatgaaaatatcgctctccacaagctgcctactgtagaggagcatcaggatccaatcttttctggattgcagctgcagcctcaaaattgcccaatctgtactggtacatcatttcctcccgtagccgggcctgctctttcattgcttgagccattccagtttgcatggagcgttttaaagctgccacttcttcctccttttgccgttcacgttccctgagcaattccagccgtcgctgttcctcatcattaaatacagtacgttctgttcccaaggcattctttaggcccttctttttctctttttccatcacacgacggtgatatgcatccaagtcataatatttttttgacggaaaagtagctgtgttgtgatcttccataaattccttaaacatttgcttctcttcccaatttgacaatgcctccaaattaacctgcttgacttcagacaaccatgcagtgaactctggtcgtttgttccacatatcgacttcgcggataatgccatacttcccccacgagtttgtcactgcagcctttttgcccaagttcttcttttcctccttcctcctcttcttcttctcctttttctttctctccctctccctctccttctccttcctcttccttctttccttatccttcctcctccgcctcctctcctcctcctccctctccttcctcctcctccgccgccgcctccttcgcctctcctcctctgagtctgtctcgctctctgaccccgcactgcaatccgagtaagaagactcggattcggactcagactccgacgacgagcccgagctcgcgctacggctccggcgccgccgatgccgccgctccttttccttcctgcgccgcttccgccgctcgcctgagtcctcgccggaggactcgctcccggcgtccccctcctcctcctcctcctcctcctcctcctcccgcctcttcgacttgccacggcggtcccggtcccggtcccgtctccccttcgaacgctcctcctcgtcggcttctatggacttgctgcggctgcgcgccgccacagccgcagccgcctccccctcgccggcggccgagccgttctgatccttcgccat

SEQ ID NO: 51905 - DNA, 309 bp, Oryza sativa
  Clone ID: PAT_MRT4530_54253C.1
atgtcagttctatctcctatctctctcctcatctctctcttttctctctcttttctctctcagatggcgaggacagcggccggcggggtggagcggggcagcggcagcggtggacgagtgcgcagccggcggagccacccctcgccgctggcgccgtgcccatgcccgctccgccaggcgtggggcagcctcgacgtgctcgtcggccacctccgcgccgccttcgaggagcacggcggccaccccgaggccaacccattcagcgcccgcgccgtccgcctctacctccatgaggtccgcgacagctag

SEQ ID NO: 51906 - DNA, 157 bp, Oryza sativa
  Clone ID: PAT_MRT4530_54254C.1
tatctaccctgactactatagtgctcccccggagccttgcccctggttggtggtgtctggtgactgaattgtaaccatatgaatagttcgtgatggttagataaatgaaagtcatacatgcatcatggtgtgacctggtgagaacttagggtcatat

SEQ ID NO: 51907 - DNA, 204 bp, Oryza sativa
  Clone ID: PAT_MRT4530_54255C.1
atggcggcaccggaggccatgctgccgatgatgaaggggactcgctccttctgcgacgaggacactattacccgggccaaaagattacaagttacgatttataaacacgaaaaattccgcaatcatgcgaattattcacagaatacaccaaagaaggagcggtggtggaagaactggaaggggtgcaagctgaggcaacaatga

SEQ ID NO: 51908 - DNA, 239 bp, Oryza sativa
  Clone ID: PAT_MRT4530_54256C.1
aggaacaagcaagttcagatcacatcgaaattcaggaagatctgacgtatgtggagaagccgactcgtatccttgaaaccagcgagagaaggaccagaaacaaagcaatcagattctgcaaagttcaatggagccaccactcagaagaagaggccacttaggaaagagaagatgagttgaaggccacccatccgcacctcttcgccagctcttccgaatctcggggtcgagattccggt

SEQ ID NO: 51909 - DNA, 665 bp, Oryza sativa
  Clone ID: PAT_MRT4530_54257C.1
gggccccccctcgaggcggcgaaggacgtggtggacttggagaaaggcgatcgacatcatcgatgctgcggcggttgttgaggccatagctggagaagaaaagggtcctgcagatctgcaagtgcaggtgcaacgcgatgcccgtaagctgaataatcagcatgcccggaagaagtactggctgctgctgtggttcctgatcgttgtttgggtgatgattctgacagatcatttcttcgacgtcgacggagaccaaccaaaagatcatgccgaatccgacagcccgcattccacgctcgccaagttcatcggcttcctgagtgtcatctgcctcatgtttcgcgcccttgattaaacggtggcagttgcgtgtcactgggcctactatctgcgcgtcacttctgctctcacagttcatgtgttaaatttgttcttttatgggacgaggagagcacgtttgcaactcaattataagtactatgacttatgattgtaataataaattcgctgggacttgtatgacttatgattgtaataataaattcacaggaaaaaaaaaaaaaaaaaaaaaaaaaaaaaaaaaaaaaaaaaaaaaaaaaaaaaaaaaaaaaaaaaggggggggcctgcagcccggggatccactagtttagagcgccgccaccgc

SEQ ID NO: 51910 - DNA, 359 bp, Oryza sativa
  Clone ID: PAT_MRT4530_54258C.1
ctctatctgtctatcaatgggagaaaaagattgatctagtcgtatcgcttccaaaacgaacaaaggatctgtaaccttctacttctaaactagtgcacgtgtttctcatgagtgctaacaatcattcactcgagtaaaaaatcttccatctttctgcaactagttttgtatatcacgatgtgtacttttgtccaccttaatatactgcgattattatctaagtgcaccgcagctgtgattctacagtactaaaatgtacccgtcccattagattcattgctttattagtgcaagcctgaccccatctgccgcttagctacacacataatgcatcctgcactaagctttataagtttctc

SEQ ID NO: 51911 - DNA, 1218 bp, Oryza sativa
  Clone ID: PAT_MRT4530_54259C.1
atggaggaggaggaggacttcctccgggtgcttcgagcgctgcgcgacgccgcgcggagggtggaggcggccgccggcggcgacgatggccccgcgctgcacgcgctcctcgcgctggatgccagcgccgacgatctcctcgccggcgaccccgatcttggcaccctgcgccggctgctcgcgcggattggcgcgctctcgtggtcgattcggtttgccggggatgggggtggtgggggtggggttgtcgggtgcttgcgggggaggtggcgacggtgcgaggcgaggagggggatcgcgcgcgcggctggcggcgtcgccggcgagatccaggcgtggatcgaccgggagaacgtggcgcgcctcgtggccgcgctgcggtcgtcgggtggggacgacgcggcgcgcgcccggctcgcggagctggaggcgcggctgggccggttcgacccgcggctgcagcgcgcgctgctgcggcacggcgtgttcgcggcggtggaggcgaagctcggggacccgggcgtcggggacggctgcgcggcggcggtgctcgcgctggtccgcttcaacaaggacgtgttcgtcgggccggtgctgatggggcgcgccgtcggcgcgctggtcgcgtccgcgtccgcctcgccggagccgctgcgcgcgctcaacgggctcgtggccgccatccgcagcccgctcgtggacgagctccacgcgcgcggcgagctcccccggctcgtctccctcctctgctccgcggacccccgcatccgcgcgctcgcgctggagttcgccctccgcgtcggctactacgcccgcaaggagatcgtcgacgcgctcctcgccgagggcctcgtcaagcgcctcctctgcctccagcgctccgactccgagaccttcgattcctacttctccccgcaagagaagccagaccacgggatcatcagaggcgtcatcttcttcgccgggatcctcggatgccagcgggaggacgacgacgccgacgacggcggcggcggcggcgcggcgacgtcgtcggcccggccgttcgtgagcgcggtggcgcggttcgcggtgcaggtggaggtcggcgaggggctgagccagcgggagaagctcgcggcgaagctggagatcctgcggcgagtccgggaggccgcggtgtcgccggcggaggaggccacggtgctcgccgacgtgctctggggcgccacgccgtag

SEQ ID NO: 51912 - DNA, 468 bp, Oryza sativa
  Clone ID: PAT_MRT4530_5425C.1
tcatacataaaatttacgtaattgatcaatgttccaggaatttgctaactcgcggccatcactgtctgcaatcttgaatgcccccggtcgcaagacttgcgtaatcgtatacggtccttcccacttgggtgagagcttgttacgccctacttggctttgaacctgtcggaggacgtaatcgccgatcgaaagtgtacgtgctctgatgcgcttctcatgatatcggcgaagggcctgctggtagccggctgctctgacgtcaaccctttctcgatgttcctctgtactcgtgtgctctgttgtcttagctccgtcgggagtatagcttctgtcacgccctaaaaattgccggtgaccgacatgtggggcccacatgtcggatccaccatcaacctctagccggccgacttggcctagcccgagccgccccctcctcccaccaaatccaccccaatccggcctccccat

SEQ ID NO: 51913 - DNA, 381 bp, Oryza sativa
  Clone ID: PAT_MRT4530_54260C.1
atggaggggagcgcggatccgacgggcggcggcgcggaggcctccgccgatgaggaggaggaggaggaagcggcgccgctgccatgcgccgacgtggaggcgcccgtcgcggctgctggtggaggcggcgcggcggccgccgctggcgttgaagaggaggaggcggcagccgggagcggcgccgctctccccacctcatgcggccgccgccgacgacgaggagaaggcggccaggagcggcaccgcccttcccacgccaggatccgtcatccggctgtggcggctgcactccgcacggatctcgcggcgacacagtcccccgcctggagccggccaccggtgacggcggggagtggcggatctagggttagggttcggtaa

SEQ ID NO: 51914 - DNA, 1944 bp, Oryza sativa
  Clone ID: PAT_MRT4530_54261C.1
atgaacaccattccttttctcagcccactcctcgtcgccgtctccctgatcgtcgccggcgccggtgccggagacgagacgacgacgtgccccggcgcgccgtcgatgacggtggagtcggcgtgccgcaacgtgagccacacgcaggcgatgtacgacgcgtgcaagggcgcgctcgccggcgtcccgaacccgatgagcgaccacgacgccaccgtctacgcgctcgccgcggcgcgcggcgcgatggcgtcggcggacgccaccgtggtggccgccaacgagcgggtcacgtacaacgggtcgctctccggcgaggagaagggcgcgtacgaggggtgcgtggaggcgtacgcggcggccgagcacgccatgggcgccgtcctgaacaagctcggcgcctgcagcttcggcggcggcctcgccgacgactacatgagcggcctcctcgccgtcgagagctgcagggaccgcgtgatcaagctgccggcgtcgccgttgtacgccatggttctcgttgaccgcaacaaggggagccttgatgccgagagacatgtggattcgccggggtggtgtcggggaggacccctgggcttcctggcacagtatggtctgggacctaacctgttgttggtctgggacccctctcgtcggcatatggtaaacctgtgtcggctttcgaaatgccttgtcatgaaagcttggaggtctcccgacgtggttgatccccacgggctgggtgacccaggttagtaatgtcgtgtgggtaaagtgtaccccctctgcagaggttaacaaatccgaccggacgagacgcactgtctcaaccgtgtcgtttgagaagcactcacttagacattcgggccccttgccgccccaccagagggcggcaagggttttcctgcaaaaaaaccctccctccgtcaccgcccgttcctcccccgtttgccacgtctgcttgccgccccagaggtgggcggcaggggctatttgcggctttttcttggacttgttgggctttggtggatataaaaggatctgggcatctgctcgcctcttggctgcgttagtccttgttggttggccattcttctggagctccttctcaatgtccagcatgtcccgtggcagcaatatcgaacgggccagctccttcaagtcatcgtcgaacttgattttcgacattggatcaatttcggggtacacgacgccttcgtcggattttgtggtggacgccaccaagcagacgacgcctgaggctttgagagccttaagatcttccaatacagctagataagcatccttgatctccgcgacagcaagaccgtcaggaaactttctaatcaacgataatagtttatcttttccgttcacaccatacttggacttgtaagagaaaaggttgccgacaaagtgtactttcggattattcttcaacctgtcaaagacctccttgttgccatgaatatgaacataagttgcttcatttatttgatctgcagttaaagcctgtcttgtcttttcaagcaattcaattactattttgatctgtgctgcagcaggagacttcctaactgaattgatgcgctgcaacctctctgtatcatctgagaatttacgctgtggtggttttgctggagtggatggaccatttgttggttgaacccatcgagtgatatttgatcttggagttgaagcttggtttgcagcaatactggatagagttgtctggcacctctcctgctgctgtctaaatttgttcagccgctcatgaagagccatatttggtgcaaagtatgtgtccttaatgaagccacattctgagttccaaggcacattgtagtcaaatttgtgttttacagagtcaattaaaagatcaacaaccgatgacggatggtgaatcatcctccataaccaacgaggtaaaagagcaaaatcgcccat

SEQ ID NO: 51915 - DNA, 954 bp, Oryza sativa
  Clone ID: PAT_MRT4530_54262C.1
atgtcactggcgtccacgtcgtcgacggagatcgagatggatgagaagaaggagatgacgaagaagacggagcaggagaagacgctgacgtcgtacgtgttgcgcgagaatcccaagaggagctacaaggtgagcgccggtgaattctccggtggtggtggtggtggtggtggcggcggcgagtcgtcggtcgtgcaggacggcgagagcgacacggagtcgtccccgccgcgcggcggagcggggtcgttcttcgccgtgagccggaggcggtcgaagcgggcgcggcggcggcgtcgcgcgccggatcccgaaccggcgagcagcgtctccgacgcgacgacggaggaggacgtggccatgtcgctcttgatgctgtctcgggactcgtggacgcgttccagatccgagcacgagacccaccaccggggggcgagctcggaggccgagcagaacaacaacaacgtcgtcaacgtgttcgacgaagaagacgaggacgcccgcgacgtggccggcgaggatcacgacgaggagctcagctacggcggcggcgaggcggcggcggcgcgccaccgcaccagcaggttccagtgcggcgcatgcaggaaggtgttccggtcgtaccaggcgctcggcggccaccgcgcgagcctcaagagaggcaagggcggcggctgcgtgccaccgccacgtccggcgccggcgagctccgccgccgcgccggccatccacgagtgcccattctgcttccgcgtgttcgactccggccaggccctgggcggccacaagcgcgcccacatgccatccggcggcgcgcggccctcgccctcgccgtctccggcgaaatgcggcgagagctccggctccatcgatctcaacatgccggcgacaatggaggacgacttcgagctctccgccgtgtacgacgccgagttcgccagcacgagacagtga

SEQ ID NO: 51916 - DNA, 1028 bp, Oryza sativa
  Clone ID: PAT_MRT4530_54263C.1
cccagcgtccgcggccgcgtcgtcagctcgatcgctcgtatcactcatggctcaaagagggtaaccgagttagaaactgaggaggaagcaactcgacgacaccaaccaatggcggagcacgccacgggagtgtacgggcacccgtacccgcgcgtcgaccagtacgggaaccctgtgccgccggtcgaccagtacggcaaccccgtcccggacgagccggcgccgcgcgacacggccgcggggtacgtggcgccgccggaccccgcggtgtcgactggcgactacggcctcgccggcgcggaggcgccgcacccgcacgagagcgcggtgatgagcggcgcagccgccgctgccgtcgcaccaggaggcgaggcgtacacgcgcgacggcggcggcgtagttcccccggccggcgagaagacgttcgcctacgagggcacggtcagcgccgccggcgtcacgggcgcctccgggcagctccagcccaccaccagggaggaggggcacacgacgctcggcgagacgttgcgccgctccggcaaatccagctccagctccagctcgtcgtcggaggatgacgggcaaggtgggcggaggaagaagaagagcatcaaggagaagataaaggagaagcttcccggcagccacaagcaggaggagcagaagcaagctggccacacggctccggcggccgggacggggacggggacggggacgcatgcagcggggaagcacgagaagaagggcatcgtggagaagatcaaggagaagctccccggccacggccaccactgagcgagagctcgcgcgcacgcactttcatcggttgacgttcgtgcaactgtccatgcatgtatgtataataccagtcgtgtttcagttcgttaattttacggtcgatgtgtggtctcggtaaaactaggtggtgtacagtgcgtctatgcatgtacggtgtatccaataatccagagtcagatctcttttaattatcaaaaaaaaaaaaaaacgagtgctttacgtttcgcacc

SEQ ID NO: 51917 - DNA, 446 bp, Oryza sativa
  Clone ID: PAT_MRT4530_54264C.1
gggcgtctccctcggcttccaggaccttctagaaccttctcgaggctcccccggcctcgcgcggtcgcggctctgcctcccgctctctctcctagggttttccccctcctggtcgcgcggcgggggcggcggccatgggggacgccgcggcggcgtcgcccccggcttccctggggaagcggcggcgcaggggaggagcgggcggaggggacggcgaggggctgcggcgggtggcggagatcgtgatggtgctggccgccgctggggaggtgaggggtgggagggagccgacggccgcggagcgggcgctcgccgcggaggcgagggagaggctggctgcggtcgtcacggagggggcggtgcggcccaaggatctgttccccggggaggccgtgcgcgccctcgtcgaggatctcggcctcaacagggccagggatcccgccgcc

SEQ ID NO: 51918 - DNA, 138 bp, Oryza sativa
  Clone ID: PAT_MRT4530_54265C.1
atgtctagcaacagctcaccaagtctggatgcagcagcatgtccgagaccagagctccgtcctcttgatctcccgattcgagagccgccgtcgagcaccgtcgccgcatccttgggaaaggacaaggacaccgaagat

SEQ ID NO: 51919 - DNA, 353 bp, Oryza sativa
  Clone ID: PAT_MRT4530_54266C.1
gcgaggcgagggactccgggagtttttctgaccttcgacctgggctactaccgatgcctcctcaggcgccgcgggcgcttccagtccgacgccgccctcgtcaccgacgccgccgctgaggccaacatcgccagcgtggtgtccagcccgcccgaggtgttcttccaggtgttcgcgaggtccatggcgaagctgggcatggtcgagctcgctagcaacgtacgcagcaactaaaccaagtgaatgcgccctcgtcaacgacatccactactagtattagtaactgcttatcgatcttcagctcctcggtgctggatataatttccacgtacgtatgtatgcatgtgcgtgaa

SEQ ID NO: 51920 - DNA, 314 bp, Oryza sativa
  Clone ID: PAT_MRT4530_54267C.1
cccacgcgtccgccaagccttccgaggaattggtggaaagggattttcctggttgagaggttttaattggcttattctggtcaaggggaggccataaaatcttttgggcaattaacttaacctggtggttttattaggcattaagctggctgtttttggcgacctttttgtggaccggggggcaccaggaccagttggggaggggattaaggtttcttgggctggttttcttaaaaaaaaaaaaaaaaaaaaaaacaaatataaaaaaaaaaaataaaaataaaataatcaaatttatatatatataaaataaa

SEQ ID NO: 51921 - DNA, 1703 bp, Oryza sativa
  Clone ID: PAT_MRT4530_54268C.1
aatcatataatatctgactggcaggtatctgcacaatcaaattagggtgcacaatgcagaaaccacttgacgatcaaacacaggcagcattgagttccctataagtagcgatcaaaggggtcatcgatagaaaaatcaaacgcatcacggaggcaacaagaatcttcttcatcatgaactgtgccctcaacgaccgttatattacagtctccactggccatcttgacagaactcagaggcttcaccagtttctcgcccacctcatcctgtgtggagaacattccattcgcgaccacgatcaccatctcctgcagcacctgtccacttcccaggatgtacttcaggaaggtgagctcgctacgatcccctcggtacccatggaaaaccacatacttgatgcacgattgcaagcattctatgcgaccagcctcctgccagaacttgaggttgagcctgccaaccggttcatctgatttctcggacttgacgtgcagcttctcgacattgggaaagcatctcaggaagctaggcagcaacttggcttcattgcggacttcaaaacgcaccttcaaggccaatacattgatgcttgggatgatggttcttgggctcgcctttgtcccagcgattgttgaacggaattggatcaaaagcgcaggcgcgtgcaccttgatgatggtgttgccgttctccaggacatgtattcctggcctcaagtatcccagcaactgtagattgggggcatggccaatgctcaatctggtggcatggttgtcatcctcaaacatctcccaaatcaatagccgctccaggcgcggggcgtccaccacggcgatgtcctccgcgatgcacatgcagatctgcacgcaccgcaggctgtggctggcgaggcggaggagcacaatctgcctctggctgtagtagatgccgaggcactccaggacggggctgttggcgaggacgaagtcgaggtcccggtcctccatggcgacgcagtagaggccgagctcccggaggtgggggaagccggcgccgcgcgggagggcggcggtgtccgggaacttccaggtgccgaggtagaggcggctgaggggcgcgagggcgaacaccgtggcggggagggcgacgtccaagggcctgcggcggttcacgaagacgagctcgcggacgcccttgacggcgaggaggtggagccagcgcgcgaggtcgccgcggcgagcgcgagcccccatggcggtggaggtgagctcgacgtagcggaaggggcccgggtgggcctcgaggacgcgcgacaccgcggcggcgacggcgccgctggcgtcgagcgcgagttggcccgcctcctcgcccggcgggaggaggtggccgtcgacgaggacgagcggcgcggagagccagatgcggcgccaccgtgaagacagcgcggcggtgcgcacggcgtccttgatagggaggcgggagacgacgccgccgaggaggtcgtcggggagcgcgccgatgcggtcctcggcgccggcgccggacaagtcgtcgtcgtcgttggccgagaggacggcgtcggggtagacgggcgggtcggggagggatgccacgaggagtttgcacatgcagtcggcgccgaggtccagcatccgcgagtccacgccgtccttctccatctgaacaaggaccttctccatcgtcatgagcgcccggtaatccat

SEQ ID NO: 51922 - DNA, 342 bp, Oryza sativa
  Clone ID: PAT_MRT4530_54269C.1
atggctgaagcatttcatcaagcattcggggtgtgtgaccttagaaagatccttggtgatgatgaagtgcgacggcgtgtgcacgtcgcctttctcgccgtgctcgtcgccgtcgtcgcgctcgccggagctatcgctgcagccgcctccgacgcgcggtccagaaacggcgcaacggcggcggtgggtggggaggccgtggtgcaccggcgcatgctggcgagcagcatccaggactcggtgctgaacgccaacaagccggcgtgcctccagtcgtgcacgggggctgggcagccgtacaccggccgtggctgcacgaacgcctaccagtgtaaaggctga

SEQ ID NO: 51923 - DNA, 291 bp, Oryza sativa
  unsure (1)..(291): unsure at all n locations
  Clone ID: PAT_MRT4530_5426C.1
aggaaccaacaacnaggggagaaggagaaaaaggcagacggacacaacagggacccccnacacgagaacagccaggaacaaacggcaccacaaaggacaggcacagccggggggggcagacacagcagagacaacggaanggagcnccaagccaagccagcccgccacgagcagccgcccggacgaccgggaacaaggaggagccaaggacgacaaaaacgaagaacccaagcaccagggggccaacagggagaggaaaccccgccgagacagaaggcagaggcacggaac

SEQ ID NO: 51924 - DNA, 140 bp, Oryza sativa
  Clone ID: PAT_MRT4530_54270C.1
ggtgtttttttttttttggccggcaatctaaaaccggggggggtcttataccgtctcacaaggctgcgcctggggcctccgggagccttatgccctgggaactccaccctgggctggtgaaaattctcaaagtctggcct

SEQ ID NO: 51925 - DNA, 726 bp, Oryza sativa
  Clone ID: PAT_MRT4530_54271C.1
atggccggcaagataaagggcctctccagccgccgcttaccacgtgcagaggtcgccggggcgtcgggccaagtcaacggcggaggcggagtcagcttgtggggactggcgactttgccatcttgctccagctccagctctcttctccgtagcgtgctggcgcagcgcccctgctccgaagcaaccggggacgacgaggccggtgcattgacttgtggttttgcggtttcggagtcgcgcgtgtggccgtgtgctggattccggattcggcgcgcgagtggtagccaagccaacgacggtgaatgcgttgccgcggccggtgaggcgggggcttccttgcggcggtgcggtggcggcgagcggcagctgcgaagcaggcaggaggcaggacgggcagcggtggacgagcgtggctgcgagtgccggcggcggacaagcaggcaagcgaagcgatggagagtggagcaggtggcgggtggtgacgacgggcaagcaagcaggcggagcgacgaagagcggagcctgcggcgggcggcgaccgcagccgcccacagctgcatggagatcgatgtcaagcaaggcgccgagagccctgcatcgtcgtcgtccatcccgctcgacccttccctgcctatcctcccgctcgctgccgagtcctctcccgacgctcccatcgacgcacgcgaccacccccggtcacgctcctccgcatcctccgccgggtag

SEQ ID NO: 51926 - DNA, 480 bp, Oryza sativa
  Clone ID: PAT_MRT4530_54272C.1
aaaggctaaacccccaagttaaaaccgaacaaaaaaaagggtttaaaaggacgggcaaagggcccaggggggggaaattttaaggggcaaggcaacaccggaaagggccggggacaaaacttaagggggccaaaaagggctagatttcccaaagggggatggggaaagcccccctgggacgggggttattttttttgggggggagcctgggccacctgggccccgggggggccccttttccccacggtttgggggaccccaacagcccccggtggccttagggcccggcggggaaaacgaccaagggggggggccccaaagaagggccccacaacccgggggggggggggaaaaattttaaccaaaccaaaatcaccggtttggaggaactggggctccttttcaagtttcttacaaaaagggtgggggatctggggcaccagctcaaaaaacttgacgggaagggggggggggggggaa

SEQ ID NO: 51927 - DNA, 434 bp, Oryza sativa
  Clone ID: PAT_MRT4530_54273C.1
aataccctactatcgttcgctcgcggctggcttatgaggaggagaggcgggggccacggcacgcaaatgctctgcaccgctccggcctatttcggcggaatagcaactcaatatcgagttctggtacagaaaattatggagagggaaattcgtgccttatatgaaccaaaaagaaacaatgaaataagaatcccagagagttcagacgagatgctcaacagacactggctgagtatattttgcatgcacgataaacatgctgataaagaagggggctactgtgctattgccctgtgtggaggccctctaggcagatcttcggggaaactttgtgacgcgccatacaacaagaccttgaattggtacaaatggaccctcttcatggatgatgagcgagctgtaacacagaatcatgccaagagtagttataggat

SEQ ID NO: 51928 - DNA, 456 bp, Oryza sativa
  Clone ID: PAT_MRT4530_54274C.1
ctcccttcctcccctccagatctggccgaaggggggggagggggaaggccggtggccgggcgcgaggcgttggcggcgtgtgctcccggcggcggcggcggcgggcgcgtccctccctcccgcggcagagggcggcagcagcgaggagggtcgaggcggcgcgtctcccagcccctccctcctagatctggccggagggggcagggggagagcggtggccggtggctcctggcccctccctcccagatctggctggaggggggtggggggagcacggcggcgggctgtggcggcgaggagggtcgaggcggcgcagccacggcggcgcggggggttgaggcggcagcggcggcgcggacgacggtgcggcgcggacatgcagtggcggcgacggacaacggctgggcggcggccgtgatttttttgaatgtttttatttgctttctttgctacaat

SEQ ID NO: 51929 - DNA, 124 bp, Oryza sativa
  Clone ID: PAT_MRT4530_54275C.1
tttttatggtgttattaaagcccagataatgtaccataattgctgcaactgtcgatgcaaactgcagaaatacactcgcccgcaatagacggcctgcaacatatacgctgtacaggccttacag

SEQ ID NO: 51930 - DNA, 502 bp, Oryza sativa
  Clone ID: PAT_MRT4530_54276C.1
ccggccgggagctgtgtggtgttgtaaagctgccagagatagagagtgagagatcagttagattgttgagtgtaagtagatcatgacgatgctgtagaagcatgcggaacgactaggcggacgcccctcgaccgaagaccggactcgacaagctacgcaaggccgatacaacccgtaccgttgtaattaacaaagattgcgacggatatgtaagcgggaggagtacaagcggacgcagtccatgccagccatcgaccgactacgccggtgacccctgcgaactaatgtacccatcgaggaggccacgacgacactgaaccctgaaagatagtgctgatggggcccaaccttgctgctgcttttctttgagagcatctacgctatctatgtgtacgctcagaagacgctctctcctaccgaatacaactcggtgtacagcaacaagaccaagaggcaaacatctgatgcacggagtaatctgcctcgatagagtgatgagagc

SEQ ID NO: 51931 - DNA, 204 bp, Oryza sativa
  Clone ID: PAT_MRT4530_54277C.1
atggaggaagaatgtgaatctgacgtgtgggtcccccgtgcaaatggggaagaggatgtaaaacgtgatgtgtgggtcccccgtgcaaatggggaagaggatgtaaaacgtgacgcctttgaagacctctctcggtccgtccgcactacgcaagcacacgccattgccttctacatgcacggcgaagtgtggtgcctgaggtag

SEQ ID NO: 51932 - DNA, 209 bp, Oryza sativa
  Clone ID: PAT_MRT4530_54278C.1
cactggtggagaaaccatctttggtcggtcagccagatttcacaatagtcccggttatattaaaaaccaggactaaaaatatatttagtcccggtttaaaagctcagaggtactttttgatcttaccaaccgggaccaaagatctatttatagtcccggttggtaacaccaaccgggaaaaaagatcgacatactctttactcccggtt

SEQ ID NO: 51933 - DNA, 2864 bp, Oryza sativa
  Clone ID: PAT_MRT4530_54279C.1
gagtcggcccccggcccgcgctccccccccgaggcctcctctccccctcgggcccccgccccgcggcggcggcggcgatgcctgaccagcggccaaagcggccgtccgactcggtcgccgccgcctcgccggcggcgaagcgcgcccgcgacccgtccgcgccggcgttccccacctacagggacgcccccgacctgcccccgaagatccgtctcctatgcgagatcctggcgtcctcggcacccgacgtcgacgcggcgctcgacgacgccgacgtccgcgtcacctcctccgacgtcgagcaggtgctccggttctcctacgcccacccgcgcgccgccgtcgccttcttccgatgggcggggcaccggcacctcagccaccagcactccccctactcgtggaacctcgtcgtcgacctcctcagccgatgagctagcctatgtgcacaaagttcctcctagtatatcattcctatctgctggaacaggcaaaaggagaaaaggtgaacacaggctcaaattctcaatacgtggatccagttctgtttcactgaatgtgaagactgaaaacccatacattggggagccagaagtttcatcagtaatgcctccaaacagagctcctgaaaccgcgcctcccgcctggacgacgcccgcgccgcgatccccgtggcgcgcgccgaggccggcacccgccccgacgccgactcctacgccatccttctggagggctgcgaggctgccggcgaccctcacgttgcacgcgaggtgttcgacgagatgcggcacgtcatcggattcgatcctgccaatgttcctgcctatgattctttcctcactacactgatttcaagtggttcctccacagcgttaatggatgcgatggactatcttgctatcttgcaccggcagaggtgctcacctggggagaagttcttccgcgccgcactggccgcacacctcaaggcgcgtgaattgcgcggcgcggtggtgctctggaacgactttgtcgtaaggcggggactcatcccagataaggaaatgtatagcacaatgatcatgctgcagggcactcttgggcatcctgaggtgattgttgagtaccttgatgagatgacctttgatggagtgtttccagatgcggacacatacaatatggttttccagttcttgctgaaggggaggaaactccgggaggcgtcggcaatatttagtgagatggtcaagaacgagttctggcccaatgaggcaaattgttcgctcgcgcttcgtatgttcttggatacacgagactgggattcagggatcaagttgtggaaatgcatggtggagaatgggcttccaccattggaggagagtgggaacatgctcgtatcaaagctaaaggatgagaggttacccgaggcatgtaaatatgcagaagacatgattgatcgatgtatcaagttgagctcttccacaatgtcaaagctgaagcaatgtctgatgaaggtggccaagtatcctggtgtaattgtgcctaagaagaaagagaaaattgtctgttggctggagcgtaattgctattatggaaggaaacaccttaaagaaaagacccgcccatggaccggttctagcgttggtatggagagcttccgtgatgatcagcgcgctggtcctcaatccgagcaacactctgatcatgtgtctgattctgctgaggatgcaatatctgatgaggatgttcttgcaccaacaagactgtcattagcttgtgctgcttcaaaagaaagagagaaggaaaacaaaatggtggtgccagatgaatcaaccatctgggatgaagttctggaagaagccgatgagctagcctatgtgcacaaagttcctcctagtatatcattcctatctgctggaacaggcaaaaggagaaaaggtgaacacaggctcaaattctcaatacgtggatccagttctgtttcactgaatgtgaagactgaaaacccatacattggggagcaagaagtttcatcagtaatgccaacaaacagagctcctgaaaccatgatggctgagcagttggaaaatatcaaggaggaaactgaagatttgccctcagagtttgcttgttcaaccaagaaagcaaatgtttcaatttctgaacttcttgacagtttacaggatagaagtgcctcctctgctgggacaccatttttgttgcatcaacacaccagacctaaggaagaaaagccaaaggtccctacttctgtgaagagaacacttgcacttctaggtcagaggaatcttgagaccgagaatcccttggagcatgtaattggtgaaacatctagcgaggaggaagacgatgctcaaaacaacctggctttgatcaacaaagatgtcaaggggcaaactatggctgacatatttcaacaagtatttaatgcaacaagcatggactgttttacactgcccgtgagatcatatggatctggttattatggaaggatgcaacaaattctgcagatggagaaagataggcatgctgagttcctaagacagtataacagagagcaagattatttaggcgatccaaagggggttacagttcagattttgtcaaggtctctggaaggaaagctaacaatctgccgctgcttgttcatggagaagagcaatttggccacaacaggggaagtgtcaacagatcttgacatggataatagcagcgtgaaaaggaccatcatcttcagtcccaagatatgtgacaacgtggatcttctagcaggaaacattattcacatcttcccaccatggaaagaagttaaggtgaaagaagagacggtgattctttgcacctacttctcgcatcgtggagtttga

SEQ ID NO: 51934 - DNA, 487 bp, Oryza sativa
  Clone ID: PAT_MRT4530_5427C.1
gggtgtaaaggaagcccatcatgatcttcatttaacggcgagcactaataacagtgatgataacaccacatgtggaaaggaggacgatgatccacaagatgagacaagtcccgcacgtacggacattactgctggatgacacaacagcacccagacgcaatcccctaacagacgaataatatggaactaatctagatgggctatcatcattgtaatggatagactagcctgctaccaactaaccttgcaatgacattgctgctagccgtgagtttcttattacatcgactccgattcttttatgactactaacacggcaaatgcaatacagcacatcacacgatcactggagcagccggactgacccggccatcttggcatgactatgaccaggatctcgtgccgttaataagctgctataagactctcatatgatggctgggtcagatatactaggagcgacaatgtaacggtccatgctggactc

SEQ ID NO: 51935 - DNA, 414 bp, Oryza sativa
  Clone ID: PAT_MRT4530_54280C.1
gcaaaaaaaaaaacttaatactcccgaatcaatagagccgaactagctccgaggcactgattgcaagcgcacgctaaatagtatcaggacatatctattatcaattacaattgcttctagatgcgggcgcggacgccgtgaaaaccggtattaatcatactcagttaaaaaaacatttggttcggtaatctttatttctgcaggcgtctgacgaagcatcgacattctactgatactgatataaaaagaaaggttagctaagccctcccaaaataaaacactataaggtaagcacatcatgttggttcaagcccatccctggaaatcaaatcaatagctagggcaatatctatcttattttccatatactgctcgtagaaatttgctttgataatccgactttcaactgccttt

SEQ ID NO: 51936 - DNA, 109 bp, Oryza sativa
  Clone ID: PAT_MRT4530_54281C.1
agaaaatataagctcaagtgttatcgtatgtgacatgagaaactggagcgtgatataaatagaagtggagggatctttgataaactataaccctattatggaactcgat

SEQ ID NO: 51937 - DNA, 769 bp, Oryza sativa
  Clone ID: PAT_MRT4530_54282C.1
aggaaggaatagaccacagaatgtttttatcctagtagtcttgatccttttccttcagaagttacacaaaataccgatgcctgaatgtgtttttaaaaatttaaacatacaatcagtctatgcttctatggaatgtctcttggatgaaatcaaaatcatatgtctctctgatcatttgcatcaatgactttcttcacttggttgactacaaattgatctcattctctccatctgtgaccgcagctcgggttgcagcagacgaagaacagggtcatcccttcctcccctctggcagtggcctggaagaacacggcctcgccgtggccacagaccgcgcaccggaccgccttggtgcgagggagagtcggatcgccggcgacatcctggagcacttgggtgaactctccggcgctgtggtgcaccacattccggtagacgcagttgttgtctgcaacctcctggtggtcacagttcctgcaggcatagagcagaatcttctggtccctatcctccttgggatacagtatgttgttgcattcgcggcaaaatttcatggtactcatggctgctagcttctcctctgacctgacctgacctgaccttgtctgcttgcctctttcagatctttatattctctgcagtgatggagctgacctgagctgaatcctattcttgttcctttctcctttgcaagaaaggggaatatggaggaggtgagcggacgcgtgggtagtgaagaagaagaagaagggatgttttactaatggcc

SEQ ID NO: 51938 - DNA, 264 bp, Oryza sativa
  Clone ID: PAT_MRT4530_54283C.1
atgatggttgaagcggcggcactccggtgcgtgctccagggcgttgtcggcgtggcttgcgttcccggcgatgcactgcacgagaggggtttaggtcaaaagagcaaaatgctcggcattgtgtggagagatgggaacgtgaaagagatggaggtgaccttgactcaaacggagatggcgatggtcgtcgtctccacggctggcggcaaggtttggagcgatggagaggcagagaacctcctccctcggtttcttcggctctga

SEQ ID NO: 51939 - DNA, 540 bp, Oryza sativa
  Clone ID: PAT_MRT4530_54284C.1
atggggggagaggaggaagaagaggaagaggaagagaaagaagagggccaccgcatcacaagaccagatccggtgaggaaggggcgtggagtggccgttgggggtagcttagttgagttgtcgccgctgccggccaccacatcccaagaccagatccggaggagtgagcgcaggaggctggaccggctgggtggtggcctgcgcggcggcgtggcggtggccagagaggaggggaggtggcagcggttgcaccggccgtgggcacgagaggacggcgggccggtggatgggagggcggcggcggcggccagcggccgacagggtggcaacgggacaaggcggggccaggttgaacatgaacgcccctgccgccccgtgcccagccttgcattgctaaccgggtggaaagcctcacccgtcatcgtccccgcaggggacctcgtggcgctgtggcgagaggaggcgatgagcggcgttgttgcgagaggcacgcgcagtggtgagaggcgccacggcgtggaggtgagggtcacgcggtga

SEQ ID NO: 51940 - DNA, 375 bp, Oryza sativa
  Clone ID: PAT_MRT4530_54285C.1
cttcaaaggggaaaagaaaacaaaacgggcccccaaacaaacaaacaccacaaccccacccaaacaccaggaagaaaaaagaccccccaaggagggggagacaaacaaggggggacaaagggaccaccaaccaacaaaggggggaagaaaccccccaagggccgggggacccggccaagaacacgggggcacgggaaaacggcaagccagccggcggcaccaaaaaggggaaaaacggcgaggaagaagaggacgacctcaaccaagatggtgacggagaccccaaaaaaaccggggggaaaacaaaacccccgaacaaaaccagcccccccacaacaagaaaggccccgggacgaaccagaaaacccccgcaaa

SEQ ID NO: 51941 - DNA, 508 bp, Oryza sativa
  Clone ID: PAT_MRT4530_54286C.1
cacgatgtttcctgtaccaagtgcagagataataccatgcgtccgatgttctcctgaagcatcaagatcagatcaatgcaattgcctattcgtcggaacaggtcattcgccaaggacatcgcaggttctcagaaatgaacctgaccaggtgaatcggacattatatactccaccggcggaaggggggaatagcttgccatcatcagaagttaacccccctggtgaaaaataacaaccagcaaaaacagtagagtcctcatattcatgacagatcatgatccactaagctaggaccctgcaactagctgcttgaaatttctgctgttctgtctgctctctgccaggtgaaactacctgtaatattagaaacatcgacacagggggatccgtggattgctgtcataggttagttttggagcggttttgatgtaaatatgagaaaccgttcaggtttcttgtaaagaaaaccacatttgtttgtcatcatattcaagatcccattgtattc

SEQ ID NO: 51942 - DNA, 471 bp, Oryza sativa
  Clone ID: PAT_MRT4530_54287C.1
aataatacaaagcagtcaaacatcctactaccaaaacggtacacctcagagtaatgttttccaaaaattggtccaaactacaaagcatcttacacatttatagattcttatgtttgtatgctctcccagacacatcaaaatacatcaagaaacaactatcatccaggttaggcgatcttcatgtagcagaacagatccaaagtctccaaccgcttttagctgcaaatgaaacaggataaatgcatattaaaaaacgatgcaaggattcaatcaatcaatgtggtatcagttgtaattagcgaagtgcttgtcttaaagtacaagtagtggcaacgaagcatcatgtacgaaggttattttatgtaaaaaggtttgacagcgagcctaatgtttgcctccaccttagtagccaaaaaagagtcataatgcaaaataacttattcaatcaaatactctccaaaccctacccaa

SEQ ID NO: 51943 - DNA, 204 bp, Oryza sativa
  Clone ID: PAT_MRT4530_54288C.1
atggaacttcggctgtcgccgacagcatctaatctgttgcacgagcacgcaacagcaggaatgcaggatgtgttcaccggtctcgcaacaggagaggatgttgtgttcctgaatcctgatggactccctgttaattgcttcggtgcccggaggcagaggcagctgaggcagctgcaacgcaacagaaggcgcttgcatttgcat

SEQ ID NO: 51944 - DNA, 1815 bp, Oryza sativa
  Clone ID: PAT_MRT4530_54289C.1
atggtgggcatcacctgcctagacaaggagacgggaaggacggtgtaccacgggacagacaagacggatgacaagggtatgttcaatattgaggtgccatacactgtcggcagcgcccacctccacccatcagcatgcctcgtccgcctcgcctcctccggggaccacggttgcgccgtcttcaccaacttcaatggcggtaagactggcgagcggccgtgccgcccctcccatgtctaccccggaagggtcacctactccgccggccccttctacttcaccctgtcccagccgagccacctgttcttcgcgctcctcgtcgcgctcttcacggcgtccctgctcgtcgtgtggcagctgctccccatcggcgacggcggcaaggcggaggagggggtcgagggtctgccgcggcccggcggcggcgggggaggtggggtcatgcggttctcggcctcgagcgtggcgctgcgggagttccacggcgagagccggctcgaggccgcgagatccgagcggcggtggtggcccggccttgcgcccgtgaggctggcactctttgtgggaaccatgaacataaatgcacagtccctgatggttgctactttggcaaaaagtcttaagaatctgggttacgaggttgaggttttagcatttgcggatgggaaagctaacgatattttggaaaatatttgtcatgtaaatgttgtcagccctccgagcttgaagtacattgattggtcaaaatacaatgctgtgcttctaagctctctggaagggaaaatggtcgtttcaattcttatgcaagaacctttccaatttctacctgtggtctggcttattcatgaagatgctcttgggcagttccttagaaatcccgaactgcaccagtccattcctaatcatattgaagattggagaactcattttaatgcatgcacttatgtcgtgtttccagatagctaccttcctttgttacattcggcccttgatactgggaacttcttggttatttctggttcaccagttgatatcttggcaacaaaaagatacagctcatcacatactcaagaaagtgcaaggaatcagtatgggagcaaagaagatgatgttgttgttttggttgttgggagctacctgttctttgatgaattaccatgggattttgcaacagttttgcgtgcatcagccccacacattatggacatggcaaaaactaaaaatttgggtgtgcaattcatttttttctgcggaaatgacactgacgcctataactctgctttccagatcactgatggcacccatggcttcctttttaatgctgatgacccaagcacaatggtttcagcttttgcacaaattttaggagaaaaaaggctttcagctagagccttttctgttgctctggaggggaagctgctttccaaaaacatgttagcttatgattgtattactgctcatgttatgcttcttgagagtgtgttgcattatccttcctacgctaaactaccatctcctgtttctaaacttcaagagagaacatggttatgggatcttttcgagacaaaagccgcactagaaaatagttcttcagacgatgacagccaactcctcacaaggataattgataatcttgtcgatgaatctcacgaaagtaaccaaacctattctgatagcaatgatacttccttatataactaccctagcctatctgactggaatgatctaaatgaagttgaaatctttgaagacattgagaggagggaaattgaggaggccagtttttccccccttccttttcctgttttcacataa

SEQ ID NO: 51945 - DNA, 303 bp, Oryza sativa
  unsure (1)..(303): unsure at all n locations
  Clone ID: PAT_MRT4530_5428C.1
tttttcntccttttctctatttttttaatatccaaaccattttaatatattcatcactgcatgtgtggatacaccattacaagcatattaccttaatantnaaaccaataacatancacattnattaacccatcacacacacacacacaccccatatatatttttcaatcaccaacccaaatttccaatcctttttatttttcttcatcacaattcacacccccacatgatatattttatattcaagcaatcattttaacactttcaaattttttcacccttatctttaacccccatcttcat

SEQ ID NO: 51946 - DNA, 492 bp, Oryza sativa
  Clone ID: PAT_MRT4530_54290C.1
atggtgtggtcggtgagggagagggcggagatcgaggaggctgagcgcgccttggtcgcggccatcggtgatctgccttgccgctccagcgccaccatccccatccccctgcccagctcagctcaatgcggctcctcctcccctgctttatgtggatctgggacggctggaaggtcggcgacggcggcggggcggacaggtcggcgatggcggcacggcggggaggtcggagtcggcggcggggcagagcaccagatctggcgacgaccccgccgacgaccggcgacggagatgactcggcgacgaccccgcgacagcaacgggcggagggagcgccgggccgttctccccgcctcctccgccgccgccgcgcccgccaccgccagcgccgccaccgagtctcacgggagagagagggtgagaggcgtcgagccggcggaggtgtcgaggcggcgctggcggggcgcgtctgatgcgcgagtgttcgcgtag

SEQ ID NO: 51947 - DNA, 507 bp, Oryza sativa
  Clone ID: PAT_MRT4530_54291C.1
atggcgtggaggaggacgttgctcgcgctggtggccgtcgcggcggcggcggcggcggcgacgcgcgccgatgcgtggcacaactacggcgcggccaagttcacggtgaccggctcggtgctgtgccaggactgcaccaagagctggaacgcctacgcctacaacgccaagcccattccagggagcatggtgggcatcacctgcctagacaaggagacgggaaggacggtgtaccacgggacagacaagacggatgacaagggtatgttcaatattgaggtgccatacactgtcggcagcgcccacctccacccatcagcatgcctcgtccgcctcgcctcctccggggaccacggttgcgccgtcttcaccaacttcaatggcggtaagactggcgagcggccgtgccgcccctcccatgtctaccccggaagggtcacctactccgccggccccttctacttcaccctgtcccagtgtgacgttaaggacggtgccacctactga

SEQ ID NO: 51948 - DNA, 3511 bp, Oryza sativa
  Clone ID: PAT_MRT4530_54292C.1
atgtggcggcgcgggtcccactcggacgccgcctaccacctccccaccgccgccgccgcgggcggtggcgggtgggcggcctcgtcgtccgcgggcggaggaggagctgcgtcgcggaggcggcggcggccggggctgtcgtgcaggccgagccacctgttcttcgcgctcctcgtcgcgctcttcacggcgtccctgctcgtcgtgtggcagctgctccccatcggcgacggcggcaaggcggaggagggggtcgagggtctgccgcggcccggcggcggcgggggaggtggggtcatgcggttctcggcctcgagcgtggcgctgcgggagttccacggcgagagccggctcgaggccgcgagatccgagcggcggtggtggcccggccttgcgcccgtgaggctggcactctttgtgggaaccatgaacataaatgcacagtccctgatggttgctactttggcaaaaagtcttaagaatctgggttacgaggttgaggttttagcatttgcggatgggaaagctaacgatattttggaaaatatttgtcatgtaaatgttgtcagccctccgagcttgaagtacattgattggtcaaaatacaatgctgtgcttctaagctctctggaagggaaaatggtcgtttcaattcttatgcaggaacctttccaatttctacctgtggtctggcttattcatgaagatgctcttgggcagttccttagaaatcccgaactgcaccagtccattcctaatcatattgaagattggagaactcattttaatgcatgcacttatgtcgtgtttccagatagctaccttcctttgttacattcggcccttgatactgggaacttcttggttatttctggttcaccagttgatatcttggcaacaaaaagatacagctcatcacatactcaagaaagtgcaaggaatcagtatgggagcaaagaagatgatgttgttgttttggttgttgggagctacctgttctttgatgaattaccatgggattttgcaacagttttgcgtgcatcagccccacacattatggacatggcaaaaactaaaaatttgggtgtgcaattcatttttttctgcggaaatgacactgacgcctataactctgctttccaggaacttgcttctcatatgggatttcctcttggttccgtaaagcatttctccctgactcatgatattaggaatctgttagtgtttgctgatattgttctctatggttcttcaagacaagaacctgttttccctcctttgctattgcggtccatggcctctgaaattcccatcattgtgccaaatctaactgttataacaaaatatatcactgatggcacccatggcttcctttttaatgctgatgacccaagcacaatggtttcagcttttgcacaaattttaggagaaaaaaggctttcagctagagccttttctgttgctctggaggggaagctgctttccaaaaacatgttagcttatgattgtattactgctcatgttatgcttcttgagagtgtgttgcattatccttcctacgctaaactaccatctcctgtttctaaacttcaagagagaacatggttatgggatcttttcgagacaaaagccgcactagaaaatagttcttcagacgatgacagccaactcctcacaaggataattgataatcttgtcgatgaatctcacgaaagtaaccaaacctattctgatagcaatgatacttccttatataactaccctagcctatctgactggaatgatctaaatgaagttgaaatctttgaagacattgagaggagggaaattgaggaggccagtttttccccccttccttttcctattgatgaaagggtggaaagacctttattatcatgggatgaggtatacaaaaatgcccgaaaatcagaaagactaaagcctgaaggaaacgagcgtgatgaaggtgaactggaaaggactgggcaacctgtgtgtatatatgagatttacagtggagaaggggcatggccatttttacaccatggttctctatatcgtggcattactctttcaaaaggaggtaggagacccagatcagatgatgtggatgccgtaactcatctttcagttctggacaatccatattactcagatcgtctttgtgaatttggtgctatgtttgccgttgcgaacagaatcgatgctgttcacaagttaccatggataggtttccagtcatggcaggctgctggaagaaaggtatccttgtctgaaaaagccgaagaaaccttagaggaaactatggctggcgaaaataatgaggatgttatatactactgggcaccaatggatatggatcaaacttcaaacttttggtcaatgtgtgattggctaaatgctggtcgttgcagaacactttttgaagacgcattcagaactatgtatgggctctcagatggcatcacagccctgccaccaatgcccaatgatggtgattattggtctactctgcatagttgggtgatgcctactccgtcatttttgaagttcatcatgttctcaaggatgtttgtagattatcttcatagcttaaacgtgaatggtacagatccagcttcatgcttgcttggagcatcacagcttgagaaaaggcactgctattgtcgaatcctcgaagtccttgtgaatgtctgggcttatcacagcggaaagaagatggcctacctaaatcctgtcaccggagatatcagagagcagcaccctcttgatgatagaaatgagatgtgggtgaagttcttcaatttcaccctactgaagagcatggatgaggatctggcagaggaagcggatgatggcatgcatgctggggatgatcaatggctgtggccactgactggtcaggtgttctggcctggtatcgctgaccgtgagagagaggagaaatacattaagaaattggacaaaaaactcaagaacaaggtgaagttgctggaaagacaaaagtccggttacaagcagaaaccccttggacaatgacaatcaggaagtcttctgatcaacatcagctgtagactcaacccaccagaccatgttttgtcatacggcaatcgatacacattattgcagctggaagaggtaaagcgcgaacgcagcattgttgtgaatacgcattgtttctcacctcttcgatctccctctcatctccgaaggagagcttggtgaagctggaagctgcctggactggatccattcggttttccttgttcatatagtggttataaaattatgtcacatagttccactgattcgattctttatttgtcttcctccactgccacggcagtggcagctgcgagggcagcagaattttggtagtcatatgtaaaacctgtaactcaccatcatcactgtacatgtaaatttccagttggtataagagcaatatttcgatcaataggatgataaaaaaaaaaaaaaaactcgagactagttctctctctctctctcc

SEQ ID NO: 51949 - DNA, 829 bp, Oryza sativa
  unsure (1)..(829): unsure at all n locations
  Clone ID: PAT_MRT4530_54293C.1
cccacgcgtcccccacggacgcgttaatgctctaacacctgtccccatctgaatagcccgggagcttcctcgcgaacgatgtcgaggaggaggaggaggaggaggaggaggaagaagaggtgccaagctatcgcactttcagaggtgtgaagtgttgtgagtgcgagctgcaggtcgggacgaagcttagcatgcttgctgccatggcttccagcggtggtcggcgagcgagcaggcggcggcggcggcagaagaagaaagaaggcaagtcttatcggcaagggaaggctaagcctttcttccaggtctccctctctccatctaaatccgtttttggaggaggaggagggggctatctcgttttagctaatctgttgtgtgtgttggtgatggtttcagttcagtttcagtttcatgtttgtgatcagtgagagtgatggtgtgtcagtggtggtttagatcatgtgttaattagttctgtgggcgtgtctttgtgttggatcttggggttgggttttcagaaaatactattgctgtggtgtgtgtgtgtgtgtgagtgagtgagtgaattaatgagtctctgaaaattctggaataataagaatgtaagcagatgatgtatgtgccttggtgctacttatatatgtgctctcgttttctgatattacagatacatgagacactatatattcatgctactatntgacagattcagttgtttgaaaagggaaaaaaaaacaggctagttaaacattttaaaaaaaattttaattaaatttaataaaattaaatttttaattatagatatttaaaattatatttttttata

SEQ ID NO: 51950 - DNA, 344 bp, Oryza sativa
  Clone ID: PAT_MRT4530_54294C.1
tcggttggagtcagaggaggaaaaatcttcgccttcaatatctttgtactcgaggaagtcaaggccgcgccctcaccccaaaaaggaggaggaggaggatggcaattaatggacgacctgttcttggcagagcttgatgacggctaaaacccgactccgacgggtgctcagaacctagaccggctcagtcatgggaggccgagccgtaccataacactccattccgcctgggggtggctccgtcatctccaggttgtatagatatacggacctgatcaccgagaacgcggcctacctaatgggggtacgtgggcgaccaccacctggtaagggacttcatcaaa

SEQ ID NO: 51951 - DNA, 303 bp, Oryza sativa
  Clone ID: PAT_MRT4530_54295C.1
ttttttttgtttttttttttttttttttttttttttttttttttttttttttttttttttttttttttttttttttaaaaaaagccggtatgtggggttttattccattcgagtggattcaattgggttatttaaacagggccattggccaagttaactccttaccggaaaactttttttggaagggggaaacccccttggggttccttttgggggcccctaaggcccttgcatacaaaaaaagaaaccgccttttttaaaggggggcggtgccttggtaaaagggggccccaatgccggttt

SEQ ID NO: 51952 - DNA, 742 bp, Oryza sativa
  Clone ID: PAT_MRT4530_54296C.1
gcccccggccaaattccatcgtcttcaacccaacccaacccaaacaccaccatgagcagggggaggagcaggctgagctggctgtggagggcgccggcgagggcgctggggagggcgcgggacatgtacgtgcgggggatgacggggtgcgcgcgctgcgtgccggcggacgccgcgttcggctacccggtgttcgtgccgtcctccgccgccgcctcgatgaggagcaacagcttcgggtcggactcgcggttcggcggcggcgccgacgacgacctccgggagctgatccgcgcggcgtcgcagaggcgcgccgcggagcaggagcgggaggcgcgggccgtggccaggagccagagcatggcgtcggggatctccatggcgcggatcgacgaggacgcgccgtgcgaggagttcggcgacgccggcgtgatgcactaccccaggagccagagctgcgtcggcggcgtcggcgggaggatcgctcactgtcacaggaaggtggcggccttggcctgagctgctgcccgccggtcgtgctcgcgacggtgttcatcgccattaatggtcttctctggaggtctagtagccattcaaactttgggattttgcgtttgtaaatatgatttttgttgagaattcgtgagtcgtaattgctatttttgctgctgcaaaacaggggcaaatgcaagaaactgaatagtattttcggaattgctatatgtcacgcaaaagttagctt

SEQ ID NO: 51953 - DNA, 248 bp, Oryza sativa
  Clone ID: PAT_MRT4530_54297C.1
gtgccgcctcgccgccgccctcagtgccgccgcgccgcgccgtgtgccgcgccgtgcgtcgccaccgccgccgccgccgagcctgagggagttgcggatccgagcgagggtcaagacccgcaggacttcgagcaaggcaagtcatcactattctttgaacatgttgatcccaattgcaaaatttattttgtttacaaataagatcgcatgcaatgataaacatcctacttgtgaattatgccatgcct

SEQ ID NO: 51954 - DNA, 1288 bp, Oryza sativa
  Clone ID: PAT_MRT4530_54298C.1
cgcgcggccgcccgcctgggctcccgcgccgccccccccgcccccgccgccaccagcccgaccgcggccgcgcccgccccgcttcgtgaggccccgccgcggccggcgcatggagatggtgaaaaacagatgggctgggaagaccattgttgacctcttcaccgatgagttcaagggccggcctcgtgaatattatgttcatgcagtgaagtgtgggaggcttcaggtggatgaccaaatggttcacgcagactatgttgtgcaatcatcacaaaagataagccatttcttgcacaggcatgaacctccagttttgggtggtgatattacaatccttcaaaatgaagctgatgttgttacagtttgcaaacctgcatctgttccagttcatccgtgtggtcaataccgcaagaatactgttgtcggtattctgcaagctgaacatggattggtgcccctatttcgtatcctttgcctcaattgtgccattattgctagtgcctttcactatcctgtttattctcttccctccgtgcatcggctagatcggttagtttcaggtctccttatatttgctaaaaatgctgacaaagctgaaagtttcaggcaacagatcgaagctagtttgctgcagaaagaatatgtggccaaggttgttggggtgtttcctgatggtgagcaaactgttaatgcaaatgtgcacttcaacgcacgggaaggaaggagcactgcagaggtttgtgatggtgatggtaaagctccaattggaaaacaagcctgcaccaagtttcagaggatctgtactgatggaatccacagcattgtcctgtgcaaacctgtgactggccggactcatcagttacttatctatatttctgatacagctttttgtttgacaaatgtagataaggatcctgacagttgtgctgaccttgggaacaatgatacaaacgaagatacagaagccgatgaggagttcagcatcgatccgatgtgtacgaattgcccaaatcttgctccagtaggttatgatgcagatgaggaggcattgtggctgcactgtgtgcgatatactggtcctgattggagctacgaatgcccatatcctgattgggccttccttgataatgtgtcgaggaagaagttgaaatcatgattatctttcatggatactagtacgggcagcccacctgcccgaaggctcaaattttgctaagtttatgatttgtttgatatgcacataaacagtgtatgcgcccatactgcattttctagcaagaagcgctag

SEQ ID NO: 51955 - DNA, 303 bp, Oryza sativa
  Clone ID: PAT_MRT4530_54299C.1
atggcgccgagactaagcacatcattgccacgtaccctggcgctgagatggaacttagcaaggtcggccatggcccagtccagcaagccttctggatggcttgcgggctgggacgttagcgccagccataatggcgctggccctgggcacctcagcgccaaggcacctagcgctaaggttggacttagccggctcggccatggcccagcccagcaagccttttggatggctgggctgggagctcagcgccaaggcgtctggcacgggcctggagtatgtcagcgccattttgcctggcgctaa

SEQ ID NO: 51956 - DNA, 1458 bp, Oryza sativa
  Clone ID: PAT_MRT4530_5429C.1
gcacgaggccccctccccctcctcgccttcctcgcttttatcgccgccgccgccgccgccgcctccgccgccgccgagagcgaggaggaggaggagatggcggaggcgaagcagcagcagcagcagccgcaggcggcgacggcggcggcggcgagcggggtgtggaagacggtgaagcccttcgtcaacggcggcgcctccgggatgctcgccacctgcgtcatccagcccatcgacatggtcaaggtgaggatccagttgggtgagggctcggcggcttctgtcaccaagaaaatgcttgcaaatgagggaattagtgccttctacaagggcttgtctgctggtttgctcaggcaagcgacatatacaaccgctcgtctcggatcctttagggttctaacaaacaaagcggttgaagcaaatgatgggaagccactgcctttagtccagaaagctggtattggtctcactgcaggagcaattggagcctgtgttggtagtcctgcggatttggcactcattaggatgcaggctgattcaacgttgccagcagcccaaagtcgcaattataagaatgcttttcatgcactttatcgtattgctgctgatgaaggtgttctagcactttggaagggcgcaggtccaactgtagtgagagctatgtcgctaaatatgggcatgcttgcctcctatgatcagagtgtggagttatttagagacacacttggtgctggagaagtcactactgtacttggggccagtgctgtttcagggttatgtgcgtctgcttgcagtttaccctttgattatgtgaagacacagattcaaaagatgcagcctgatgcctccgggaagtatccatacactgggtctcttgattgtgccatgaagaccttgaagagtggaggcccatttaagttctacactggctttcctgtgtactgtgtcaggattgcaccacatgccatgatgacttggatattcctaaatgagatccagaagctcgagaagcgtttaggcctctaaaagctggttggttcggtcatgctgtccttacctaagacataacaacagtccaggtgtaaatagtcgagcacttgcttttgattagcaaaatctttttcctatatgcttccttggtgctttttggttttggtaaacaaaagtttaaaccaagttagcctatttttaatgtttccgtggtggttgggctgtgtcttttacaataatcgaatcatttgttgtaactggggcgatttttttggggtggacatactttatttttgttggctgggactcagccatgaggggggatacttcctgttgcgccattgaattaaatgggaccatattttatacagaataccaaaaacaatgaaaacaaaaagttgttgaatgttgattactggtttgcccttaaaaaaaaaaaaaaaaaaaaaaaaaaaaaaaaaaaaaaaa

SEQ ID NO: 51957 - DNA, 4503 bp, Oryza sativa
  Clone ID: PAT_MRT4530_542C.1
atgtgcaccttcatcgtggtccttacttccatcgtcttcctcatggtcacctccaatggccaagcacaagctcccattggctgcatcccgcgcgagagggacgcgctgctagagttcaagaacagcattacggatgacccgatgggccagctcaagttttggcggcgaggcgacgactgttgccagtggcgaggcatccggtgcagcaacaggaccggccatgtcatcaagcttcaactttggaagcccaagtttgatgatgatggcatgagcctcgtcggaaacggtatggtaggactgataagtccctctctgctttctttggagcatctgcaacatcttgatctcagctggaacaacctaagtggttcagatggccacattccagggttcataggatcttttaggaacttgagatatctgaacctctctggcatgccgttcatcggcgtggtgccgcctcagcttggtaacctctcaaagctgcaatttcttgacctctcatcttgcatagggctagaaatgcagtcaagatcaggcatgacatggttaaggaacatacctttgctacagtatctcaaccttaattcggtagacctcagcgcagttgataattggcttcatgtgatgaaccagcttccttccttaagggttcttaatctctctaattgctcacttcaaagagcagaccaaaagctgactcaccttcacaataacttcacccggctcgagagacttgatctctccgggaaccagtttaatcatcctgctgcttcttgttggttttggaacattacaagcctcaaggacctcatactttctgggaacagattatatggccaactccctgatgcactggcagatatgacatccctccaggtcctcgatttttcgattaatcgtcctgtacctatctcaccaataggtctgcttccatccagccaagcacccccttcctccggtgacgatgatgccgccatcgaaggcatcactatcatggctgagaacttgagaaatctatgcagtttagaaatcctggacctcacacagagtctctcatctggaaacataactgagttaattgataatttggcgaaatgcccggccagcaaactgcagcaattgattttgaaatacaacaatatcacaggcatcctgccaatatcaatgggagtgttttccagtttagtataccttgacctctcacaaaactatctcacaggacaactgccttctgagataggcatgcttagaaatctgacatggatggacttaagctacaatggcctggttcatttgcctcctgagataggtatgctcacaaatttggcctatatcgacctaggccacaacaacttttctcatctgccttctgagataggtatgctctcaaatctaggatatttggacctaagcttcaacaacctagatggagtcatcacagagaaacactttgcgcatctagcaagcttggagtcgatatatttgccttataattccttggagattgtggttgatcctgaatggttacctcccttcagactaaagtatgcatatttttattgttgtcaaatgggccccatgtttcctaaatggctccaaacacaagttgatattattgaacttgacatagcaaacacaagtataaaagatacctttccagaatggttctggacaacagtttcaaaggccacatatttggacatctccaacaatcaaatccgtggtggattgccaacaaatatggaaaccatgttgttggagacattttatctggattcaaacctaataactggtgaaatacctgaattgccaataaacctcgaaacactggacatctccaacaattacctatcaggacctttgccatccaacattggagctccaaatcttgctcacctgaatctctactccaatcaaatcagtggacatattccaggatatttatgcaacttgggagctttggaggccttggacctaggtaacaatcgtttcgagggagaacttcctcgatgttttgagatgggagtaggaagcctaaaatttcttcgattaagtaataatagattatctggtaacttcccatcttttctgcgcaaatgcaaagagctacatttcatcgatctatcatggaataaattatcaggaatattacctaaatggattggagacttgactgagttacaaattttacgtctgagccataactcattctctggcgatattccaagaagcatcaccaaacttacaaaccttcatcatttagatcttgcaagcaataatatttcaggtgctataccaaatagtttgtcaaaaatactagcgatgataggccaaccatatgaaggagctgatcagactcctccagcatcaggagtaacctatacttctcctgtggccacaaaagggcaagagcgccaatataatgaggaaaatgtggaagtggtgaacattgacttgtcttccaatttcttgaccggcggaattcctgaagacatagtctctcttggtggattagtaaatctaaatctatcaaggaatcacttgagtggacaaattccatataagattggggccatgagaatgttggcatcgcttgacctatcagagaacaagctctatggcgaaatcccagcaagcctatccagtttgacatttctaagttatttgaacttgtcatataatagtctcacaggaaggataccatcagggtcacaacttgagaccatctacaatcaacaccctgacatatacaatggcaacagtggtctctgcgggccgccacttcaaaagaattgttcgagtaataatgtaccaaagcaaggttctcagcctgtacaattgctcacacacacacacataaacctcacaaaacttgagcaccttggtctatcaaggaactactttggccatccaattgcttcaagttggttttggaaagtaagaaccataaaggaacttggtcttagtgaaacctatcttcatggtccatttcctgatgcactagggggaatcacatccctccaacagctagattttaccaataatggtaatgcagccacaatgacaataaacttgaaaaacctttgtgaattggcagcactatggcttgatgggagtctatcgtctgggaacataacagagtttgtggaaaagttaccgcgatgttctagtccattgaatatattgagtttgcaaggcaataacatgaccggaatgctgccggatgtgatggggcacataaacaacttatccatccttgatctttctaacaacagcattagtggatctataccaagggggatacaaaatctgactcagttgatttcacttactcttagttctaaccaactcactggacacataccagtgctaccaacaagcctcacaaatttcgacgtcgccatgaacttcttgtcaggaaatttgccgtcacaatttggcgctccatttcttagagtaattatcctatcgtacaatcgcattacgggtcaaattccgggatctatttgcatgttgcaaaacatttttatgttggatttatcaaataattttcttgagggagaacttccccgctgttttacaatgccaaacttatttttcttactcctaagtaacaacagattttctggagagtttccattatgcatccaatacacatggtcattggctttcatagatctttcacggaacaagttctatggagcattacctgtgtggattggagacttggagaatttgcgatttcttcagctaagtcacaacatgttccatggaaatattccagtaaatatagcaaatcttggcagtcttcaatacttgaatttagcagcaaataacatgtcaggatcaattcctcggactttggtaaacttaaaagcaatgacactacatccgacgagaattgatgttggttggtacgaatctttaacgtattatgtcctactcacagatattctgtcgctagtgatgaaacatcaagaacttaactatcatgcagaaggaagttttgatctggtgggcattgacttgtcacaaaaccaattaactggtggaattccagatcaagtaacttgtctcgatggattggtgaatttaaatttatcatcgaatcacttgaaagggaaaattccagacaatgtcggggacatgaaatcagtagaatcacttgatttctcaagaaacaatctttctggtgaaatcccactgagcttatccgacttgacatatttaagctccttggatttgtcacataacaaatttgttggaagaataccacggggaagtcaacttgacaccctatatgcaaacaacccatccatgtatgatggcaacagtggtctatgtggacctcctcttcaaaggaattgttcaagcgttaatgcaccaaagcatgggaaacaaaacataagtgtggaggatactgaggctgtgatgttcttttattttgggcttgtgtcagggtttgtgattggtctctgggtggtgttctgcgccatatag

SEQ ID NO: 51958 - DNA, 532 bp, Oryza sativa
  Clone ID: PAT_MRT4530_54300C.1
ccggttggtgaggagctacgaggagacccatccctcgagcccctggtaccaagctggtcgtcttctctctcggattactcgcggcgaggggtctctcggaccagggtactacgcgagggtcgtcggaggagggcttactacggcgagccagcatactgccgccggggatgacccgcgtgaggcttgaccagggcgagcgcagtaccggcgcagctgccgtgcgatgggccagggttgagccccaagcagtggcaagcatcttcgccagccggccagtgactgaggctagctggcttgcactcatagctagtgaggatcaccaccgttgctgtggttggcatggcaacgagatagtggatcacaaaccaatatatgaatgaatggaaatggttttgaaaccaaatagctggtgataaagtactatatatgattttgtgcgttctggaccaaaaaaaaaaaaaaaaaaaaaaaaaaataaaaaaaaaaatagaacaccaaaaaataaaaaaaaataaaagaaaaaaaaaaaaaa

SEQ ID NO: 51959 - DNA, 465 bp, Oryza sativa
  Clone ID: PAT_MRT4530_54301C.1
cgtgtcatcgacctgatccgccacatggccaagacccagtagaatccttttgcttgccatggtattccatggccgccgagccggagataccggtatgctttgtctatgctgagaataaaacgtggacggtgttcatcaggacccaccccctctgttaatgctagttgggataatgagttgcattttgttttccaatctacctacttgtaagttgtaacgatgctgatcatatggacctgagtctacttttttgcttgtgaagaatataagccgtccagtgcagttgtaattttgttatgctggttgcatatatgggctttgtgtttggttcgtgctacctcttcacttctgcttgtttgtttggtcgtgtagggcaacgtctcatgatcagcttagtttgctctttcgtagttgctctcaatgtttattactccagaataacgtggcctttgcgattcagttgtg

SEQ ID NO: 51960 - DNA, 2073 bp, Oryza sativa
  Clone ID: PAT_MRT4530_54302C.1
atggtggcggaggcaaagcaaggtgaggggaaggaggccggccaggcaaggccgcagcaatgtggccagggcagcgtcacggcgaggggagaggatggagaatatgtgcaggggcaatttggcgggcagatgcgggtgcggcgctcggcagcggagcaggctcggcagcgcgtggggaacaagcgggagagggggagaggaggagcggcgggcaagagcgacaggtggaggagcggtgggcggagggcagcaggcgagtgcggtggagcggagggcctggccggctgggcaagctcagatgggctcgccagccgcctccccctccctcccaaactgttccgcccggcagccaccgatcgtgacgacgatgaggaagatgatgatgaggatttcgtcttgttttccttccgctgtctcggtcccatctggcttgattaataattacgcatactttttcctcttggctttataaaagagagcgcttaaaccccctcccggccgggatatccggcttccagacgcttctctcctcctctaatctcaagtctctgtctcgtcgtcctcgcatctccactcgccatgggcaagattaagatcggaatcaacggtttcggaaggatcgggaggctcgtggccagggtggccctccagagcgaggatgtcgagctcgtcgccgtcaacgaccccttcatcaccaccgactacatgacctacatgttcaagtacgataccgtgcacggccaatggaagcacagcgacatcaagatcaaggactccaagactctgctcttgggcgagaagccggtcaccgttttcggcatcaggaaccctgacgagattccgtggggctgaggctggtgctgagtatgtcgtggagtccaccggtgtcttcactgacaaggagaaggctgctgctcacttgaagggtggtgccaagaaggttgtcatctcagccccgagcaaagatgctccgatgtttgtctgcggtgtcaacgaggacaagtacacttcagatattgatattgtctcaaatgctagctgcaccacaaactgccttgctcctcttgccaaggtcattcatgacaactttggtattatcgagggtctgatgacaactgttcatgccatcactgccacccaaaagaccgttgatggaccgtccagcaaggactggaggggtggcagggcggccagttttaacatcattcccagcagcactggtgctgccaaagctgttggcaaggttcttcctgatttgaatggcaagcttacgggaatgtccttccgtgttcccactgtcgatgtctcagttgttgatctcacagttagaatcgagaaggctgcctcatatgatgctatcaagagtgctatcaagtctgcatcagagggaaagctcaagggaatcataggatatgttgaggaagacctggtttctactgactttgttggtgacagcaggtcgagcatcttcgacgccaaggctggaattgctcttaacgataactttgtcaagcttgtcgcctggtacgacaacgagtggggttacagcaaccgtgtcatcgacctgatccgccacatggccaagacccagtagaatccttttgcttgccatggtattccatggccgccgagccggagataccggtatgctttgtctatgctgagaataaaacgtggacggtgttcatcaggacccaccccctctgttaatgctagttgggataatgagttgcattttgttttccaatctacctacttgtaagttgtaacgatgctgatgatatggacctgagtctacttttttgcttgtgaagaatataagccgtccagtgcagttgtaattttgttatgctggttgcatatatgggctttgtgtttggttcgtgctaaaaaaaaaaaaaaaaaaaaaaaaaaaaaaaaaaagggcaacgtctcatgatcagcttagtttgctctttcgtagttgctctcaatgtttattactccagaataacgtggcctttgcgattcagttgtgttggatactggttaatggttgattgtgaatttgtgttgaccaaaaaaaaaaaaaaa

SEQ ID NO: 51961 - DNA, 812 bp, Oryza sativa
  unsure (1)..(812): unsure at all n locations
  Clone ID: PAT_MRT4530_54303C.1
ggaataagncttgccaacatcaactacatcaagcgcgtcgtgggcctgcctggtgacgtagttcgatacagcagtgacaagcggctgagcatcaatggcaagccagtcccggaaacgctcgtcggcgaagagccggggagtctgggcagtgccaagctctatcaggaaaagctgggtgaggctgagcatctcattcgcaaagagatggcacggtatcgcgtagagcctgatcgcgagtggcgtgttcccgaaggtcactacttcatgatgggcgacaaccgcgacaattcgaatgacagtcgctactggcaggatgccgcaattccagccgatttggccgggatggtgccagaccgcaatatcgtcggtaaggcgttcgcggtctggatgagctggccagatcccaagttcagcaaccttccgcatttctcacgggtcgggctgattcactaagctgtgaatcagcgccgggttcctctggcccggctcgctatatttgtgcagccccgattcgtgggtacgttacgacatagaggtcgacatgagttttgctcgttcgcagaaaggtctgtccatgctgagctggatcgtgatgcttgcactggtcgctttccttgccagtactgcattcaagatgatgccgcattacttcgactatatgtccatggacaagatcatcagcggagtggaaagtgacaagtcgatggaaatccgcacggttcgggatttctacagtcatgtccgcaaggggatggacgtaaacggcattcgtgacctcacctcgaggaagcgctcaaagtcgtcatcgaaaa

SEQ ID NO: 51962 - DNA, 454 bp, Oryza sativa
  Clone ID: PAT_MRT4530_54304C.1
acgatgcacgcagcacgtacagcagggatgcattctataggagccgcccgtccttttttgtttttttttttttttttttgggtcttcccttttcttttttttttttttttttttttttttttaatgaaaaaaacctaaaagggcccatttaaaaagggaaggcaaaaatttaaaaaccaaatgcttggtttggggcctaaaaaacttaaccaaatcccaggggggggaaaccaaaaaaaagggctggtaaaaaaaagggtacaaccctttgggggggaaaaataaaaaattcccctttaaatttaaaagaaggttcccccccaaaaaaaaagggtcaaagttcaatttttggatggacacaccccccaaaagggggcctttttttttttttttggggacccgcggggtttttctttctttcaaaaaaaaaaacccttaaaaaaaccccgggggg

SEQ ID NO: 51963 - DNA, 1786 bp, Oryza sativa
  Clone ID: PAT_MRT4530_54305C.1
ccaacaaagcaacggaaaattctttacacaatggaaaattttgtgtatatgagttgcacaagcggccaaacccaagggctgccgcatgctaaataatgtcctaccaattctatgttcactggttagacttcgaatgaggcatcatcttttcctgagttgcctgattcaatgcaatatcactgcatgaggcatacacaggtctcatagcaatccaagacatctgcagatgagcactatctgcgacctcaacatcagtctcttcatcttctttgagcttgcccaactcctttggatctttacactccttcaaaacatctgaaacagcctgtgctttctgcaatatcaatttcctcttttccatggagtcatccccttccttatccctatagctgcctggtaactttgtagaatgtggcactgagcgcattaaatttgtcaacttttggatcagatgaaccaaaccaagtcgcttgagctctctcataagcttctggtaagtgatgtactggggcacaattcctctcttaaacatatcctcaaactcagcacatgcctcctcaaattgatgacgccggcaaagcaaatgtatcagcatggtactcgtcgccaaatctggctcaaaaccatgagttctcatctcctgtatcatttgcaccacaagttcaagccggttcgccctggacaacatcttgaccaagaggacataagtaagctgatctggtgaatagccattaccgatcattttgctataaaaattcatccctgactcaacatcgctgttcttggcaaaggtcatgaagaaataattgtatgtccttgtggtcggcgaaatgccccgttctgtcatcaccttgagcacactgctagccccagcaaggtccccatgcttgcaatagcccatcacgagcgagttgaaggtggaaatgttgggcgcgacaccgtacagaggaaatttctcgagcaccttgtgggcgtcctggaatcggccggcctgcgcaagagcgtacacaatggggttgcaagtaagcagattggcctcgatcccttcttcccgcatctcgtcaagaagcgcaatcgcctggtctggcctgcgcttcacgcagagcccctcgatgagagtcccatacgtgaccaccgtcgggcgcaccccggcgaggcgcatctcggcccagagtttccccaccttgtcgagcctgccggcgcggctccagccgtggagaaggatattgtaagcccgctcatctggtggcgagtcgggctcctcgcggcgccaccgctcgaagagctccacggccgcgcgcgggtggccctccttgcagagcgcgtcgaccgccatgtttagcagggacgccgcggcagggatgtcgccgccggccatgtagcggtcggggtggcggcggaggaactggaaggcgcggagggcggcgggggcgcggccgaggcgggcgtagcgtcggacgagcggggcgaaggcggcgaggggaggaggcgtgggggaaggggccaggaggaggcgccaggcggcagcaaagaggccgcgggacgtcaggagggagacggcggtggcttcgcccgcccatcgggccagcgccgggagcgcggagtccgggacggtgggcagcgacgggcggagttgctggaacacggcggggcacgggtcgatgccggccgcggggaggctggcggggtcctcgccgcggagtatggagaggacggtggatgcggcggcggcggcggaatcgttgggaagggtggaagcggcgagccgcccaggcctggccagcat

SEQ ID NO: 51964 - DNA, 516 bp, Oryza sativa
  Clone ID: PAT_MRT4530_54306C.1
atggcggcggcggaggagatggccgtggtggttctgcggtgcttcgacggcaccacggtggccgcgccggcgggggttgtgaccgggaggtcgggcctcgtggcggaggcggtagccggcggcgctggcggcggcgggggaggcggggggcgcgtggtggtggacgtgccggggaacgtatccggcgtcgacgtcgcggcggttgtcgcgtacatggaggcccgcgcggcggcggccgacggcgacgcgttcgacggcgagttcatcggcgggctcacccacgacgcgcggattgacctcatccacgccgcgcaccacctcgccgacaaggccctcttcaacctcctcgcctagaagaaattagcttcatcaaatctcggttcatgttccattattagtaaattcagtcgttttttatagtcggatcattttaatttgtaccaaattcagttattattactagatcggtccctgccttttatatatatttttcttgtaaaaaaaaaaaaaaaaaaa

SEQ ID NO: 51965 - DNA, 2196 bp, Oryza sativa
  Clone ID: PAT_MRT4530_54307C.1
ttggggagtacatagtatttgataatgcatttagtgtgtattgtttccttgtgcacaatgttcacagtagctccctctaaagcccagcggaacatcaccaagggctcgttcttgacgactgaaggcgtgaacacatcgtgggtttcaccctccggcgattttgcatttggcttccaactcatcaatggtaacaactcttacctccttgctgtctggtttgacaagaccgtcgacaaaaccttggcatggtatgctaagaccaacacacaggtgccagagctagtagtagtgccttctggttctcgacttcagcttagctctaatggtctgtcactccttgaccctggtggccatgagctttggaatccccaagttaccagtgcagcttatgccaacatgcttgacactggaaacttcgtgcttgctggcgcagatggttctataaagtggggaacctttgagagcccagcggacaccatccttcccacacaagggccattttctgaagttcaactctacagtcgactgacacacacagactactccaatggccggtttctacttcaagtgaaagatggagaccttgaatttgatctagttgctgttccctcaggaaacccgtattccacatattggaccaccaatacaggcggaaatggatcacaacttttcttcaatgcaaccggaagggtatacttcaccttgaaggatcgcactgaaattaatatcacgtctaccatcatgagttcaatgggggactactaccagcgtgcaacacttgacccagatggtgtttttcgccatggtgcatgcgggttcaacagcttctgcaacttcaactggagcctgaacgagacagtggattgccaatgtccaccacattactcgttcatagaccaggcactgaagtacaaaggctgcaaagcagacttccaaccacagagctgtgacttggatgaagaaaccatgatcgatcagtttgatttgatcccaatgaatggagtggattggcctcttgcagactatgagcactacacctctgttggcatggatgagtgcaagaaactatgcttgacagattgcttctgcgctgtcgtggtatttaacaatggagactgttggaagaagaagctccccatgtccaatggaatattggacagtagtgttgatagaacactttatctaaaggtgcccaagaacaacaatactcagtctcaacttaatagcaactccatcaagtggaagaaacaaactttcacttatgaagaacttcatgaggcaacaggtgggttcagtgaagaagttggtagaggtggttctggggtagtctacaaggggcaattacaagatccccttggtacatatgttgcagtaaaaaaaattgacaggatcatgccagatattgaaaaggagtttgcagtggaagtccagaccattgggtggacatttcacaaaaacctggtcaggttgctggggttctgcaatgaaggggctgaaagattgcttgtttatgagtttatgccaaatggctcacttactggattcctttttgacactgtcaggccatcttggtatctacgagttcagtttgcaataggggtggcaagaggattgctctatttgcatgaggaatgcagcacacagatcatccactgcgacataaagcctcagaatatccttcttgataacaacctcacagcaaaaatttctgacttcggtttagcaaagctgctccggatggaccaaacacaaacgcacactggaatccggggaacccgaggatatgttgcacctgaatggttcaagaacattgctatcactgccaaggtggatgtctacagttttggggtgatcctactagagattatatgttgcaggcgtaatgtggagaaagacatgaccaatgacgatagagaaatacttactgactgggcaaatgattgttatcgttctggaagaatcgatttgctggtggagggtgatgaggaggcatcatttgacattaagagggtacagaggtttcttgcagtagcactttggtgcatccaagaggacccggccatgcgacctaccatgcataaggtgacccaaatgcttgatggcgctgttgagatcgcgatgcctcctgaccctgcatcatatatcagttcactccagtaatgctcgtgcccaggacagcagtaatgcagcatgttg

SEQ ID NO: 51966 - DNA, 509 bp, Oryza sativa
  unsure (1)..(509): unsure at all n locations
  Clone ID: PAT_MRT4530_54308C.1
tggacgagctgctctgaatgtccttctgcgtcgtgatgggcatagatcgnggtggagcgccctgagacatacaagccaatggcaggtggcggtaatcaacgggctggcgttcaagcacaactggcccattggaatcccaggaaattgttcnaggttagtgcaggaacnaggtccaaggactgctacgcacaaggacttcgtgattagaatattaggatcacccacagtggctccttgccnaaggatgtgaagggaccgaattactcctactgccactctcacaccactggacgccacaattgatgctctctcttatttttagttgttgttccttctttttggcactcgcgacacaattagtaacgattctatggtagtttcnataagatggcctatgtgccagtatgtcatgtatgaagatcgatggtgttggtgttggtttgatggaccccatgacttgaggtatgcctatntagaatttggagtgccaaaaaaaaaaaaaaaaaaaa

SEQ ID NO: 51967 - DNA, 628 bp, Oryza sativa
  Clone ID: PAT_MRT4530_54309C.1
gcacgagggtcctcagctcttgcaactttagttgatactagaagaagaacgaggttaacagatagtagcattcctcctggatgcggaaggacaaggaaatatgaaatcacaagcacgagcactcgacttgtgttacgaagaagtgttaggtccctttacaagttgcacagtcagtcaaacgtcgctcgctggtcgattctcattgagaaattttcggataagtgacgagatgaccattgaaatggatgagtttcaagctgatgatttagacccctatacaaaggccaatgcagaggttgacttttatcaatatgtgaagactattgaagaacgctttgaatctttaccagttcctgaagatattcacagatggctaagtatgattatgagagatccaactgcttatcagtatctgatatgctatcactactgtttgatggaagagcaccaaatgatgcatgtctttacatcattgtacaataaacttctagtattgccaacaacagacccagcaggatacaattttgtgcttgaacgtctcaagatattctctggttggagcccgatggatcttcacaacgtttatttcattgagaccttttactggaaagatcccatcacgggcgta

SEQ ID NO: 51968 - DNA, 837 bp, Oryza sativa
  Clone ID: PAT_MRT4530_5430C.1
tggtttcttattggacttaatattgacactactcctattgacagcatgacaaacatatcagatatcctaggttatttgttagcaactttaaaaactgataattgtcttcaaaatattagtatcatcctttggtttatctggaaagctagaaatgatctttttttttcaaaaagaaatactgggagccaatccaaatttgtattgcagctgaaataatggcaaaaaactataatactcttttatgctcaaatgaagaagaaactactattgatgatactctggaaaagcacaatgtctctttgattattttgccaggtatcagatgttagacagatgcttcctggaaagaaggagaatcaggtctaggtgtttttattcatgacccaacttctcacaaagcaatttttgttcaagccaaatctatgctatatacctcctcttttacaggctgagctattctggcaatatgcatctgctccaaagttcaaatttctaatccaatcttgttttcagataatcaagaacttgttactctgctttgtcaacagaactacagcaggaagcctcatcactggagttcaaagcctcttttatctctggtaaaccaacacatcggaggagaatcagtcaacatcaaatggatagatagaaaattaaatcaaatggcagactttctttcaaaaaaggctagaaataaagctgttcctacctctacagagatagtttgtcaaaatatttctcacctttgtcatcattatgaatgtcctactaaggtagccttggcttcggctaagcatgcaatatataaacgatgatagaacagagcttctcagttct

SEQ ID NO: 51969 - DNA, 954 bp, Oryza sativa
  Clone ID: PAT_MRT4530_54310C.1
atggaccacggcgaccggaaaccatggccgaacgcggcggtggaggtggtgctcacccgagtgcgagggaacgagggctccggcgacgaacctcgacggaggaggggtggacgggacgcggcgcacgcgcgggcgtggtcgacgtggcccggaggaggcggagacgtgggcgcggcggcggtttcggcgcggcggcgcgagcgcgagatcggcgggaggagggagacgggcccgacaggcttgccccttgcctctttgggaaaaggaagaggggagcgggggcgacgcggcagagggaggagggggctctgcctccgccccttggaggctagcaagcggagtggcgggggccgggcgatgacgacggcgatgacggcggggctgtgtggagcggagcggcgacacgggcgacaggcgcgggcaggcgcggcagagggtgacggcggcggcgaccaggcggtcggccaccacggcacgcgcgcgggcgggttgcaacgggaggcgcggcggtttgagcggcgcggctcgggcacgcgcgctggcttgcggggccgagcggatgcgcggctgcaggcgcggcagggcagcggggccgggtcacgcggaacggcgcaggcgcggcatgggcggcaaccacgcgggcgcgcgcgcgaacaacgccgcgcggggccgatttcgcgggcagggagctcgccagggatggaggcggggagaaggagagcgaggggaagggagggcgctcggcgcgagcggctcacgcgcacgcgcgcgggcagagcggagggggagagcgcgagagagagagagggcgccggggagggagggggagatgagccgagaaagattcggcccatcgaccccgggggaggcaaaatagacttttgcggagggatcgatttgggaaggattgggttcgggattgaactcgacgatagatcagggattgagatctga

SEQ ID NO: 51970 - DNA, 332 bp, Oryza sativa
  unsure (1)..(332): unsure at all n locations
  Clone ID: PAT_MRT4530_54311C.1
aggggngttcnnattgcgcttgatcgtaaagggtattttccaccccaaaaactagccaatgaggtgatgggctctcccacttatatcttagatcctttgcccttccacaaggaacgtgggactattcaacaatctcacccttcacacattggtgtcccttagcccttcaccgtcctccccccaccccccacggtccatcaggccttcacttactataatcgtaaagggcttttcccaccctaaagctagccaatgagatgaggggctccccacttatatcttagatgttttatccttccacgaccaatgtagtactgttcaacaggaaacac

SEQ ID NO: 51971 - DNA, 1080 bp, Oryza sativa
  Clone ID: PAT_MRT4530_54312C.1
tcagttcgccggtgagccctccatatccaccgcctccggtcggcaatggttgccgccgtggcctctcaaacccctctgatcttcttccctaggtcgttctggagcctgtacaccccttgccgccatcgttgtcgtcctccccgtgctggtcgccgtcgtcgtcggtgaggccctcctcttttcctcctccctctccttgccgtgccgccgctcgccgtcatcgggccggcttgtcccgagctgcgctccagtacccgtggaccggtggtggaccaccacggtggtcccggtccacagtggacctggtgctatgtcaccgacggatggggaccgtgtgtcggcaccccctactctagattttgaaatttggtagcagatgccgcgtgaccatgatcttcgaagtgagcttagcagcactgcatatgcacaagttaaaacatcagtaactgccaagctgagctccttgtttcttcttgtctcatctgcaccattgacaagcaatatcattgttatatctctatttctactctgtatagctaaatgcaacggtgtccacccatcgcgaagacttcgcttctcctcctcgctagctcctcctcctccccggatgttctgccgccgcgccgccgcatcctcgctggatatcctccccgcgtggactgccgctgccggagcctctgattcttcttcttccccgccaccggagccagtgcttcttccccgcgtggactgccactgcatccccgccgccggagccggtgcttcttccccgccaccggagccgccgcggccggttccaacctcggcaccatccgccagcaccgacgacgaggtccaccgccgcgaccggagccgacctcggccccatcccccgcgcgatgactccgggatgctcctccttcccttgatccgcaactcctcactccagcgtgctccgtgcctccccgccgctgagacactccaccgcggccaccgcgccctgccctcgccggcgccgtggatctgtatgtcatgaagcctgtctccgcttccaacggcactctgccgcgcctccagtggtgccgccgttgtaagggtcat

SEQ ID NO: 51972 - DNA, 650 bp, Oryza sativa
  unsure (1)..(650): unsure at all n locations
  Clone ID: PAT_MRT4530_54313C.1
ccgggntcgacctaagcgtccgcggacgcttgggaaatcctgcaaaataagataaaaaatcacctgcatttctgcaaaatcccgtgctgcaatgtgagtatgtgacctgcggttgcagcaccaagtcgatgaggagcaatggcggctacgaggtgatcaagaaagcgatcaagaagcttggcatgcgccaccgtgagcacatcgccgcctacggggacgggaacgagcgccggcttaccgggcggcacgagaccggcgacatcaacaacttcgtctgggtaggacaagatcgctcgtcacactcatctctagtgaaaaattttagtcttaataggtaccaaaaaaaaaaaattgagccccactacgttactctctacagttagtagaaaataatctgaactattaatctcatttgatcgaagggtttagatctatttgtactacaaccctaattagcggtagtaaaaatatggagggacattattataaaaaaaagacgcggagaggtgtataatcgtcatttagcagtgattaaatatttttcctttatttttttgtttttttgatggaatatgaataatactagcggaatggatggccacatatcgatcttgccgggaaaaaaaaaataataaagttatccctaatta

SEQ ID NO: 51973 - DNA, 303 bp, Oryza sativa
  Clone ID: PAT_MRT4530_54314C.1
atgtcgtcgagccggcggagccgtacatcgtcgagattggcggcggcgccgccgccgacggatgagcagatggcggagctcatctcgaagctgcaggccgtcctccccacccgcggcggcgaggccaatgccaaggcgtcaagtgccgaggtgctgcaggaggcgtgccgctacatccggaggcttcaccgggaggcggacgccctcagcgagaggctcgccgagctcctcctcctccagccgtccgatctcgccatcaacggcgcagatgtgcccgacctcatccgtagcctactcatgtaa
